United States Patent Application Publication US 2007/0020625 A1 - sequence listing, part 3

SEQ ID NO: 41 - DNA, 1225559 bp, Photorhabdus luminescens
  misc_feature (1224509)..(1224512): n is a, c, g, or t
  misc_feature (1224518)..(1224518): n is a, c, g, or t
agttatgccgaagtgacgttgaaaatccccgaaggaaaaagcggtgaggcggtgcggatattttatgtcggttgctacgaaaaaggtccggaggatgggctttgctggcatcttctgacctccgaacccgtcaacagtcaggaagacgcccataaaatattcagttattacgagcgccgctggctgatagaagaatttcacaaagcgtggaaaacgggcggcacgcaggtagaagcgctgcgtatgcaaagcaaagataatctggagcgcatgatagtgctgctggcctttattgcggtacgaatacaccagctgcgttttatgggtctgaacaaagaagaggcagagaaagagagctgtgagacagtattaagccccctggcgtggaaattactgtggtcaaaacaagaaaaacgccgtgtgccgaaaaaagccccgagtttgcattgggccttcatcaatctgggaaaactggccggctggtacgattccaaacgcacgggtcgagtcggatgggaacgactttgggaaggctggtttcggctgcaaaccctgatagacggctatttgctggctaaatcagttgatttggagatctgatcaagagacaggggctgcacggggcggcgatggcgagcacgggaatgagcaaggagcctgcgactgcgaaccgggcgcagccagtgcagcggggttggggcggggggaagtcaatgagcggaggccgcaggccgatctgccttcagggttgttggccggacgttggcacggcagctaaagaagaacacgggtttttgccgaggactggctcagccgctgatagcagaaggcgtcagccttgtgcgccacacctgccaatgctgacccgcgggggcgcaagacataatgccaattatacgcattaagccgctcatcaatgctcaggcggttgcccgggctcaccggcgcagtgcgtataattcccccgcattatgttcaataggcgttgggcggcctggaccggcttaacggggacgctcgtggttgagccgcctgacgactatttacccccgcgtgcgccgatgccgacgggcagtccggccacggtctgcccccacaccgaacccgcccaactcaacgggggcgtgcggacgctcagcggctatcggcggttgaggtcggctctgaactgtccggcggcgtgtccgtgtcggcgttatcgtcggcgtacaggtcggccagtaaacccacctcatcggcgtcgcggactttttcgtcggccatttgctccgccggatgcgtactggcgtgcaccgcctgcaaggcccggatagagacctgcgtatacacctgggtggattccacgctggcatggcctaacatggcctgtatccagcgcaggtccgcgccgttctccagcatctgcgtcgccatcgcgtgccgaaacaggtggcaggcaccttttttctcgatacccaccgcgttgatataagctgtcaccagattgctgataccgttagcctgtaagccgtccagcccatccattgcgacgaataatgccttgacgtctggattgacgataagttgtggccgcacctgttgctgatagcgctgtagccagcttaaggcccgttcaccgaggggcaacacccggtctttattccccttgccctgccggatggtcaccgttttgcgttttccgtcaacgctgtacacatccagccgggttaattcgccccgacgcatcccggttgaccagagcaactccatcaacgcccggtcacgtatcccctgcaacgtcgtcaggtcaggctgcgccagtatctgttcggtttcatcgatggtcaggatatagcgcggcaggtgcttttccagtctggggagttcaatgtccgccgccgggttcgccagtatcagattctgtttggtcagccatttgaaccagactttcaatggctccagttgggtacgttgcgtccgggtgcttaacggttcaccgttggtcttgcggtactgatacagataacgctggtaacgctccagtatcggccgggtgatatccgctgcgtagtataagccgcgctcggttgcccacaggataaagtggtaagtatggtgcgtctgtactttcagcgtactttctgaccagctccgttcctgtcgccacactacaaagcgcagcaacaacgcatacaggctcttcgggtcatgcgccggccccacaggctgacggtagacgtcattaacggtcagaaggctccccttgcggggtttacggtttgccatgattgacctccggttgagattgaggggcgggcgcagacaaggggcgcgttttcttttttccttttatcacggtgtcttccgttaccccgacttgcggtacgctgaacccgtgttctgcctgcccggatagggattttttcaccccagacttagcccggacctggcccagacttgaggcagacgggtgttcatttaagtcagacttgctctcatgacctgtcgggacggctgccggcgttttatccctgtcgggtacgggcaatgcgtctctgtgattattttccttgataactgcgttttcatctgcccggacttgtgcccccactggcccttgtgctgtctgggctgacgcgggtttttcttccccagactcaggccagacttgccccggacttggggaagacttatgaccttccgggtcagacttgcgttcactgccggcggtttctgagtccgcttctccgacatccagcaggccgcacaggtgggctgcgccgttgtcttctccgtcccacagcagttcataatgcagcaggtgcccccggctgccgccatgcaacagcaggtattccatttccgtcagccgttgacagtggtttttgagctggctgtcgctccagtgggtaaaggcgcggatatcccgccgggtaaagcggacttcatttggctggcagtgctggatttgcgcctgtgcgttcaccatctcttgtatcagcagtaacagcttgcgcgtctgcggcggcatttcatccagcgtgcgccccagcacctcatgcgccagccggttagccagggcaatgtcgtcctgggtgacttcgatatattcgatgacctgcccgcggtgggtggttttcttcacttcacgttgatactggtgcagcagggcaatggcctgtatcagcgtcaggtatttcatgtggtcgcgccgcatccgggttttgtctgacaggaacgtcagttgatgggcgtaaggattgaccactttcagcggccttaacaggcgctgggcgttctggtgtaactgcgtcagatagcctttctccgagtcagccagcaacccggccagcgtctggcggtgccgctgcatggcgtggatagcctgcgtctgctcacgcgattcgttgaccgtcagcaccagacagcggttcagcagctcttcatccacatcaatggccgtcgtcgttaacatcagcatcaccggtccctgtaccctgtattcccgcgtcaccagttcgccgctctgctcgttcttgccggtgctggcgattttcagctcgccgtcggactgcaacagtttcagggcataggccgcctgccgcaccccttcttcttcggctatcgccagtattttgtgttgcaggctggtttcgccgaggtaatacaggctctgtccggtcatcgccgagtactggatacgctcctcttccggcatcaggttcagcacggcatccatcaggctgctcttgcctgccgcgctgctgctctggattaacacggccagcggtttatcgagtttgcgcgagactgccgccagatacccggtcagcagattggtggattcgccgaccaccccacaggcggccatgtcgttgataatctgttctgtcaggttcggcgatgttagcaacgccagcgcggcggcttcgtcttccgcgctgaccgtcaccgccgttgtccctgaggcttcggcgtcggcttgctgttgcgcgtcctgttgctgctccagcatcagcaagacccgcccggcttcgcgtttgatgaccgacagctcgcattccagctcttgcgccgccgtgctgatgtagttctgacgatgccgcgcgtgatacatgtccagcgtatccacatggaacaggccggacgtttcatcccgcacctgcacattgactttcatcacatcaggcaccggcgattttttcatcccccgtatccgccagatacgtggcccgcttttcatcagcagttcaccgcaggccgtgcgctcacagggcacgggggcaacagtcagctctggtggggcggctaaggcagccggtttagccacatcggcattgtgaggcttttccgtcacacccggcgagacgggccgctcatggctgaacaccgcgcccggcgcggttccctgtcccagccagaccgcctgttgcaacgccagccccagtgcatgttcggcgttgccgcttttgacggcatagtcattggcatccatacccggcgggaactgcacccgccatgcctcgataccggcttccagtaaatcagccgccacattagccacgccacggtctccggcctcgtcccggtcaaaggcaatcagcacccgtttcacgccgtgatactgcaacgcgtcgagatgttcacggttaaacccgttcaccccgaacgcggcaatcacgttacggaacccggcacaccagaacgtcatggcatcgatcaacgcttcgcacaggataatttccgcagcggctttcatcgctgcctcattccagaccccggctagcggtgacggcagatacagatgcttcgggctgtctttcagcactttgtaatccggctgggttcggcggccatacagttgcagcacccgcccgcggctggccacactggccgattcggcccagccgatcaccggcaccacgacgcagccccggaagtggtcctgccgggtggtagtacgcaacacgcccagccccgacagcttgtcgcgcaggtgctggccttcctgactgctcttggacggtaataagcccgctgaaccgccgatcccgtgatggcccgcgtaccccagcttaaagtgattgaccagttcagggtgattcagcccgcgtcgtgccagccaggctttggcttccggtgacgccagtaagtgctgatgataaaaatcaatcacctgatgcaacagcgcctgcccgtcatcgtccaggtcggccagtttcgggcgcggcaggggggccgcctgtgactccggcagggcggctaaagaagaagcagccacaactgcattgtccatatccggcaacccggccagctcccgcagccggcggatagcgattttcagcgtcaccccttccgtttgtatcacccagtccagcaccgaccccgctgcgccacagccaaagcagtgatacaggttcttagccggcgatatcaccattgagggcgttttctcgttatggaacggacagcgcagcacataatcctcaccgcgttttttcatcggacggccttgcttacgcgccagccccagtaacgagacggtttgctttaagtggactaaatcggtgtcgggaacgcgggtcatcaatgacctcctgtaaaaacctgtcaagatgctatattgatatttaaaacatatctgataagatatctaaaaacaagctttttaaaagggggatatatagtgatatcaagttcaacaacctggtttctcgatatgcagttccctgaacggcttaccacattacgcaaggaacgcgggctcactcagcaggcgctggctgatatggctggtgtggcagttttacagatccggcgttatgagggaggctcagcacaacctaccttagaggtaatacgtcgcttggctatttcgctcggtgtcagtgcggatatgctggtttttgatgaacaggagcgcggtcctagtgagcggctgcgctatcaatttgaggcaatttctcgtatgccgcagtatgagcaggaggttattaaggagttgctggatgcaatgatcatcaaaactcagattgccggcacaatggcctgtatttcaacaacagcgaaggaagagagttaacacagcacggcgctgaagtgcgggaacactccagcgccgctaaccatcaccaactatcagaggtagttcatcatggctaaatgcgattctaaagcaaaaaccattacaactaaagtgcaggctgtaaagccacggcattacaccgtgggctaccggcctaaccggggcaagcccaatccgtacccgcagctcaccattaaggggcgctggttggctgcgttgggctttaccacagggaagccgatcactattaccagcgaagccgggcagttaatcattcaactggctgagaatgactgacggctaaaggaagagtccagttttttagctggaccctttggataacaacaggttaaggttgataatcctcatattcccaggcaaagacacgagatagcttttgcgctatctccatccaatcttgcccctcgcactgatcgatatagtttgtaatggtctttttaatttcatccaaattatactcacgtaccagaagcgtatgacgtatcaattccggctgccaatgatgattacacagccattcaggtgtacagataaaaagatcaaaatattcactcccactttccaactctggcccgattaatagggataaggttatattaatagttccgtcatcttcaccggagtacataactggatctttatgcatacaatctatgccttttagtactgctttcactaatgcatcctcttttaatccagaatatttaaatgaccgtttccagtcttatttatttttcctttagaatcaatggaataagtttcaaagttggcttgcacaccagtagtggcatgggcactattaggtttctctgatggcggcctataacctctcgtaccatccgcactaacccagccatttccggtagtcttcttggctccatctcctacccagattttgcctaatctatccgcttctgttcgagttccagtgccaatgccataattgagcttaccattatcacctttaactacagccgccaaccttggatcttgcgaagcaatatgactgaggtttcgttgcaccaagtcttcttttaacttcggataagttgccgcattttccgcaccacttgtgtttttccctgctaactcaggctgagcatctttgccggcattattttgcgatgattttggtgacgacttcggccctttggctccctccatcacaataggcagcgtcatcgccattgcagcggcagtctcctgactcatgcccatcgcctcaaagcgttttgtccagccgagttcgcctaccttgcctgtggccgcctgacctaacgtattcaccgccgacaggtaatttctgaactcaaccggcaatgtgccatcccggtccatatttttgagggtacgttcaaacaccggccactgatcaaccagataaccatacttctgtgcacactgggtcgggttgctgttgcagaaatccatcatttcctgctgattgcggatattagtgtctaccatatccttgatcacttgtttgcagctttcgccttcacaggtgcgggcttgatgcgcaaaactgtccagctcattcacgctcagatagttattctcaaccgcattcttccctgcctgtgccccggtgatggcgctcccggtggagtcaccggcaataccgccggccagccctgccgccagggtggaaagggtgctgatagtttgcttctgctcctccgttaactcactgacgttggccccgtcaccataaagttgcttcatcagtacctgagcggccagttcaccggaagccgcaccggctgcgcctgacaaggcattattgccgctgacctctgccgctaccgcgcctaaaatcgcatgggccagcgtattggtggcggtatccacctgatgggtttgtgggtccgtcgtcagctcttttatcacgcccgccagatacggtgaagcgcccccggccagcgcctgaccgagattgttcccagccaagccctgaatcgctgccgtagcagcctgtaaggctttctgataggttccgccggtccccaagcccgagtcattcagtgcctgcgtgtaagcggtgtcataaacttgcttattgatatccgctggagaggggtctttattacctgcgttgatcaatttttctctggccgcggctttgtccggttcactgatatgattcagtttcgctttcgccgctttggtggcgataattttcccttccgtacgggctatctcggtcatctgggcgctgagttcgccaatcagttgcgcttgtttcagccgttgctgtgctttttccttatcaaatatcggactcagaacattggcggcattatcggtatcgcgacttaagttcgcgacatcctgcgtctggtgcgctttgtcccggataatcagattgccgtcactgaccgcggcgtgcgtggtgctgctgtcatggcctgagttatgagtccccgtcagcccattgaccgccagattattcaggacctgaccggcggtcggttgaccaaggctgacgcccgcactctgctgttcgacagtaaagtccgcttgattctgaatgtccttgaagcccagcgtcccggtgttcagggtgtttttggttttgtcggcttgactcgctatcaccgccccgtccagttgggtgtggtcaccgacgttaacctgatagccgcctttgccagcaaacagcccggtctgctcctgcacgctgtcatagttgctgtgcagtttattgcggctggcattgaggctcgcggtaccattggtgaggggacccacggtggcactgacgcccgcactggcattctgttgtttgctgtcatagcgctggctgtcctgctcgctgctgagggtcagatgacgtttcacctcggcggtaatctgttcgccgctgacctgagcgccttttagcgtcgtgtcccggccactgttcagcccgacggtctgtcccgcctgtaacgtggtgttagtatgactgacgccgttgccgttttcgtgaccgttgccccgactgacattggccgagacgttcagaccggtgccccccggccctgcggtcaggcccacgcccagcgcgctgccgtgactgctgttcttgccggtcgtctgttcggtgttctggctggaggagagctgaatatcccggtgagcattcagttgcaggtctttgcccgcctgtaactgactgccctgaatacggatatcgccattctggcctgatgcgcctttgccatcccctttggcggttatggtgaggttatccccggcggtgaggtggctgccctgttgggtggtctgacggtgctgctgttctgaacgggaggattgccgaccgtaagacaggctcaccccggccagattgttattgcctttgtcgtcactgccctgagcttccgccagtcggccagcctgcacggcctgtaccccgctcagcgcggctttagtattttgcagcgctttcactcgcgggtcactttcattgtgggcggctctggctgtttgcaccgcgctgttgacggccccgcctgctgtgccactcagcgccacagttaagccgctctgtttttgctcggtttttgtcgtggtgtgatggcggttttccgcgctggtgatatcgacctgttgaccggcgagcgtcaggtctttaccggcaatcacctcgctgccgtgaacccggagctgttcacctgcgttaagggtgacattgccctggctgctgccgaccgtgctgcctttgctcagctggctgtcactgtcggtggtgactttctggctggctttacctaaggtgaagccaatccccccagtccccatcaggcccgattttttctcctgccgcaaatgggtttcatcgtgagattccgcggcggtggtgacggtgagctgatgaccggcgttcaggctgacatcctgcgtgcccgccacattgctgccgcggatattgaggtctttaccggcctgtaaagtcactttatcgccactgaatgtggtgctgagcgcctgccggtcgtgcacttcatcgtgggtttccactgacgatttcgacagccagcctttgctggtttgtttactgtgctccactaaatcggatgaggccgtcccggtggtcagcgtcaggttatttccggcctgcgccgtcaggtgttgaccggcgttgacgtgggcagcggtggcgttcaaatcctgcccggcttgcagggtcacctcaccggcaccggttatctggctaccgatatcttgttgttgggtcagatggcgagtgttatctttcccccagttgccctgctctgtgcgacgcgtgcttaaggtgtccagcgtcaggttatggcctgccgttatctcggtgtggccgtctttaccggcgtttttgacgtcactggcggttaattgcacattgttgatggcgttcagcgataaggtgccgttatcgttctgcacatagatgcctgccggacgatctaaccaacgattagcctcatccccgcgcaccgttgatgcactggtgatatcccggcctttcagggtcacccggtcatccccctgaatccggccgccccggttggtgagcgtctgttgggccgttaaatctactttgccgccgcgaataaagccgctgttggtgaggttgttggccgtcagttgagtcacatcccgcccgctaattgtgccgctgttggtgatatcgccctgactgttgagcgccacggtattcccggccagcaaagcgccatcactgcgcaggtcgccctgacggacgcgcgcataaacctgcggcacggtgaccacctcggtagtgccatccggcaaagtgacggtttggttagtcagccagataatgtctgaggtcagcagcgccatctgtgccgggcttaaggcgacgcccggcgttaattgttgctgttttccaaaagcgacaccggcatccatcagcgctttaaactgcgcttcgtcgttattgtagcccggcagatagcgccggccggtcagttgggtgatttggtcccgcaccagccgctgttcgtagaacccatcgcccagacgtttgtggaccagcgccgggtcatgcgttaactgttgccgcatatagtccgagcccagccacggtttgtactgggtaaatttcgggtcggtttcgaccagatagtgactgtcactgcccggttgcacggtatacaggctgttattcggcaagcgggtatcgggcgtcaccacgcgtatcaccggatcgactgtttgccctttgacggtctccgggggcaaactcagctcaaacggctgaccgggaggcaagaccagtggctgatttttgataccgctcaccggtgtgactgtcgtgggggccgcgtgtatctgaccggtttgtcggtctgtaatcgtgatatcggtaccctgcggacgggtatgctcctgccaggccagcgttttcaggtcgatggtttctatcactggggcgggggcataattgctgcggctttttccctgcgaggttttggtaccacggaatcggggcttcagtcgtttctttttcgcataccagtgggtctggcgacctttatcggtagtgatgcgttccccctgagtggcaatattatgcagttcgcctatcaccccgtccagcgccccaccggcgataatttggctgtcatgattggtgacctgcgcactgttgagcgtcatattgccgccggccagaattttaccggggtcactctgtttaacctgagtttccctgacggtgcgggtgtactgatattcgtaaaagtcattactgccgctgccgtccggcatgatggcatcgtgcactttgtatttattgcggtgggaggtgtccacctgtgaccagtcatagcgagtggtctggccgctcagtactgcatcgtgatgctgagacttttctgtttcgacgacctgagtcaccaacccggcgttggtgttgttaatccggtcggcattaatcttcaaatggcgcccggcttcaatcgtcgccgcgtggttattgagcacaccagcttggccggtagctttcagggcgttatccaactgaccgccgatgtgcatgtcgcccacactgtaaatctgcgcatgatgctggttgttgagtgttccggtgccgatatccagttggtcccgcgccgcaatcaccgcggctttgccgtcctgtgcggagttattcagtgtgcctgtctggagggcaatttggtcaccgtaaatgcgcccggtgccggtattgttcagagtgttggccgtgagatgggttaagccgccgtcaatcagtccggtgttgttcagcgtatcgtgaacctggatttgcgtttgtttggcgctgatttcaccggaggcgctgttgatgagattctgtgcgcccagatacagcgcccgaccggcttttatctggcggttgttggtgatattgccggtcgttttcagcgtcagattgccattggccgccgtgttgccggtatggtgaaaatcctcggttaaagtgaccgccatatcgccctgcgataacagttggccgtccccgctcaaggcgtgtgcggtgatagctgcgtgttccccggcaattagcgtgccttgccggttgttaatcgccagcgaggcaggcccgctcttgtcgcccaccgtcagttgtttacctgcggagaccagtccctgggtattattcaacgtctggcggatgttcgcttgcaggtggttggccgcccgtaaagcgccctgagtattgtccacctgttgcgcgtttaccgtcaggttttgcgcttccagcccgttatccgtgtgcgccgtctcgcggttaatcaggcgagcggtgttcagggtcaattgctgaccgccacggataaggccgccggtgttatcggtttgagtgtcaacatcaagctgagtgtcgcccaccgcctgcacctgcccgtgacgattatcgagttggtgagtgttcagagttaaggtgtccgtggataacagtttgccatcccgattatccagcgcggcgtgtcgggtatcgatagccaactgtccgccttgaagatgaccgtggcgattgtccagcgggccactggtgatagtggttttgccctcaccgataatctggccctgctggttatccagtaactgcccgtcggtatccagagtcagggcgtcggcggattgtaaagtgccctcgcggttggtgagttgtcggctgtgaatgttcagcccgctatttccggctatctggccctgagtattattgagcgcggtgctggtcagcacggttttgccgtccgctgcgatcatccctccggtgttgtcgatgtcgccggtgcgcaaagttaactgcccgccactcaataaccggcccgctttttggtcggcatggtgggtattggtgagcccatgcccgtgggtatcaacggccatctcgcgaccggcctgtaacagccccgccgtattatccagttgaccactgttgaccgtcagggtgtcttcggctatcacctgtccggcggtattggtgaagggatggcctgtggtctggctgtcaatgttttgtgccagcaacaccccctgggtgttatccaacgtctggctagtcgtagtcagtcgggttttggcttcaagatggccgtgagcgttttgaatagttttgccaacggtgagggtggcgctgtccccggcggcaacaatgctcctccggcgattatccagttgagtggcgctaagttggagcgcgtggcccgcttccagtttgcccgactgattatccagcgtgtctttgacggtcagtttcagcgaaccttggtcggcggccacgatattgccgtgacgattatcgacggtcgttgccttaaggttcaggttgccattgcccgcaatagtgccgctgtggttatccagtatccgggtagtgagggacaagtcatccttaccccattgttgcatcacgccgccttgatggctcagggtgtcggcgttgatggttatctgcccggcctgagtttcggcgtggttgagttgcagttcaccggcctgtatcgtcagggtgccattggtcagcagtttgcccttatcacccagccaccgttgcgtgttgagcgacagtttcccgttgcctgccagttgcaccgttccctggttgttatcggcctgatgcgcggtgagatgcaggtcctcgccctgactggcaatagtgccctgatggttgtcgagccggtcagtggtgagggtcaatttcccctgattgaacacggtcccctcacggttattcagggtgcgggtatggagcgtcagttcaccagtaccggtctgattaatttttcccttcaagttagagatatcaggcgtcgtgaggtggattgctcgcgccactaactggccgccgtcgttgttaaactggcccggggttttcgcggtcaaacggtcggcgttgacggtagcgcgagcggtactgatgcccaattgactggcggtgagttgaatctggctggctgcggtctggctgtcgctcaggtcaatccgctgactgtggatagccagcgtatcggcggccagatttttgcccttagcctgaacgtgctgcgcggtcagagtcaatgagccgggtcgggtagtgttgccgttatcatccagccccgcagcccatacgctgtcatggctgctgtgtatcgtgcccgcagtaacggtggtatcgccgcgggcttccacccggccctgattattgagcgcacctttagcctgtaaattcaccgccgattgtgacagcaatttgccggtgttagtgacatcggcagacgaggttaattgcaacgtatcccgactactgagggtgccgcggttctctatccggccctcggcggtgatatggacctcgccggcagacgcgccgatattaccggcattatgcacgcccacccccgcttcggtgcctatcagcctgattttatgggcatacatgccgcccagcgccgccacatccaacgcaaacgccgggtgcttttcatcgtcaatcgattttttcttcatctgctgatgcgtcgcatcgacaatattgcgcccggtggtcactttcaggtcttgcgcgtgtaatttggcgttaatcgccacggagcgggcgataatatcggtgtaactttgctgtgtgctgtccataccgtgtccgtcaatccgcacttccccctgattgacatcaaaccctttcagccggcctcgctccatcagcgcttgtccggtagtgagcgtggtgcgatgtgagttaatgaacccgcaaccgttacaggtgatgcccgccggattggcaataatcacctcggctttatgcccggccacttcaatccagccgttgaggtgactgcggttatggttgttgacttcattgaggataacgcgggcatcccctttagctaaccacggattgcccgccaccatgccgccgagttgcgtctgcgtagcctgatggctgttattgaggataactccctgtttatccacgtcaaactgacggtaggtattgtgggaaacgccatcggcgcccggcgtctgaatattgacctgcggcgtgccgttggcgctgcgaataatagtcggctgctgacgccccggtgcctgtccgtcggccacaatcgccgcctgtgccgtaagcgaaattccgccaagggcgaataacaccccaaaccgtagcgcagtcagccggcaacaacgctgcggtgaagcggagcgatgagcgcggcgtccggttcttccccgtccggcccgcgctatctcggccaccaccatccacatctggcgggcctgattaaagataatacgatataactgcttgttcatgatttttactccacacaacactacccactggcagttttgctatttgaattaatactgccaatacaggttgaatccggccgtgacgggggaggtttggaagccggcgggtttggacagcgggacgccgacaaacaggtcgtagctcacccctttcaggctgcctcgccagcccagcgcgctccccgccaggtgttttccgagcagcgtatcgctgccccgtccgcccacttcgccataatccattgccagatacagcgattgcccgcgcagcggggtttgccagtccagttcgttgcggctgtaccaaccccgatcagcggataaggtcagctcgccatcaaagccgcgtaccgtccagcgaccgccaatcgagaagcgatcctggggcgtcaatgggctggcgcttatctgacgcaaatattgggtctgataaaaaaagggctgagaaaacagcgttaacggcccggcaagtgtcgccgagaactgggtgattttaggtaaggcggtcccttcattgcggtactcttccggtgccggttgtgcgccaaaccagcgcatgccctgttgataagtcacccgggtatccagcgtcgcgctgccgataaagtgatgatgggacagccccagcttccagcccgcggtttcccggcgctgaacgtcgatttcagtgttatcaataaaattgcgagacgcccgacgataaatttcaccgttaagcagggttttctggtcggcattacggtgcagcacccggctaagctgaaccgccaggttttggcttttgccccgatattggatcgcctgattcagcccggctattgtctgggtataatcgtaatgactggccgtcacgctcgccatccagtagccgaagggcaaagagtaatagagcgtgtcattttggctgcctttcccggcagacgaatgaatatcgcgtccaccggagagataaaacaggtcgctgagcgccagcggattatccagaaagaaggtgagtccgccctgataacgtccggtgcttttggagccggtatcatccagatacgtggcgactcgccagtgccgggactgacgccagtccagcacaatatcgctctcccccggctgctctgccgggacaatattcatatccgcctgcacggtggggaaacgttgcagattttccagtccctgctcgatatcccgtaaatccagtaattttccttcacgcgcgggaaagggggttatccgctggatatagttcccgctgtcaggggtatagcggatatgccggatttttcccggtatcatcaccagttttaaggtttgggtacgcaaatcctgacgaggaaccagaacccggctggtgacatagccgtgattaatgagctgatcttgcaattgggttatcagccggctaatgcctttatcgcccagacaatggttttcgccctgttgggcgacaagccggaacggtaaccagtgcgggaaattttcggtacctgccagtctgacgtgggtaatgggaaaacacggagtttccaccgcaaaggcggatgattccccggtttccggtaccgacaggtgaacctccgcaggcggcggggctaattgcgtctccagggcttgctggcgggcctgttgatgaatgagttgttgatctgcgatgtcggcggcttgactacctgagactgcgctacaaaaaactattaataatacaatactgcttttcattgacttgctattccacaatgttgaaacagcattaaccacgaatttaacttagcgatcaatatttagtgttgattatcaaccgggcaactaaaatagggagttggtcaagatagcagcaaaaacaagaggttatatgacaaagcaaaaaacaggccaatgtgattattttgtgacaggattgtataaaaaacagattaatattaatcatttaataatcaacattaataatttcaaattaattttattgttttattttcattgtgtgattcgtatcacatttttatctttttatttctgtatgaaattacttttaatgtgatgattatcgtaaatttgtgattaggaattaccttttatgattatgtcagatgatgacttttagctcggttggcagaactgagcgctaatttacgtcacatttttgtcttattacaaacggcagtagcttttaaaatttaggctttcgtgatgataaaatatcttcttttctcatttatcatagatatacgaatataccctatggatttcaagatgcatcgcgacggcaagggaacgaatccccgggagcataggtaacgatgtgaccggggtgagtgagtgcagccaacaaagaggcaacttgaaggataacgggtatagatagttcttaggcggtaagaaaggatatttactgccgtttcttccttaaaacgcacagtaaaggaggttattgcgtaataaatcatgcccgctttttccggtaaatacggcatataacgataactcagttcgtctatttcctcttgtgagcatcgctaaaatttgagacttaaaccagaatactgctttcaggacgtaaaaatctttctggtacataaagatcataattattaaaacgacaatattcctccaattgctgagcagacctaacaccaacctttctgtatatttgtgctgtatagtgttcaacagtacggtaggaaatatttaatattctgccaatttgtttactggtatatttatgtaaagagagaaaaacaacatcccattcacgcggagtaaataaatcagtcggtggctgaaatataatggaggcagggagttttccataaaatagacgggttaatgaaaaatcctggacttcccacccgtggaaaatgactccgacacattcgttttcattattatatagtgggtatttttcacaaaaatgagatgataagaatttatcgttcccatacatatgtgtttcaagcgaacatactgttgtttcgctcttcattacactttgatcatgaagaacgaattcttttgcaaactcagcgccactccaaggaagttcataatcataccacccttcgtaatcaaatgagtctggaaggttttcaagatgtttaagtgccttattgccataaataaagcatgaatttttatctttgatcccccaaggctcattactttgcttcattgtattaatgacttgaggtgaaataattagtttattatccatgttactactccttttttcgctagccttaaagttagattcttgatattttataatcaatttaactctctactgccaatagtgacaaatcttgctggaatataaagatcaagtttattttctttacagaaatcttttaattctgcatgtaaaggcaaattgaatttttggtaaattgattggatatgattaatcacatcttcggaacttatcattaattcttcactaattttctcttcatctaatgaacacagagttagaaagagaacctcccattcaaattgcgtcagtgtgtcattaggtggggtgaatgccagtgttgccggaggagttttttcataatagtacgaaacagaaaaatcttgagttttatacatatgaaagaagatcccaatgcaatcattattctcatcataaagtggaaatttatcacaaatataagtttgtttaatgttatgctccccaaactgatgtgtttccagtgaagtgacgcgttgcatagtttgaatggttttttggtcctgacgatggaattcttctgcatattcggcaataggcaagggtaattcccccatagatagccctataatatcgaaatattcaggaaggttgagcagttgataaaaagcagggttagcataaataaatcttgactcgcgatctctggctccccaaggttcatcgcttttatcccacatcagcgttaattgtggtgtaatatgattggttttttttcttatatttgacatagtaactccttaattatcatttagtcattatctgaatgaattgttttctgatgatacaaaaaataatttaactatataatgtagtataacaattatccagccaaagactgtatgtttattaattttattatggtattataaataccaaacaatataaggaaaaatattatttttattggagattatttaagtgatttatttttccagttaaaaattgcacgcacataataatttattaaggctcccagtgttcactcttaatccagaaaaaaatggctcatagatttaaagtattttggtggaatataaagatcataatgatttttttcgcaaaacagtttcaactcaataattgatccgattaataatttctcatagatactttggaaatacttttccaaagtacgacatgaaattttcatttcattagcgatacattgattactgattccacggcagaataaaaagatcactatccattctttttctgtcaatatattattaggtggtctaagcttaacagatatatacccaagaaacttcaagatgcagtttttagcacctgaaaatggtcgttaattctagacatcagcgagtccgctatatccggtagcgttgtggtgaaaaatttgaagacgttgtctcgaaattcatgtttatccgcaaaataacggttatttcgaacctgttcattcatgaccttccataatcgctctattgggtttaaatttgggctatagggaggaaggtaatgtaactcaatattgctaacataagcccactccttaacaagatgagctttgttgtaacccgccccatccacaataagatgaattttttgatgatagtcaggataagactttcttatttcattgaaaaaacagcaaatgttgtagtcattgatggtttgatattcctggaacaccgtacgaccaatggcattcaggttgagcgcgcccaatatattcaggcgagtccggcttcctgttgtttttactgtttttttctcgccttttcgcatccagccataaccgagtttggtgccttgagtcgggtgaacagcatcaagaaaaaggatgggttcgtctttcgctgtgactttaagattctcataatattcaataaattgtcgctgtttttctgcgtcgaatttatgagggacgccacaaggttttttataagaaaaaccctgacggtgtagccatttattcatgccgggaatgctaaaggtaatattccagagctgagcaacataggccacgatttcatgggtgtgatggaaaagatgttgagataagtgattgattaaaaaatcagtttgttcttgagaaagcaaactatcagaccccccattatcagatttaagtttaccttgattaaggtaatcgctgatatgacggttaacggtcatttcatgaagacgcagggcctgagcgatcatcactgaactccagccttcagaggccagcaggaccgctttgatgcgatcacactccctcttatcacggcaggtgtgatggagatgttcaagttcggctttttgttcatcggtaatgaatattttcatagcgaggataatgatctccatttcggataaaatcaagcatcttcaatgattacgggtatagttgtatcatttttaatataatgatgtactgaaaaatgatttattcttttaatgtgacaaattattccaatacattgattcttttcatccatcaatgggtatttttcacagagacaaggattaagctgttgaccattgcttttaagatgagccacaataatagatgatactcgttgcatagactgtaagactttacgatcatgttcttcaaaaaagtgagcaagataattaaatggcgtcgataattctttaacagaatatcccatgatatcagagtcttcaggtaacttacttaatttaacaaattctttattggcatatataaaacgaagcttcttatcttttacaaaccatgattcatgacttttgtcccacatattttttaactgaggggtgatttgactcatatatgaccttcaataaggttgaatataaatatacccgttatccttcaagttgcctctttgttggctgcactcgctcaccccggtcacatcgttatctatgctcccggggattctctcccttgccgtcgcgatgcatcttgaaatccatagggtatagaaaaacatttcaacaatcggcaaaaaagcgattcatttttgccaccctgttgggttcaggtatagaaagtgcatttaatgacgctttcattcgaccaccaatcttcctcctttatggtggttacagcaatgtagggtaaatacctggcccaatgggcaatccagcaaaataccaacctataagcagcaatatccaaacggcaaaaaacaccagcggataaggtaataccaacgtgtaataagtacctagctgagcccccttatagtaccgttgaagaaaccccaaaaaaagcggtagaaaaggtgacatcggtgccaacggtaatactgcggaatcagaaatacggaaaatgatctgtgcaaaggcagggtgaaagccaagcaggacaaacatgggaacaaaaataggtgccagaatcgaccaaatggcagaaccacttgcgatgaacatacacaaaaaggcagataaaaacattaatccaatgaaggcaggaacacctgtcatacccaaggcttctagcatatcggttagccctaccgccataaatttgcccatgttgctccagttaaagaaggcaacaaattgagccagagggaagaccattataatgaagccagccatgtttttcatgggatcaacgagtaagtctggaatatcattagacttttttatctgttttgtggaaacgccatatgtaatcgaaaccacgaagaaaaacaaaataatgactggcacgatcccttttatgaatggcgatggaatgattgagccagtctgtggatcacgcagtagtgcattttcgggaacaactagcaacgcaacaataccgatgaaaattagtgcagatagaccgctcattagcagcccgcgattttgttgtggcgtgagctttgctaacttctcattgtgacttcctttccatgctggaaggcgtggctcaacaaatttatccgttaagatagcgcctgcaatcgtcagtacaatcactgatgttgccataaaataccagttatcgatgacactgacgtgtaagttgggatcaagcattttaaccgcttcagtactgataccagataacagcacatcggtagtgacaatcaataagttcgccgtaaatcctgaagcaacaccagcaatagcggccagtaggccagcaacggggtggcgaccaaccgcaataaaaattagcgcgcctaatggaggcatgacaacgagtgcggcatccgaagaaatatggctaaaaaaggcaataaatagcaccatatagctggcgtaacgtttattaataccagaagccattttatacatcagggtttgtaacagaccgactttttctgccagccctgcaccaatgaccaaagctaatattgctccaagtggtgtgaagttactgaaatttttaacgatattaggcaggatccactgtaatccttcggcgctaagtaagtttttaactctaatgaactctccatttgtagggttttttacggccaagtcaaaccaagacaaaatagcagtcgctatcattaaaacagctattaaatagataaataaaataaaaggattcggaattttatttccaactctttcgatccaaccaagaatacgtcctgggctcttatttacagagatagttgtttcactcatgattttttcctttgtgtttgctctcgttattattttttgattatgtaaatgactgaacgctagctgctagcttgccgctgtaagcaagccagtatttatcgaagcaaagttatttcaaaggtgatggtttaatatcgggcggaataggacactgatagggatgctcatcccgttggtgtttgaactcagactggacctctgctagcagagcagggtctattaataatttaagtgcggtggcggccataattttcccggcaagacacatccctttgtgagcaatggatgaacgcccttgtgcgactaattgccaagtatgcagtggtgtgccaaaggcgaagcagggactgaaacattgcgctgtgggtgttacccaactgacatcaccgacatcggtagatccatacagtaactcttgcgattctatatagggtaagacttcatctgtcagtgctttttccccttgtcgctcactccagcgtttaccctcttcgcccgctgttcgcgctgcattgagtttggcattgcgtaaatcatcttttgtcagtgtttgatgaattttttcggcaaattggcattcctcatcagtatattcaggaataccaaaggcttgaatatactgatacatcactctttccatcgtgcggttaggaatatagtttgaacacgccttatcaaagcgaatattcaattgcgtgccggtcattaaggcagcacctttagcaatatcaatgactcgttgataaatatcttgagcctgatccagttgtggggcgcgaacaaggtataaaacttcggcatcagcctgtacaacgttaggtgacacaccaccggtattagtcactgcataatgaattcgtgcttcctgaatgatatgttcacgaagaaattgaacacccacattcatcagactaactgcatctaaagcacttcgacccaagtgaggggaattggcggcgtgtgaagcaactcctttaaaatgaaatgctgtttggatatttgccagagactggacattaaatacactactgaatgattcaggatgccatgtaattgctgcatcaacatcatcaaaaagaccttgccggaccataaatgttttgccggaacccccttcttccgccgggcaaccgtaaaaccgtacagttccaatttgttgatttttttgcaaccaggctttcactgtaaatgccgcagcgagtgcggctgtccccagtaaattatgtccacacccatgaccgttaccgtttttaaccataggattaggttcacaacagcctgctttttggcttaaaccagccagcgcatcatactcaccaagtaaagaaatcacagggtgtccactgccataactggcgataaacgcggtctcaatattgcctaccccacgctgaacaacgaacccttcattttctaacgcatttgcgagcagttcagcagaaaagttttcttcaaaattggtctcagggtgttcccaaatcttatcgctaaggtaagtaaaatcactttggcgttgctcaatgtattcattgatgaattcaatcaacgagttattcatgatgaactccgaaatcaggtaggttaagggcgatagtggctaatgttttcactgcggtagtcatcacgttttcatcaaagtcaaaccgttcattatgatgacctgcgctgagtgctgtaccgaaaataaggtaagtggcttgaccaccattcgatttgacgtgttccataaaataggtcgcgtcctcagatccggcagcttgctgacggcttttgacaacagatgaaagctctgggatatattgttgagcctgttgataaatgaaatcgacccatactgggctaggctggctactttgagcggctcccattaactgtattccatattcaaccccctgcatttttgccgcgccttcaatgatattgagagcttgacggtagacaaatgcattgatctcattagtttcaccgcgagtttccactttcattaatgcatagtcaggaataacgttacggccaatgcctgcctgtagcactccgacattaatgcgtgagctgccttcgctatggtgagaaatagcatacagccctaaggttgcttgagctgcggctaacagtgcattttttcccgcttctggttttgcaccagaatgggaggccacaccacgataagtaacatcgattttggtagtagcaagaaaattattactcccacagaccaattcgccttgaggtacaccagtgccgatatgaatagcgataaagaaatcaacatcatcgacaacgcccgcttcaaccattgattttgcaccacgagttccttcttccgcaggctgaaaaatcagtttgatttttccagtcagttggctttcatattttttcaatatacaagcgagtcctaatccaatcgctgtgtgaccatcatgaccacaggcatgcatcatatgtgtattacaagaggaaaagccttcagcataagggcggtgcacgtgagtttgttcctcattcaggtcaagcgcatccatatccacccgaaaagccaaggttggtccaggttttccggtatcgagtgtcgcgacaatgccagtaaacccgcctgaaaaatggggtagccattcagtcagagcgccctgtttaatagcacgctgttcttgcgcttgtaatgcctgttttgaaggtaagcccattcgtgcatcagccttgataacatcttttcccattttcaggctataacccagacggtgcagctcatccaccacaatcgttgctgttctgaattcgaaccagcctgattcagcaaaatggtggaaatcgcgacgccagtttcgtaattgttcagcaatttgctgaatagattcgcttaataaagtgcccataataattatctcttttagttatcgcggagaagaaaatatatttagtttatttcaccaagattgattttgttaaaatatttatttaattttgattgaactagtttattttttaaaattttattgttttaataatttaaaaatatttttgttgaattttaaatttaaatacagcccgatttttcattactgatttttaatgtatacaataaattttgttcaagtaagatacaattatctttatctatataattaaaagttatcgcaagagagaaaaatgacgacaccaataaaactcaatcaactgcgcgcttttgttgaaatttaccgtcatggcagtatcagagcggctagtcggtttctgttactctcacaacctgctttgaccaaatcgattcgcgaactagaagattcacttggtgcaaaattatttatacgcagtaaccaaggtattcatttgacagggtgtggaaaaagttttttacaacgcgcctgtttgatacttgaggagcttcgaattgcacaggaagatattcaacaacgagttggcttgatcggtggtgtagtcaatattggcgtagctggcagtattgcacgtacgattatgccaaaggtgattacacagtttcaccgtgattatcctacagtaaaattaagagttgttgagggacagttattgactatgctacctcagctcagacaaggtgaactgaattttaccgtgaacacctattatcccggtagcttagatgcagaattgagcttcgaaaaattgatggaaaaagagtacaaagtgattgtacgaaaagggcatccaaaagtgaatgcaacctctttagacgaattaattgattgtgactggaccatgccaacaccgaaaggcacctactatcgcaggttatttgagatgtttacatcgctggataatccacctgtctttagtgtcacgtgtgaaacattaatggcttgcatgagtttagtctccgaaagtgactttgtgactattgtagctgtggatgtggttgatgagactctgtttaaccagcaatttgtggcgttaaaccttaaagaggagcttccctttgcaactttttgccttgttcaacgaagagatacaaagttaactcccgcaggagaacatttggctagactttttcggatgtattgtcgtgactaatttttgcacctgaagtgggaattagggaggagctgagtagacccgccggtccgactggataaactaaataagcttccatatggtggtacacttattttttcactccagattgttgttgcaacgaaaacgctttctataaactcttccacatatttaatttaagtaactgccacatatactgacaacaatgatttcgtgttaccgcttcatgtaataattaccacaagcgttcaattttgtttagcccggtattgattgccccgtccttccttaaacgggtagtaaaaaagatcatagtgtgctggtcatgttcgctttttccggtaaatacggcatataacgataactcagttcgtctatttcttcttgtgaacatcgctaaaatttgagattcaaacaaaaatactgctttcagggcgtaaaaatctttctggtacataaagatcataattattaaagcgacagtattcctccaattgccgagcagatctaacaccaacttttctgtatatttgtgccgtatatacccaagaaacttcaagatgcagtttttagcacctgaaaatggtcgttaattctagacatcagcgagtccgctatatccggtagcgttgtggtgaaaaatttgaagacgttgtctcgaaattcatgtttatccgcaaaataacggttatttcgaacctgttcattcatgaccttccataatcgctctattgggtttaaatttgggctatagggaggaaggtaatgtaactcaatattgctaacataagcccactccttaacaagatgagctttgttgtaacccgccccatccacaataagatgaattttttgatgatagtcaggataagactttcttatttcattgaaaaaacagcaaatgttgtagtcattgatggtttgatattcctggaacaccgtacgaccaatggcattcaggttgagcgcgcccaatatattcaggcgagtccggcttcctgttgtttttactgtttttttctcgccttttcgcatccagccataaccgagtttggtgccttgagtcgggtgaacagcatcaagaaaaaggatgggttcgtctttcgctgtgactttaagattctcataatattcaataaattgtcgctgtttttctgcgtcgaatttatgagggacgccacaaggttttttataagaaaaaccctgacggtgtagccatttattcatgccgggaatgctaaaggtaatattccagagctgagcaacataggccacgatttcatgggtgtgatggaaaagatgttgagataagtgattgattaaaaaatcagtttgttcttgagaaagcaaactatcagaccccccattatcagatttaagtttaccttgattaaggtaatcgctgatatgacggttaacggtcatttcatgaagacgcagggcctgagcgatcatcactgaactccagccttcagaggccagcaggaccgctttgatgcgatcacactccctcttatcacggcaggtgtgatggagatgttcaagttcggctttttgttcatcggtaatgaatattttcatagcgaggataatgatctccatttcggataaaatcaagcatcttcaatgattacgggtatagtgttcaacagtacggtaggaaatatttaatattctatcaatttgtttactggtatatttatgtaaagagagaaaaatgacatcccattcccgttgggtaaataaatgagtcggtggttgaaatataatggaagcggggagttttccatgatataaacgtgttaatgaataatcttgagctttccacaagtgatagataattccaagacaatcaccattttcatgataaataggttgtttttcacagaaataggaggataaggttcttatttctccccaaatatgggtttcgagtgaaacatatgatttttcttctttcattaccttttggtcatgatgaatatattcttttgcaaactcggcaccatcccaaggaagctcatcatcataaagcccttcgaaatcaaatgaatcagaaaaacctttgatggagttcagcgctttattgccataaataaaacaggaatttttatcttttattccccaaggatcgttactgattgccaatgtgttaataacttgaggtgaaatgattaacttattattcatgtcatcgttcctttattatattttacatagtgactactgaattatcattaagaaattatctgaatgaattgctaccttaattataatcgagacagcttaactatataatacagcacaacaatcatccagccaaaaagtgtatttttattaattttacgacaacattataagtactataaaatataaacaatgttattgttttaaacaataatcatttatatgatttattttattagttaagaagtttttaaaaaattgaacgtacataacttcgcaactcattaagattaatggtcttattaattcactgagctaactaagttggtgtcattccctgtaactgaatagcttaagacattcattaaagtatttcatccgctttcaacatttccaaaaataactaaactttttgaatatattagcgatctaaaaagaacatttctgaacatttaaagttcaattttgaacaatcagagttcatttaataacatttttgtcgttagacaattttctattcggagaatatttggctgtacttggcggggtttaatgtcttagtacagctattttttaacattctgcgcctgcgcggactcagggaaaaagctgtagaaatataaaaatatcaaattgaagagagagtatgaatatagcaccttgaataaccaaactgaggagagaagaaaggaatgattgtaaaaaacgactggcacccagcggatattattgcgggacttaaaaaacggggaacgtcgttatctgctatttcaagagaggcggggcttgcatcatctaccttaagtaatgcgctgcaccgtccgtggcccaaaggcgaacgacttattgctgccgctttaaattgtgatccttgcgaaatatggccgagtagatattttaaatgagttgtcattttcaaaattaatatgaacttctcatataaaaatcaatgagaggatactcattacctgaagcttttcttgtggaaagcttcaggtatgaatatagaattaatacagggctatttacctttttattttatgatgttatctgaactaaaccacctattgccttttcaagatattcgcggggacaacctaagtttattctgataaatcctttcccatgattaccaaaactcgatcccattgaaacggctattttggctttttgtaataaagcacgttgcaaagcatcatcatccaagtttaaatcgcggcaatccagccaagccagataagtaccttccgctttggtcattcgacaccagggaacaacagacgttaaagcctgctcaaaccaacaacggttttccgccagataatgctgtagttcatcaagccatacgtccccatattgatatgcggctgtagccgcagtcatcgatagtgcattgaatacatctagtccatgcgcattcaaccgatcgataaaggcacgtcgaagttcaggattgggaatgagaaaattggagatacggagtgatgaaagtccaaatgccttacttgttgaggtggcggcaatgacattgtcatgccattcactccccagatgcagtattgaggtgaatttcccccacggtaaaattaaatcagcccaaatttcatcggaaattaccgtcgtcccgtaccttttacaaagcattaatatctggagtagttcgtcactattccagcatctaccagtaggattatgtgggttacataacaataacagaggcggtctgtgttgctccaatatctgttccagatgatcataatcaattttataaccttccagactttcaagaagcgggttttcaatcaccatcctgccgttcatagtaataattttggcgaatgaagcataataaggcccttgcacaacgacaccttcccccggtttactgagcatctgtatcagtaaagccaatccgggtatgacgccttctattgatgtaaaccaatcgcggtgcaaggtcagtttatgacgccttgaaaaccagtctattgctgcttgataatagagatcgtcgcgttcgctataaccaaaaataccatgttcaattcgggagtagagtgtttgcaagactgcttccgggcattgaaaatcaatatcagatacccacattggcaacaggtcagtcttatttaagtacaaatcacgacctaaaaagtcccacttcacagagcttgtattgtggcgatcgattatctggttgaaatcaggcaatttcacgttggatttcctttttattcagggagttctccggcgtgatttttgcgataccgaaaccagtaaagccataaatgagagcaaagaagatggcagaatagcactggatagcccaaggcagtagctcaagcgtactgacacccaatgtcgtcgccatataaatgccagcggcagtccaagggatcaacggttctatgacggtacaaccatcttctattgttcgtgacagatttttattatccagccccatgcgacgataagcatctttgaatagctcagccgggatgaggagagccagctttccattgcaagttgcgccggttaccagaatagttgttgccaaggttgcagcgataagttgcccggttgtgtgaacaacttgtagaagccggttaatgatgatggtcaaagcaccagtgagtgctaaagcaccagcgaacgcgaatgcacaaaatgcaagcaggatagtactcatcatcgagaacatgccaccacgattgagcagacgggagacatcgctaacaactccggtaatgttgtgtccctggtcagagaacatcgagagattgaaaccgtctatcaacgcattaaggccctgtttaagggtgagcccttggagacctatgccaagtacaatagctaatgcacaggcagcaagcatgacgggtatcaccggacgttttgttattgctccccataaaaccaatatcggtggcaaaatcagcaataaattgaagtgatacaggctttcaagagattgcacaatttctgtaactttttccggtgttgccacgttacctgttaagcttgtatgacccacaataaaatagacaatagcggctaaaacaaagccgggaatagtggtatacatcaaatgttgaacatgactgtaaagatcagtatcggcaacgatggcagcaaagtttgttgagtcagataacggtgaaattttatcgccgaaatacgcacctgaaacaaccgctccggctgccgcggccaaagatacatcaaggccagcagcgacgcccatcagagcaacccccactgtgccggctgacccccatgacgtaccggtacaaaccgagataacgctcgtgataaaaaaagccgcaatcagtatgtattgggggctaatcagttttaacccccaatacaccatatacggtatggttccgctgaacatccaagtcccaattagcccgcctacgcaaatcagtatcatgatcaccggcatcgctttagccagctttgtcacaatagcatcgataatgtcattccaacgataaccttgccaatatgccaaggtagctgctattgctgctgatatcagtaatagggattcgatgcgtaaattcagttgaccatatccaataactaacaataagagcattgctgcgattggcagtatagcgagtcccaaattaagctttttcttgtcatccatattaaaactccagtttcagatgggttgttgaaacagaatagaataatgaatttattttgaatgaaatgtgacagatattacttgttcatgtaattggtttcataagatgtgaaatgtgatctgtatatcgcttttacgcttattacgacgcttttcattactcgattaaaaaaacggaatctctgataacgagttcggctgagaacatattcatctgtggagttatttcttttttggcactgagttgcaatgccagattagccgcccgctgagccattcgttctattggattatgtacggtagttaagggaggataaagatatcgggccgggacaatatcatcaaacccaacaatcgacagttgttccggtaatttgattttccgttgatgtagggagcgcatcataccagcagccataacatcattgaatgttactgccgcggtaaagccgatgtcgctgtctaagagcttttctgctgccagttctccacccttttcattaaatggaacactgataacccaatcgccaggtactgtaacacccgcattagccattgctgcataatatccctccagacggagccttctattatcaatcggtagatttgccgttacacaagcaatttttcgatggccgttttgaagaagatagttggtagcaatctgagaagcgctgacattatctaaccaaatgcaccggttggcgatagcagggaaatatcgattgataatcaccaatcctggtgtatgagcggcataacgtaatacatctacatcactcatcctactaacatgcgctactattgcttcgcatccctgattaattaaaaaatctaaggcagatttctcaagttcagcttgatatccgccactacaaaccatcagttttactttttcttgtcgggcaactttttcaaccccgcgagctaaaagcgaaaaaaacggatcagctaaattaccggtgagtaaacccaacatattcccgcaccttttcgctaatgcaagtgcggcagaattacgatgataattgaactcacgcatagctttctctacacgctcacgagtgcccggttcgacataagcggtattattaatgacacggcttacagtggctacggatactccagcttgatgggctacgtctttcattgtggtcatgctctcacctcagcgattatgtaaaataaatcataccccgactaatagaagcggttgggagtatgaattggattctcaatataccgacaataaagatcttaacaaccaaatctacgacctaactttgaaaatgagctatgaagctgatttgcatcatggacttattaagtatcatattccatcgtttaccctgactaagtgacagaatatatggaactcaaggatcgttcttaatccaaaaaaaaatggttcatagatttaaaatattttggtggaatatagagatcataatgattattttcgcaaaatagcttcaattcaataattgatccgatcgataatttttcatatatactttggaaatacccctccaaagtacgacatgaaattttcatttcgttagcaatacatcgattactgatgccacggcaaaataaaaagattactatccactctttctctgtcaatatattattcggggggctatgcttaacagacatagttgtgtcatttttaatataatgatgtactgaaaaatgatttatttctttaatgtggcaaattactccaatacattgattattttcatccattaacgggtatttttcacaaaaataaggcttaagctgctggctatcgctttgaagataagccccaatagatgatattcgttgcatcgcctgtaaaaccttacggtcatgttcttcaaaaaggtgaacaagatgattaaacggtgtaggtaattctttagcagtatatcccgtgacatcaaagtgttcaggtaacttacttaatttgataaatactttatttgcatacataaaacgaagattcttatcttttacaaaccatgattcatgacttttatcccacatatttgttagctgaggggtgatttgactcatatatggccttcaataaggttgaatatcaatggaaaaatatttcaataattagcaagaatagctattcgttctatagggaattccctcatagtcagaagtatagaataatgaatttatttcaaatgaaatgtgagatgagtttgcggttcatgtaaccggtttcatgaaatgtgaaaatgtgacctatgtatcgatttctgatcttgcttataatccattgccagatatcaaaaaaattttgaagataaagtaagtggaactcgtataaaatgttccggtttatctaaaacaccggaaatttaaggttatgattaagtaactagtcccatttaaacattacacttaattctcctataataaaaaattattattaaaaacaggtaggtattcaatatggaagattatttagcagagctgtttttcatagccgttctttaatatggcctgctgaatatttagataataataaatcgataaaccggaagaattatttcacaacgataatatcgtaataatatattattaattatataaaatatcattgagaacataaaatgcactttatataccttatagatttcaagatgcatcgcgacggcaagggagcgaatccccgggagcatagagaactatgtgaccggggtgagcgagtgcagccaacaaagaggcaacttgaaagatgacgggtatatcaaatatcactctacaattcattaatatatggaaaaaaggttacaaaccgtggggtgtaaaaaatggttatccatattttatttacggtaatttagcaacaaaagaatttacttataatattgaaaaattatttgattggagaaagtcttacaatcatgagcttccttggaatggatctgaatgtgtaagataatcaattaaccaacaaatgtactttttaactaacagattaccaagtattacctataacccattgttttaaatacgataaacagtaaattaaaacaataaacaacaattcgatctgccataacatataaaactagaaaattcttatgaaaaaagtcaattttattgctatatcccagaaaacacgagggaatccaaaagtagaacgtttatttaatcttcaaattattaaggagtctttatgaagaactgtacgatatcacctcagattatcaatacaatggaaataagtaatgaaccttggggaataaaagatagttcttcatgttttatttatggtaataaagcgttaagttctatcaaaaatttctcacaatcatttgattacagcgggctttatgatcatgaactcccttgggatggcgctgaatttgcaaaggaatatattcatcatgatcaaaaagtaatgaaaacagggaaaaatatatgctcacttgaaacacatatatttggtaaagagcaaattctatcatcttatttctgtgaaaagatgcctttttatcatgaagatggaagttgtataggcgttatatatcattgctggaggataaaggactattcattaacccgtctgtatcaatatcataataaacttccctcatccattttactccaaccaccgacagatctttttactgagcgtgaatgggatattattttccttttcttacagaaatacaccataaatcaaattggaataatcttgaatcttgattctagtgtaattgaaaaccatacggacaggatatatcataaaataaacataaactccactcttcaattagaagaatattgtcgagtcaatagtctttatcactatatccctgagaaatttttattaacttaaagggcttcttctgcggacgcaattgtccttatgacgctcgtcactaatcatgcctggggtaaaatagaattttattaaaacctcaggcatattcaatatgataaaaaacacctattacaccaccacaaataaattttaaattaaaaaataaaccatttgaaaatatatctaaataatatcgattaattacaaattaaataaataaactcattaaaatagaaaataaattattttattaaattatttttaatatatattttcactctattaaacccgttcatcttattcatattaattgatagtaaattcgatattaaatatataaaacattaagttaatttaaataaacatcctatttaaacccctaataaaaagatattaaacagcattctttcatctaacaatataaacagaaaaccaagaatttttaattaccattacagatgaaatataaataaaactctttttaaatcaataagatacccaatgaatatgggcatcttattggtaattttaaacgagttctgtcatcactaatttcgctatttcgaaatagataatcagccctgtaccatcaataaacgtggcaataaaaggagcagatacaacagccggatcaacagatagccttttcaataccattggaataatggaagaaacaatggcactccagagggtgattgcaatgatggccaaactaacagcaatcgtcacttcaataccgacacctaatatccaggcacggataagcgcggcaaaacctatcgttattgcaactaaaaatgaagtggaaatctctttacgcaacacagcccatagattacgcaaactcacttcccccaatgccattgctctgaccaaagttgaggtaatttgcgtcccgctgttgccccccgttcctattaataacggaatgaaaaatgcgagagaaattaccgcttccaattgatcttcaaatgctttaagcacagcaccggtataagcttctgcaacaaatagtaataataaccacccgacacgcttacgccataatgttattgggctggtactcagataaggccgctccagaggtaaagttgccccctgcaaatgagcatccaacgtattttcatcttcaaccaactcagcaatatcctgcgatcgtagtaccccaaccaatttaccaaaatgggtaaccgggacactatccataccactgtgatttatcaaattataaacatcatgacgcgactgttccggtgatacggaaaaatagctttgcctcataatatctgacacaaataaatcatcggctacagttaataaccctttcaccggtaatatgccattaagatagccttcagcatcaataacatataagtaagttgggatctgctcaccttcaagctgatcaatcaaatgactttttaccgacaaaacagaatcagcaacagatacagaaatgaaacattggctcatatatgcgctgaccgttgtctctgcatttttcacgcgatgtttccgctgctgatcagcatttatttcattaatagaatgattagcaatcgctaatgcatccattttttcatgggatgtgactttcatgatgttggtccctattactgttgtgaacttcaaacagcactcacataggggcgaaaccagatgagagaatgcaacgactatctctacgtctcggttttagcactatacaacgtatcctgaattatcagaaagttacatggggatataccttggttcgatatatcctgtcctaatcttgggcgtctctcgacgtcgtcagatcagcaacctgtgtttgtataggagcctcgcctaacgagatactgcacttagaatgcggcgcatattgtaaacaagagtcgtaataattcaaaattgaaagtgagtttgtttaattttcatttaagtttcatttaagtttcatttaagtttctgatgataataaaaaaaacggcatagatttccaccttttgccgtttaatgagaataatcctatgaaggaattattcattttttgatctcttagattcaattttttcaacttcagtaatcaattggtcagccgttttaccatccagcaatttataaaacttttgtttcgatttttccatgtcaccattagaacctgatttaaccaaatcattaaaatcgatactattaaacatagccgattgaattgattcatcaaacttcacttttttatcatcaggtagcctatctcttactttttcaatggatgctttcaacgcgatttcattagaagcatccattttaggttggctatcacagccagctaatacacatcctaacaaacaaattactaacaattttttcatattcatcccccaccgaatattcaacaagggaataataacagaagcaataaaccgtatatacccgtcatctttcaagttgcttctttgttggctgcactcgctcacctcggtcacatcgttatctatgctcgcggggattcactcccttgccgtcgcgatccattcttgaaatccatggaatatataattagccaaattgataaaaaatagcaaataaaattaactttctcatcatgttattccagaataattatccttgtggttagcagctacgatgccaaaatacgatcacttgttatttcttcaacaacataaaaaacgactttctgccaaatcgaccagatgcttaaaacacccgaccaaccgacaatatggcagatccagatacgactacagtaactgccgatattcagaccaataatgtagttggaaccatcacaattagatgagatcatacttgcgtttatcgcctcgcttaaccatttaaaaaccagcaccgaaaaccaaggagaaataatggcactcatccactgcactgcaaaatatattctgactgccatattgatattactgcctgtctttgcgcaagcaaaagtcattacagtcaaggacgttgctgggcggaaggttaaaattgacgcgccagtcagtcgggttatgctggctgacagccggatattgattgccctgaatattcttcaccctgataatccgcttaaaggtattgtcgcctgggataatgcactagaaattaaatctccagatttggcaactacttatgagaaagatttcccgcaattgcgggatattccggtattccctaacccttatcacagtgattttaacgtcgaaaaagcgctgacttataaacccgatctggttatttttgatattggtcttcaaaccaagctcaatgatagtggaaccatcatgttactggaaaaagcgggcatccaggttatctttatcgatttccatcaatatccgctaacaaatacgattccaagtatgattttacttgggaaggtattcaacgaagaagaaaatgcacaaaaatttattgagttttatcaagagaggatgaaaatcattaatcaacgcgttggtacgctaggtaaagaacagcgccctccggtgtttatcgaacgccatgcaggcatgttaggtgcggaacattgctgtaaaactttcggaaatggcaattttggtgaatttgttactgccgcaggaggtgataacctcggcgctcgctggttttcaggtatagatggtgaggtaaacgaaaaacaattaatcgtcagtaatcctgaattttatctgatgaccgccgcaaattgggataaagttcgctctggaagtttctctgtgccattaggttataccggcgatttaaaacagtcacaggaacgactaaaaaaattactgacacgccccaaattaagcgtattaagagcctttcgcgaaaagcaagtaatagcactgtaccaccaatattacgatacgccgtttaacatcattgctgttgagatcattgctaaattcctgcatccgaagttatttgaagatatcgatccacaagctgacaacctatatctgcataaaacttttaccgcccttgatggtaacggagtattctgggtcacagcaaaataatattacctttcaatccgttggtatattccaacggatatttaatcacaccctttacttataatttccgttcgttaatatacctaatattttatataacatgctaatagacatctattattttgtcatctactatagttgatgctaaaaaaatataaaacatgacaagataaattcgggtaagtaatataaagcaaaaatatattcacataatgaaattataccctatggatttcaagatggatcgcgacggcaagggagcgaatccccgggaacatagcaaactatgtaacctgggtgaacgagtgcaggcaaggtacaaaaatcagtctataccctatggatttcaagatggatcgcgacggcaagggagtgaatccccgggagcatagataactatgtgaccggggtgagcgagtgcagccaacaaagaggcaacttgaaggataacgggtatatatgcagggaatcatccgctctttactaacaagaatggaaaataaaataacctaagtgagatagattctcgatgtaactattcttaaaccaaagtactcggagtatgttaatgaaacgattacacgatattgagaaagagatgttgcccgttgaatcctacaaaatgcttattggtgggcaatgggtagatagtgtatccaaagcaacgaccaaaagttataacccggcgacaggagaactcctggctgaatatgcatccggtaatgctgaagatgttgatcttgctgtcagcgctgcaaaaaaagccttccacgcctggagtcaaacctccgcaatcgaaagacaatcagctttgctgaaaattgctgacttactagaagcagaacaaaaacgttttgccatccttgaatcactggatactggcaaaccattaaatgaatccctgtatatggatttaccggccagcattgaccagttccgctattttgcgggtgtgatccgttcccataccgatgaagcttcagttctggataccaatacacttagcttggtgatccgtgaacccattggtgttgtcggacaggtaattccctggaatttcccactactgatggcggcatggaaactggctcctgctcttgcagcgggcaataccattgttattaacccggcaacactgacatcaatcactctgcttgaattgggcagaatattggataaagtcctgccagccggggtagttaacattgttacaggtcgtggttcagtcgttggtcaagccattctggatcatgaagatgtcgaaaaagtggcattcactggttccaccaaagtcggttataccgtagccgaagccgcagccaaaaaactgatccctgcaacactggagcttggtggtaaatcagccaatattatcttccctgatgccaatatgaaaaaagcagtaaaatatgcggccaaagctattttgctgaatcagggccaagcgtgtgaatcaggttcccggttgttcctgcataaagatattcatgatgaattcctcaaatcgctgaaaacagaattcgaatccatccaggttggtgatccattggaaaaagaaactcagatgggaagccaagtcagccaggaacaaatggaaaaaattctcgaatacgtggaaattgcgaaaaaagagggtgcaaccattttcacggggggtaaacgcattactgaaaaaggttatgacgagggtttctttattcaaccaactatcattaccgatgtcactaatgacatgcgagtcgcacgcgaagagatttttggccctgtattggccgtgattccattcagcgaagaagaagacgtgatcagaatggcaaatgattctgattatggcctggctggtgctgtctggacacaggatatcgaccgagcactacgcgtagctaaagctgtcagaactggccgtatgtggattaacacttaccatgaactgcctgctcacgccccatttggtggctacaaaaaatcaggcattggcagagaaacacacaaaatgatgttggatgcttacactcaggtcaaaaacatctatatcaaaaccagtgaagaataatctcaaccagtgatgagaaaagccttccaaacggaaggcttttatttaaattttggctttaatatcaatactatctgcattcacatctttaatatgctctttcgtcagccgataaacaactgggcttaacaatgctaatgcaattaggttcggtattgccatcatcgcattcaatgtatctgccaataaccagacaaaatccaatgactgagtagcacctaccatcaaagcaataatccatactacacggaaaggcgtaatagctttttgcccaaatagatattgagtacatttttcaccgtagaaactccagccaagaattgtggtaaaggcaaatattaccagagcacccgcgacaatatagttgccaccaggaatcgccatcgcgaaagaagtcgctgtcagtgtcgcacctgtctgaccgttcaaccaaccaccagtaatgacgatagttaagccagtgatggaacaaacaataatggtatcgatgaaagtccctagcatagcgatcaacccctgacgaatcgggttttgagttttagctgttgcatgagcaatcggcgcgcttcccaatcccgcttcattagagaaaatgccacgagcgacaccaaagcgaattgccgcccacactgctgcacccgcaaaaccaccttgggccgcaacaggtgtaaatgcagatttaacaatcagaacaaatgcagcgggaatttcactgaaattcattcccagaacaataatcccagcagcgagataggcaaccgtcataaatggcactaatttaccggcgacatcagcaatacgtttaatccccccgataagcactgcaccaactagaattgccaatacgatggccgttaccatggtagaaacgccaaagttactttgcagcacatcagcaaccgaattcgcttgtacggtattaccaataccgaaacaagcaatactgccaaacaccgcaaacaacgtccccaaccaggcccactttttacctaaaccgttttttatgtaatacatggggccaccaacatagtgaccgtttttgtcaacctcacggaaacggactgccagtaccgcctctgaatatttggttgccatgcccactaatgcagttatccacatccaaaacagcgcacctggcccacccaatacaactgcggtagccacgccagcgatattacccgttcctatggtggcagaaagcgcagtcatcagtgcgttaaatggtgatatctgcccttctccccgctgatgattacgctcaaatagtaatttaaaacccgttcccaatttacgtataggcagaaaagagaggcggagctgcatgaacaacccaacccccaaaagaccgaccatcatcggcactcccaatactaccccgttaatagcactcagccattctgtgattaattccatatattccctcggacatttcataacaaaataacaacatactcgcagcaacttaataaagaatatttatggaaaatatgcgagaaaaaatttcgtaaaaatggaaaaagatttgatacttgtgagtgatatcacttgatagaatcttaagattagaatgttcaaaaatttatcacgcctaatacattaaaaaatgtttaggtataaaccgctatcttaatcaaaataatttactggaatatttaattatttaaactaattaaaacaaaatattattctttatactccgttttttgttaattaatggactgattaatattatttttaaaaacgattttttaagaaacagatcattgagtataccctatggatttcgagatgcatcgcgacggcaaaagaacgaatccccgggagcatagataacgatgtgaccagggtgagagagtgcagccaacaaagaggcaacttgaaagataacgggtatagacattatcagcgatttttctgagaatatcttgctcactctacctatcatgcttttccttttaaacaaaccactctccggaatgtatttattacatcagcaaaaagaacaataaaaaatatatgtgatatttttctatcatcataaaactaccgaatctttttcgagccgcctcacaataattgaataacctcattgttttattgttccactcaactcattttatcagcctgagttaatgaataaggagataacctcatggtggaacaacaatatttcattggtgttgatgttggctccgccagtgtccgtactgcggtttttgaccaatgcggcaaacggcatgcattctccgctcgccctatccagcaatttcatccaaaagctgattttgttgaacaatcttctgctgacatctgggcgcaagtatgtgcaacagtaaaagaagctgttgcactggcaaatattaatcctattgatgttaaatcaatcggcttcgatgccacctgttcactcgttgcggtagcagcagagggatgctctctttctgtggccgaaaatggcaatcctgaacacgatatcatcatgtggatggatcatcgtgccataaaagaagccatcacgataaatcaaaccaatgaccctgcactctgctatgtaggcggtgaaatcagccctgaaatggaactaccgaaaatcttatggttaaaaaactactttcctcaacgttatcaggatatatggcgtttctttgatttagctgattttctggtgtggaaagccactggcgctgatgtagccagtacctgcacgcttacttgcaaatggaactatctggctcatcaaaaacagttcagcgaaaaactactctatgatgtggggttagaagatttaacaaataaagttccatctaccatcattgaacttggcgaaaaagcaggttacctgactgctgaggtggctaaagattttgggctgcacacaggaatcatcgtcgccggtggtattattgatgctcatgccggcggattggcactgactggtgcctatccagagggcagcttggttattatcagcggtacctcaaactgccacatgattgtcagtcctcatcctgtcatggttccgggggtttggggcccctatttcggcgcaatgctacccggttactggctcaacgaaggtggacaaagcgccgccggcgcattagttgaatggtcaattcgtcaacacaatagctggccggagctggcagccgaagccgaggaatctggtcatcattactaccagctactgaatgaagcggttacacagttagaaaaacaagagatatacccgaccgcacagcttcatattttaagtgaccatcatggtaatcgttcaccaagagcaaaccctaatgccaagggaatggtaagcgggctgacgctggcaaatggtcgtgatgatctggcccgtcattacttggcaacactgcaatctatcgcctatggtacccgccatattattgatgcattagtagaagcaggacaccagataaacagactggttatgtgtggtggcgcaactaaaaaccctctatggttacgtgaatatgccaatgccactgggcgagagatccatctcactcaggaagaggatgctgtcaatcttggctctgctttgctaggtgccgttgcttgcggttcctttgcaaacttcgctcaagcagcaaaatcgatggtacgtgacggcaacattatcaaaccggaaaaagagacatttttatttcatcaagccaaatatcaggtctatctgcaaatgtaccgagatcaacagcaatataacgaaatcatgcaaaccggtaattagcccagtgagtacagccaacaaataggcaatttgaaaggtaacgttcatcgctttctggcgagaagcgtagcaaaatttaattttattctattaccattttcatctgttttatgaagatgaccagggttttcattatatttaatgatttcccagtcagaataataattctccaattcacctggcatgaggaaacttttgaatggcaataatgaatatggtgcaaaatctgtttcaatcgggcaaacaatcagattaataccacctttattcgtctgtttttgcatattgtaaataatatcggtgattttttcccgttgtagaaacatcagtaccacagttgaaataattaaatcatatttttcggtgatattgtgagagttgatatcataaacagccgtacggatatttttaaattgctgtttttctttaataacattaattgtgttaatacattgctgactaatatccacggctgtaacgtcataacctctttctgccagatagaaagtattccggccatgaccggcccccagatctaatgtcttacaaggagaaataatatttgccaaatatataatttcagagtgaggtaatgacaaattattttgtttataaaacagatattgtggttcacataaaaaagagagctggcatttaatatcatcacttacccatttaattttatgccaaatctgtggctgaataatgggaggctgcttttgtacattaaaatatgcagtttcttcctgatcaccatcgaaaatcacaaattccagttcaccttcaaagatctcaagacaagcataagtcccctcttttgtgttatgcctttcagtgaacatttcaggaagggtatttttctgccagatgggtattcgtttataacaaatgaggtcactcatagaaggttccttgaccataaattacatttaaaatgcatcttataatgacattctacaactgtaaagctataaaatcatcagaagaaaagtctctgggtttcaccatagctatgcttgtaagataaaaggaaaaatgatccactctccgttaaattgaacgaactgactcactattaagaaacataggaaagaaaataagcgctcattgataaaatttctccggccttataagccggagaaaaggcgatcaatccttataactgtattgataacatccgctagaatcataatagagaccagacttcttctctaccgcgtttagcaacacacctttaatatgaatgccattttgtctaaaccggcgaatagtcacattaacttctttaacccttgttttatgataacgtgcaattaacaatgaagttcctgcatatctcccaataatcgcagcatcagtgacagccaaaataggaggagtatctaccaagacataatcataatgctcttctgcccaagataataattctttcagtctattatgcataagtaattctgacgggtttggcggaatagcacctcggttgataaaatcaagctcagtaagatacgttctggtaataatcccttttaattgatgttgacctgccaaatattcagaaagccccagagattgaggactttccaatactttatgtaaacggcctcttctcatatctgcatcgattaaaagcacgcgtttattacttaatgccaatacagcggcaagatttactgaaataaaagactttcctaattcaggagcagaacctgaaagaagaataattttatttgcagattccatcattgaaaaatgcaaggttgttctaaggctacgcaatgcttcaatagctaaatcagtaggatcttgaatagctaataaccgcaatttctgacgatgaattcgctttttctgttgttggtcaagtttgatctgagtctcagagagtggaatagtggcgtaaacggaaacacctatctcttccaattgttcgggactttcgattcctttacgaaacatgactcgtatgcaaatcaacccagcagacaatataaatcccaataccatcatcgatgcaataatcagtgacttcttcggttttaccgctgaactttctacaatagcttcatcaataatacgcacattacccactgtccccgctttcacgatattcaattcttgctgtttattgagtaactgcacataaatttcttggtcaacttgaacatctctggtcaaacgtaaaatttcctgctgtgttttaggtaaccgtttgattgactgattcagctcctttttggtatcaaccaaagttttacgtttatcaagcaacgcaacataagcgggatgttgtttggtatacaattgctgtaattcagcttctttgaacgtcaattcattaatctgtttctcaatttggaccaatgtctccaaagccgattttgcttcaagtgataaatcgatagattcattcgcttgacgatattgattaagcaactcttcagaacgattgagctcaattttaactttaggcaaatgattttttaagaaattaagactactttcagcctcttccgtctttcttgtcacattttgttgcaagtaatttttaccaatactatccagtatcaattttattcttgcacgatcatcaccttctatttcaagcaagataataccggtattattacctttttcttttacccgcaaagcctgttgcagcccgcgaataacacccaattgcccccgtttaaccaacgtgaaactttgccctggagaagctgaaatatttgagataagcaaatttatgccatcggtatcaaatactttgtttacttgcccgtggaaaacctgatcgtcaaaaaacaaccgataattttctgcatcgtcaacatatatttttatcccttcattaatatattcaggtgatattgtaaaatgtttaataacaatattaggctttggcataccacgaagacgggcaatgcccttacctatcacaggaaaatagtccgctgtaacctgaacatccaaatttagatcctttaccgtctttcctaatatcattcgggaagttaacaactccaattctgccgatgtatctgacggttttccagaaagcatatccgacatgtcgccgattaaaggtaatgcactacttctcttttcaacctgcaataaagcatttgccttgtatatcggagtcgcaatcaaggaataacaaaggccaataacggtgaacaatagggtgattccaccaatcacccagcgataatcgaataaggcactaagaagacggcctaaatcaatttcatcactatccgtatgagtgtgacttgatttatctgatgtagtcataaaaagcctataattactttattaataagcagcaaacccataatataaaaatacttataagttataatttccctaaccaactattagtactcttaaataataactgatacacatattcataaacctcgatatcagacttataaggatcggggatgaccatttcatttaaccagtgacctaaaagcattgttttcccccttgcccctagatttatcctatttacagcctcaatatgttttttttccataaccaagatcaaacttgactgctggcataattcactggttagttgacgcgctatatgcccttctaaggataatccatgtctagccgcaaccctacttgagaattcatttgcaggtttaccaattaaagccgatattcccgcagaataaatctctttctgaggaaatagttgccgcaataaacgctctcccgttggcgatcggcagatattacccacacaaacaatcagaatagaattgaacattaattcggccacttacgaatccacttagttgtttcagtcaggctattaatgcttgatatcgttggcaccaactgattgataacccgattccagcgaacaactggcgcactggtaacatagacaatatcataaggttgcaaattgaactcagttcccaggactaacgccgtcgcatccttagcattgagctgataaatattggctattttccccttattatcaggtacattacgcagcgaacggataacaaagatgccattagcatcacttgataattgatctataccttcagcattacccaatgcttcggtcaacgtcatcccactgcgatccatacgtagagtggtttgttttctgacttcccccataacaaacactttcaaatcatcattacgaggaatgtataagatatcgccagaatagagcagacgattttgcttcagatcaccattttgcatcaaatcttggagagaaataatcgtttcttttcccttatgagtcaaaatgatcctcctccaatcagcgttttcggttaagccgccagcatggttaatcgcatcaataatggttaaaggaacgttagtgataggttgttgagcagatcgggcaacttcacctgttacataggctttttgtgaacgaaaagcagcaatattgacatcaacttgaggtgattcgatgtacttcgataacttatcagtaatcatcgtacgcacctgagtgaccgtttttcctttcacatgaagtttaccaacatagggataaaaaatcgtcccatcagaatgcacccaattacccgtatcactagcactacgatattgtcctgccggtattgtcaattcaggatgatcccaaacagtaaccataatgacatcccccacaccaatacggtattcatactgttgtaattctttatctaactcaggattaggacgtgcaatagcagaattcacccgtaaattttcaattaattttggtgttaccggataaacgtttaccaaattattaatatcatagttactatcatcatcattgattatttctttattataaacagtaagaccactcccaggcataacagtacaaccacctaatagcatagaaccggacaatgccagaactataattaattccttaatattcatcagaaatttatccttaaaaaataataaacaaaaaagaatacagaaaatagtattaattataatccccctcacaaaactagattataatataataaaatataatataatataaagattttgcttaagggccgcaagattccaggctactggtcatatcacttggtaaaaacaatagaaatcaacttaatagctttgaaaaattcagattattaaataatagtagtagtaaattcattaattattttattatttaatatatcttataagatattattacaaacagaaagtaagagcagacctatcaaataaaagacagtgaggatatttatcagaatttatcaagaccaagatacatgctctcgatgacattgtgaagaaaacagatacctacttacatcaaatccgtgttcatatcatcgactttggtgcttgaaatggtgacaaaaaataaaaaaatagacaatcaattcatcaaacaactccaattataaaaccctaagtttaatcatattgtaaataatagctcggtagtatcggatatttttagattgttttaactttaaagatcaccactttgtacttttcacgtttatcaactaccattagcagttgttttatatcgcagtagaagatctgaaaattggacatattccacaaaaactttatcaactgggattaccatgaaaaaatctactatactaagaatcgccaggcccactgacaatttaactcaaattgctgaaatgtaccgccgaggtttaggatttattctcctggagcaattcgaaaatcatgaaaattttgatggcatcattctcgggcatccaaatcatctctggcatctcgaatttacgcatcatcgtggcacaacagtaggaagatcccccacacaggacaatttattggccttctatataccagaccattcagaatggttagatcagatatcattaatggaaaatgctggctttattgcagtcccctcttacaacccatattgggatattgaaggtaaaacatttgaagatattgatggttatcgggttgtattacaaaacacagtattccttgcttgattattaatcgatcttaagcatacttgccctaataaccaacccacacctacgttgttttacattacgcaataacattatcaaaactcagctattgacactgagttttgatatattcttgcaagtatttcgtttgctgttcgttctcaacaatcattcttcggagatcgaaataatcttgttcagttgctgggttaagtcgtggggtgtctgcatggcccacgctgccggaggagccggcttggccttgatgacaggtggctgcgatgcgcaaccgacgatgaccagcggcaacatcattgcgcagaacatcaatttcagatttggcattagcaagttcctttgtatgctgattatccagtttagacaggagccttattcgctcctgctgattaacgatttcattctgctgctccagcaactcactctgtagcttaactgtcgtatcaagctgtttggtatacttaccgtaatagtgataagccagaagcgaggcaagcgccagagcaataacagtataaccacgagagttaaacttcataatatcgctctacaaaagtgaaaatgctttatcaatgacctcattgctataaggttgactaccattttccatggtaataatggacttaataagctctgtcataaatactttattaaatacatcaacaacctgatcgcaagtcactcccgtacctttacatacgtggttaatataggcatcagtattattttcattagtaggagcccatcgtgaaatgatctctttcactgttttaaggccatatttccgattgtaattatgcaaaattttaatcatcgcccgaagaccatattcaggaccaacaaactgacagaaagatttatcagtacgctgtgatgcaggcatcagaccttgccagtcatcaccccaacgaatattacctgggttattatttcgaatacctctgctcataattcactcctattgtttattacctgttttgttattaacaacttttcttaagatctgaccaaaatagtcagtgcccagataaccaataatgacactgctgatgtaagccaaatccgtgctcataccaaaaaaattcaacgcatcacggataaaccaagcaatcatggcacacataatagaatccataattgtcgtccaaaatttaccaccgttatatcgacccctgagataagccattgcggcagccagcgccgcacctataccttgttctttgactgacagcagccataaccatagctgcatccagatgtcaggctgtttatccatgtatttcatccttcactcccactcacataaatgggaatccataggctgccgtgtagccttaattttgagttaataggaatactgcgaaatcagtagaataagaaaaggccacacatagcgcagccttaaattttataaggtgattacttacatttaatataataccaagctcatcaacaaattctgcgggtgtatcattatgtgtaagggaatgataataattaacaaatagatatatatcctatggatttcaagatggatcacggcggcaagggagcgaatccccgggagcatagataactatgtgaccggggtgagtgaatgcagccaacaaagaggcaacttgaaagatgacgggtatagagcattgtagtcactcatccatgaacctccttaatattaagactaaattacaacgtataataaaccatagttcatggtaattatgcacacctggtaataaatctctcaaagcaatttggttaataaaacgtttagcaagcaatttttttaagcttggatcgtgtatcttttttctatacaaaataaaaaaactaccaacctctcgaattgcatgacgactaagagatctttttaacgatttctcacctttaatttcttttgagattttaataattgaattaaccacagtaatataactatcagctcgatgatataattttttactttctcttgagcgagttattgattgcaaattatgtcgataacaatacaattgctcctcacaaaagccgattcgattcgctataagtgacaaattaattgtccataagatatcttcatgaaagatattttccataaaactcatttggttatttataattaattcttttttaataagttgtaaccaaacaaaatgtggccattctctacattcaacgcaatattttatccactctttacctgttaatactctaccataaggttgtctacgtgttattcttctatttccttgtgagaatggatcttttgtaaaactaactccattgccaattaacacatctaatctctgttcaatagcgtgatcaagccattttcttaatatttgtggttttagccaatcatcactatcaacaaataaaatccactcacctctcgcatattttatgccataatttctagctattgaaacaccacgattttcttgattaaagatccgtattctattatcttttctttcatattctttaatgacttctaagctattatctgttgaaccatcattaataataatgacttcaaaattaacattttcttgtgcaaaaattgaatctaacaaataggttatattattctcatcattaaaaacagggataataatagtaatatcaaactgaaacatctaccatccttttaatgagttagttgtttttgataaaaataccattttcataataaaaatgccccttttccccattgctattcacataccatacaatgttttaagtatcagttatagatgggattgaaaatttctaccaaaatagtaaatcattaagtacgataatgataaaaatatgcattgggaatttaggtattactatctcctgtaaagatagtaacagtatcaaaaatctattggaacagtttaaataaatcggtaaatgtagcagataaaattaaaaatgatattaatttaaaatggcttatgtaatctatattaaaaatacaattaaatacttttaggatgaaaaagtaaaatataatcaagcataagaaatagaaagaaataacagaagaggaagtgaaaaatattaactatctttaccaatcccaataatatgacagacgtgaggtttatcataccctaattggcaaataatattattatataccctatggatttcaagatgcatcgcgacggcaagggagttaatccccgggagcataggtaactatgtgaccggggtgagcgagtgcagccaacaaagaggcaacttgaaagatgacgggtataaacactattgtgaatattatctctatctaatttataattaaattatttaagataatataagaggaactattcaactaattgtaaaataagcgattaaaatattaatgcattatcctatagatatttaacattgaaaatatattaaattataccggaaaataaaatattacatgaaattattaggtataaagccatgtgatttaaatagcatttaaaaatttaaaagacaatattatcccttatttattaatgcgaaaatatttagcattctggataacatggcaagggagacaattgcactacaattctttttcctgcaatgatgcgttgttggcttttcgcctgcactgcccgtttcccatcccaacgtagacgagctcttaaaaataactcaccatgagaaaactgcggattcaaccgcatagaaaaagtgacgggtagcatatccaaacgataatgcatctcacctactgtcaacacttttccttcaaccaccgtcaacaatgacacctcaacgtttgccgttctgggtagagaggcccgcatggtcacatccccctcaatcagacgtgatgcttcatgctcaatagcctcactaacacaaccagtcatcagcaaacacaacaagaccaaccctattttggtcatgttaggctgatcctacgttgtgacaacggagtatgctgcccatccaacaagcgctgtagtgttgtctcatgttcaagccccatggcaagacctctactcagcatcgtagaaagcggctcatgaacgttttgtggtatataccctgacgtaacccgacgaccacaacaaaggctaccattttcatggggaacatttgttaaatgaatgggtaacgaattctcaattttcatactcgcattcccaaagattcgttctgttgagagccaatcggaagttgagcttgcaataattcctgccaaaactcagcatgatccaacatacttgaaagactctcttcaaaaacagcctgattcagccgacttgctgacatttgccgataaagctgcaccatcagcgttgactcatcaaaaccaaagtgaagatcaaactgataccaatgacgattaaagctggctaattgacggaaaatcccctctccgaccgcagtgatatcagcgacatctatctgtaaaacgagctggtcacgttcaggaattaagatcaaagagaggtgaaggtgctcatcaaaacagagagcagccacaccttcatgatttaaagctaagtgcggcaagccgaatttagcagcaaattcagccaaaacttgattgacgatggctatcacatccatgggttactcctactagagagggcaatcagaccaacttgaattaccaagtagtcaaacaaacgggttacccccgcagaaaagggactcagtttactaccatcgccttttacgcctctgtcactcaagggcaattcttttaataaaaaggtcaccccagtgattatcaaaaaccaaacaccggaatataggaaaatgctttttttccttaacacattctgcctgttaaggactgaaatcttaatttgatattttcgtttttctatacctttggtggtgttagtggattttaaaaacgagatcaaataacggtatccattgataagagcgcacctctcggtacgcccaagcttattatataacactgatctattttaccagcattacaccacgccagtcgccgcgcgcaatgcctgaacatgattctgatagagttgttgcaataattgcaaaacatctttcatgaaattattattcaatgagatttggtcttcactcttctgtttttcatgttgggcaatagatgaacccacttcatgttccttggctttagcctgagaaagtccctgttctacctgcacagaattattggacataccctctaaagatttcatcactgaggttaataactgctgattgctgttacgactttcaaaaaccaaggtaagagatttcaaagtgctcttgtcagcatcttgtgctacattccatactttaccaattgctgcccgatccgcatcgctactcttgcccaactgttgcaacttagactcgattaatttgttacgaccagcaatattgctttccaacgtcttctgctgcttaaccgcctgactgtttttaacggaagaaaaactacctatcagccctgaaccaagcgtcattaagcctgaaaccactgccatggcaatcatcaatttggcaccatgtcgcatctcatccacttgtgatttttgagcatcaatggacgctttattctcagtgtcacgctgcaaaatacccagttcacgcatcctctttgcaatctcaaaaagtagcgacatcatatccagcgtgttatttaattcttgtccgacatttcctaaacgactgggatcgaggccctgtttcggtacaatcaattcaaccttatccgtgagcctcgttttttccggctgttgaatagcagcttcatgtgctgtcggtgtcgacacaaagttgtcagttccaacttcaacaccattactggaagtaaccccttgactactggcgttatcattaattttcatctttttattccctaaatttcctgtggtcggctggcaaggttatttatcatgtctccccgggcattaagcatctggaaaatcatttccatcacattttggaaagactctaccaggtgggacaactcctctttgagcctgtccataacagcttggaatgcggtcaattcgctacgtgaaagttgcacgtcagcttgtcggttagccgctttactctggaaggccgcattggtagtttgagcagcgccattagtaacatcaactcccgaatcgcccacctgcatagccactctcaagccccgagacgtggtatttgctgctgtacccgcggcttttgcagaaaattccgctgcctttactgccatcttagccgtcatctcagccactttactgcccattttagcgcccattttcgcaatcaaaccggcagcagaaccaccgaaactgactgccgccgccgccaccgccatcgtaatctcaatcgctgttatgactggccctagccatttcatggtttccttgctgattaaaccatcttgagctgcttgttgtagtccctgagagactacccccatcactcctccgacaatcagcaaagcaccggctaccgcaccaacaccggtagcaaccataatcgcgccgatcacaattgaagtaattgcactaatccagccaaagatcttagaaaacaatccagatttctgcgcctctttggcagaattttcagcttctttaatcttctgctggttctcttccattttctgcaagctttgctgacgtgctcgctggatatcctggattttgagactcgtctgaatacgatcaagcttgctggtcagctcgcccagattaatctctatttcctcaagtgagtgcaacaccagagaggtcaaccacgaagttgctgtcagctttgctgtcagttcctttatcagacctgttgcctgcttagcctcttgcataaccgatttaagcctggccatttgttcttgatcagggtgagtattcaccaccgtcaatggcgctggcaatgatacccctcgtgacttagcggcatcagaagacaacgagctacccgcctggctgggcgtaacgtgctccgcgcttttcgaaggtgtagttgcgaggatttcaccaaccggagaactattgaccaccggttgaggaattttagattcactaacttgaaccattttcctgagtcctttttattgtaatagcttctaacattgcactggaactggcagccagagcggcctgttccggcgaagctgccgcaagttgttgagccgagtagaagccactctcagccccatcaagttctcctaattgcaggagacattcggcagcatgaaatggaaaacggggctcattaatatcaagcatcgctccgtagctatagctttgaactgcctgctccagttgccccattgcctgacggcatgcccccaatccaaggaagaatcgggaatcatagtgatccaacatacacaaagcctggaatatcttatgtgcatcctgccatttgcctgactgatactggttaaacgctaatgagtaaagttgctccaacgtatcactagaaatatccttcaacatggcaagagtgccaccatcatgaagaaaagattccagctcttgtgcatattggtcagaagtggttgatgtttcttgatgctccataatcattccttaaattgcgccgagaatattacgtataatgctgtcatatttttgaataaaacggtttaacgcctcaatagccgcgttataacgggaactagcctcatttaaacgtgttgttttttcctggacagtattgtttagtggacttacacgatcgttaactgaagtcgaaaagttggctaggcgattattttccttatcatattcgtaagaattctccagacctgccatagctccactctgtttattagaactttccaaaaatgtcttaatggagatttcagaaccagaagatatcttccttagcagcttatattcagcacttttctcaaaagtgggctgatcgctaaaaccatacttcttatggtccagcaaattgaaagagttatcatcaatcttaagctccccattagccgctaatttcgcattaatctccgattgaataacactgtaaatttttaactctgcggtcaatgtcgccagttcatcacgcaactcaagtcgttttttatcatgacctgacataaccgaaacaaaaatatcgattacatcatcatcaagacgatccggtgttaaattaaaatgaaccgcagccaaaaaatcttttaatgtccacgtttttaatgttgagctattcaagaaagattcaagattattaattccattttttatttggctatctaagtgaccaccctcgacaaccgcgtcggctggcaggaaataggcaatcagttttttcaagagctccttattttcagtaacaacactagaatcagatgtaatcttgatccccttatcaaaaataagattaaccaatctatcaagctccgaagatccagaaccttgtagttgagctagcgaaaccttttctagatctgccaagaaaagctgtgggtcattttgatatggcctaatttccaccttcaaactccttatacaataatgccacgcatacgaggtgggcgacgaagacgctttccctcttccagagagggaggttggttgcttcgtaagcgattaacttctgtcagcaactcttgctcagcattctgaaccagagtaacgtcagtatgaccaaacagttctgtacccacattggggttgatgccaagagactgccacatctcctgcaatagttgcagtctgtgatcactgtctttgatggctgcttcagcagcttgcagtactttggcgttaggttcctcttgcatccatgactcctataataaagagagatattgattcttcctgtcaacgttggacttttttttgttgttttctcatttgatgtagcgatataacgcaactggcttctaactcgaaccagccaggcaccacctcatttgcgcctgtccagcgatggtaaaagcgggccaaacgttcatcattaaggggagagtcaaccaaagtattaacttgaccataaagccggctacccggcccaagcatggccatcgttgctgttgccaacagataaagaggcgcaaatggattcgcaagccctcgacgctgccgggtacggcgtaacatcacgatccaaactcgcggcgcatcataacgccaggcaatttcacagccttcataccacacacgccagccaagagggattgggctattccccatacagtgaggctgtactgaataaccttgctcctcaaaccaaggggtgagcggatcacggttcatagacacactctaccaagcggttggatgttgatctgttgggtcaactcttgatacgaaagcactggcaagccgtggtgatcaccttcaattaacttacgaacataacggcgaatatccattgatacgatcaacaccggtttattctgcatctgtgttaaatcacccacggttttcttcatctgttcaaggaaactttgcgtcaccgctgggtccagcgccaagtagctacccgcgctcgtttggcgaatacctccccggatctgctcctctacctgttgatccaacagataagcaggcaagatattgttgccattagcatacttgtaacagatgtaacgcttgagactactgcgaatatattccgttaattgcaccacatctttttccttctgcccccacaccaccatagcttcgagaatcgtacgtgtattacgaatagagatgtcctcgccgaccaaccgctgcaatatctcagtcatccgctgcaatggaattatacgcatagcctccttgaccaattccccataactcccttccatctgctccagaagataacgggtttcctgcacgccaataaaatcttcggcatactcccgcaacacatgtgacaaatgccaggtgatcacctgagacatggataaagccgccagcccggatttcaccaaacgttcctgatgtgcttccgctacccacaaggtaggctggttaggtaatagaggttccccttcttcataagggatagccagtaattccaactgactgactggttcctgcaccagtaaatgcgctgagcgcagccgaccacgggcaacgggcacctcttgtagctggatcaggtattctccttccttcatcccttcattaaagcgcaaatggatacccggaaatggtacgcccagatccaaatagagggcgcgtcgtacccgtattaattcatcattcagtgaaatagcttccagctcagcctgtaatcccgcatccacatcaataagtaaaggaaccgtcatagcaaattcctctttctcactcagttttccagctttggccttactgccgctcttggctttagatttggccgccggtgcgcctgctccttgggctaacaggctaggaagatccgcttgttggctggcgttagcttggcgctgacgctggaacagcaaatagccaccacccgccaccaccagtgcaagtattaagaaagttaatgtagggaatccaggaataaggccaaataccaccaataaaacaccgccaattaatagtgcctttggttgagcaacgacctgatcaccaatctcactacctagatcagaggcgtcttccgacgaaactcgggtaacaatgatgcctgccgtaatcgcaatcaatagggcaggaacctgagagaccataccatcaccaacagtcaaaatggcatagagctgcaatgcatcggacgctgacattcctttttgggtgacgcctatggttatcccgcccaaaatgttgacaaagatgatgagaagactcgcaatcgcatcacccttaacaaatttcatcgcaccatccattgaaccaaacatctggctctctttttcgataatgctacgcctctccctcgcttcattgacgtcaataacaccagcacgcatatctccgtcgatactcatctgcttacccggcatggcatcaagggaaaaacgagcactaacctcagctacgcgctccgaacctttggttatgacgataaattgtacaatagtgatgatcagaaagatcactatcccgactatcaggttgccaccgacaacgaaattaccaaaggtgtagactattttaccggcatctgcttgcagtaggatcatccgggtggtactaacggaaagcgccaaacgaaatagcgtggtcaccagcaagaccgcaggaaacgcggaaaactgtaaaggggaattgatatagaccgccatcatcatgagcacaacagagatggtcatattaatggcgatcaaaatgtccagcaggataggcggaagcggcaaaaccatcatgaagaccacggctagcaacaatattgccaacatgatgtctttacgttcaccaatcagccgcaataactcaaacccacggttcataatagagccccttgagcgagataacgctgataagcactgcgtgcttcttccagattcccttcctgttgacaagcacggctaacacagagccagagggcggcgctttgttcaccctgttcttgtaagagagtgcaatgttcttttgccatgctccccttttgcagtttaagtaatgaaactaccaaggcacgacgcccttctttatgttcaggatgcaaagccagtaatgcatctaataaaatacgcgctcggtcaggatgaccgtattgaagttgaagccagccgagcagcaacagagcgctctgctgtttagcactgagagtcatggtcataccttgtgcaacaggtgcagagccatctgcaacaactgttcatcttgattcatgttttccaacagggagacagcatgctgtaccctgatgtcattaccttgttgcaaaattgtacgcagaccactaaccgcctgacgaaaatcatgtggacgcaacagagcgtgaaacccatcttgcgggcaggcaaaagccaacaaagcctgatcagctttgttggccggataaagacgtgcggcgtgagtctcaacggattgaccatcgggcaataacgcgtagcgatcgggtaaactaacctctatctcttcccgactgatcgccgttagttgctcaattcctatatgggcggcagcgattttgctcacgaagcgagcacctcacgctgtactcttagcaaagaacgaaatgcctgatgcagcaagggcaaggttatatgtcgttcatctagtgtcacaaacaataacagacgatcttctcccagccagccacaacgcaagggcagttcgggtccctgaccactgaaagtgagtagcatcgctttcaccattgcctcttttccctgatgccagggaatttcacgacccagccaaagtgttaatgcgccaccatagcgctcaatttgcaacgtaccagaatactcaaaatcaatttggatcaaggggctagaagcatcagacatctccatacccaaatcctgacaaaactggagtaactgcggctctatccagttcatgatgctccctctcccgaccacaattcgtcttcttctctctcaattgctgcatccagcgccagttgacacgcattcagcaggttttggcgctgctcttcatcactgaacacttccaccggaatcaagcgaattaatcgcttcaactcccggtagaaatgaatttgagtttggctatcctgcaatcccaaagcatgaccgagtatttcaacatctcgcacattggcccaacgtttctcaaccagagaaacgacatcccccataaggtcagaaggcccgtatgccatgattttccccctctaccacgcttttccataactgttcaacttgaaccgataaactgttaagcaaacggagtttatgcatgtcactcatcacacgttccaacttaataggatcaagttgccgctgttggctgtccagatcagcactcaacgctttcatgatgaatcctgttacttccatcagggaactactcttgaaattggattgaatatcccgccaggcagccgacaacccttgataatccatcacggcatcacgatagatattgcgtaatgcttgcaagttgccaaccccatttctagctgctgccgtggcatcaggcgtaatgcgggctcccaactcgatagcaattccctgctcttgcgctaaacgtgataattcttgttcaaccaatgtcaatatggcatgtgcctctggcctgcctgccagcgcatcacgggcctgacttagcgcataaaattgctcactcacctctccagagaaactttccagataagcctgtagttgagcaatattagtcaactgagcactatttaagtgagagatcaatgccttgactttttgttggcgctctaaatctggcaccttctgcaaatattcacccaccagtgcctcaatttctcgcaccctggcatgtccatcgctaactttacgtttggaaagtggcatatccttgcgttccgaaaatgcaaaagtcatctcttcggccgcatcagcaaaagactgggatgctgataccagcacgactttctctccctgaaactgacctaccttagcctgttcctgttgtgcggtaaccccggcacccagttctgataaagttatcgaatgaagatgattctggataatatccatagtctaccctgtcatatcagagttaataatgaacaaattataaaggtaccgtcccagtgcctatgccaaaatcagtcgtgaatttttagcaaaaaccgccgtaactcaaggaagagccgattgctctgatataaaacgtatataccctatggatttcaagatggatcgcggcggcaagggagcgaatccccgggagcatagataactatgtgaccggggtgagtgagtgcagccaacaaagaggcaacttgaaagataacgggtataaaacatgagcaacacactgtgaataaaataggaaatctcaccgataaagcagagaacagccaggtaaactccaaccattttctaaaaactcccgactcaggttgcaatcccttcctcctccccttctttatagtattcgtagcagaggttatataaacgatcatgaagctttcccttgaccatattcccggcaaaatgcgccacgccattaatgaatgccggctaattcagattcgtggccgggttactcaggtcacgggtacactccttaaagccgttattcctggtgtgcggataggcgaactttgtcacttacgcaatcctgacaacacactgtcgcttttggcggaggtgattggattccaacaacatcaagccttgttgactccacttggtgaaatgtttggtatctcttcaaatactgaagtaagcccaaccggagccatgcaccaagttggcgtgggtgattatctgttagggcaagtccttgatgggctaggtaatccattttccggcggccaattgccggaaccacaagcttggtatcccgtttatcgggatgcgccggctccgatgagtcgtaaacggattgaacacccgctttcactcggtgtacgcgctattgatggcttactcacttgtggcgaaggtcaacgtatggggatttttgccgcagcgggtggcggaaaaagtaccctgctatctacgctgattcgtagcgccgaagttgatgttaccgtgctggcgctcatcggtgaacgtggccgtgaagtacgggaatttatcgaatcagatctcggtgaagagggactaaaacgttccgtgctggtggtagcgacctcagatcgcccggcaatggagcgagctaaagcagggtttgtcgccacatcaatcgctgaatattttcgtgatcaaggcaaacgtgtactcctactgatggattcagtgacccgttttgcccgagcgcaacgagaaataggtttagctgccggcgagccgccaacccgacgaggttatcccccatcagtgtttgccgctttgccacggctaatggaacgtgctggtcaatccgacaaaggttcgattaccgccctctataccgtcttggtggaaggcgatgacatgacagagcctgtggcagacgagactcgttctatccttgatggtcacattattttgtcacgcaaactggcggcggctaaccactatccagctatcgatgtgttacgttccgccagcagggtgatgaatcaaattatcactcctgagcatcaggctcaggccggcctgttgcgcaaatggctagctaaatatgaagaagttgagcttttgttgcagattggagagtaccaaaaagggcaagatcccgttgctgacaatgccattgcacacattgaagcaatacgtaactggttacgccaaggcacccatgagccaagtgatctaccgcaaaccttagctcaattacagcagataacaaaataatgattagccgtttacaacgcataaaagccttgcgagtcgaacgcgctgaaaaacatttttccttgcaacaaatgaagctgcaaacggcccgtcaacaccatcagcaggctttgcaaaccttgcaagattactgtcaatggcgaatagaagaagaacaacggctttttgcattgtgtcagggccaacctattgaccgcaaaggtcttgaacgctggcaacaacaagttgccctgttacgcgaaaatgaagcgcaattggaaaagcaagtggctgaaatgactgaaaaagtggagctggaactccgccaattaaaagagtgtcaacgtgttctgcaccacacacgccagcagcaagaaaaatttaatgaattgggtcgtcagcaacaagaggcgatccgggcccaaggtgaataccaggaagagctggaacaagaagagttccatcgccaggaaagagtgtaaaacagaagagtatgaacccactgacagctatcggcagaaaagatgtctcctccctcccaacgtcgtcacccgcagaggcagacgcagatttgcaacgccgtttcgagcaagctatcacctctcatgccgccaacacgcgccagtcaaccacacggcagacggaacaaccgttaaccaatacaacggcaaaccatgaaccagcggatcaacatgccacacatgactcagatgaggagcttccactattcgactctccccaaccggcaattgatgatctgcgcaagcaagccttaccattgacaggccatgacatgcctgcaccacatcaaaatcagaaaaaaaacttatcggcccccgctcaccgccttaatgagatcgctaacgagataaaggaatcgctgtcagcacccggagtcccaacacgtcagtcaaacctgaatgccttgtctgattctgacctaaagccggttgatatcacggtaacttctaatcctgacacagcaatgatgcagacaacacctggccgatccccatctcagccagacacacaacacagcgccattcctcaccaacagacagacccgacgttacctatacctgcccgcaatgccaacgaaatcaaccctgcggaaggaaaaacacgagatgaaatcgaaacatcccatttgttggtattaaaaccaaaagagtccgactctcaatcctctgactctggtggatcagacggaaaaacacctttcttcccacaaacccaattcctgccgggggagcgcatcctcgccacgatgcaagcaacttcaaccatatctccccttttggaagtgttgatcgacaaactgagtgtggagatcagtatcgaactaacccaacagccgcgtccggcgacattacatctgacacttcctaacttgggagcacttgagatccaactcaccagcgagcatggcaaacttcaaatagaaattttagcgaatcccgccgctcaacaactcctgaaacaagcacgttttgaactgattgaacgtttacagcttctttacccaacacaaactgtcgaactctcccttccgccccaaacggatagtgaacatggatcacgtcaacgtcgcagcgtatatgaagaatggaaaaaagatgcatgaatagcctgaccttatccaaagtttcattggaagaattaacgctgcatcaggccctgagtcgccatcagcaacaatttagttgggataatagccatctcaccctagatgtgatctctcctccccaaacgttagacaaggtactgatcgcccattggcagggacaaactttttccttttactgccatgcagccgagctagcgctgtggctcgcacctgatctacaacaagcggacctcacatcactccctcaagatctgctgttagcactactggaatatcagagcaaaatgctacccactctgtcatggtcagcactgagtaccacgtcagaacgccgccctttgtcagcttgcttacgactccgccttgaacggccaggggccacattgccgctctggttaccagaaccatcccccttaattgccatattgccagaacgtcaacctagagaatgcctgcctattccattacgactttctctgcaatggggagcaataatcctgactttagatgtgtttcgtactctggaatcaggggatgtgctgctactgcccccacagcaacaaccagatgaccctttattagcgtatctggaaggacgcccttgggcctactttaaatcccatgaccataaattggagttaatcactatgcacacactctctcctgacagttctgacaacactctgccagtaacagatctaaacgatctggaggttcatgtcagtttcgaagtgggccgtcagaccttggacctacagacactcaccagcctgcaacccggctcattactcgatcttggtgttccttcagacggtgcagttcgtattcttgtcaatcaaaaatgcctgggttcagggcggttggtggatattgagggacgtctgggagtaagagtcgaacatctctccgtggagaaacaatcatgatccaactaccggacgaattagatcttatcatcggtctggctttgctggctctgctgccctttattgccgtgatggcaacctcttttctcaaactggcggtggtattttccttactacgtaacgcgttgggcgtacagcagatcccacccaacatggctatgtacggtttggcaattatcctcactatctatgtgatggctccggtgggtttcgccactcaagattacctgcgtcaaaatgaagtttcattcagcaatgcgcagtcagtagataaatttgtggaagagggcctgacaccttaccgaaattttctcaaacaacatattaaacccagtgaacgcactttctttatcgatagtacccgacaaatttggccaagccagtatgccgatcggctagaaccagacagcctattgatactgttacctgcctttaccgtcagtgaattaacccgggcttttgaaattgggtttcttctttatctaccatttattgcaatcgatctcattatttccaacattctgctggcaatggggatgatgatggtttctccaatgactatctcacttcctttcaaattactgttatttgtcctgcttgatggctggacacgcctgacacatggccttgttatcagttatggagattgaatatgagtaatgctgatattttacatttcactagccaatctctctggttagtgttaatcctttccctgccaccggtactcatggctgcggcagtgggaacattggtctcgttgatccaagcactcacccaaatacaagaacaaacattgggttttgttatcaaattaattgcagtcattatcaccctgttcgctaccgctacctggcttggcaacgaactctacagcttcgccaatatgacctttcttaaggtgccacagatcaaatgaccctacctgagctccagcagcaaatacttgcttataccctgttgttaccacgcatcatgagttgctttgtgatatttcctgtgctcagcaaacagatgctaggtggtgggttaatccgcaacggcgtggcctgctcgctggccctttatgcttatccaacagtagcaggcagccagttgcccacattaagtagcttggaattgacgctgttgctcggtaaagaagtcctgcttggtttgctcattggctttatcgcttctatcccattttgggcgatggaagccaccggttttattatagataaccaacggggagcaacaatggcttcagtgctcaaccctgccctgggaagccagacctccccaacaggtctgttattgactcaaacgctgatcacactctttttttccggcggcgcttttcttagcctgctcggagccctatttcagagttataacagttggccggtaacacagtttttccccaaaattaccaaccagtggctccactttttctatggtcagtttagctatctactacagctctgcgctttaatggcagcccctttgctaatcgccatgtttctggcagagttcgggctggcactgattagccgtttcgctccttctctcaacgttttcgtattggcaatgccgatcaaaagcgcaattgccagcctgttactggttatctatatccagttattgatgcatcatgcctatgataaggtgctgttaatgctctccccagtacgcatgttaatccctattctggaggcaccatgagcggagaaaagactgaaaaacctactcccaagaaacttagagacgcccggaagaaaggccaagtaaccaaaagtaacgaagttgtctccacctcgttaatcttggggctaatcggcatgataatggtcatgtctgaatactatttggagcatctgagtaaactgatgctgatcccggctaatctgctagagaaaccctttccccaagccttcaaccatgtggttgaaaacttgatgcaagagctggtctacctctgcctgccaattctaagcgtttccgctttgctatcgctggtatcacactttgctcaatatggttttctacttagtggacactccatcaaacctgatattaaaaagatcaaccctgttgaaggtgctaagagaatcttctctatcaagagtctggtggaattcatcaaatcgatacttaaagtaggactgctctgcaccttggtttggattactctggcaggcaatctacaagcactactgcggctgccggagtgtggaacaagatgtattgttcctgtactcggcataatgttaacccagctcatgaccgtatgcggcatcgggcttatcgtgatttctattgccgattatgcttttgaacactaccaacatattaaacagcttagaatgagtaaagacgagatcaaacgggagtataaagagagtgaaggcagcccagagatcaaaagcaaacgacgccaatttcaccaagaattacaatcaagcaatatgcgcgctagcgtcaagaattcatcagttatcgtcgccaacccaactcacattgcggtaggtatccgttataagaaaggagagacaccgttaccccttattacactcaagttcaccaatgcgcaggccctacaagttcggcgtattgccgaagaggaaggtattccggtgttacaacgcattccgctggcccgagcactttatcaagatggcctgatagaccaatatattcctgctgatctcatccaagctaccgcagaagttttgcgctggttagaacagtggcaagatcgcccgccggagccgtaatctgtcctcaaacagcactttttgacagtcaaactgcatatatgaactgagtattggcatttaacataccttgccaatgctcaattgcaacaaacgaaatacaatttatatttgtctcttaagcgttacgatttaattacataataacaacaaatttaatataaattaaaattactgctaataacctaacattgcttaaacaatattataataaacaatccaattaggttaggtgagttttctgtttttatcgattgatcaaatagctgaaaccagattgaatttattattaagtgatttatattacacgtagctatttggatttcactttgcgctgacttctacacctgttaattcgttaatattactctagctatcattcattacaattactaacgtattatgaatcaataatagattgcctgaataaaaggagataactatcaatatcagtcaagacaaaagactcggtttatatacccgttatctttcaagttgcctctttgttggctgcactcactcaccccggtcacatcgttctctatgctcccggggattcgctcccttgccgccgcgatacatcttgaaatccatagggtataactaagggtgaaaaatttacaggcaatcgttatcgtgcaaaaaactgatcgcttttcactcttcgtttataaagcgtttataaaacgtgagaataatacagtattcggcccaaagaacattataggcccactagcaaaaatcattttaattaaaagatgctatagttaatcatcaggttaaatacgtaaaattattcttcactgtctattccaggcagcgaaaccaaaaaaatatctattaataataatctgatttgtatttttaagacataacaccaacagatccaggacaatagaatgaacggcatcacaacatcagggaagggaatggatatctcacgactccaacgtagcatgcctgcctttaacgttatagagcacccccaagaagggatatatatcctgctcgaaggtgaaatgacatggcaggacagtaccaatacctacgatatctcccacaacgagctgctttttgttcgtcgtggcagttatgcagcaaaaacgcgtagcgatacttgcaaactactctggttgcctctgagtacgactttcctccacgggtttctgcaacgctttggtactctgctcagtgaagtcgagcgacacaacatgtcaacacccgaattaattgcatttacctcatcccctctgttatctcaaagtataaatgggctggtcgatctattggctcatgattaccccacagcgttgggtcaactcagaacagaagagttgttattgttattagcatttggagaacaaggtactttgctcatgtcagtattacgacaattgagcaatcgccaagtggaacgtttacagagttttatggagaatcactaccttaaggagtggaaactcagtgaattcgctaaagaatttggtatgggattaaccaccttcaaggagctgttccgttcggtatacggaatatccccacgcgcttggatcagtgaacgccgcattctttatgcacatcagctactactcaatagcgagatgagtattgttgatatctcgatggaagcaggattttccagccaatcctactttactcaaagctatcggagacgctttaattgcacgcccagtcgagccagatatggcaaagagtaacgattggctaaaataatctgacgttttttacaagttaaccgttggcctgacagataaaataaggccatccccaatttaatcgacaagagtgactagcagcaagatgagcatagcatgagccagcaagaccataatcagactcgaaccagcatgtttcttggccgcaagatctctgtcacgcagtcgggaattccacgccgggatcaattactcggaaaatcatcggctattcagtatcagaatagagacattattaatagccaacagtttattttattacagcgtttgctacccagacatctgctggaaagcttgatgaagtccgtctggtttcgtagacggttaaattgcgggcaagctttgcggcgtgatgacttacaacaactcatcagagcggcggcagaactggaatgtgactggaataaggtactgggtgaccgcataaacctagctgacagacatcttttacagcactgggtattacagccgctatttgactggtggctccgtttgttggagccagagatagacttctggttcactgaatttgatcagctacaaatccaagaacggcaactgcatgctaaagcgcatttttggcagcaagccgaaagcgtctcgtctcaatgccgggaacaacaacataaagaggttacatctttgcaaacagcgcttaatcaacgcaagcaactattagaaaaacggctgttgacaacggaaactcaggcgcgcgaagcatggcccaactggtttactgggctagatgccctccaaactggcggcgacctaaccgcttttatgccggttcccgaagcactgtcatcctgttgggcgtggttgactactttagagcatgacaccgaggcggctactcacttgcaaaaatggctctgtgcccgtttcctgtgcctgccacaggacaattttcactggcaatcgacgacctaattattagaggaaacatgcaaactctactcaatcatttggccagtcgtttaggccagaagccttttgtttccgatagacaagggcattaccatttgcacattgataactacaacctgttttttcgccaacagggaactgaacttgtgttatccagcccgctaagctggcgccataacccaaaagatccgtcaggcgctgaattattgaaaacactattgcaacaagttacgcgctggggacgccatgctccccatgcattgaccttagatgaatcagagaatcttattttggaagcacgccttaaccttgatagtttggatgttcaaatactggaacagatgctaactctgcacgtcgatctactggaacaagtcatggctttattgtcggaaacccaatctgcccctcaatggaaacaggcaatatggcaaccatgaaaccatttcaaaagctatgccgttcgctactgttgtcgttgagtatcagcggtgtgatgctcccctctgcttatagccaagatctggattggtttcctgcgccttatagctatctggcaaaaggagaaagcttgcgggatgtactggttaatttcggtgccaactatgaagcatcagtggttgtcagcgacaaggtgaccgatcaagttaacggccattttgagcaggacactcctcaggaattcctgcaacatttatcctctctctataatctggtctggtactacgacgggagcgtgctttatgtattcaaaaacagtgaaatacaatcgcgcctgcttaaacttgaacgaaccaacgcaacggagttacagcaagccctaaaacgttccggtatttgggagccacgctttggttggcgtcctgatccaagcaaccaactggtttacgtatcaggccctcctcgttatcttgaactggttgatcagactacatccgcactggaacagcagtcattgctgcgtagcgaaaaaacgggtgccttgacagtggaaattttcccgctcaaatacgcctcagtggtcgatcgcaagatccagtatcgtgataccagtattgaggcaccgggcatagccaccattctctcccgcctgctcagtgataccaatgtaactgctgttactggtgaagcatcatctccttctatgggagaaagctactcaagccgtgcagtcgtacaagcagaaccctccctaaatgccatcattgtacgggataacccggaaaggatgtccatgtacgcccatttaatcaacgcactggataaaccctccgcccggattgaagttgccctttccatcgtcgacatcgacgcaaacaacctttcagaactgggagttgactggcaagtcggcatcaacaccgggcctcgccatatcattgatatcacaacgtctgccagggaaaaaacagagatcaaagaaaaaggtgaaagcatcggttcagccgcattaggtagcctggttgatcgccgtggtctggattacctgctcgccaaaatcaccttactagagagtaaaggaagcgctcaggtgatttcccgcccaacgcttttaacgcaggagaatacgcaagccgtcattgacaacaatgaaacctactacgtgaaagttaatggcgaacgggttgccgagcttaaaagccttacctatggcactatgctacgcatgatccccagagtcatccaagtaggcgattcttctgaaatcagtttagacctgcatattgaggatggtaaccagaaacctaatagctcaggacaggatggcatcccgaccatcagccgaaccgtcgtcgataccgttgccagagttggacatgggcaaagtctgctgattggtggcatctaccgcgacgaaatgagtcaaataacacgcaaggtgccatttttaggcgatatcccctatctgggtgtcttgtttcgcaataccagtgagcaagttcggcgatcagtacggttattcattattgagccacgtctgattgatagtgggatagcccattatctggctcttggtaacggacaagatctacgccctggattactggcaacacaggatatctctaatcagagcttatcgttgggcaaagttctagggagtgcacaatgccaaccattatcctcagctcgtcaaatacaagaaacactacgacaagcaggtaaaagctcatttttagactcatgccgaatgggtaacacttacggatggcgagtcattgaacagcaatgttcactgaaagaaacctggtgtgttcgtgtacaaaataaggcgaatagatgagttggaaaattcgcttttaccgcggactgaataaaagtattgaggtcaatttagctgaggggcgtttagccatcggctcagaccccctacaggcagatatcgttctggtggatgaagatgttgctcctgtgcacctgatcttagaagtcgaaccagactcaattcgcctgttggaatgggccggggaagctgcaccaagccagaatggcgaaccgctgtcaccgggtgcgacattgcaagcgctggcccgtcaggaagttggcccgttattgtgggctttttgtgaccagcaacatacattcccaagccaactagctgaacccgtggtcacaccacagcgccctgcccggcaaaatcgcagccgggtagcaggcggaatgttaatactttgtctggtactggcactcggtcttctggcgctacttggacatgaagggtggcaaagaaaccacatgtccaatggcatagccgagcaagaactacgccgttttctcagtagtgattcagcctatcgccaagtgagcgtacaaatgatgcccaatcacgggccgccgttgctcaaaggttatgtggctctcaaccaccaacggctggccctgcaacagtatctcgatacccactctctcagttatcggctggagctacgtactatggaagagttacgtcagggggtagatttcattttacaaaaattaggctatgcccagatccaaagtagcgatggtaaacaacccggttggatccgccttataggcgaagtcactgataccagccagcaatggaacaatatcgagtcactactcaaacgtgatgttcctggtttgcttggcatagaaaaccagacgcggttcaccggtaaccacctcaagcgactggatatgttattggctaaacatgatttacctgacacgctgacctacaaggataaaaatgatcgtatcgagttcataggtcaactggatgaacaccaaacgcataacttctaccgcttacagcaggtatttaagcaagaattcggcaaccagccggcactggtattactgaataataagcagctcacccgcaatgatgagctcaatttcgacgtccgggccgtttctctcgggcgtgtgccctatgtggtactcaaaaacaacttgcgttacccggttggagcaaccacagaaaacggtttaataatcgaggccatccgtcaagatgcgattgttattaccaagggtaagcaacaatttatcgtcaaacttaacaggagcccagcttcatgatgacatccctggaagcacgactgtttggtgctgatccctcttatgtcaacgaaatacaacatcgcctttctcaggcgctgaacgatatcaaacaacgcctgagatgtggcggttcggtacaagaataccaacaatggcaactggaggctgatgctatccaagctgcaatcacaatacttaacacaacagaaggagaccatcatggcccaaatttttagttccgcaacaacagtgaatacattcgataaggttgctgaccagttgaaagagccagctaacgcagccaacaaagatgttgatgaggcaatcacggccctcaaaggcgggcctgataacccagctttgctagctgatttacaacacaagattaacaaatggtcggtcatctacaacatcaactctaccatcatccgggccatgaaagacctgatgcagggtatattacagaagatctaatcatgacacgttcacttaaagggctactggcagatattgctctggttggaagcggccatcactgccatgacgaagccaatattattgccgactggctgatgtcaggcgaagaagagcaagaagctgcaaacctgattcggctctcttctctaacgaaccaaggcaaatatcaacaggctctggattttgggcgggaccttccctggccaagtttggaaccttggttagcattgtgcgagtggcgtttgggtctggcatcagccttggagcagagactgacgcgaatggctggcagtgacgatccacaattgctctccttcgtcgacggcatgcgggaacaactggctcatgaataggattgaagggctatcctataacaccgtgtcgcaaccaacggtacagccttcggtcagttccaagcaccagcacagctttgagcaagcactggaaaccacgcccgatcagcaaatgttgaaagagcgccagcaacgctggcttcagggagaaccgctggaaaacgttttaggcgacttagatccagcgacacaacgcaaagtgatatggcagtggtatcaggctttatcgtctgataaacagccctcccaacgtgctcagttacaggccaagctgattgccccggtacaagagcgcttatggtcgcagtttggtggcttggcaggcaacatcaaaccaccactggatatgccagaacttagaaagattgttcgtgaattcgcccccacaggtcgacaacaggagacggttcttcttgaggtactcggcgaaattaagcctattcctggcaatgagtacctgagtgaccttatccgacaagagttaaaaacgctgatcccccgtaacggtatggtggataacctgatacgaaactcacacaaacccgatttggaagaataatggagcagccacaacaccatgaaacaaggacagacaacctaaataaactgcacacacctcaaatttggaggaactatggatctaccacagataagcgagacactgatcaccagcctggatgaacttaatacacatcaggccagtgccgaaaatattgcgagttttgaacacgctatgtccaatcaagatcaggggattgaaaacaatctgatcaatgaattgggtcagcttagacagcaacttactcaggcgaaacaagatttggaaacacagttagcggtctctggtagtgatcctaacagcctgatgcaaatgcagtggtctctgatgcgaatcaccctgcaagaagagctgattgccaaaacggtaggacgactcaatcaaaacattgaaaccctaatgaaagcccagtgaggagctgtgaagaaacactatataatctgcgttatgctcgctgtcctgatgctaactggctgtaaaatcgaactctataccgatgtgagccaaaaagaaggcaacgaaatgttagccttgctcagggaagcgggcatttcctctgataagcagccagacaaagatggcaatatcaagctgttagtcgaagagtctgatgtggcacaagctgttgaagtgctcaaacgtaaaggatatccacgggagaacttctcttcgttacaagatgtcttccccaaggacggccttatctcctcaccaatagaggagcgggcacggctcaactttgccaaagcacaggagattgcccgaacactttccgagatcgatggcgtgctcgtcgcccgggtacacgttgttttacccgaggagcaagaccgactgggcaaaaagctatcgccagcctcttcctcggtgtttattaaacacgcagcggacgtgcaactcgacacttacatccctcaaatcaagcaactggttaataacagcattgaagggttgagttatgatcggatcagtgtcgtattagtgcccgccgcgggcgtgcgtcaggtaccgttggcaccacgctactccactctgttctctatccaagtgacggaagagtcacagggacggttgattgggctgttggtgctattattagccctgctatttatcagcaatctggcacaattcctgtggcaccgcagcaggatacaataatggtaacagcattaacgccctatcagtttcggttttgccctgccagctatattcattctgatcatctatccccagaatggcttaccgtcttatcttctctacctgagtggcgacactctcccaggcttaatggactactgctaacccaatttgatctaaatgtggattatgaattaccaactggattgggaaacatcgccctgttagagcaatcgtgcttagaacaacttcttacctggctaggtgctttacttcatgggcaagctatccgccattgtctgatggcgacagaacttcgccacttgcatgactcactaggaaaagagggacatcgcttctgcttaaagtatctcgacatcattatcggcaactggccgactggctggcagcgctcgttaccaccagaaatcaatgcaaactattttcgtaccagtgccttacagttctggctaacggcgatggagtctcctcctattgatttcgctaagcgcctgagcctgcggcttccctcttatgaaaacctcgcagcctggcctgtcagccaggcagaacgaccgttggcacaagcattgtgtctcaaattggctaagcaagtgaacacagaatgttaccatttattaaaataacgacagggcatcttcaactgtctcctgaactccagatactgcgtaaagcggactatcagacctgcctcagtgccaaatctctgcttgaggctgcccggctccaggcacaagaaattgaacgtgacgcgcaggcagtgtatgagcaacaaaaagagttaggttggcaagcaggcattgatgctgcccgcgcagaacaagctaacctgattcatcaaacccagttgcaatgccaacaatattaccggcaggtcgagcaacagatgagcaatgtagtcttgcaggctgtacgtaaaatcctcaagaattatgaccaagtttccctcaccttacaggtagtgcgtgaggccctgtcattagtcagtaaccaaaaacaggttatcctgcgcgttaatcctgaacaggccgcaacagttcgcgaacaaatatcacgggtacacaaagatttccctgaaatcggctatttagagatcactgctgatgagcgtcttgatcaagggggctgtattttagaaacagaagtcgggatcattgatgccagtctggatagccaattagaagcactgatgtcagccatcaataaccaatggcaaagttgacgatgccatcacgcctcaaagagataaccagttttcgacggaaagtgaaaatttcttctgccgttattaatattctctatttcgacaaaacattatgattcactctacttaatatccaaacatctatctcaaaaaaccacttaaggagtgaccattgtctcccatctcaagtattaatcaccaaagaatatttcctacccagcagctcgataccacagccgttaatcaaccacagggtgaactgtcgggtaaatccctgaaagtctcttcccccagaccggggttgttagagcgcctctcagcggcgattcaacgcaatctaccgggccactccatgctcgatcgccaactcactactgatggcaagaagaaccaagagagccgcttctcgttcagcatgataaaagacagaatcgttcactttgcggtgagcaccacgttagggagtgttcgaaattctgcgagtaagcacggcggcgaaatcaccttcaagttcgcccagaccaaggggacctttctggatcaaatcatgaaacatagtgacaccgccggcggggtttgtgaatccatatcagctcattggataagcgctcatgccaaaggggaaagtgtcttcgatcaactctatgtgggcggccaaaaaggacagtttcatatcgactctctggtttccattaagcagttacagatggatggtatagcccaagatgtcgatcaagacactatgaccgaatcttggcttagcgaaaatggcatccaaccacgcatgaaaacgataacctatcaaagcgccaacgggcccattaattacaaacgtccaatcgaagtcaacggtcagaccggcagtaatggcacatcagatctactaaacgctattctagacacaggcgataaaggttctagctataaaaagattagtttttcaggacagatggccgggcatgccgtagccgcttatgtagatgaccagaagggtgttactttctttgaccctaactttggcgagttccactttccaaacaaagaatcattctctaattggttctctcaagatttctggtccaaatccatgtacaacaaggaaatcggtcttgggcaacatttccaagtcctcaactacgagcctaaaacacaatgacacacgactatcaccaacttatagaagccctgttctctaaactcggggtacctgcatcgcctactgaggatggtatctacactctcgaagttgacgggcgttttcaagtattgattggctgttatcacgacaactggctacagttgttctgcgaattagggtccgaaatcagtcatgccaacaatctttttgggcaacattggccggctcatgttcaaggtgatttggatggacaagcaattttgtggtcgcaacgccctttgggcgaggtagacgtagccgagctacaagcttggttagaacgctttattgatgatattgagcagcgcctgacacctaacacaacccaacagcctaaaaatccgccgccttccttggtgcgggtttgatcgctaaatacaaaccactaccagaatataagttcaatgggagcttcaatatttagttccctttaaactgccaaggcaaaataatcaagcaaagagccaagcaaaatgctactgcctccatgcaaaaaacccgcaactaagcgggtttttacttattaacaactttaactactcaggatattaccttcatcgctatcgtaaagttgctaatagacttaatcagttaaattaagataatacgataacatttaccgcagatgggcctttagcgccattctcaatagagaatgagacttcctgaccttcttccaatgttttgaaattattactctgaattgcagaataatgaacgaaaacatctttgctaccatcttttggggaaataaagccaaaacctttatcgttgttaaaccattttactgaaccagtcattgaactagacatagaattttcctttaaatttattaagttgccataaggcgttatgaggtctgtttttcagttttacttatgggtactaattagaaggaattcgcaatgaagtggtatcagggataacgctaaatggtgaactgctttaattttaatacttttcattaatacttttcataaataggtctgtacttccaaaccagtgacgctattaaatcacattgattggtcattagcaaattttaatttcatttatttttttctattagtgttctcatttatcctaaatttcggctttatccatattgcatggctttaccatagccataactagctaattatgaaaggtttttatccacaagccctatttgccgagattacggcactgagtttgaatttaccattcctccctagcaccctaatcagactacaacccgtaacctaaaattaatgaaaataaagctaacatctagtctgtaaataaccatcgcagttcacgagctgtgataccttaggatacgggaaaaaccgagtaccgttatcgacagccggtccatgagcaatacgacattgtgctgtaatagcgcaagtagtatctccgattttccaaattaatacatcacaagactgggaagcactagacatataccacttcgcaatacactcttaatcagtgagttcaatagacttatcggccccactgcctgcgtttgtggcagacgcaatcccgagaagcaatgcaactaatataaatttcttcatatttatacccgtcatctttcaagttgcctctttgttggctgcactcgctcaccctggtcacatcgttatctatgctcccggggattcactcccttgccatcgcgatccctcttgaaatccattgggtatataatatgagaaaaaccgcatattgatttcaaatggttatcattagaatgatattatttaccctataagattccaatgaattaaatatgaattttcattcatcaagcattaattagacagagcaatatagataaaccccggataaacagcgcttaaatcaaacctgaaccaaatcaattcactataatatttatatactttaaataatgcaaatcgtgatggaataatactgacaaaataaatattatgacagtacattggaagttacatctatgatattgctttaaaactggataaatatttcaatatctccacaagcgttagtaatttcaggctattcatctgtaatgtaatcatgctaataacaaagtcataattaaagagacgctataagaaaaagatggaataatgttaataattaattccagcgttaaacagtaaccgaattacaataaaatatattttcagataaacttatttatgtaaagggaattgttctacgaactgtaactgaatttatttctagcaagaaaatttggaaaaatacacaatgatctcattcaacaccttgaaaccctctcattttgaactatatttattttaaccatgtttgattatgaaaaaactattcatccttatgaggggttaaaaatgagcgcagtctttgaatgggacccaaataattctcaggtatataccaaagattatggaactggatctattactctttcatctactcagtcagattcattcgataaattaggtggcgctaatttcacaatgaacgctgaaagtgaaacattaacactacaaaatgattccgataatatacctatttattggccagaatttaatcgccacaatgacggaacaatgactgatagcggcaaaggattaggcataaatgtatccgctggaacattattagtagactatcggctaaatgatcaaaaccatccagttgatagaagccatacagttgcttatttagggtgctctgaaagcactaattttattcttaaaaattcaggctccttaagcatcaaaaatccaggaactgtatttatgtttatagattatgtcgtttccaataaaccgccaaaactcatcatgtcaggaaacagcagattcgaaataaaacaaacaacaaaaatagaagatgatgttcccgcttttatatttctagccagtgaaatttctctaagtgaatcatctaagctcacttttgaaagtagtaatctctaccttggagatggaaactttaattactgtaatataagcatacaagataaatcgacagtgaccttgattaacaatggtataatgcaaaaaaatgacatagaaaaaaacaagacatggttcaagcttaaagcaggttctccttcactaaacttgaaatcttttgacggtatccacttccctctctatcttgcaacgtaaaatatccagaaggtctatttaatttcattactacagaaggtaataatggaggaaaagttacaattcatttcgcaaaaccgggtctaaaggaagactttaatactttcacaaacaagatatttaataaaaaactcatatacctcaatggtcaaatagcagatcaaaaatactttaacgtcagttatggaaatgaatttatcaatgctcatgaaattgccactgtaacaatatcacttaaaaattaattttactctttgtggtacgatatcgaataaggtaacgcaccatcaagtcgttatttcatcatgatagactatagaaccgacattccgcactgaattcgtaatttgttgttttaattaagaattaacaagcatatgaattttatacaaacaatttgaaatcagtatattacagatatagctgcggaatgacagttttatacttatatagcatatttagacatgaattaataaaactgaaaaagatcgagctattgcttcacaaaacagtcatcagaaatactctgctttgttatattcaatcactgcttaaaatggtcaaaatgtttataaaaaacaattatatgctcataaaaacacattaatattataaatatttagcgagttacacatcatttctttaatatcaaacaaaacaaacaacaccttaatattaaaataaaaaatgaaggccacataaaaatgtagccttaaacctaaaattaaaaaccggcaaactagccaaaaaatcctatatcttttcatttataacattgcaaaagattattctaatttacaaccagtttataatacatcaagaataaaattaatctgtggaaattccaactttaaaacaagtctatttttctttttcgctagaacaatcttattctaacggaattcagatctcctggcgttgtacatataaccttcaaacgtttatatcctccaccactattattaccttccgccgctcttgaagctttataattaggattatcacctggataatatttaattatgccgtcagaagtccttgcatcttggaacacccaaataactccaacataatcccaaaattgtgtcataacatggagccttagtggcttaataacgctatgcgggcctatcactggaacgtgtacaagtacatcagtcaaatcaccatctgccttgatcatataatcagtctgcaaatttcctccagataagtttatatcacacatgtcacctatgtaattactgagtacataaacatatgtagaaacttgtgaatcaatgagtttttctaattctactattttttcttgcatttcattcacctatgttattagtaaattaaacaaaaaccataaaaagattttgaataaatttaatctttgcattcaaaaacacaatacaaatccaaaattaattaatttgataaactaatcctctaagtacctcctcaagattgaaatagattgctggtagtaaactttatcttctattcgacgaaagcatgactatttttattcatcatattacgttgttaattaaatatagccaaagttctattccttgccactaaattttaaaattattttatgacatcttatccatcttcatattgaaatactaaaaacccataaaatcatttattaaaaaaattaaattcagtgaatcattcttcttttaacaccaataaacaacataaaacagaataataaataagattccaaaatagtgctacatctgataccaccaataattctatgtataacaatgagttgaagaaggctatgtgtagcagaattatgaaacgttatttataatgcattatagtattcaatataaaatccctatcaaagagacccgtcatttggcaatcaataataaaacacatggaaatcagaaattttcttttttgaaatttaaatcacatatcagggcaagggcgcgaacgttttttgaacttaaattgcacgtaacactacccaataatggataaaaaacacccaatccaacgctattcaagtattggtcagtgctttatttaagcaatttattcaaaatatacccgtcatctttcaagttgcttctttgttggctgcactcactcaccccagtcacatagttatctatgctcctggggattcgctcccttaccgtcgcgatgcatcttgaaatctattgggtatatcctttaagaatcattcaattatcgtataatggtattagctaattgaaattaattctcatggctattttaggtacgtaaatatctttcttaaataatatttaatttctgaataaaataatataatcaatattctttagtgaatctagtaatttcaaatagttatcattagaatgatattatttaccctgcaagatgccaatgatttaaatatgaatttaattaaatgttaattatatggtgaatatggataattacagaaaaaacaatagataaatttaatttcaatcaaatcaacacattataaaatttaaataattcaatatataaaactaaaccattcgaagaataaaatattaaagttaattgtgcttaacatttaggttcaaagataaaatgtcattcttattaattattactgaaagcaaccattaattcgatttaatctttagaataaatttaaaagtcataataattcattccagtattaaacaataacctaattacaaaaatattattctttaaacaaactcattaacagtaaaagtaactaaaccattcactaaaatttaacttttttaatgagaaataaatcaataaaatatgaatatgagttattcattaccttgaaattcatccgttttgaactacacttatttcaaccactccttaattatgaaaaaatttaattttatgaggaattaaaaatgagcgcagcttttaaatgggaccctaaaaattctcaggaattcactaaagattatggaactcaagtcattactttcacaccgactgatcaacaagcacaaccctatccgttcgataaattaggtggtgctaattttataatgaatgctgaaggtgaaacattaacgttacaaaatgactctaataaaatacctatatattggccagagtttaaacgtaacaatgatggaacaatgactgacagcggaaaaggaatgcagttcattatatcctcagggacattagaagtaagttatcaatcggaagatagaaataatacagttatttacttaggttgtgctgaaagtactagttttgactttaaagattcaggaatattaaacataataaatccaggaactgtattttttttcatagattatgttatttcaaacgaacttaagccaccaaaactgactatgtcaggaaacagtaaatttaaaataatacaaaaaacaaaaatacagcctaaagctcctgcctttatttttttagctagtgatatttctctgcatggatcatctgagcttacttttgaaagcaataaaatcttcttaggagatggaaatattaattactgtaatataaatatacaagataattcaaaagtaacactaattaatgatggtatagtaccaaaaaataacatagacaaaaccaaaacaaagttcaatctcagatctggaactcctatattaaacttatcatctcttacaggaatcaattatcctattaatcttgacaatatagaatatccaaaaggtttatttaatttcattactacagaaggaaaaaataaagggaaaattataattgacatttcaaatccagattctaaggagaccaatctaagtgataaaatattcagcaaagagctcatcgctatcaatggcaaaatagcagataaaaactcttttaatataagttataaaattgcaatacgtcagggtaagcaagttatcactacaacaatatcactcagagcataacaccaatcaggaggagctgtattttctacattacgctatccaagaactagagcatttttagcataaaggcttaccagctgtcagagtggaatttaccttgcatgtcataacatataacttatcaatggcaactgccctgatattagagactaatagtacaaataaaagataataaatcgctgtggatttattttcactcttagcaagaaatggtggccttttacgacaacctcctcatagagaggttttaagctaattcgataaaatcacacgtcattacttccaacatcagaaaaaacacaattacattaaaataagaaaggctacaccaaagtgtagccttaaattaaaaacggtccttccaaattatatctcgtttaatttataatttttcaaaaaataatttgagtttacaaccagctttcaattagctaaaacatagtcaatctataaaatgcaaaatcataaactagtacattgtaacagcaattcctgctatcccatcactgtcttcattaattatcataaacttatttccaccaccctcagcagaaaccctaaccggatttgcatcatcgtagttaaattgttcaccaacccaatacttaattgtaagtagcggatctcttgaatcttggaacacccaaatcttcttaagcagagcttgactttgtaccacagtagtgaatttaagtaccttatcctgatatgtagtaggacctaccggaggaattattgtatatctggattgctcagacgctgagggaattaactctggtgtttgaggtaaaggtccaacagttacttttaaactactacttagatcattcttgaccgcagtaataactgttcgcactgatgcatcaagcatgctttctaatttctctatttttactttcatttcattcatttcactcatttcattcacctatattattaataaattaaaaggtataataagattttgaataacaccaatctttgcattcaaaaacacaatataaattcaaaattaattaaatcgatgaactaatctctgagcacctccttgaattttaattttatttctagtaataaactttctcttctatcccactaaagcattaccatttttattcatcatgttacgttgttaattaaatatagccaaagttctacgcctttccactaaattttaaaattatttcatgacctcttacccattttcacaccaaaatatcaaaaaccacaaaataatttacatcaaaaaacaaaatcagttaattattcctctctgaggaccaataaacaatataagacagaataatatcatgctcatgcttattattatttcataagagaattaaccatcctaaaatcatcacactcaggtgtattcacaattaattttacgattattgcagtatttacaatgcattataatattcagcatatatttccctaataaaatccccttcggagaatcacttcatttgacaatcgataatgaagcacacgggaattagaaattttcttttttgagatttaaatcacatatcagggcgggattccactttgtatttaatttaatcaaagataagttgactacggaattcccctgaccaaatggctcttcgacgtttagctgcctgactgtcttttatgctggtattctgtttaatcacacttaatgcaattcggttaaaaagcgccatttgtgcagccccatcaggatctttgagtgagatagcatcttctcgaaaagtgacatctaatacccaatgcagctcgttttccaccgacccgtgctttcttattgccttagccacgatttccgcctccaacggtagcgagctgacataccagcgtgaattacgatggggaggctgaccttttacgcttcgttcactgacgacttcaataacactttgtattgaaggccattgccgccgaaggacctccggtaatacggcacgaatttgcatgacatgccgaaattctgtccgtccatgaccgctatttttctgcgtaaattcaacaagctcatcactctcataatgcgaagcaaaatacgatttgacccattcatggagggtcttttgattgcctttgagacccacaataaaatcaccaccgcgctgagtaattaacgcaagggtttctttctggcaatgcagggcatccatagtgacaatcgcgccatcaagcgccagtaattcaatcaattgtctggcaaccgggccttcctgacctttgctttcggctgcctgatggtatagggctacaccggattcaacatcataagcactgaccacatgcagggcttcaaataatgtccccttacaggttcctctcagggtttttccatcaatggcgataagactttttcctgccctgacccgacgctggttgatccaggcataaaaggcttcaaccagtgcatcttgctctatcattttgataatattagcaatacagtgacgacgaggaataccgtgagtaaaatgcgtgtattgtttaagccactcgctctgtaactcaccaaattcctgaatcgatttccagccagaagcgccgcataatacagcggagaaggctaaaaaaatcacatccattaactcatgttttttattgatgtcagaacgggggtcttctatcttgctgataaaattaaaaatactcattattaggatcgctttttatggaagagggagatcttaacgttttaatgagagaaatgcctataaaaaatcatattctgatttttatttaaccaaaatgaccttattaaaaatgtgagatctcaccctgaatcacatataggcaaaccgattagttcaatcagctatcttaattgtccatacccaatagaaagcacacctttgttctgcaattaagaaattataagattgctaattttaatttttataaaaaatcatacaacttcatgacaattaaaatatagcgaaaaaacgccattcacagagagtaaaattctcatattgaaattaatatcgtcttcatattgtaaccagttacattaataacccgccaaacacatccatcccgacacaggattttcacctatcattattttctcaaccacaaagaattgtttatcaacttaagtaattttcttcaccaattatgtccgagtaaatctgcatttacacagcattattcggttagcaaatagtaataaactattcccttacagggttatgatttatacccttcatctttcaaattgctgctttgttggctgcactctctcaccccggtcacatcgttatctatactcccagggattcgttcccttgccgtcgcaaagcatcttgaaatccatagggtataaaccattgaaagttttttaccaaaaacaacgaaaaatactgatatcaggctccattcaccagtaacaaaaccacaataaaatagattgaaagtatcttgaaatccacttattttgaactatatttatgttaaacaaattttaattatgaaaaatcaatactaagggctaaaaatgaacgaaaaatctgaaaactcttttatttggtatccggatcgagatcaaacatacactgaagagtatgataacaaaactattcctccaatatactcatttaataaagaaattggcaccaccttcacaatggatgctggagaaaatacattaacactgtcttttgataaaaatgatcgccctagcgactatgatattaagtggcctattcttagtccactacagactgccaaagataatccgggcaataaaactttatcaaaaacaataaaaatatcatcaggaaatctcataatatctggaaaaaaagaaaaacctgttaacttttatcttaatcgtgaaatttcaggcaaacatggacatagaattgaactacaaaactcaagtaccttcaaaatagaaaatgctggtattgtaagaattagcaaccacataaatacaaaattaaaagaatcaacagtggctatgtcaggaaaaagccagcttactgtagaggttgtggggactgtagaaaaaacacaagaaaataatgaagtgctaaaaactaatatttcactaaattgtgatttctttatcacagaatactctaacgctatgcttaaaagtcattttatcgatatatataatagcaatattatcttacaagataatgcacagatgtccataacttctcaaaaattaagaataaaaactgatttagatgaaaaaggtcaacctttattcgacacaaatttcactctaaaagccggagcaacttcattaaatctcaactctatagatggcatccactttccattaaatattcacagagaaaactaccctaaaggtgtattcaatttcatggctgaaggaaaagagaatacaggaaaagttgtcattgatgttgcaccaaaagatgctaatgcttatggcctcaatacattgctacgtaaaaatttcacagcgattaacggaaaggtagtagaaaccggagatcagatgaaatattttgattttaattatggaaaagatatccgcaacggtaatcaggtcggaacgataactatttctcttagaaaccctcatctaaaattatcttagtgaatgtattcaaagcacggcattgaatacaatgctgtgcctcccggtattaacagatcatccctacgccatacacctataaggctaaagtgaaccaaacccattagaagcccctcacacttacccattttcccccttgctcccattcggtaacgctttctatactcccaatcagcgcctttccctctatatcctgaacagcgagatttctcggaggctaattgatgaagcaggaagtcaatcaacgacgccgtgcctcatccgacaactacggttgggatcggatcttaactaacagcctcaaaatgatggcgttgtgctgtgacagcgcgaaaattgcccgtagccacgccagagtattaattactggtgaaagtggtaccggtaaagggctaatcgctaaagccattcattataatagtccgcgggctaaaggaccgttcatcaaaattaactgtggggctttaccggagtccttacccgaaaacgagttgttcagccatgaaaaagagttcgaatgtcctggtggcagccacaccattaaaaccgacattcgtttgatcacagcaaccaaccgctttactgatatgcgcctatatccatatatcctatataaggaatcgatatgaaaaataaactcattagcacacagcaagctatggagcatttttatgacggcatgaccattatggctggcggttttataggcgtaggtacacctcctcacttggttaccgcattgctgaactccggtgtaaaaaatctgaccttgattgttaatgatactggccgtatcgacaccggcattggcccccttgtggttaataacagggtgaaaaaagttatcacctcacatattggcactaacccggaaaccggacgcaaaatgcttgctggagaaatagaagtagaactggttcctttgggtacgttgatcgaacgtattcgctgcggaggagccggtctgggcggatttctaaccccaaccggagtgggtactattgtcgaaaatgggaaacaaaaaatcaccctcaatggaacagactatttgttggaactcccgctacgcgccgatctcgcgttgattcaggctcatcttgccgattaccacggtaatctgacctatcagttaagcgcccgaaattttaacccagtgatcgccttggcagcggacatcacacttgccgaaccggacaggttggttgaagtcggtgagattacaccggactgcgttataacacccggcgcattgatcgactacatcgtttatccaggagaaaactaataatgaatactcaacaagtcattgcccaccgtgttgctctcgaactacaagatggcgacgtgatcaatcttggcatcggcattcccacgcaagtcccgaactatctgcctgataatattcatattactctccagtcagaaaacggcatactgggccttggaccgattacagaagtacatcccaatctggtcaacgctggcggaaaaccttgcggtatcctgcccggcgctgccatatttgacagtgccctctcttttgctttgatccgaggtggtcacgtaaatacctgtgttctgggcggtctgcaagttgatcaacacgccaatctagccagttggatggtaccggggaaaatggtccttggtatgggaggagcaatggatcttgtcactggcgcgcgcaaggtcatcattgcaatggaacattgcaccaaagacggttcagcaaaaatcctcaagcagtgtactctgccacttaccgccatcaacaaagtcaacatgattgtcactgaattaggcgtcttctgctttgaacaaggccagttaattctgaaagaacatgcgccaaatgtcacattagagactctgcgggaaaaaaccgaagcagaatttagtatcgcgcatgatctcaaaatcatgcctattccgatacagaagaaataagcctaattagcagtatcattagctgattttatcagtactatcctaccgttccactaatctagacagctcagatgtgaggcaatggctgctggaatctgctcattattatcactgctcataaaccagataactcatcatcattatcattatcattatcaataatcacatcaagaaatttgaagatattggaatgactgtaattaaaacaaataaccactaaaatattaataaaatgaagtaataatccttcaagagcggtctctttattccagatgaagcatagaataattataatatatccgtcatctttcaagttgcctctttgttggctgcactctctcaccccggtcacatcgttatctatgctcccggggattcgctcccttgccgttgcgatgcatcttgaaatctattgggtataaatacttattgaattctcataaaattgtataggtgtttttataagaagagtcttagcattcttatttaatgaaacaattaacatataattgtagtcatgtcagcccatttaatatagaggcattaattcaagcacatgatttttatagtttttgtcaattatagttatagagataaattaatttatttttccattaatacattgcacttaatctttagactatctagctacagtgatcatcacctattaaaaaggtgatttttatcacatcttaagatttaaaaaaatcagatataatcattttattttgggtgattaaaatcacactatccgttaattttggttttaaagaagaataatatatgtaatatactcctacttttagggttaactaacattattatttttcaaagagaatataaatggattaccaaaatatatttaaattaaccatgcaagaaaaacaggatctctttttagcattaaataaaattgattacgatcctaccggtagtgatttatatattcatttagttaaatccgccatgatgtcttttttacctacaagagtaatatcagccctaaataaacaacgaacatctataaaccctagaccatatattatattaaagaatgttccaaccgattgtgaaatctttttctctccatcgccaaaccaatacaccccctcagcaaaatcagggaatattagtgaaaatcttttaacgggcatagcctcactcattggtgaaccctattcaatgctttttgaaggtaaggaactcatcaacaatctcattccaactcatgagtcgaaaaatgaatataccggtctaggatttgatgtcgaacttgactttcatattgaaaacgcagccctaaaacatttagaacaatataatatttcaccattgggtttattacttacaggtgtcaggcatgatcctggcggccctttaacacgcatctctgattcacgcttatctattgctcaattaaagaaagatgatatagaaacattatcttcaccattatacagcataaaattaccttatcgctggcgacaatccacattagttggaaaagaagaaacgcatcctgtccctctcatagcagaaaaccacatattacccaacatcagtgctgtattttatcccggtatgataacagcaagtacagctaaagctgaaattgctctagaaaaattctacgcttcagttaaaagaaatgcagtaggaatatgtattatcccaggggatttagtctatatagacaaccggctaactttgcattcaagagataaatttaccccaacatttgataatataggaacaccattacggtggttacaacgcgtatttatctcacctaacctttggaatcatcgatatttaaatcaaatagagcatagagttttttctatctaaaaggaccaccagatgttaaatgttttcttttcaattctacctatattcttgctaattactcttggcttcctatctaaaatatatataaaggacgtttctagtttctggaatttttcagataagtttgtttactatcttttttttccttgcttattaatattagatattagtgaggctaatttctctggttctgacaacttctatccaatcgtatcaaccataagttcaacaataataatcgctattattattttcatcggtagatttttatttaacactacaccagatctatttacatccattttccaaggaggagttagatataattcatatgtttttatagcactttcacaatcactattcggcagtgagggagttgcattatccggattttttgtggcctatatgataattattaccaatattatgagcgtactcgtaatgaatcattatggtcacggaagtaagaaaaatctgggtggtgctatccttgctttagctaaaaacccgctaattattggtgcaattattggagtattgctaaactactttaacattcatattaccggcccaatcagacaactttttatttacttatcgaacgcagctacaccattaagcttaatgtccgtaggagctggattgatcatcagcatgcatataaaaaagatactttcgatttcttatgcgactatacttaagttggttttaatgccactcatcaccatattgataataaaatatttaggtgtatcaggcgcttccgcaaacatcgctattctatattccgcagtgccttgtgccggcaatgcttatatattagctaaacaaatgggtggtgatcatgaggcaatggcatctattattacatggacaacgttattatccattattactgtaactttaattcttggcaatatgaagttatagaaataggcataaaacagagcgtcatgatatagaaaacatattactcagaacaaatgtaatatgttttctattactaaataaccacgtcacatagtaggccgcttaatataagtcaatccgttttgaataatctgatcaatcgctaaaaacaaaaaaatataccgtacgtctgacaaacaccgcaggaagaaatataagtataaatttcatatattaaatacaaatagctttaatatgtttttggttaaaaaatttctagttatttactgccatcaaccatacaaaaataattaatcttataagatataagaatattccattattctcattcctaactagactatgatcggcatgagttggcgggagttatttttacaataattcaatatgttaattataaaatagtattatttaatttgaggaaagtatatgagtcccaagaatgattttaaagctttttctattagtaataatgctaacgtagtcagccaagaagggtatgaaacaagctcggctttaaagactggatttccaccagagaatattaccactcatttactcaataaggtattacgtcaatcttcagcaatatcgtctacaatagctaattttatcgcgacacaatatggcgatgatgttctggatgatggggatatagtcaaactcactactcagttaaataaagccttagaaaaaaagatcgcgacagaaattccaagtgcttcactaactcagaaaggaattgttcaactcacagataaaacaggcaacagtaattcacttgcggtcactcaaaaacttgtttctgatgtaaatgataatgctaacaacagattagcaaaaaaccaaaatggcgcagacattcctgataaaaatgcgtttgtgaaaaatctcggcttagcagaaaccgccaatttagctaaaaatgcggtaccgaatagtagaaaaattaatgggaaagcgttaaccggggatatcagcctgaacgctggagatgtgggggcatttaggcttggattaacaggaaacaacactgttagtaatcaagtcccctggaatgcaaataccgggttatatgatttgctgagacctggaatagattctcagcatatcgctcatttcaataatggcgttggaagctgcccagcttttcaattgaaagtgcagtacaaaaacagcgggattgcttatcgctccgcccgtgataattatggttttgaggaagattggactgatatttatacaacaaaaaataaaccaacggcagcggatgttggggcatttagactcggattagcaggcggatactctgttaataatccagtcccttggaatgcagacaccgggttatatgacttgctgagacctggaatagattctcagcatatcgctcatttcaataatggcgcaggaagctgcccagcttttcagttgaaagtacagtacagaaacggcgggattgcttatcgctctgctcgtgataattatggctttgaagaagattggactgatatttatacaacgaaaaacaaaccaacgccggcggatatcggggcatatgcaaaatccgaaggatctgaatttatccagccaaagtatattaatcaagcgaatataagtgatcttaccgcatggataaaatcattgccgcagggtggtcatgcattcagattttcagggaatgatagtggtattggatatgcgtggtcgggcggctatataacaagaatgcatgacatatgggcaggatttgtcgcgcattatgactatgccggtattagctttatccacggaaatgatggaggtggaaacacaaaagttagccgactttggacagataaaaacgcccgctccgacgctaacggcattctcagagtatccagcccagttgtagatattcatccagacggaacttacgagttaaccagcgaagctgaaggagtgacggttaagcgtatagatacagggaaatatcgtatcagaggctgcaatggttttgccaaagatggtgcgtggggaattcacggtggaactatcatcccggcagacagcaacgggttaaatctcatttgggtgcgtgaatcggtagacacaaccagcggcgatataaccatcgaatgttaccatcgtcaaaataaagacgctccagaatttgctcaaaataagcgtgtcaaaagcgtgactgcaacaggagaagtcgtttattaccatgatgctgaaccatgcgatattccagacggaagagtaattaatattcgtgtgcaactacctgagaagtcataataatgtaatcaggatcaggctccctaaaagggagccttaattatcaaagcaattgtactctatcaggcttacttacgacgccagcttgtcccttgcggcccatcttccagttcaatgcccatctcatttaactgattacgagcagaatctgccagcggccaatctttatttttacgggcatcattacgctgcttaatcagcgcttcaattttcgcaatctcttcatcatcagcctgaataccacggtgcaggaattgttccggctgttgttgcaacaaacctaaaatacccgccagcttgcgtaattcagccgctaagccattcgcggcatccatatcttctgattttaaacgattgatttcacgtaccatatcaaacagtaccgaataagcctctggcgtattgaaatcatcattcattgcgtcaatgaaacgcgcctcaaatatttcaccaccggccggcggtacagaagcatctgtacctcgcagcgcagtataaaatcgttcaagtgcggtacgagcctgctttaggttatcttctgtatagttaagttgactgcggtaatggcctgacaacaagaaataacgtaccgtctctgcatcgtaatatgccaatacatcacggatagtaaagaagttgttcagcgatttggacatcttctctttatccaccatcaccatccctgaatgcatccagtaattcacatacgggccatcatgggcacaagtagattgtgcaatttcattttcatgatgcggaaacatcagatcagcaccaccaccatgaatatcaaaatgattacctagctgtttactgttcatggcagaacattcaatatgccagccaggacggcccgccccccacggcgattcccaacttggttccccaggcttggacattttccacaacacgaaatccatcgggttgcgcttaacatcagccacttccactcgcgctcctgcttgtagttggctgagatcttgacgggaaagcaatccgtaatcctgatcactctcgacggaaaacatgacgtcgccattatctgcaacataggcgtgaccacgttttatcaacgattcggtcagcgcaataatctcctggatatgccgggtcgcacgtggttccagatcagggcgtaagatattcagcgcatcaaaatctttgtacatttccgccaacatacggccagtcagatcatcacaactttcactgttttctgccgcccgcttgatgattttgtcatcaacatcggtcacattacgtacataagttaaatcatatcccagatagcgcagataacgagcaaccacatcaaaagaaacaaaggttctgccgtgaccaatatgacacaggtcataaatcgtgataccacacacgtacatccctactttccctggatggattggcttaaattcttctttctgacggctgagggtattgaaaatttttagcatcgagattttccgtaaattcactgtacgtgtgttaaaaataacgaattgataattctggatttatgtccttatctcatcaataagtgctcgatatggcatagtccaataggatattgaaacctgatattaagcgctttgcaaggttggtgatcaagatagctcactgaaattaatatgtactgactcattatggtagatgtgatataaaagccgcctggtccaaatgccctaaccgggttaatcaaaactattattaggatttcaattatggtgactttccataccaattttggcgatattgtaattaatactttcgctgataaagctcctgtaactgttgagaatttcttgaactactgccgcaatagtttctacgataatactattttccaccgtgttattaacggtttcatgattcagggtggtggattcgaacctggtatgaaacaaaagccgactgatgcagctatcaaaaacgaagccaataacggtctgaaaaacaaccgtggtactttggcaatggcccgtactaacgatccacactcagcaactgcgcagttcttcattaatgttgttgataatgatttcctgaacttccgctctgagcgccctgatggttggggttactgcgtctttgccgaagtgatcgaaggtatggatgttgttgataaaatcaaaggcgtttctaccggtcgcagcggtatgcaccaagatgtaccactcgaagatgttatcatcgaaaaagtcactgtcagcgaataattcactgcatatgtgtacactttttatcgcagatttacatctcagcgaacatgaaccggcaatcactgccggttttctgcgtttcttgcgtgaggatgccattcaggcagatagcctctatattctcggcgatctgttcgattactggattggcgatgatgataacaaccctctccaccgtgaaatcgctagcgcattaaaaactgtacaacaacaaggtgttagctgttactttattcatggcaaccgtgattttctgctcggttcacgctttgctaaagagagtggcatcatattgctcccacaggaaaaagtactggaactgtacggtaagcgagtgcttattctacatggcgacaccttgtgtactgatgacgaaggttatcaacgatatcgtaagcgggttcataccccgtggatccaacgtctgtttctactattacctctgtctatccgtcaaaaaattgccgtaaaaatgcgagcaaacagccaatcggtcaaccgcagaaaatccgaagccattatggatgtaaaccagcaagctgttattgacacttttgagcggtatcaagctgactggatgattcatgggcacactcaccgcccttttgtacatgaagttcctctgcatgataaaaccgtctaccgcggtgtacttggcgcatggcatcatcagggatcgatgttcaaaataacggataaatcaattgatcttatctctttcccattctgattaatcaaaaacacccacatccaggtatggcaacgaaagtataaagtaacgcaatcgttttccttagcttgtgagcatgatatgatccgcggccttaaagcgttattttcattctggtggacgttaaaacacaggagcatttgatttatgactgcccaacctgatttagcaggaacagctcaacacaatgccaaaatcgccattgtcatgggttctaaaagcgattggacgactatgcagcacgcggctgatatcctcacttctcttaatgtaccttttcatgttgaaattgtttctgctcaccgtacacccgataaactattcagttttgccgagcaagctgagcaaaatggttttgatgtcattatcgccggtgccggtggtgccgctcatttacccggcatgctggctgctaaaacgctggtaccggttctcggcgtacccgtacaaagtgctgcactaaatgggatagacagtctttactctattgtacagatgccaaaagggattcctgtcggcacacttgccattgggaaagctggcgcggcaaacgcagctctactggctgcacagattttggctcgtcataataaagatttactgaaacgcctcagccattggcgtgaaacacaaactcaggatgtactcgataatcccgatccgcgggaggaagcatgaagccagtttgtgtattaggcaatggtcagctcggccgcatgttacgtcaagctggtgagcctttaggtatcacggtttatcctgttggcctcgatgcagaacccgaagcggttccttatcagaatagcgtgattaccgctgaaattgagcgctggccggaaacggctcttactcaggaacttgcccgccataaggctttcgctaatcgagatatctttccccgtctggccgaccgtttaccgcaaaaacagttaatggatagccttggactggcaacggctccgtggcaattactctctgataccaaccaatggccgcaattattctctgagctcggtaatttcgttatcgttaagcgccgcatgggtggttatgatggccgagggcaatggcgtattcatcccggagatgaaacagaattacccgccgatatttatggtgaatgtattgctgaacaagccattcctttttctggcgaagtttcactggtaggtgcccgcaataaaaatggcgattgtgtgttctaccccttagcacacaatttgcatcaagatggcattctccgtgccagtattgtctctcctcaagaaaattaccatttacagcatcaccatttacagcatcaccatttacaacaacaggccgagagtatgttgtcagcgattatgcacgagttgaaatatatcggcgtgatggcaatggaatgttttattgtcggtgataatttattgattaatgaactcgcaccacgcgttcacaacagcggtcattggactcagaacggcgcatctatcagccagtttgaattacatctgcgtgctattctggatttgcccatgcctcgaccagtagtcaccgcgccgtcagttatgatcaatttgattggcacagatattaatgcccaatggctcagtttgcccttggtacatttacattggtatgagaaagaagttcgccccgcacgtaaagtgggtcaccttaatctttctcactttgataaaaatgaattaaaaaatacattgcagaaacttatccccatgttgccacccgaatatcaaagtggccttgaatgggcgcaggaaaaattaatttaactaattatctaacactaacattggttatttatcgatcttgttctcttgatttgtgtccgcaatagtctcactgttaaggatacaaattaagagacagcgaggcacatatgaatacagccatgttaaaagttcgtatttctgaagatatggacaccgactctttttattctctgctattcctgtagggatatgagtttaaaaacgttttcactttctcaaacaactgccacatatactgacagccatgatttcgtgtcaccgtttcatgcaaggattaccacagacgcccaattttattcagccagggagaataagcgtgtaaaaacaataggttaaatttaggatggcgggccagtcaatcactgaccaatcggcttttatggacataaaaaacgggatgtttttctgaacacattgacaacgtctcaattattttcgccatttttttcatggtactcgggatcgggtaatttaagcgtcggagctgcccttcgccacacgatccccatttatgtcagtaacgatagaaagtactgatggataatttttttcatctggcgtcgttcattgcgggatataggcgctatgataggcataattcagtccgtttagtggtttgagattattgacaattgatcagattgcaaaaattggactgagttccctccgagtgatctactattttaaaagttataatgaactctgttcggatgccaaaatcaataataaatggtcacatcaggcgtatgaacattgaggttttgacgaaacagaacaagtcattttgtttccgcaaacaactcacctaatcacgttccccatgctcttaaggtgtcatttcgctcccttataaataagaacaaaaatgccgattttgaatatcggcattttgctgtaaaagagaagatgaatttaatgctttaacatttcaattttatcccggctcaatccggtactggtgacaataatgtccaaactcacgccatgccgtaataaggcacgagccgtttccactttaccttcctctcggcctagttcaatgccttcttctcgaccttgcttgatacctcgctcaagccctttttgttcaagctgttctgcaatagtcatcaacatcgtttcatgctccggagattgctgtttcagtctgaccggtttcagcttcgccgggcaaacgtaaaagtcccttgtatagccatcatcctgaataagaacaaaaatgccgattttgaatatcggcattttgctgtaaaagagaagattaatttaatgctttaacgtttcaattttatcccggctcagtccggtactggtaacaataatgtccaaactcacgccatgctgtaataaggcgcgagccgtttccactttaccttcttctcggccttcttctcggccttcttctcggccttcttctcggccttcttctcgacctagctcaataccttgcttgatacctcgctcaagccctttttgttcaagctgttctgcaatagtcatcagcatcgtttcatgctccggagattgttcaatcagttgatggacaaagtgtgagagatccagcgtatgtccattcagtaaaatatagagtaacaccacattgagctgctcggttgtattataccctgcattcaagagttccaccaattggaggagccattcctgcatatcccggcagcgaatatgtttttgcaccagctccatcagggctacccctttatgcgtcaggatctcttcatcgctgagcacactgacgtccaccaacggaaacgcctgacggtataagcgagccgcctgttcggggagcgtgaaacaatccagccaccggtttgagtaaggatacggccgaatctcaccatgataaaacagcagaggtgccaccaacgggagttcagtatggccttttttcaggtgagccgccatggctaacatggcataatacatcagccgccaggccattaacgggtcaggggtggactgatgttcaatcaggcaatagatatagccctgtccccgggccgtttcgaccgagtacaacacatcactgtgcagttgacgtaaatgctcatccacaaaactgccgggctccagtttcaatgtggctaagtcacacaacgactggatttcttcgggcaaataaagggatagaaactctctggccgtttcaggctgcgttaaaaaatatttaaataatccgtcatggtgaggccgtttttctttctttgccacaatctgtttctctgtcttattagttagtcattaccatttatagtatttctaccaagctacaaaaaacatcttcccatattttctcaggcaaatctttaccgaatgcattaatagaagagcctaaagaatcaaatatcagaaaagaaaaaaagagaaaacattatatttacaacaattactttatgaaaaccattcatttaaatcagtttttaacttgcattcgcataatgataatccctttatcaaaatattgattatttatatttccgttaatcttggatgttcagatcgcaaaaatttaactgagttaccttcagataatctattatttttaaatgctattgagatggtacgagacttcttacaatcaatctgaagatttctacgactttggttatcatcaaaaactcagatagtatctaaggtactttaattcactatttcaaacaaaactcaagttaactatttattatggaatatatgacaaacggacattaaaataatcaaatgtttgttatttaattgcctggaattaattgtagaagcggaagtaaagtgacttaccgcttcacatttcaactcatcctaacttatcctaacttatctatattacttcaattatcatattgatctattatacccgttatctttcaaattgcctctttgttggctgcgctcactcaccccggtcacatagttacctatgctcccggggattcactcccttgccgtcgcgatgcatcttgaaatccatagggtatagcattcatcgatctggatatcgtatctacaatcgttctggttgtttgatctatttcataattaagtaaatcattaactttaatattaccaagattagtcgcccttaaagtttctggaattaaattcaactctatggttttctcttcttcatttataccatttattgttaaactacagccatgcagcccaataaatcctttatggaaaaagtattttatattatcgccagggatattaatcactaatcgataagtttcacctgttttaataaaatcaacaacttctgctgcgccttcaatatgtccatataaactatgaccaccattctctttattcatttgatgtgatctttcaatattaacttcatcccccacatttaaaaactttaacgtggtcacatcagccgtaaaatctgatatatcaaaccagacgatatcgtttttaaattgggtgacagtcaagcacgtaccattaatcgcaacactagcccccacagaaacatcatcaaaaaaatggttattattactgacggtcaatgtactaaatccctcttttttctcaagagataataccttttcttttccttgcacaattccagtatacataatcaccctcttttatttatattaagtagaaatgcccttgttacattaataaagttttattagctctattaaccacattttcctaccccatatttacaaaatatcttttatacccgttatctttcaagttgcctctttgttggctgcactctctcaccccggtcacatcgttatctatgctcccgaggattcgctcccttgccgtcgcaatccatcttgaaatccattgggtatatatacttaatttaaatcaaaattttaataacacatttataaagctaaaaaaccactttaccctataatttttaattatatcaagctttttgtgaaatggatgattttttactattaaattgacaattatcaaacatgaacaaaaatagagtcaaagattatttttctaacttatggaaacactttactttgaatatttattatttaattaaaaacatataacaataaaattgtcagacaaaaaattataatttacaacatttaactcataatctcttttttattataaataaatcaaacgaattatcattttaaacatttattatatttttattccatgaaagataattactcaaaataaatattaaaaaagatattttatctctatattttaaaaacaaagcaataattatttaaagtcgaaaatggttttgattataccaaaacaggcacccatttattattgttatttatcatggttattcctcattaaaaatcagaattaattaagaaaaataaattatatatttaagttaactaaaatataattacacaaatattttcataaaaccattaattaacaatgttttcccaataaccaaaacaaagttgaataaacaacctatcgttaattaaataatcaacatattactaacaccgaaaaatcaccaaggttaaaataattttatctttctactccctccacctttcatcaataaaatcaaatatccctttgacaaaaccgtcttattagatcaatgttagcaaccaccagcccgataccgtatgagaaagggaaccttcgtgttacttgccacaaaaatccataatacgaaaaactacccccggctttttttcaccttaaagccctctttcccattttcctgtaccgcttatctggcaatgacttggcgttggatcggcacccgattaaagaaaagcggattacctgcaatgctattaatgctattattgctgtcggcaatcaatcaagctcaagccggtcattttgttaattttcaatcgattgataccagcctttatatgcaatttgaaaatcgggtcgatcccagaaaaaccatttcaccgattttagaggctttcggcgactacagtatcggcgatatgtacgtctatagtatttggcaaaattcgctgcaaagtgattaccaaggtgacaaaagcacctactattataaatttgtccctagagtgagcttgagtaaagtcactggtaatgacatctcttttgggccggtaaaagatattctgttcgctcaatgggttgccaaaactaaaggtatagattacgactatttccccggtatcagtatcgactggcaagctagttggattagctggttacgtacaattttttattttgagaataatgccaaaggaagctggaatgatcagcgaatccatatcgactacggaattcccttcaataaccgtttaggtgatttccgtgttgtcggtacttttgattataccttaggtttgcatgggcaacctgaaactatcgatttcaaaccagaattgcactatgatttaggaaaacgccttggcaatcaacccggtcatttatggactggcattgtcctgaacccaataaaaaataaatacaaaataagagataccccttattatcgaacggatcaatttagttatggggtctttattcgatatagttttttctgatatcggaataaaatatcagaaattttctgatggcctttatcctgatggagtcaaaatgcccactcaacatgaccagttcggacgtacttatcagtggctcctactgatacttttgggtttagtttattttctggtcaccgcaaccacatttacttcgctaggtgttgtattacctagcatgatcaaggaattacactggagttggacggatgccggtttggggttcactttactgggcttgtcatgtgggctgtccagttaccttccagcgatgtttattcgtcgtaccggcgtccgcgctaccttaattatcggtacgcttacctttatcaccagtttttatatcctctataacacccacagtatcgcggcctattttaccggtaccaccctactagggatcggctttagtcttatggcaacggttcccggcacttatgtcattagccgactttttaaaaagcagtcgttggcttttggtatctatttcactatcgggggattaggaggcgtggtcggtccgtggatctatttcctggcaaccgtattttgggaaaactggcgtatgcactgggcaatttccgggatatcactcaccctgattagtctattaaccattttatttatgcgcgaaggtaaaaaggaaaacgcccacgctgaaagaattagcaaaaatcaacaagaccagctccccaccagtatctatcgcaccaaggaaatatggaatgtccgacaggcactgcacacttggcaattttatgccattgccgccgcttatacctcttttttactgtgtgggataaccgttaatagcttcgctgtcgcccatattactgaaaacgggttcagtgagtctgttgccgcctcctcgctcagtatcttggcttttatcaatgcattctcacgatttgcaggaggcgctgttggtgaatggctcgatcccaaaaaattgcttatcggtagtctgtcgataattatctgcggccttatcgcactcagtgccaccacttcatggacatttttaatcctgttcacgttgtgtattggcatcggttatggcatgacttttctggcatccagtattttactgttcaattattttgggcgcacgccttatctggaactgttctcagtgatgaatctgatctctactaccgcctgtatcgccccttttctggtgggagcaattaaagattattcaggtagttttacaccggcatttctcattatcgccataccggtgctaactattctgattatcacattcataatgcaaccaccgttacaaatcgtgaagaaatgttctgataacagcacattacttaactgaatttagaaataaaatgaacctataagatattccttaccacagacaaacaaggaattcatcatggcaaaaaaagaattcggtgtatttctacccatagctaaaggtggatggattatttccaaaaatacaccaccactcgatgcttcttatcagcaaaaccgtgaagcagctattctggctgatcaaattggtttggatttcatcatgtcaatgagcaaatggcgtggctttggtggcgaaacggaacattggggctgttcgttggaatccgttacgatgatggcaggtattgccgaagtgactcatcatgctcggcttatcgcaaccatgcacgccgggctgcataatcctgccgtgacagccaaaatgattgcgacattggatcaaattagtcatgggcgcgccgggctgaatattgtctctggctcattcaaagacgaatttgaacagatgggggaatgggataacaatttagatcacgatcaacgttacgcaatgaccgaagagtggacccaattgatcaaacggctttggagtgagaagcaggttaatcatcagggagattactttaatttcaagaattgtgtttctgaacctaaacctgtttccgttccgcgcccttatttggtctgtgccggtcaatcagaatgtggactacgttttagtgtgcgtaacaccgatgtgtgtttcattggtggtaaagatgaggaagaaacgcgacaaatcagtctgatggctaaacgtcttgcagccgaatacggcacaaccaccaaaaccttttgtatgtgtacgattatttgcgctgaaacagatgaagaagctaaaacgctggctgagttctatcgtgatggcttggatatagacgcagttaaaagcatgatgcacagttttggcgtcgatgttggcgaaaaaagcaatgcgatggttgaaagatcccaaaacgcttttatgacccacaccgctatcggcaacccggaaacgtgccgccaacaattatcagatttgctgcgtgaatgcgaactggacggcgttatgttgatcttccctgattatgttcaggggttgaccactttcggcgagaaaatcttgccacaacttagagctgaatttatctatacccaatagatttcaagatgcatcgcgacggcaagggagtaaatccccgggagcatagataacgatgtgaccggggtgagagagtgcagccaacatgcagccaacaaagaggcaacttgaaagatgacggatataaacaacgataataggccaataagccagggaatggattctccacatctcgacgagcgattacccattccctaaacgtctgcaaatatcgcccttttacccctgaactcgccggtgtaatcccgtaccccgtaataaccgaagccccaacccactcccacacaatgaaagtaacaagctgctgattattggtaataacagccacatctgccattctggttgccacggaaaatcaaataccttggtctgtaataaccagagcgcaacctcagcccctaatgccgcagtaaaacccgccattaatccaagcaaagcaaattcataccaaagcgtacgacgcagtagctgtttactggctcccaaggtgcgataaaccactaattcaagttgccgttgatgcatccctacctgaacctgagccaatagcagtaatgcgccacaaaccatgaccaatccaaccatgacttccaatgccttacttacctgctgcaaaataccctgaatttgcttaatcatcacgccggtatcaagtaggctcaacgtcggaaactgacgattaagatccgtcagaaggcgaccctctccctcataatggaaactggtcaaccaagtttgctgctgattttctaatgcttgtttcgggaaaataaacaagaaatttggccgcaaactttcccaatccaccagtcgaatactgctaacgatggcactgaattgctgcgtatcaccactgaatgtcagcttatcgccgattttgattgccaaacgctcagcaagcccttgctcgatagaaacctcatccttctttagcggccagtgaccttccaccaaggtattaaacgggggtaactcctctttccatgtcaggttcaattcccgctgtaccgtgttgctatccgatcctctggcctctgcccacgcgatagctgactgaccattaatttccgtcaagcgagccaataccaccggatagaatgccgtaggtttaacctgatactgagccagcaaatgttctacttgtggaatttgctgtccagtcatattaatcagaaaatagtttggactatctggtggcaattggtgctgccaacggtcaagcaagtctccccggaccaccagcaacaaagcaaataacataaatgataaagaaaaagccgccaattgagctactgtttgaaacggctgccgcagtagtcgattaaccgccagacgaaaactgagttggcgaagtttcaaatgacgtaataaccacaatcctccccaaccaaacaccgccagtaatagcgcaaccatcatcatgcctgcaagtaacgcccataacatgggcttggtgccaactaacagactcagcccactaatgaccaccaataccgccaacggcaagtaataacgtaacggccagataggcgcgataatatcattacgcagcactcgtgatggttgggttgccattaactgcttatacggacgtattcccaccagtaaggcgataacagataacgcacctaacgcccatatccacggccagaatcctgctactggtaaggtcttcggcaacataggggccaaaatctgcacgagcagatattcaaacatcaatcccagaagcgttcccaccagcgccgccgcaattaatatcaccagccattgaccaatcacccatttacgcaacgcccaacgccccgcacccagtgttttaagcacagcaatcaaatcatggcggctacggcaatagtgagtcattgatactgctaccgcggcgacagcgagtaataatgtcagtaaagccgataacaacaagaattgctgtgccctttcaatcgttttttccagcgccccgctgtcctgtttcaaggtataccagcgctgatcagctttaagttggggatcaatgagctgctgatactgataaactgcttctttatcacccgaaaacatataacgataagtcaggcggctacccggctgaatcgcaccggtagatggcgcatcatcaagattgattaaaatccgtggcgcaatctgaaagggattgaaaccactgtccggttcctgaattaattctccactcaccttaagcgtggtatcacccacatcgagattatcgccaactttgattttcaacaattcaagcaagcgaggtgcaaccagcactgtgcctttttccgctttcaaacccggtggatgggtttccagttcaccatataacgggtaatgactgtctgcggcttttacattcgcaagttgaggaatgtccccagcataagtcattgtggtgaaagagagttggcgacttaattttaatccccgttttttcgcctgctgtagccattcttcatctaccggataagcagcacgcaggactaaatcacccgccagaaaatcccgactctggtaatgaacactttgatcaatgcgatcactaatccttcctaaggccagcacacaagctaccgccaaggtaagagataaccagacaatcaataaagaaggtgtgcgccactcgcgccaaaaccaacgccaaatcatctttcttccctcaattttccatcaaccaaccgcaagcaacgttgacaacgggccgcaagctggctgtcatgagtgaccaaaattaatgttgtggcataatcacgattcagagaaaacagtaaatcagcaatacgatcaccggtttgccgatccagattacctgttggctcatcagcaaacagaattttgggttgactgctgaatgcccgtgccaatgccactctctgttgttcaccgccagaaagttgtgctggcatatgtttcaaacgcttccccaatcccagttgttcaagcaattcaaccgcctgtttcctactactattttcagactcaccacgtaataaggcaggaagctggacattctctaatgcgtttaatgtcggaattaacataaaggactgaaagacaaaaccaacactttcagcccggagttgcgcccgctgctcttcattcatctggcttaaattatgccctagcagccgaacctcaccgtcactgccatcatctaacccggcaataatgccaagcaatgtggatttacccgaacccgactctcccaccaaagcgatagtctgtgccgactcgacaaccaactcaactccctgcaatatagtgatcttatgtcctccctgaccaacgtgcttactgagatgctgaacttcaagaatattccccgttaccatttacttttccttttactgatggtgctatttagcgccagagcgactgcggctgatacccttctgattctcggtgatagccttagtgccggttaccatctgcctattgagcagtcatggcctgctttgatggaaaaaaagtggcaaaaatccggcaataaaatcacggtcatcaacggcagcatcagcggcaacaccgccgctcagggccttgagcggctacctgaattacttaaacaacataaaccccgttgggtactgatagagctgggtgccaacgatggattacgcggttttcctccacaacacaccgaacaagatctacaacagatcattactttagtgaaacaagctaatattcagcctttattgatgcagatccgtctaccaccaaactatgggcgccgttataccgagtcttttgccaagatttaccccaaactggcagaatataatcaaattcccctgctcccgttttatatggagcaagtcgccattaaaccggagtgggtgcaacaagatgggttacatcctaatctggcagcccaaccatttatcgccgattggatgtctgacacactatcagcacatcttaattattcttaagtagtaaactattagtttcaacaaattgatgtctataagcaggtaaagttatgcaaaagtcagttcttatcacaggctgttccagtggaattggtctggtggcggccaaaacactacatcagcggggctacagagtattagcagcctgccggaaacccgcagatttacagcatatgcgcgaattaggactggaacctatcgaattggatcttgatgacaaaatgagtgttgaacgtgccgccgccgaggtcatcaagctaaccaatggccgtctttacgggctgtttaataatggcggctttggtatttatggcccactcaatactatcagtcgtgaacaactggaacggcaattctctactaatctatttggtacacatcaacttacctgcttattacttcccgcaatgcaacttcatggtgaaggccgtattattcaaaccagttcagttatgggactgatttcaaccccaggccgtggtgcttactctgccagtaaatatgccttggaagcatggtcagatgcgctaagaatggaattagccggcacaggaattaaagcctgtttgattgttcctggcccgataaaaacacgtttttcagaaaacgtgaatcaaacgcaaagcgataaacctgtcaaaaaccccaggatcgcccgtcactttaccctgactcccgaagccgttgtgaataaactaattcatgctctggaaagtccgaatcctaaattacgttacccagtgacttgggtaacccatgcagtcgctattatgcgccggattttaccaggaagagtaatggataaaatactgagcaaacaaagtggtacaacttgaaagttaagaaaataacctcaatctatttaatcgtaccctgcgataaccaaatttaagagactaattatatgttaccgacctctattggaattaatgttaacgaaagcaacctccatcaaatcgttgaacagtctatgactgtacctgttttattttatttctggtccgaacgtagcccccattgccaagaattaagcgtaacactggataaactggccgcagaatatgcggatcaattcatattggcaaaagtggattgcgataaagagcaaatggtcgccgcacaatttggtttacgcgccattcctacggtttatattatgcaacaaggtcaacccgtagatggttttcaggggccacaacctgaaaacgttatcagagagatgctgactcgcgtattaccgaagccggaagagttgaaagccgctcaggcggaagaacttatcgccgaaggaaaacatcaggaagcactaccgttattgaaagaagcctggcaattagcgcccaaaaacagtgcaattgcacttatgttgaccaaagtgcaaattatgctcaataatatagaggaagcccaggaaattctgaatcttattccattacaggatcaagatactaattatcacagtttactggctcaaattgagttacaaaagcaagcggcggatacaccagagatccaacaattgcagcaagaattcgccattcaaccggagaatgccgagctagctgttaagctcgcgctgaaactgcacgaagtcagccgtaatgaagaagctctggaattattactcagcttcctaaaaaaggacctttctgctgccaacggggcggtacggaaaacaatgatggatattatgtctgcaatggggaccggtaataccttggcttcgaaataccgtcgccaagtttactcactgctttactgatttatttaattgtaaggaattgctatggatttattcgcttttggtgccgtacccattctgatatttattgcggtggttattgtctttacttgcgtaaaaaccgtgccacaaggctatcaatggacggtagaacgtttcggccgttatacccgaactttattaccgggtttgcatattatcgtcccttttatcgatcgcattggccgtaaaattaacatgatggaacaagtgttggatattccttcacaagaagtgatttcccgcgataacgccaatgttactattgatgcggtctgctttattcaggttgtcgatcctgttcgagctgcttatgaagtcagcaaccttgaactatccattatcaatctgacgatgaccaacttccgtaccgttttgggttcaatggaactggatgaaatgctgtcacagcgtgattccatcaacagccgcctattacatattgttgatgaagccactaacccatggggggtgaaaattacccgtattgaaatccgtgatgtgcgtccaccaaaagagttgatctctgccatgaacgcccagatgaaagcagaacgtacaaaacgtgctgatattctggaagcagaaggtatccgtcaggcggctattctgaaagcagaaggagaaaaacagtctcaaattctgaaagcagaaggggaacgtcaatcggcatttctccaggcagaagcacgtgaacgtgccgccgaagcggaagctcgcgcaactaaaatggtatccgatgcgatcgctgacggtaacatgcaggcaattaactactttgttgcccagaaatatacggatgccctgaccagtattggcgcttccggtaacagcaaagtcattatgatgcctctggaagcgagcaacctaatgggtgcgattggcggtattactgaattgattggcgaaagcaaaaaaggtaaataaccatgattgcacagattgcggcgcaaactccttggctctggttctctttcggcggcttactgttaattgcagagcttctgggaactggcggctatctgttatggacgggcatagccgctatcgttgttgcgtttgtcacctggctgctaccaggaatagattgggaatggcaaggcattttgtttgccactctgacgctgctttctgcaatgctatggcgctactggttacgtcgccgcccatcaaaaggcggcgataccctgaaccagaaagagcaccagctcatcggtatccgagccaaactgactaccgatactgaaaatggttacagccgggtcaagctagctgatggaagctggcgagttcactgtaatagtgaactaccagcccacaccgaagtagaagtgatcgctgttgatggcattaccctgaaagtaaaaccggtcagttctcagtgatgagagcaacaacccgataaatgatctatgatggggcatgcagccccgtcatctccagggcactcttccgctaaggataacaatttacttcttattttctgcaactcttcaatcgccttttctatttcagccactttatgcaatgttgccacttttacatcagcactatgacgattggggttgcgaaataacactaaaaactcacggcattcatcaagcgtaaaaccgacctgttttgcctgacgtaacagcgttagttcatcaatatgtttctgctgataataacggtagccgttatcccccctttccggcggtgtaatcagatccttttcttcataaaaccggatagctttgctggtaagaccggttttttgggcaatctcactaatgttcattttttccccttgaccttacccttgagggaaggtttaacctccccaacaagtcagaaactcacttgaactgtgtagatattcatcaccaattatcacacaggtatgaagaataattacatcactatgtgttaggagttttttatgtcatacacaactattttaaccttgcagggactctcctgtatgcactgtgttaacagtgtgaaaaaggcactagcaaatcgtacagatgtggaacaggcggatattacaattgattatgccaaaatcatcggtaaagcctctactgaatcattaatcgaaaccattcaagcagccggttacgatgcgatgattgccagccaacccgatgttgaactgacactctctggactgagttgcatgcattgtgcaggtacgacacgtaaagcgctggaggccgtagatggtgttatcgccgcagaggtgaataccgaaaaagctaaagtttacggtaaagccgatgcggataccttgattgccgctgttgagcgggcgggttaccatgcaaaactcgcttctggtcaaaactccccaaaatctgagccgctgacattacctgcttcaaacagaccggaacctttggcagcggcaacctcctctgttccggtcgaaaaagctgacgtatccgttgtgagtgacagcaatgagagcatccagttgctgttggatggcatgacttgcgccagttgcgtgaataaagttcagaaagcattacaaggtgttgacggcgtggaaaatgccagagtgaatcttgctgaacgcagcgctttaattaccggcagtgcctcaccagaggcactgattaaagcagtagaaaaagccgggtatggcgcagaactgattcaggacgaaactaagcggcgtgaacgccagcaacaagtttctgacgctaatatgcgccgttttcgttggcagtcagcattagccttagtcgtcggtattcccgtaatggtgtggggcatgatgggcgataatatgatgctcacacctgaaaaccatcatatctggctgactattggcgttatcacgcttgccgtgatgatttttgccggtggtcacttctatcgtaatgcgtggcaaagcctgaaaaacggcagtgcgacaatggacacattagtggcattgggaacgggtgcagcctggctttactccatcagtgtcaacctatggccagatatttttccaccacaagcccgtcatctctattatgaagccagcgcgatgattattggtctgataaacctggggcatgctctggaacaacgtgcccgtcagcgttcttcaaaagcactggagcgtctgctggatctgacaccaccgactgcccgtgtggtgacagaagatggcgaaaaagagataccgctggctgatgtcaaacccggcatgacgttacgtctgacaaccggtgatcgtgttcccgttgatggtgaaatcattcaaggtgaggtttggatagatgaggcaatgctcaccggtgagccgattccacagcaaaaaaccaaaggcgataacattcatgccggtacgacggtgcaagacggtacagtgctgtttactgccgccgcggttggcagccagacaacattagctcgaattattaaactggtccgtcaggcacaaagtagtaagcccgaaatcggtcagttagcagataaaatttccgccgtatttgttcctgttgttgtcgccattgccctgattgccggcgctatttggtatttcgttgggccagcaccacagattatgtattcattggtcattattaccactgtgttgattattgcctgtccctgtgcccttgggttggcaacccctatgtcaattatctctggtgtcggccgggcagcagaattcggggtactggtgcgagacgcggatgcgctgcaacaagccagcaccttggatacccttgttttcgataaaactggtacgctgacagagggtatgcctcaagtgactgatatccatacttttaatgggtacagtgaacaagaagtattgcggtgggctggcgcactggaacaaggttctaaccatccattagccaaagccattcttgccaaagccaaagggctgacgttgccgcaagttgaacaattccgtactctggctggactcggtatcagcggtgaagtgaatggcacaaccttgttgctaggtaatcaagcttggctagaacaaaatcaaattgatacgcaagaattaaaatcgttgatcgctcaacaggcagaacaaggcatcacaccggttcttctggcagcaggaggtcaagcggcggcagtgctatctattcgcgatccactgcgtgaagatactatgactgcattgcagcgattacatcaccaaggctaccgtttagtgatgttaaccggtgataacccagtgactgccaatgcgattgccaaagaagcgggtattgatcaagtgattgcaggtgtattgcctgatggcaaagctgaggtaattcagaaactgcaagcagcaggtcgcaaggttgctatggtgggggatggtattaacgatgctccagccctagcgcaagctgatgtaggcattgcaatgggtggtggtagtgatatcgccattgaaaccgccgcaataacgctgatgcgccatagtttacatggcgtggctgatgcggttgagctatccaaaggcactctgcgcaatatgaaacagaacctattaggcgcatttatctacaacacattggggattccgatcgccgctggtgtgctctatccctttactggaaccctgttagatccggtagtcgcaggtgcggcaatggcgctctcttcaattacggtagtgagtaatgctaatcgattactgaggtttaagcctaagttctgaatcactaaagaaataagtctgctttaatgatgttggggtgaatcgtaaaaatgcatatccatgatcgcattttacacttctaccccagcactttttcatatagcaatgtccatccacgttactgcatcaaatcatcacatctccgacaatgttttcattcagatcgataacgtgccccgtattgtgctgcatagcctcgtccaattccttaggtaaatcactcacatggtacccgacctgaatgtcggcagacagcaagtcaaggaatgccccaattaactggtcttcgtattcaacgcttacattagtcacaacaacctcaccattacgcaactcaaataccaatgtgctaccggtatcaacactcaatacctgacggatgaaccaaggtaacgtgatctgacctttaggaatcaatgttaccagctcataaatatctgacataacaaacccctagtttataccctatggatttcaaggtgcatcgcgacggcaagggagcgaatccccgggagcatagagaactatgtgaccggggtgagtgagtgcagccagggtatatcattttcaaagaactagaaaagtaaatacagcggccaaataaaatctccttgtatactgaatagtagtaaaagaacattcaatagaaatggatagagatacagttgtaatattaacctgaaaaaatagttagcctaaagaataaatgctaaaccggagctcaaatgggacgactgattaaacaccttaccaatatattaggaatcaatgccctccaccgttatccctatcctgctcacgatattacactggcaggtgatagacatttgcatctggtaggcagtattcatatgggtacgaaaaatatgttcccactttcagaaatattgatagaacagcttaatcaatccgatacattaatcgtggaagcagatattactcaggcagactccccatttcatgatgagtttcaatcatatcaccgtatcgaacaacgtttatcttctgagatgtatcagaactttcaggactgttgcaatgaaatccaacagcaagaagaattcctcaatctattgccctcatggcaaatcgctttaattttacaagctggacaagcacaaaaccttggattacatccccaatacggtatcgattatcagctactaaatgcagccaaagctctaggaaaaacgattattgaactagaaggtactgaatcacaaattaatttacttaatcaaattcccaataacggcctgccactattagaagatacattaacccattggcacgcaaatgcccgtgctttacaaaccatgatcagttggtggatggactatcaacctaaacagcaagaacatgctctaccaacaactttcagtaaagagatataccaactattgatgactgaacgtaataaacaatggaataaacatttacggggattacctgccggtcgatacctcgttgctgttggcgttttgcatctgtatggtgaagggaatttgcccaagatgctggcagaaaaacagcattaaaaaaaggccaatattacctatattgctataataatattggccaatcatatgaggaataatctgtcattttcgttgttcttattaagtacgggatattacctgtttgtatacaagcaacagagccatagtcagattatcaattccatcgttccatttcatccgttatccttaattataaaattaccctatgtaatgaaattatgacacctgcgatcattttgttagaaaaacagaaagttagcttcgctcttcatgcctatgagcacgacacaaatgaacataattttggtgatgaagcagtgaggaaattaagactccatgccaggcaagtattcaagaccttactggttgcacttaatggtgaggctaaaaatttggtggtagccgtcacccccgtttcaagtgagctggacttaaaaaaggtcgccaaagtttttaaagtcaaaaaagcagaaatggctgatccccaaatcgcccagaaagtaacagggtatctcgtcggcgggatcagtccgctaggacagaaaaaacacttgccaacggttattgataaccaagcgcaacagttctcaactatatttgtctctggtggtaaacgagggttagatattgaattggcgtcggctgatctctgtaggttggtgaaaggcaactttgctgatattgcaaaaacttaaattattacccaaaaagggctgctaaaattgcagccctttcgatttatcattctgtcagggattattgataaataatttcactctttggctcataatcagccgctttcagtggtgaatgcttctcgatatagtctttcaaaacttctgcatcaacaaaaccggtgttgacataggttggataattatcaacacgtggatagccatcaccaccaatagcattaaagtcaagcattgccatgcggtaagttttatgcggatctaatggattcccaccgatttttacctctttaacacttttaccatcagcaatcaggctaacattcacaaactgtgcataagcaccagagtcaactttcatattagcaatcgccgccagatattgtttgacttcattgcctttcatatcaacgtaaaccaatgtgttggcaaatggatgcactttcaacacatctttataagtgatatcacctgattcaatcgaatcgcgaataccaccaccactcataatcgcaaaatcagcgtccgcgcgttccatcatggcagaaagaacaacatgagccatattagtctgaacaaaacgaactttgctgcgatccccttccaatttaccctcaacagaccccacttttacaccaagctgtttatcacctttatcttgataaggcatcagcaactttaacatatccgggttttgtgcaatttcatgagtgtagtaagtacgttcagtagaaccatcttccttctgcactttctttttgaggttaatagggatcaactgatagtgagtcaacttcaattcaccattacggaactggaagtcagcacgaccaacatatttaccccactcatgagcctgaacaatccaggtaccgttctgacgatctggcgaacatggggttcctggcacataatcaatctgcttataatttttattttccgcggacatacagaccggatcttgtgaatgaccaccgacaatcatatccagatagcccgcaggcaaactgcgagccatttcaacatcacccggcgcattagaaccatgattaccgttgtcatagtgccccatatgggttgcggcaataatcacatctggcttttcatctctctttaattcttcaacaaccattttggcttctgtcgcaggaagacgaaattcaacatcaggaaaattagccgggttaccgattttcgccgtatcatcagtcgtcaggccaataactgcaattttcacaccttgcttatcgaaaatggtataaggcttgaacaaacgtttgccggtgcttgtctggtaaatattggcagccagaaatggaaaagttgcccatttttcctgttgacgcagtattgacagaggattatcaaactcatggttacccaacgccattgcatcatagcccaccaaattcatacctttaaaatcaggctcggcattttgcaaatcagattctggtacaccggtatttatatctccgccggaaagcagtaacacactccccccttttttcacgacctcttgacggatttcatcaactaccgttttttgcgcggctaagccatactcaccataatcgttatgccaaaaatgaccatgatggtcattggtgtgcaaaatggtaatgtcataggttttgtctttctcccatgcatttgcgattgctggaagtagtgctatagatacaaccaaagcacaagctgaggtcttgaacgagagtttcatggtatatctccatgtttttttagtgaattgccatgcaaaaacagcttttaaagctaacaaggcgggataaattgatcatttcttgagacaggttatgtatgttatgcagttattagatatttatacccgtcatctttcaagttgcctctttgttggctgcactcgctcaccccggtcacatagtttgctatgctcccggggattcactcccttgccgccgcgatgcatcttgaaatccatagggtatagaacatgttttatttcgtcttcgcgagtgtactataaaactatatccaagatagtaaaaaatcaactctctgcctaatatgtattaaaattcaacgaataaccaatatactgactattgattaagacaggttggcagcaaatatgagcgaacaaagtaataccaccatagttccatctcaccccaaaaaaaccaggaataccgtttttactattcttggggcaatcagtgtttcacacttattgaacgatatgatccaatcgctgattctggcgatttatcctttactacaattagaatttaacctaagttttgtgcaaatcggtatgattaccctgacctatcagattaccgcctctttattacaaccactggtaggtctctatactgataaacatccacagccttattcattacctgttggaatgagtttcaccttatccggtctattactgctggcctacgccaacaatttcccgttaattctattagcatcggcattaatcggaacaggttcttcagtattccacccggaatcgtcgcgcgtagcgcgtatggcatccggtggtcgccacggattagctcaatctctttttcaagtcggcggtaattttggcagctcccttgggcctttgctagccgctctgtttattgctccctatggcagaggcaacgttggctggttctctctagccgcattactgggtatcattgtgctgttacagatcagtaaatggtataacgttcagaattatatcaagaaaaatcaagccaaaactggcccagccattaaagttttatcaagaaaaaccgtgataggttccttggttattttgctcatcttaatattttccaaatatttttatctcaccagtatcagtagctattatactttttacttaatacacaaatttggcatttccgtacaaagcgcccagtttcatctgtttatttttttattcgcagttgcagcaggaaccattattggtggaccgcttggtgacaggatcggcagaaagtatgttatctggatatctatccttggagttgcaccttttacattagctctgccttacgcttctctgtactggacaagtattctatcagtgattattggtgtggttctggcatctgcattctctgcgatcctggtatacgctcaggaacttattccaggtaaaaccgggatggtatccggcctgtttttcgggctggcttttggtatgggaggtattggcgcagcggtacttggtgatattgcggacagaacaagtattgaactggtttatcagatttgtgcttttctgccgttacttggcatatttaccgctttattacctaatatagaagataagaactaggaaaagcaccatacaaccccacataaaatttactttttatgtgggaatagtgcttatttacctcataaatattcaaatagagcaacacaaatacctgttacgggtaatttaatcctttcaatccatattttttgatgttttattcatttttttagcgaatttacctcgaattatctataaaatacagttacacctacctcttcactatgctatttactagcctcagcaagaaggagtcttaatggagcactcgacaccacttatcaccactctcgttggcgggttctttatcgcttatctgcttggtatgctggcacaacgcctgaaaatctcaccgctggttggttaccttactgcgggagtcctcgctggtcctttcactcctggttttgtcgctgatgcatcactggcccccgaactggcagaaattggtgtcatcttattgatgtttggtgttggactgcatttttcacttaaagatctgctagccgtaaaatccattgctatccccggcgctattgcgcaaatactggtcgcgacactactcggagtagggctatcagcaatactgggttgggaattatttagcggcatcgtctttggtctctgtctatcaaccgccagtaccgttgttctgttacgagcgctagaagagcgccaactcatcgatagccaacgaggtcaaatagctatcggctggctgattgtcgaagatctggcgatggtactgactctggtattactgcccgcagctgccggtattcttggtaataaggaagccaatatcgggcagctaattatggaacttgccatgacagtcggcaaagttatcgcttttatcttgctgatgattgttgttggccgccgtctaatcccgtgggtattggcaaaaaccgcgagtaccggctccagggagctatttacccttgccgtactggttatcgccttgggtatcgcttacggtgccgttgctctgtttgatgcctcattcgcactaggggcgttcttcgccggtatggtattaaacgaatcagaactaagccaccgtgccgcccaagatacgctgccactcagagatgctttcgccgtattgttcttcgtttctgttggtatgctgttcgacccaatggtcctcattcaacaaccactatcgatactggcaacgttggcaatcattattattggtaagtccgcggctgcaatgttactcgttaagatgttcggccactcacgccggaccgcattgacgatttcagtcagtctggcacaaatcggtgaatttgcctttattctagccggtcttggggttgcacttggcctgcttgatggaaatgcccgtaaccttgttctggctggcgcgattgtttctatcatgctaaacccagttctatttagtctgttagatcgctatctggaaaaaacagaaaccattgaggagcagttactggaagaaacgttggaagaagagacgcagattcctgtcgatatctgcggccacactattgttgtcggctacgggcgggtcggcagcttgctatgccaacgcttgcaggaaaaagagatccctctggttgttattgagaacacccgagccaaatttgaggaactcggtgaacaaggtattagtgcagtcatgggtaacgctgccagcaaagatattatgtcactggctcgcttggattgcgcctgctccctcctactgactattcctaatggctatgaagccggtgagattgtcgcctgtgcaagagaagcacgcccggatattaatattatcgtccgagccgactatgacgatgaagttacctatatcacagagcgtggagctagccacgtcattattggtgagcatgaaattgctaaaacaatggcaactgtattcgccaacagtgagcaaagctattcgattgaaccccctccagcatcgcctttttcaccatcactttgaggaaagcgactgctgatgaatcattctctagtccctaccaagtaaggatcatgagccgttcttatcacttaagtatcagtgataagaacggctcagaggggacaaaatgttcagttgaagtatcgctttactcaattctgtacaacaaaaatcaatcggattatcaattaatccttagcccattcaagacaagattcagcaacctattgaggtaaatatttttttattaataggaagggtaaataccatacattgaatttttagcgttacttaacatgatcatggtatttacccaactacaacaaggaaactctatacaatccaagctaccttcaaccacgattagcttaatgagactattaatgaaaaagccaatcagtcgggagggcgcaatatcaaacaatcgattacgtcaaagatataaaacacctttcattgacgtgtaaaacattgaaacagagaaaacacataacactaaagaagcaaaacgataaaacaaatcgggttttaaaattccttttcccaactttcctacatatagtattttcccaacccccacccaaatcagggaaatgggtaatagtgcacaaacaaaaaccgtcatgcatggaatgtattctgaccacaaagtaaatgcagtaagaggaaatatatatgtagcaaacacaaaagccttaggattcagcaatgtggcaaataataccgtgataaaatggatttttgctacgttcttgtctaatgagaaatgccaaactttaaaagccagataagcaatgtatgtcgaagcacacatctttaagatgaccagtgaccatacgaaaacatgagagactgtagataaaaataacccccacaaactaattgctgttatataacccaatgcctcagctaatatcagcctgagtgtactaataaaaccatgtgaatatccagatgatactaaaagagtatttgttggtcccggcataattaagaccatactcaccatactggcaattcttatataatcgtagtaactattcatagtatcctcagcggctgttatacataataattaattatttgaaatataataggaaatttttaataaaaaatttcatcatgctccttcctctctttaaattaacaataataagttacggtcattaaataccattactttcacttaatagctattagcttcatcttttcttcaaatgttaataatctcaataactccaattcaataataaaagatacataaaacctgtcctaatataggccacaaattgaaataattacagcaaacaaaaactatttcgctaaatgatccttctaagttatcaatcatagctaaaacttcgctatcggaattagcatcaaaaaatactaatccacatatcaatactatacaaaaatatgaaactccgtatcaacccaatggctatttctagaatatagcagccccaatccatatataactaatatcatttctatatatagtcgatatcatttcaatatataaagaatatcatttcagtatattactaataaaggagtattctctagccaatcatcttgattataattagtaaaatcaacaattgaaaaatcagttccaagatttttaaaaattgtgattttagtccaaattcttcctttagctaatccctattataataaatagaaaaattaggtaaataatcaaatcagtatgaatcggatgggtgattttagcggtatctatacccgttatctttcaagttgcttctttgttggctgcactcaccccagtcacatcgttatctatgctcccggggattcgttcccttgccgtcgcgatgcatcttgaaatccatagagtatagctatattagaaatgtgccgatacgcgaaatttttatataaaaaacaacaatataagttaaatacaaaaaataaatagaaatttttatttgcatattattgctatctgagtgatataaatattctattctaggacatttttgaatattatttcaatttatttaaacagatatataaataagaataaaatacttttcattttataaattagacgaaaaatcattgctattaataaaataaactctaactatcatttacaatcttaataaatgattttatagctaaatttcggcaccttattaatttatacggtgccgaaattttaaaattaccgttcccagtaagattcttccaaactatcttctttttcgggtaaaccacggcttaatcgtggggaatgctgactcaatacctgatagctaactctgttggcatatttacatacctgagcaagcgatgaatatgttagataagtacgcatatgtttactggaattaggcacattcattctgtggtgattgttggccgttatatcatgcagcaaagcagataaagcaccatcacctgccccattagtattcatgattttttctggtccccccatataaggttcaatatgggaataaactttcatcggaatttggcaatcagatttacgcatagcacggctaaactcataacggttaaactcagcaatagcacccggtaacaatggatgggttgtctgacgcatataatctttttccgtataacctgccatatataatccagccggacctgcggtacacaaaactaaatcgacccaatctagtgccacatccgaagccaatagtggatcactgaaacccgtaagctcataagcttcatcttcattcattgccagaacagaaatattctcaaccagaaaatcacgccaccattgtggatcatcagcaataacatatttcgtccctagcgtcagaaccacaggtacactatgctttttcgcatattcgatagctttcatggttgcttctggcattggttctcccggtttacaacgaatcaagtaagcagttaataccaaagcagaagcttcagcaataatcttctcaggaatactttccggtttaagttgattcatttgcccaggactaatggcaaaagtccgctcaccattttccgttactaacgtaaaacagcgaccaattgccccattcactccctgtaaatagttcagatcagtacggctagacgtgttacataagtagcggtaagcataactgccaatctgaatattactacacatagtgcccagtaagacggaacgatcatcggcaagaactgagtaattatgtaaagtattaccaatagtgccaccagcaaattcgtggctaataagattattatcagtaagttctttatacagggtttcagctacatcatcttcaataactaatgaatgcccctggctgaggttatagcgctggataaaatcttcatctactttcgcctcaatatccactaatgtctgatcgataccaacgatataagctcggttattctcaccatccatcatctctttaattggctggagtaaaggatcacgcagactgacgggaaaatagtgttttgatttacgtttaccagggaatttcatttttgattgatgctataacgccaaaaggtgcagcatattagcacaataaaaacggacaggcagcaaatgtcactacgacatttactgccaaggaaaacttaagccgcttgctgacgactacgtaccatatgacgaattagaacagacaccacagccaagatcagcccaaggaaagcactgcctattaagataagtagacgcttcggtgaatctttcgctgtcggctcataaggagcctgcatatatctaaatggttggaagttaactttatctactttaagtgctttcagctcttttatatagaacaaacggttacgtaagtcagcatcaatcaaagtgggatcttttatctcctctgtaatctgcaacttacgctgtaatgcatcagcccccaaagcaatggaataatctggatcgtctttgatcattgccccttcactggaaataggctttttaattcctgccgaattagcgatagataatgcatgtttcaatcgctcaacattagcttcctgtatattattcacacggtttaaatcaacgctatacaaaccttcagagtaattaagcttttgttttaccatatcacttaattcactcttcacctgttcatggacaacagacgacacatagtcaatatagccatttaacagattatatgcatcttctgcggttccagcactgaaagtcaatttagtttcaccattttcatcatctttttccgcttttgaagaagatgaaatattatcattcacaatcttttcaataagttttctttttacaagtggtgaatgatcacctgattcagccaccagatttttaaaatattctgtattaaccagatattcttcacgcaaaacccgtgaattaaaattatttaaaaaattattatacagtgatgatgaagttactgatggttgtagatttaaaacctctaacttagtcaggatatctttaagtggttgtatttcttcaagttgaggcttaacaatagaagccgaactgctccacttttgtggcatcaaagatgctgctacaaagccaataacagcaaaaaggatggtaacagtaataatcaataactttgattgaaataaaacagagaataactcaaacaaatcaatttcatcatcttgttttgaattgtaataattaaaatattcttcactgaaattagtgcctttaatcggtttattactcattatttatatccaaatccaaatatgctgttactaattgatatacaaaacatcatcccactgagcgagcctataggttaattcccatttactctgaaacaagtatggcagttccactaggctagcatccgtgtagcaatataccttaaaaagccaatgaaccctaatgatagattaatcctatcactattcatccctatttctgacaaacccgttgaccaactcttcaagtagtaaaatatgactagcattgtcgttaagcgccggaatatattcaaatttttccccaccagcattaagaaacatctctttatttagctgttttatctcttccagcgtttccagacaatcagacgaaaaaccagggcaaagtacctgaatatgttttattccctgattaggtagcgttttcatcgtttgatctacgtatggtgtcagccattgctcacggccaaaacgtgattgataagccatcattacctgctctgtcggataattaattgcttgctttagcaatcgtgttgttaacttacactgctcagcataaatatcacccgtatcaacaaaacgctgcggaatgccatgataggaaagcaataatctgtctggttgaccatgcttatcgaaactctgctcaatagtttctttcagtgcagaaatataagccggatgatcagcataactacgaataaagtgcatcccaggaatagtgcggtatttttgcaataccagactgacaccatcaaatacagccgcagatgaggaaccagaatattggggataaagtggtaaaacaatcagctgctcaacattctgcttaagtaagttgtcaatcgcttgttcaagagatggagaaccgtaattcattcccagttcaacagggatgccagcaagtctttctgccagtaatttctgttgccgacggccatatactaacagaggagaaccttcatcagtccaaattttctggtataactttgctacacgtgaagagcggaaaggcaaaacaaaaccatataatattggcttccagataaatcgagataaatctatgactcttttatcgctaagaaactcagctaaataacgtcttatagccgcagttgtcggtttatcaggagtgccaagattaactaataaaacaccaaatttaccgttgttcattatgtcgatccttcattatttcgctagtgaaaaccctaacataataaaatacagatgaaaatcatgtttatctacgaaaacaatgaggaaaaatcgattaatttacctgatacagtaaataaataatataggataaggcgacttattagtcgccttataagaatcactcaggctgattaatccaaaattttagataattcttcactaatctcagataccttacgagtaccatcaattccaaaatatttggtataatctgcttctgcttctttttgatagtaggatactaaaggtgctgtctgctgatggtattcaactaaacgtttacgcacgatatcttcgtgatcgtctttacgaactgtcagctcttcacctgtaacatcatccttgttttccactaccggtggattaaatttgatgtgataaacacggccggatggcgcatgtatacggcgcccaatgatacgttcaataatcagttcatcgggaacatcgaattccagaacataatcaacattaatgcccgcttctttcatcgcatcagcttggggaatagtacgggggaacccatccaacaagaaaccattgcggcagtcatcttgtttgatgcgctctttgaccaaagcaataaccagttcatcagtaaccagcttaccatgatccatcagcgcttttgcttttaaacccaattctgtgccagccttaaccgcagaacgcaacatatcgccagtagaaatttgagggatcccatatttctccacgataaattgcgcctgagtccctttaccggcgcccggagcgcccagcagaatgatacgcattgcgtaaatccccttgctagttagtttttatattttgagaaaacgagtcaccataccatttagcatggggttcgctcaaggaaacaggtaaacgatttcgtgatatttttctgtaaaaataaaccacgccccatctcattatcagaggcgtggtttctaatcgtcaccaaaaaatgattaaatcaagctttctcagacaacaatagctgattcatacggcgaataaactgatttgggtcttccaacgtgccacgctcagcaaacaatgcctgatcaagcaacagttcaatccaatccgcaaattgaacttcatcactgatatcagcagccagttttaccaactgatgatcaggattcagttcaaaattgtacttaacgtccggcacctgttgaccagccgcagcaaacaatttcgccatctgcgtgctcatttcatccacatttgttgtgacaattgctggagtatcagtcagacggtgagtcaatttaacctcttttacgcgatcaccaagcaatgtttttacacgctcaacaaacggctctagctgcttttcaatttcttcctgttcggctttattttcatctgccaatttatccagggattcatcagctttactgactgattggaattttttaccatcaaaatcagtgaggtatcccatcatccattcatcaatgcgctctgacagtaacagaacttcaatacctttcttacggaacaactccagatgaggactgtttttcgccgcagcataactgtctgcggtgatgtagtaaatcttatcctgaccttccgtcatcctactaacatactcttccagagaaacggtttgtgccgagctgtcattatgagtagaagcaaaacgtagcaatttagcgatagcttctttgttggtgctatcctctgccggaccttctttcatgaccagaccaaactgttgccagaattgctggtacttttctgcatcatctttcgccagtttatccagcatctgtaatgcacgtttggtcaatgcattacgtaaattacgggtaatagagttatcttgtaaaatttcacgggaaacgttcagcggcaagtcgttggagtcaatcaagccacggacaaagcgtaaatagttcggcataaactgttccgcatcatccataataaacacacgctggacatacaatttcaacccatgcttatgctcacggttccacatatcccacggagcctgagatggaatatagagcatgctagtatattcctgcttaccttctacgcggttatggctccagatcagcggatcagtaaaatcatgagaaatatgtttatagaactctttgtactcttcatctgtaatttcagatttaccacgagtccacaaagcttgggctttattaatcttctcccaagttactgtatcctcttcaccttcttcttcgctcttatttttggtttcaatttcaaccggcaaggcaatatggtcagagtatttactgataacagaacgcaaacgccagtcattcaggaattcatcttctccttcacgtaaatgaagggtgatctctgtaccacgggtttctttttcaatatcggcaatcgtgtaatcaccttcaccagcagattcccaaaatacgccctgatcaattgaagcgccggcagcacgagtacgtacagtgactttatcagacacaataaatgcagagtaaaacccaacaccaaactgaccaattaactggctgtctttagcctgatctgaaccaatagattccagaaaagcttttgttcctgatttagcgattgttccaagattatcgatgacttcatcacgagtcataccaatgccattatcactaatcgtgatgcatctcttctctttatcaaaagaaagacgaacgcgtagttcaccatcattttcataaagttttggaacagataatgcgcggaaacgtaatttgtcagcagcatcggaagcgtttgagattagctcacgaaggaaaatctctttattggaatagagtgaatggatcattaattgcagaagttgttttacttcagattgaaatccacgggtttcctgacctttcatactcatttattacctcaatctaaatccagttcagacagacaaaatcagacgataatatgcagatggggataaataagttgaatttcaagtttgattatccaaaagaatgtaaagtcattcttgatcatagcagaatgaagtaactgcttcccttgctccggtgatgaaagatatcgccagtacccaaaaaaccacctttgccaccgctcagaccgtctggtgttttctaaacaataactatacccgtaatctttcaagttgcctcgcagtaactttcaattatcgcctttggacagccggttatcgttaatccactcatcaacaatattttttatccgatgggccgtaaaacctcgtttctcagagtggaaagaatatcagaattgaaatcatctcctccttcgttagcacgcacacaaaataatcacttttgttttttttactgtagttatattttcatttgtttacattttcatgcgaaacgtaaataatattgattctcatatacatttagagaaaaaataatggaaaaattattcaatatttacaatcacatagcaaaaccaagcttatatgtaactttgatgtctgtatctatgctatctcacgcagctccagcaaataccatctctaatgcaaatgataagacgattaaacaagcagaagagaaaacaggagatactcttgttgtgattgctaacaacaatgcacaagatgatggaaaaattagcagcaatgaaataaaagtcagacagcctcaaagtgtcggtgaaatattaaaaaatgttccaggtgttcaagccggacatcctagcggattaggtcagcgctttaaaattcgtggtatggatgaccaattcataaacattactatcgacggtgcaagacaagagggatatcacttccaccacgcaggcaattacggaatagaccctgagttattaaaacaagttgatatcaacatcggtagcaacagtatcacatacgatacaggtgcaattggcggggcactaaaatttgagactatagacacggatgacttattaacccccggtcaattatttggagcaaaaagtaaactgagctattcaagtaatggttctgaattccaaaaatcactggccgcctatgggaaactaggtgctgttgatttattaggatatgttaaccatcgtaatatgcacgattctgaatccggcagagatggacgaggaagagactcaattcctacagatgggaaattactcaattatctattaaaaacaaaattcaatcttaccgatgaacagtatattagcttatcaaaagaacattataaaaatgatgcagaaaccaactttagattaaattttggacatgatataaataatggaaagaaagggaggtatgaaatagaccgtgatacccataatatcacttatggttacactccaaccgataacgatttaattgatctaaaaatttccgcatatcatactgaacaaacctttacccatatgaagccagtaagcggtgatgggaaaggcttcgatactattgtaaaaacgcaaggcattaaacttcgcaacacatccaactttgatacacagaatctattccattcattaacctatgggtatgaatattttgataccagaatggcttataccgatgtagaagaaaacataaacaaaaaagatatagaaaaaggaaaagcatcttccttctacttagaagatgatgtccagcttggcaacttccatgtaataccgggtatcagatgggaccactataaatatcaaactgttaataaaaaggaacaaccttttgagaaaagctattcacatatctcaaaagcactcggtttaaaatatgagctaggaaaatcaacaacattatttaccaactacactgaattatttagaggtccattaggtaaagaaattggtctgggattaactaatcatagtaataatttaaaagcaacaacgggatacaacctggaagctggattgattggttcttaccctgccatttttactgacaacgacacgctaactatctcagggaaagtcttccaaaccaatttcaaaaacctgtcaacaactttagccaacagagaattgcataacatccctaaagcaaggctggaaggatttgagttatctacaggttatcgtattaaggggctaggtttaagagctagttatgcaaaagtaaatgacaaaattgtcaaaggcaacgagttatttaaagaaggtcttgaattcgaaccatcacttggtgattcaattacagttggcggcagttatttgtttgacaaaactgatattgaagccggctggaactcccgatttgtattatctaaaaactccaaaggcaaaggtggtaaaggtggtaatagcgctgtagacgttcataaatctggatatggtgtaagtgatatatatatcgcttggtctccaaaaacaggaacatttaaaaataccgaaatactgttgggcgtagataatatctttgataaacgttacaacgagcattcttactacctgaatactactcaaggacaggaagaaaaaggccgtacgtataaagcaacgatttcttacaaattttagcaaaatcaaactaaaatattcggaaaatcattacattaaaacaacaatataattttcttaacggcggttagataaaccgccgtcttcagataatacatgtccaggatgtcggttatggacaacaaaccagccctattggttgatgacgccgatctactgatagctcctgtggcacgataataatgagttcaattcagtactcgatatctaagcctcctcggagcctccatttggatgctttgacgaacacgactggctagggtttacaacattttttgctatagcgacacgcgccacataaatgtagcgcctcaaagtctttacgatttgatttacacagggttacaacaccattcctttccaacctaaataaaaccgtaaaacattaacgtaaaatcaataagtaatcttctgccgaccagcaagtgaatgggacaatgtcgtaccatctaccatctcaagttcaccaccaaccggcacaccatgagcaatacggcttgctgttacaccatactgaacgcatatctctgcgatataattggcagtggcctctccctccactgtcggattagtcgccagaatcacctcggaaatctcttccgtggcgagacgatcctcaagacgatctaaaccaatatccattggaccaatgccatctaatggggataaatgccccatcaatacaaagtaacgcccggcaaactgcccggtttgttcaatagcatgaatatccgcagggctttcaaccacacagatttgaccattttgttgacggcgtggattagcacaaattgtgcactgttcttgttcggtaaaagtccggcaatatttgcagtgtccaatttctgacattgctctggtcaatgcctgtgccaaacgcattccaccactgcgattacgctgtagcagatgaaaagccatccgctgtgcagacttagggccaacccctggtaaacagcgtaatgcttccatcaaggattcaaggagaggactggtttgcatcagaatggcatcttaaagcctggtggcaattgcataccactggaaatgcctgccattttctctttctgagtctcttcaatacgacgggctgcgtcattgaatgcggcagcaatcaggtcttccaacatctctttgtcatcttccatcagacttggatcgatctcaacacgacggcaattatgagcaccattgatagtcactttaaccagacctgctcccgattcccccgttacttccagactggcgatctcttcttgcattttctgcattttgtcctgcatttgctgggcctgtttcatcaaattgcccaaaccacctttaccaaacatagatttctctcttcgctatggctacatcgtacaacaaggtacagattgcagcatggttaaaccggtcggatactctcttcatccaattcagcatcaaatacctgccgcaatgtttgaatagttttatccgcaataattgattggcgagcttgtgccaatttctcttcataaatggcttgtcgccactccagcggagttttctccgcaggattatcatcttcaataatactgaattcaaccgttacgccgtacaactcacttaaagcccccgctaatgacttttgtgcgaaagcagaattaaggtggcgctggctcgaacgcaagtgtaaacggatattatttgcgctaatctgctctttgaatgcatttaatgccaattgctgcaccagtttaggaattttaagtttaccaacttctgcggcccatgcatctctctgtttagattcttccgttaatttctctgccagctctggtgttttttcatgttccaaagctgttcttaaagcctttggtgtggccacatgagtttctgttttctcctcaatattcttggcacgccaacggtaagcttcttttttctcaggtttgttttcctgttttttatctattgatgactgaggtcgctgtcctgacactgcggcaagccgttccaatgctgaagttgctgacttcatcttaacaggcatagccgattcaggcttttttgttggcgtttgctcttgctgtcgggataacacattccttgctttcagcaactgcgcggttgggcttgatgcaagcgcctgaggtatctggggttccgactgagaagctctatccaatggtgccggttcattaatatcattagcaggtggcacatctccctgagcactatgtttcggctgtgctgtaactgatggtataaccgcaggatgtaccaccggtgccgcaacctcttcaataactgttttcggatgaaatgccaaagctctgaacagagccatttcaacacccatcctgcgctccggtgcatacggcaagtccctacgaccaatcagcaaagtttgataataaagttgcaaatcttccggtgaaacagcttttgccactatccgcaaacggccttcaattgatgaagaatcgctctctggctgagaaggtaacaattggagcattgcaatacgatgcagcaatgcaagaatttctacgagcaaatcctcccaatcagccccccgtgaagcgacttgttccaccaatgccataacctgctgaccgtcagctcgaatcaatgcttcaatgattgataatggctgttcatcatctaacgttcctagcatcaagctgactatttcagttgtcaccaagccttgtccgatagcaatagcctgatcggtcagactcaaagcatcacgcatgctaccatcagcagcacgagccaatagttgacgagcgcggttatcgctctctatatgttcagctttaagaatacgctcaagctgatcgcttatttgacctatatccagcgatttgagatggaattgcaaacaacgggaaagaatagtcactggcaatttttgcggatcagtcgttgctagtagaaatttcacatgctcaggtggctcctccaacgttttcaataatgcattgaaactgtggcgagaaagcatatgtacttcatcaatcaagtagactttaaaacgcccacgagccggagcatattgcacgttatctagcaattcacgcgtatcttcaactttagtacgggaagccgcatcaatttcaattaaatcgacaaatcgcccctgttcaatttcaaggcaattaacacatttaccacaaggcttatcagtaatacctgtttcacaatttagccccttagcaaacaaacgggcgatcgttgttttcccgacacctctcgtgccagaaaataaataggcgtgatgaagccggccatgggcaagaccattagctaacgcggtcaggatatattcctgaccaattacatcagaaaatatttgtgggcgccacttacgggcaagtacctgatagctcattgataccgggaaaatcgaatacagttgagcaccatgctaacacagcctcactatagacagcgaggccgatatgttagtaatacgaaaataagcagattaatgatctgggaattcaagtagagtaaaactacttacaccttgtctttgcagacgctcaacaccacctaagccaagcaaaccaataataaaagccgcttcagaaacctcaccacctaaacgacggattaaacgaacagtggcttcaaccgtaccacccgttgccagcaaatcatcaataaccagcaccttatcgttttctcttacgctatccttatgcatttccaacgtatcagtgccatactccagattgtacgtttcactcaatgtttcccgaggtagtttgcccgctttacgaacaggaataaaaccaacaccaaggcgtaatgcaaccggggctccaaacagaaaaccgcgagcttcagtgccaactatttttgtgatgcctttgccctgatatcgctctaccagaagatcaattgttgcctggtaggcaagagggttatccagtaaagtggtaatatcacgaaaaagaacccccggttttggataatcaggaatagtttcaatactgtctttaataaattgcagttgctgcgcatttgcggtcataatcggtgccaatgagtagaacacgaaggtgctaaaatctattcaaactgatagaaaaaagcaactaatgaacacgcaccagcctactttttgtcgtcccagattaattccgcttcgcaaggcataaccattttaaggtataaatgaatacgcagccgttattaaatttactcgaaaaacaggtcgatatactggcggaagagatagcaccattagcagacacaccattctctactgcccggtttgatcaggctttatttaaccgacacagcgataaactccgtggttatctacaagaagtcaggcacaacatggaacaactcaaagagtgtgtgcaagatcaccgaaccgaacaggtcgcatttctgactgaacgcttagttgcccaaatagaagcattaaggcgtgaattgtctacccagtcattgagaaaaaaagagagccgatttgagcataaacaacaagctactgacctgtatcacaaactggctgaacatcaggattatgaacgccgcctgctcgcaatgatcaatgatagagagctaaaattgaatcaacaaactacacttagtcatcaacaaaaaatacagaaagaaatcgcggcattagccggaagactagcacgttgccgtcaatctctgatgcgtattgaaaaatcaatcgaatacaaagagaacatggactaacgattcagatgaggaatgttttatgtccgtcgaacatgcaccacccgaagttcaacttgctgttgatctgatctatttactggaatgcaatgaaatcactcctgaaatcgcactcgccgcactggaaatagtcaaacacgattatcaagcaaaattagcgaagcaatcaccatcggcaaaggagtattgagcgatttacttcaacaccttaatagatatcttgatcgatactataaaagattcttatttgtcttaagtatgtgatcatacattcatatcaatatcagcctttgctaaatttcaaacggctttatatcgtcattcactctttccactatttcgtttaagaagcgttgaagaataatcatccgcagcaattcgagtgcaaagcgattcccattcacagcctatacaagcagatcttatgatcccacgattgaaagcccatcgcgcctgttttaaataggtctcatcaagcctcaacgtatgacctatatcaattgatcggcccataagagaaccaacagcgtccaaagctcgactatcccggacaatgacactctcgccaaagcaatgaggtttgtcttctccaagcaaaggaatacatatgtcatccggccctgccacaatcaagatatcctcgtcccgaattcgaggaataatcctattgtaattttcaacaaaaccagtggaatatccgttgccagcgtaggtaaaaatacacaaaaggtgatgacctctcagagatattgtcattgttgcgttcctaaatgtgatcaaatgttgcatttttatacaaccaatgctatatgatgaatactgaccatcaacagatcaatttttctaatataaagaaaatcggctaggagtcgactattatgtcgtcacggtgggtatcaaacgagcttgtcaaattatcatcagaaagcttgcaggcaatcatagacaacaagattccagctgcgatgatagatgattttgcaacgacagaagaaacagaacaactttcgtctgcaatcctgagcataaaggcaaaaccctatgaattcggaaggccggggttttatttgggaaatacactcgctcattatcgtgatcgaccaaaagagcaatatttttctcaagttagcgtagctgaacaagatcgcatccaaattatcaatcaagcttttgatccagttgatcggttcatgcgatacaccaatcacgatacaaatttcagcatttcagtcgcagaagagccggggttcggtccctattttgccggtatcgtccgaattatctccggtggctcagatctacatgtagattacgcacccacttttgcgaaagggaatttaatcatcggagatatatcgactcaacttgcttggaacctctatattttatctccctctcagggaggagaaaccgtgatctataatcaaccattcaagagtactgtggttgataaaacatacaagccgtatgacagttctctattagttgattgcgaatctttcacttttcgacctcaagttggttcagtcgttattttcaacacaactaaccctcatattgtcctgcctgcaagtggcaatcgcattgcaacaggctccttcatcggtgtattaaatgagaagaagctgattttatggtcgtaatacatctcagcgaaacatttgggacctgaatattaagattgctttttcttactctaccatcattgtatttattgtaacaattatctcaggagaagcgtcacaataggcacaatgacgcttaagaacgcggttcaagagtggggtaagcccgacgaaccgttttcgcaatcaaaataaccagtacgattttgataatatctcccggtatgaacccaattgaacctacggctgcttgccaagtgctgatattagcaaatacggcaatccacgggataccgattacataaacaaccataattccgccaaagacaagaaatacagcttctttaaaggtattcagttttgcaagatttttctcatacaaataaccgataacaaaagcggcaatcggccatgccaaaataaaaccaccacttggactgagaaatacactcaatcctccccgccctccagacattaccggtaatccaacggaaacaaacacacaaaagagcaacaatgccaatccaccccgtttcgcaccaataatggcaccagcaagcattgctcccattgactgcgctgttatcggaacgcccacaacgggaagtgtcagtggcggaaataaacccagtgctacggttaaagaggcaaatagtgctatataaacaatatctttggtagacatttaatccccctctcttttcaataaaaccacagcctctgttttacttgctgcttgatttacttttgtcaaattctggatcataagacctcgcttcaatcgcggcagaaatatcgtctgccattttgagcatccgcacaataacaggaactgcaattgcaatgacactcttatcaagacctcttgctttctgcgcctcccgtacttcttctgtaattgacgccagaacagggataaaccgcaaagcaagcgataaagccaagctcacctttccaggattgataccaaaataatacagccacccaagccccttttccaacgcgtcgatcatatcagaagaacgagtagtgagagtgaccagcgaggccaacaataaaagagagataagacgaactattacaagtacacctgcggtccagtggtgtagaaacaattggactataaaaataagcacgaagatccataacgccggccgtaattgcatccaagccgtttttaatgagattttggctaacaagtataaaagtacgatgcccgccaatgccgcagcagaaagatcgatacgcggaacaacgaaaagcaatgttcccagaatgagcaaagaaataattttaaacccaggactcactcgatgcacaaatgatgaaccaggattatatccagacaggctcataacatcatccttacgtattcaggaatagcaatagagggtatgtcatcaacaacaacacgaccatcatcaaaaaccagaacacgatcaaatcccgccaaaaaatcaaggtcatgagacactacaattacagtttgagataagttatcgattgctgcggcaacacggcgcttgtttcgtaaatccagcaaggttgtaggctcatcgaaaataatgtaatcgggctccatcaccagaacaccggaaatcgcaaggagttgtttctgaccaccacttaaaagatgggctggatgctccctaaattgaagtaaatcatagcgtgaaagcgcctcttgagttctttgtcgaatcgtgtccttggaaaaaccaagatttttcattccaaaggccaaatcttcttcaacaacaggaaacacgatctgattgtcaggattctgaaatacgaaaccaaccttacgccggatcgctttaccctccgttctggtgttcaaaccatccaccaaaacatcaccatttttcggcaccaataatccattaagaagacgtgcaaatgtacttttaccacaaccgttgctacctatgatggcaatgcgtttttcctttagctgcaaatttaattcttgcaatatcactcgctcgccataggcgtacgttacatttcgtatttccagcatagatggttatcccttaacaattgtggcccgcaacttaacactgcccccatttagcacggtgtctacctgcaaaatccgtagggaaaattcaatcaatacactgatttcagcgttatcaatcagttccaacttactgatattacaagcccttactccacacttgccgaatttaatcagtacattttacacaaccagaatcttcaacatttaccttagggtatagcctttctttgatctcttctctaacaaaaccggcagcagtatctgatattagaaataatttcagcttagtttctcagtctaatcccttatataacagcagataagcaaagagcataagataatgacttttggccattaaccacattgttagcaattaccaaaatagaattcacctctattattctagttcttcatttttcagcaattttcatatgctcactatatttaagcatatcgataaaactatccactaacgactccgcttctttctgaatatcaaaactatctggtgcaaataaccaattttccaacaagcccgttatcaatcctcttaacatgatagccgctcgccgcagatgaagattataaggaagctggcctgatgcaatacaaccagaaagagactcttcaatacgaacatagtctgcaacacacagttcctgacgcacttccaccaaggcagacatttcaccaacaaactcacatttgtggaaaaaaatctccattaatagccggtttttcggatcatcaacgaccgacgtcaggatatggatgattaaagttcttaaaatcaggagtggattattaggatattttgcttgatactctttttctaattcgtcaatcttagaatctgttattctacaggcttcggaaaacaggtctactttatttttaaaatgccagtaaattgccccacgggttaccccagccgttgtggcaatatctgtcagtgaagtagccgagacaccgcgctcagaaaactcttttatagctgcgtctataatctgttgccgggtctcctcagcctgttgtttagtttttcgtgccatacactctatttttaacctaaaatggatttacatacattcacgtatgtttgtattatagcatgctgttattaatggagtaatggttttacggattgaagggtcaacatctaaaaatattgaggtttacttatgcgaataaacaggggagttttgcctctggctacagtactggtactctcaggcagcttagctctttcaggatgtaacgacaaagactctcagcaagttgctgggaaccaacaggctcctgaagtcggtatcgtgacgctgaaaactgaacctctgatggtcacgacggaacttccaggccgaacatcagccttccgcattgcagaagttcgtccacaagtaagtggtataattctgaaacgaaattataaagaaggtagcgatgtaaaagcaggcgcttctttatatcagatagatccagcaacttaccaggctgcctatgacagtgctaaagctgatttggcaaaagctcaggctcatgcagagatcacacgcttgacagcgaaccgatataaatcactgttaggtacaaactatgttagtcaacaggaatttgataaagccagcgccgactacgcacaagcggatgctatagtacaggcagcaaaagcggtcgtagagaccaaccgtatcaatttggcatataccaaagttacagcgccgattagtggtcgttccggcaaatctacgataactgaaggtgctctggtttctgttggtcaaccaacagcactgacaactgttcaacaactggatccaatttatgtggatgtcactcagtcaagtgatgattatctgcgtcttaaaaatgaaatcgctaaaggtattgtgcagaaagaggacaataaggctaaagttcacctaatcatggaaaatggtaaaaactacagtgaaacaggttacttagaattctctgatattactgtagatgaaacaacaggctctatcactatccgtgcaatattccctaacccaaatgaagagctacttccaggcatgtttgttcgtgcaaaattggaagaaggtattcgccaggattcaatactggttcctcagcaaggagttacccgtacacctcgtggtgaagctactgtcatggtggttggtgcagacgaaaaagtcgaaccgcgcgttatcactaccaaccaagctattggtgataaatggctagtagcttccggtctgaaagcaggtgatcgggtcatcgttactggtttgcaaaaaattaaacccggcatcccggttaaagcagaagaagtggacttaaatgcaaaacctgctgcgaaccaagctgaacctgcgaaaaagtcttaatttaggattcataggagtcagtgattcatgcctaaattttttatagatcggccaatctttgcatgggtaatcgcaattatcaccatgctggctgggctgttggcaattatgaaattacccgtagcgcaatatcctactattgcaccaccggcgatttctatctctgcaacttatcccggcgcagatgccaccactgtgcaaaacacagtgactcaggttatcgaacagaacatgaatggtatcgataacctagtttatatgtcttccgacagtgattctgctggaaacatgaatatcacactaacctttgaggccggtactgatcccgatattgcacaggtacaagtgcaaaacaagctacaactcgctatgcctctgttaccacaagaagtgcaacagcaaggtatacgtgtagataagtccacgacctctttcttgatggttgccggattcatctctgaagatggttcaatgtcacaggacgatatctctgactacgttggtgcaactgtcaaggaccctttaagtcgcgtaaccggtgtaggtgatacaatgcttttcggtaaccagtatgccatgcgtatctggttaaatcctgacaagctcgttaactacaagatgacgactttggatgtaataaatgcaatcaaagcgcaaaataaccaaatagccgccggtcaattagggggaacccctccggttccaggtcaacgcctgaatgcgtcgatcattgctcaaacacgtctaacttcaccggaagagttcagtaatattctcttgcgcgtcaatactgacggttctcaggtccgtctgaaagatgtagcaaaggtggaactaggtgcacaaagctacaacatcattgcccgctataacggtaaacctgctgcgggtatcggtgtcaaactagcgacaggcgctaacgctttggatacatccaaagcagtaaaagaagcgctaaacaatatggaacctttcttccctcacgggctgaaaatcgtctatccatatgacaccacaccattcgttaaaatctctattaacgaagtggtaaaaacactggttgaagcaattatgctggtgttcgtggtaatgtacctatttctccaaaatttccgcgcaacactcattccaaccattgcagttccagtcgtactcttaggaacatttgcaatactcgctacatttggctattcaataaatacattaaccatgtttgctatggttcttgccattggcttactggtagacgatgccattgttgttgtagaaaatgttgaacgtgttatgcaggaagaaggtctatcgccaaaagaagcaaccaggaaatcaatgggacaaatccaaagcgccttagttggtattgcaatggtgctgtctgctgtatttatcccaatggccttcttcggcggttcaaccggtgcaatttatcgtcaattctcgatcactatcgtatctgcaatggtattgtctgtgctggtagcattaatcctgacaccagctctatgtgctaccatgttgaaacccattgccaaaggtagccatggtaagcagaccggcgtctttggctggttcaaccgcatatttgacaaaagtacccaccactatactgacagcattggtcgcattctacgtaatacaggccgttatctggtaatttatgtattcctggtggcaggtatggccgtcatgttcacacgtttaccatcctcttttcttcctgaagaagatcagggagtattgctgacaatggttcaattacctgcgggggcgacacaggaacaaacagaaaaagttctagataaagtaagcgattacttcaatacagaagaaaaagatcgtgtggtttctgtatttactgtcagtggctttggttttagtgggcaaggtcaaaacactgggttgggatttataagcctgaaagactggggtgaacgtccgggggctgaaaacaaagtacctgctattgttgccagggctagtgctcacttccagacaatcaaagaaggtatggtttttgcgtttaacatcccggcaattgtagagttaggttcagcaactggctttgattttgaattaattgataaagcaaaccttggacatgacaaactgacagcagcccgtaatcaattacttggcatgatacaacagcatccagatatgttagtaggtgttcgtcctaatggtcaggaagatacccctcaatatcggctcagaattgatcaggaaaaagctgaagctctcggtgtttccatcgctgatattaactcaacactcagcacgatgtttggtagtaactatgtgaacgactttattgatcgcggtcgtgtcaaaaaagtttacgttcagtcggaagcaccttatcgtatgttgccaagtgacatctacaagctgtatgtccgtaacaaacagggtgaaatggttccattctctgcctttacagacacgtccaaagaaccctggacctacggttcaccacgtctggaacgttacaacggcttaccatcaatggaaattctgggtgaagccgctccgggtaaaagtaccggtgatgcaatggccctaatggaagagctggcatctaagctaccaaatggaatcggtttcgactggacaggtatgtcctatcaggaacgtttgtctggtaatcaagccccagctctatatgcattatcattgatagtggtattcctctgtctggctgcactgtatgaaagctggtcaattccattctcagttatgctagtagtaccattaggtatcgttggagccttgttagcaacaacattccgcggcttggataacgatgtttactttaaagttggcttgttgaccactatcggtttgtcagctaagaacgcgatactcatcgttgaattcgccaaggacctgatggaaaaagagggcaaggggttgatagaagctacgctagatgcggtaagaatgcgtcttcgcccaatcctaatgacatcactagcatttatgttaggtgttatccccctagtactgagtaatggtgcaggatccggctctcaaaacgcagtgggtactggggtattaggcggaatgattgcagcaacctcgctagccatctttttcgtgccggtattctttgtggttataagacgacgtttcagtaagaaagctgaggagattgaacccgcatcagaatctcactaaatgctaccaacaataaccagaaggccgtcaaatcggccttcttaaatataatcgttgcttccatctgataagattctgatcattaatctatccgcttaatatttaagtaatttcgtttaaatttaattataatcaccacttatgagtataaaatagctttaaaaatccaagcattagtgactttaataaaattaatataaaatttgtcggacaaaaattactttatctttttttacactaaatgacaaaaaacaataccagcacatagtgacttatgtaataatgatgttatattcattgattattgtagccatcaggctataatctgccgttactggtatctgagggtaatactgttttatataaatctacatattcactcacacatactagccgctatttatagtttattgagttaaggtatgaatttttgttaagagctgattctggtttactagaagcgaatcagagccatctgtagaaaagataaataatcccaaagaacgattatagatacataataataatctcttgaaaaaaattttattttacgtgtatatgcttagtgtttaactcaaaaaaattaagtaatggcatacacagcaagatcaacatagcatggatgaatattcactcaagatgacataacattgatgaattagaatgcttatgtgaaaatctaaggcgagaagtacttctagtgtagagtacacagagatgagactggttgtaaaaatggcttctacatctcaggataatttaaagctaaacaaatagattgaatacatatcaactttcgtttggtactttaaaataaaatattctgatgatttcagccttctcacttgaattgataaatgtattgataatacatatagttatactttgtttagaaacaaattaagattagcgtttctaaacttatggaatggtaaaaaaactaatgaacgcttaaccagcgtcctgttacaggatttaaattgctccttgagcaaaatttgattgaatatttccctcaataattttttatatatgttaaataagaaaggcgattatgactaaaactgattatctgatgcgtttaagaaaatgcaccacgattgatacactggaacgtgtgattgaaaagaacaaatatgaactttcaggagatgaacttgaactattctactctgctgcggatcatcgcctagctgagctgaccatgaataaactgtatgatagaattccaccttcagtatggaaatatgttcgctaaaatagtctttatcagatagaaagtgatccgagccggtaaagtgctatcggcttattaggttaccaatgaaattggcgagggctctgccagcgacatcccggcacacacatcccctgctatggctgcttccttccggacctgaccaagttaacaagttagcgttgcgggagaaccaacagagcccccattgtgacgtgttgctttaactctaaagcgtcgccattatcattcatacctacttaaatagcaagacaagcaggcccgaatgctggtttattgcacattgcaaatcaatacaataaggaaatgtattatctaacggctttcaacgtaatttcgacatctttagtcttcccattattaatcacttcatatgctgtatctgtaacaaacatcaagcggctatgcagcgaaacagaagctctgacaacaatgcgtgcattcggcttaattttgtttggctgataaggcaaaacaaaatggaaaggtgattgtttcccacctaaacgctctaccttctgagacagagtaactgaaggcgcatcagccaaagacacatcagataacgccactgtcagaacagcatctgctggcaatgctatacgctgtagtatattaatattaccttcaacaaaagaccgtttcattagattttcaatctgctccacctgagtatctgctacctcagcacctttgacattacacccaaccaaagcaaccgctagtaatacgccagcgggtaactgccataatttcatacacattcctccattattaactaatctatataaatattaaaataaattgaaatatcaaatcattaaatctaaatcatttgaattatagattaaaaatttgaacataaaacgccaataaatctcacattctttattgcaccgctgttaggacttaaaacatttacaatttagttatttattaatcatctattaatgagacaataatcatcccttgtactctcgataacctaatagaaaacaaaggcatattatgagcaagtcattacagaatctgataaatttgatgaaattggaaaaaattgaggaaggtatttaccgagggcaaagcgaagatctcggttttcctcaggttttcggaggacaagtgattggtcaggcactgtatgctgccaaacaaaccgttgtcgatgaccgaatgggcaactctttccatagctatttcttacgccccggtgacagtcacaagcctatcgtctatgatgttgagattttgcgggatggaggaagttttagtgcccggcgagttagtgcaatacagaatggtaaacctatcttttatatgactgcctcatttcaaagtcacgaagaaagttttgaacaccaaaatataatgccggatgtaccctatccagaagaacttatccctcaggatgaaattgtgaaaaaaatgtcgcatctgctgccacagaagatgcagaatacgcttctttttccctgcccgttagaaatgagacccgtaaaatatcacagtccattcaattgtccaccagaagaacctatacgctatgtttggttccgcagtaacggcaatatgcctgataatccttttattcatcaatatctgcttggctatgcctccgattttaactttctgccaacagcattacagccacatggtgtcgggttccttgagaaaaatattcagatagcaacaattgaccattctatgtggttccaccgcccgtttagactagatgactggctgctatatgctgtagatagtccctcagcttccggtgcccgtggttttgttcggggacagatttataatcgtgaagggatacttgttgcttccactgtacaggaaggtctgattaggaaacgcaatagataaatgagtaaggcagcaaactaagaaaccaacattacattttatggccttattgctgcccttttatattacaacttaattataagcactctctccgtgagaattaatgtccaacccttccctttcaatttcaaccgtaacccgcagccctaccaacagatctgctattttaaaagcaataaaggcaacaacgactgaccaaatcacacaaaccagtatactaaaagcctgaataccaacttgtcccaacatggttataccctctgcataaccgatccctcccaaagatttagccgtaaaaacccctgttagaaggcaacctacgatcccacatacgccgtgtatgccgaatacatcacacacatcgtcaacacgtaaccaccgttttaaggccaccaccccccaaagtccggtaaaacccgcaatcaggccaatgattaatgcaccaccaacaccaaccattcctgccgcaggtgtaataccaaccagcccagcaatacagcctgaacatgcccctaaaagagacggtttattacggaaaagccactctgcaaaaacccatgacaggatagcggcggcagtcgccacaatggtatttaaaaatgccaaagcagctatctcattagcagcactagcagaaccagcattaaaaccaaaccaaccaatatagagcacagtagtgcccgtgaagaccatcggcaagttatgcggtttaaatgcttctttcccaaagccagtacgttttcccagtaagtaagcaccaaccaatccagctacagcagcattaatatgaacaaccgtaccaccagcaaaatccaatgctccatcttgtgaaagcacacctcccccccaaaccatgtgcgccataggcaagtaagaaaatgtcagccacaacacagtaaaaactaacaaagccggaaagcgaatacgctcccctaacgcgccaataatcaaagcaacagtgatacaagcgaaagagccctgaaatgccacatgaattagctgataaaaattgccacttaagtcagtgaatgccaaattctttagcatcacttgactaaaaccaccgaaaaaaccattccctggctcaaaagccaggctataaccataaatcacccacaacacacatactaaagcaaagctcaccatgacctgagccattagcgataaaacgtttttactccgtagcaatccaccataaaacagagcaattcccggaatggtcataaacagaacaagcactgtacaaatcatcataaaagcattatccgctttatcaacaacgccttccgcagcctgagataatgatggtacacaactggccacaacactggcagccactgagaattgccttttcatatctatcttctctatcagtgagttacagtgccgcatcgttagtttctcctgttctaatacgaatagcctgttgtaattcaatgacaaagattttaccgtcgccaacttttccagtaaaagctgattgctgaatagcatgaatgacctcctcaaccaattcatctgctacagcaatatctatctttattttaggtaaaaaattgacactatattcagctccacgatacagctccgcatgtcctctctgacgcccaaatccttttacctctgttatggtcaacccctgaacaccaagaccagaaagaacttcccgaatatcctccaatttgaatggttttataattgtcgtaatgagcttcatatatcccccttccatcctgctattatgttttcaataaggaaatagcaaagggtgtgccagaaattaaaaacatataaaaatcaaagaataatgaagagagtaaaaattatggagaattaagaagggaggagagcagcgaatatactctcccgtgagtgcaccgaattagtgcaagcttgattaaattaacacctctttctcagagattgtgccacattcatttaatgtctcacctacttgttgcaactgatacatctgataataacgtccacgactcacaaataattgttgatggcatccctgttcaacaactgcaccacgatgcagcaccagaatagtatcagcctccacaatggtagacagacgatgagcaatcacgatcaatgttgtttgttgacgaatcaatctcaaagcctgttgtaccgcctgttccgtaccagaatcaatatttgcagtcgcttcatcaaggatcaaaatttgtggcgtttgcactaacactctcgccatagcaagcaattgtttttgaccggctgacaacgtattaccctgctctcccaagatagtatgaagtccatcaggcaatgtacgtactaactcagctaattgaaccgtttccagtacttgccaaaccttctcttctgaaatattccgaccaagcgtaatattgtcaaagaaagagtccgcaagaacaaccgggtcctgctgaactattgccacaccattgcgtaataccgaatgagacagagatgatacaggcctgccatcgagataaatttcccctttctgccacgggtaatatcccatcagcaaatttgccagcgtacttttaccactaccagtatgaccaaccaaagcaacaaaaccatgagccggaacctgtaagttaatatcttgcaaaactatttttccatgccggtaggaaaaactgacattttctatatcaattcgaccactggatagtggctgaccatccataccataaccttgttgagggctatccattaattcaaatattctctcgccagaaacgacagcttgttgcaaaatcgattgctgagatgtcagctcaataagaggttcattcaaccgccccaaataattaataaaagcatacaataccccgataccaatcgcccctggcccactaattccaaacaacacgataagaccgcacagtaccatagcagatagcaaactcaataatgggcgtaacaaaagcccatctaatctcaacgcttgcattctcgcctgataatgggcccgattggttaacaacatacgttcaccaaaacgcgcctgctgccggaactgctgaataacactcattccattaatgacttcattaaactcatcattaatatcagccaaataactacgtacccggcggacaatgggtgtactaaaatgctgatatattgccataacaatcaatacgacaggaaaaataagaattgcaatcaatgccatacgccattccaacataaacatagcaatcagcatcgtaccaatcaatgccatgctgcgaaataccgatggaactacattaacataaagatctttaatgacttcggtgtcattcgttacacgggaaatcaactgccctaccggttgattatcaaaagcactcagaggctggcgcaatgctgcattcatcacatcagtacgaagctgctgaaccacatcaactgacacttgattgaacaataaagcctgaaaatagtgtaacgccgccgtaatcagttgcagaacaataaaagttatagctagcccgataaccactctagtaggcatattacccgttgcaaccatattatcgataaaataactaatgagaaccggaccactgacttccgcaattgcagccccccataacatgagtacagccagccccaacggcttacgataattttttccataaaccaacagacgcttcagagacggccacaattgacgaactttagtcatctttatccccttctgctgtttcctcgccatccaattctgcttcaagttgctgataataatacatatcacgataccatcccggctgctctgccagttgcggatgccgtccctgatgtataacagaaccttgctgcatcaccaggatattatccgcttcagttaatgcagacagacggtgggcactaatgataaccgtccgttgttgcctccactgactgaggttttgtaggatattgtattcagtttgcccatcaaccgcagataaagcgtcatccagaatcaaaatctcggcatctaaaagtaatgccctcgcaatggaaatacgctgcttttgcccaccagaaagcattaccccacgctcgcctacttctgtctgatacccctcaggtaaacgaagaatatcttcatgaacattggcaagacgggcaacttcttcaatctgttcctgtgttgcatcaggacgtcccaaagcgatattcctggcaacagtatctgaaaataaaaagggggtttgattgacaacagcaaatcgtgctcgccattcatctaacctgatatctgcaattttgagcgattggaaaagaatttctccatcagtcacatcaaactgtctctgtatcagcgcaagtaatgtgctcttacctgaaccagttgaaccacagatccctaataactgtccaggtaataactggaaattaatttgactaagaacagttttgttactttgcggataattaaacgctttgatattcacatccagaataccgcgctcaggcaataaattgccaataccatccttaatgaccggaggctcctgcaacaagctacggatacgactataagcggcacttccccgttcaacgatattaaacatccatgccaatgccaacattggccaaatcatcaagccaaggtacatcacaaaactagtgagctcaccgagtgttaaaacaccatttaacaccatccaaccaccaccaccgatagccagtaaatttgacataccgatagcaataaaaattgtcggatcaaatcgcgcatccaccctagcaacatacatattcttacgaccagcttccacggcaacttgttcaaactgatttgattgcagatcttcaaggccaaacgccttaatcatacgaatactggtcagactttcttgagcctggttattcagagcagaaaatgcgccttgtgcagatttgaagcgacgatgaagttgatcaccatatcgtttaataatgattgccataatcggcataggtaacaaagacagtaaagttaattgccaactaatttgtatgctcatcataattagcactgcacagcccataactagcgaatcaactaacgtaagcacaccttcacccgcagcaaacactacacgatccacatcattagtagcgcgagccattaaatcccctgtgcggtgacgcaaataaaattcagggctttgtcggctaagttgctggtaaaaattattccgcaatttaacggctaattgatatgacgccccaaacaaccataaacgccatatataacgcaagatatagacaatcaatgcgataaccagtataactcccgcccacaccatcaattggtaaaatgacatagacgcagtgctgatcccatcaacgattacacccaccagatatggaggaatgagtagtagaatagagataataataagcagagttactgccccaagatagcgacgccactcgctacggaagtaccaacttaattgagaaaacaatctcacacgtgtatatcccgaaatgaaatagatagtagaaatgttgaacgacactcagaataattgaattaacgcaatagattaataattggttaatctggtatcggcaatgctgtagtgtatttgattttttccattgcaaaactcgatgtcacatcaatcaaccccggaacaccattaaccatacgcttgtagaaaagatcataacttttcatatccacaacttctacgtgcattaaataatcacattcaccagccatacgataaaaagctaggacttctggcatttgctttataaatgcaacaaattgctcataccaatcactgctatgctgctgagttctgatcataacaatcactgtcagccctaatcctaatttttcgctatcaagcaaagcaactttaccaacgatatagccttcatcttcaagtcgttttaaccgtttccaacaaggagtagaggtaagattaacagcttccgccaatgcattcagagacagactacaatctttctgtagtaacttaagcaacttgcggtctgttttatccaacatagctacctcttatagaaaaattttccataaagaaaccacatattaagaaaaataacaatctatttctcccagtatcaagttaatctacccgctgccaattatttttaaattatagagttaataattaatgtcacacagttggaccaccaaggcaatcagagagattcaagcagaccatcaacgcagctctgatactcatcttatccgccttaatttgccagtttttccaggtatccatttatatctaaaagatgaaagcacccatccaaccggcagtttgaaacataggcttgctcgttctttattcctttacgcgctgagtaatagttggataaaggaaggtaccccggttattgaatcctcatcgggtagcactgctgtatccgaagcctattttgcccgcctgcttgggctaccttttattgctgttatgccctcatacactgcgaaacgtaaaattcaggaaattgaattttatggtggtaaatgccattttgttaaccattcagcacaaatatatgacgaatcagaacgactagcgaaagaactaaatggtcattatatggatcaatttacttacgccgaacgagcaacagactggcgaggtaacaacaatattgctgaaagtatttttcgccagatgcaaatggaaccatttcctgaaccagattatatcgttatgagcgctggtactgggggaacctctgcaactttaggacgctatatccgttaccaagggcataacactaaactaattgttgtcgatccagaaaactctatattttatgactattaccgtcaaaattgctgtgatattcgtggcaattatagcagcaagattgagggtattggccgccctcgagcagagccttcttttattccctcagtcattgatgacatgatccaaatacccgattgcgccagcattgcaacaatttactggttggaaaaattactaggcagaaaagttggcgcatctacggggactaatgtctggggagcgcttctgcttgctaaccaaatgcatgagcgtggagagcaaggtgcaatagtaactttactgtgcgacagtggtgaacgttatctcgatacttattacaatccagattgggtaaaaaataacatcggcgatatctctccttatctcaaacaactacccaatttccgtagttataagtaacataaccattttattccaatgaggatgttacaatgagacgagctgttgttgtattcagtgggggacaagattccactacctgcctgattcaggcaattaatcaatatgacgaagtacattgtgtcacttttgattatggccagcgccatcgtgccgaaattgatgttgcacgtaatgtcagccattttcttggtgttgttgcacataaagtactggatgtcacattacttaatgaactggctctcagcagtctgactcgtgataacatccctgtccccgaccacagtgaaagcgaaaaaagtgccatacccagtacatttgtccctggccgcaatattttgttcctgacactggctgctatatatgcttatcaagttgaagccgaagcagttattactggcgtatgcgaaactgatttctccggttaccctgattgccgtgatgaatttgtcaaggcattgaacaaagctgtaagccttggcattgcccgtgatatccgttttgaaactccattgatgtggctcaacaaagcggaaacttgggcattgtccgactactaccagcacttagactttgttcgtagtcagacactaacttgctacaacggcattcaaggtaatggatgtggtacatgtgcagcttgtcatctcagagctaacggattagaacaatatctgaatgctccggagaaaataatgactgaaatgaaagcaaaaacacatctagtttaatccaaatggcaatgagagcctttccctctcattgccctgttttcaccaaagcccccattatttcacgtaattcaccttcaatagataatgctctttgtgtctttctatcaatccagacaaacgtagtcttagcatctgcaatgagttgattattccttctacgtatgatttcctgagaaaatacaccacttctgttcctcagttccgtcaatcggcaatccacttccaattcatcgccaagaactgctgaactacgataattaatattaatgttgaccactgcaaacccaacattgtttctctgtatccattccactacagaatgcttatgcaaccattcccaccgagcactttccagaaattctaaatagcgagcattgttcacatgttgaaacaaatctatatgataaccatgaacttttataattgaactcataatattgccttatgttaaagtcactcgtctgactaggttgatttcacaatagcaaaacaaaaaattcacactaattaaagtgatttatttgcaaccttgatcacaacatccccattcacaaaaaaatcatgaatgaggatgatagataatatactagtaactcaacttacttctatttcgttcaataaaaactggcccgattccctgaacctcctgcaattgttccaccgcagtaaacgcaccatgtttttctcgatattcaacaattccttgtgctttttttaccccaataccatttaatgctcttgctaactcttcagcacttgcagtattaatattcacctttcccttttcttctactttcaaagcgtcctgttgctgtaattgcttttctggtgaagaatggctggtagtactggctgctttagcgactttatcttttacttgctcggcggcaatcgcgaattgccctccacacgcataaagcaagccagcgagcaaaacagataaaattcccgattttttcatattaattcctccatgttttatgaacggaaaaaagattgccacagataaatttgagcacaatggacaaagatcagatatgcgaaaggccgcgaaagcggcctttgttgacaagataattacaaagatatttgcgatattctccgcaaatttttattcggtatgccctaacttaattttggctttttcacgcaaactaatcagtaaagactccagcatagcgttacccatttcactctgatagccatcagtcatgcttttaatttgttcttcggatacaacacctggagtaactttatccagttggatcaacacaacgtcatccaaactatttttcgtcaaaccatattctgccttaccttcttttggcagtggtaaagcgaatactgcaccaactaacacattatcctgagatgtacgctgaataacctgagattcaccaaattgaatacctgcatctttcaaggcttgctcacctttaccttcttttaaggcggtcagtaatttctcactttcgacttgaagctgtttttcagctttctggcgtttaaccagttcagtaacctgatctttaactttctcgaaaggctgtactgtttctggcttataattatctacacgcagaacaaatgcacgatcaccttcaacggagataacatcagaattagttcctgttggcccctgtccatcaacaagattaccttcaaaaatggcatgaataacggcaccaaaattaatctctgctggcacactattgcgatcaaaccaatcagtcgtcacaaccttaatacctgaaacttcctcagccgcagctaaagattcattatcgctggtagcagcatcactgactttctgttgcagagcatagaaagcatctaccgctttttcctgcttaaccattttctcaatttcagaacgaacttcagataagggcttaattatttggggtttaacatcatccaaatggaaaatagcgaagccattaggaaccttaatcacagaagaaatttggcctttttctttcaaattagcttgtttcaattcttcaggaagagcatcttcttccatccagccgatctcaccatgatttttcgctgaaaacttatccgtagattttttagtcgctaatttaccaaaatcagcacccttatttaactcatcaaacacggttctggcttcagattcagttgcaagctgaatcagactgtattttttctgctctggttgtgtataacgcttcaaattatgctcataataagcatcaacatcagcggatgtagctgaaactttattcatttcatctacagcatccatcttgatatagctgattttcacttcttcagaagcaataaagctgctcttattcagattatagtaatcttgcaaatctttatctgttacttcctgctgcgcctgaattttcttcagctccagtgtagctatacgagcagttctctgttgcagaagcaattcagcattgagtttcacctcaccaggcaatgctatttcactgccagaaaaggccataattaattgttggttaactaaattctggcgtgtttgttccgcaaaaatatccggactcatattgaaacggttgagcaactccagatatttgttgttatcaaatttaccgtctgtctgaaagtaagaagtatttcggatagaatccttaacttgctcatcactagcagataaacccaattcacgggaatattgatcaatcaatgcattattaattagacgatccaaagcctgattacgaatctgcttcatgctttgttcgtcacttgctaacaccgagaatttatctcctaattgctcttgcaatgcatttctctcttgctgaaacgcctgctccaattgagcacgactgatagcctggccattcacttcggcagcataactaccagctccacttgtcaggtagcccccaacccccgtcaaaacaaaagacaggataatgagagccagcacgattttaagcacaggactgtttgccgccgtgcgtaggttgtccatcataaagaggcaaaactccgctttggtgaaattgaaaacgccatattacgctaattcaagcgctaagagaaaaaaagcgcaccaatcaattgatgcgcttctattttaacttaccaaatctgtctcgtcagtctatgtttaccaatatatacccgttatctttcaagttgcttctttgttggctgctctcggtcacatcgttatctatgctcccggggattcactcccttgccgtcgcgatgcatcttgaaatccatagggtataacaaggattgacaaacaatatttagttcgtgtcacccattaacagcgtctttcaaacctttacctggacggaaagcaggtactttagccgcagcaattttgagctcttttcctgtttgagggttacggcctgtacgtgcagaacgttcacgaacagcaaaagtaccgaatcccaccagagcaacatcatcaccatccttcaatgcacccgttacagaagaaatgaatgcatctactacacgccccgcagctgctttagaaatattagagtcagcagcaattttgtcgatcagttgtgatttattcactcttatcatccccatatagtttttactaccgcatcagaatcccaacggataacccgatagcagtgccgttatatcaatcctttccgatattggcaagaaatcataagacaacaaaatatttattaagcagtttatccaagttaataatataaaaaggctggtaagcctgaattcacttaccagcctatatttcattcatacttattgaaaaaattcactatttttgtactatttgactgacactaattctgcgccaaacacagggtcctgcaatgtaatagccaaaacatcttcaatacgtttaactggatggatctgtagatctgcaacaatgttctggggaatttcttccagatcacgtttattctcttccggaattaagactgttttaattccacctcgatgggcagctaatagtttctctttcaagccaccgattggcagaactaaaccacgcaacgtgatttcgcccgtcatagcaacatccgcccgaactggattaccggtcaggcaggagaccaatgctgtacacatggcgatacccgcacttgggccatcttttggcgtcgcaccttccggaacgtggacatgaatatcccgtttctcatagaaatcagagttgatacccaacttatcagcacgagcacgaacaactgttaatgctgcctgaatggattcctgcataacctcaccgagtgagccggtataggttagtttacctttccccggaacacacgcggtttcaatggtcagtaaatcaccaccaacctcagtccatgcaagccctgtgacctgaccaatacggttttctgtatctgcacgaccataatccacacgttgaacacccagataatctttcaagttatctgaattgatttcaatatgttttaaatttttatccattaacaatgtcttcaccgtcttacggcacagcttagaaatttctcgctctaaactacgcactccggcttcacgagtgtagtaacggataatgccaataatagcactgtcatcaacagttaattcattttttttcagagcattacgttcaatctgcttaggcagcaaatgacgcttggcaatatttaacttttcatcttcggtataaccggaaagacgaataatctccatgcgatccaacaatggtgccggaatcttcatagagttggatgttgcaacaaacatgacatctgacagatcataatcgacctccagataatggtcgttaaatgccacgttctgttctgggtccaaaacttccaataaggcagaagctggatcaccacgcatatcggacgacatcttatcaatctcgtccagtaggaataggggatttttcactccaaccttggacattttttgaatcaatttgcccggcatagagccaatataagtacggcgatgaccacgaatttccgcttcatcacggaccccacccaatgccatacgcacatatttccgcccggtcgctcgtgcaatagactgacctaaagaggttttacccaccccaggaggaccaaccagacataaaatcggtcctttaattttgctaattcggctttgtaccgctagatactcaaggatacgctctttcacacgctctaaaccataatggtcggtatccagagtttcctgagctttaaccaaatcttttttaactttactgcgagcaacccacggaacctgcaccatccaatcgatatagctacggacaactgtcgcttccgccgacataggagacatcattttcagtttttgcaattcagcttcggctttttcacgagcttctttgggcatttttgccgcttcaattttgcgcttcagagtttcatactcatcaggcgcatcatccatttcacccagttctttttgaattgctttcatctgctcattcaggtagtactcgcgctgacttttttccatttgttttttcacgcggttacggatgcgcttttctacctgtaacaaatcaatttctgattccatcattgccatcagatattcaagacgctcaacgacatcagacatttccaaaacagtctgtttatcactgagtttcaatggcatatgcgcagcaattgtatcagctaatttagctgcatcttcaacactgtgtagcgaagtcaaaacctctggcgggatttttttatttagcttaatgtagccttcaaactgattaatagctgtcctgatcatcacttcctgctcacgttcatcaacgatcggtgagtcaagatactcagcatgagcagaaaaatgttcgccattgtcagtcagagttgtaatgcgggcacgtttcaacccttcgacaagcacttttacggtgccgtcaggcaattttaacatctgtaaaatagaagctactgtaccaacggagaaaaggtcattaacccctggctcatcagttgaagcttctttttgcgcaaccaacatgatctgtttgtcatgatccattgctgcttctaggcagtgaatagacttctcacgccctacaaacaatgggatcaccatatgcgggtaaaccaccacatcgcgcagaggcaatacagggatttctatgcgttcggaacgctcaagattcatagagctctctcttcgtttagctttcgccagtttttagggaatctcgtgaaacgcggttctcacgagtttcactccatagaatataaaatatatggggacaggaatttgacattcaatagtatgatactttaataaaaataaaatgagggtagtcccctcattttatttaataatatctcgtttagcgaattccctatcctagactcaattattcaccagaaacttgggcatccggtttgctgtaaattagtaaaggcgcagattgaccattgacaaccgattcatctacaacaactttcccaacgttttccattgatggcagatcatacatagtgtccagcaatgcgccttcaacgatagaacgcaggccgcgggcacctgtcttacgaaccattgctttcttagcaatagccgtcagggcttcacttctgaattccagatcaacaccttcaaggttaaacagtgcttgatactgcttagtcaacgcatttttaggctctttcaaaatctggatcaacgcttcctcactcaattcactgagcgtggcaacaacaggtaaccgcccaataaattcagggataagaccaaatttgatgagatcttctggctcagcctgtgcaagcaattcgccttcagtcgctttttctgactcacctttgactttcgcactaaatccaatacctgtactggtatttagacgctgaccaatcactttatccaaacctgcaaacgcaccaccacaaataaacaggatcttagaggtatctacctgtaaaaactcctgttgtggatgtttacgccccccctgaggaggaaccgcagcaattgtaccttcaatcagtttcagcagcgcttgctgtacaccctcacctgaaacatcccgagtaattgacgggttatcagatttacgtgaaatcttgtcaatttcatcaatgtaaacaataccgcgctgagctttttgcacatcgtagtcacatttttgcagtaatttctgaataatgttttctacgtcttctcccacatatcccgcttcagtcagcgtagtcgcatctgccatagtaaaaggaacatcaagataacgggccaatgtttcagccaatagtgttttaccactccctgtcggcccaatcagcaggatattacttttacctaattcaacaccgttactggtatcgccattacgtaaccgcttgtaatggttataaacagcaaccgccaacacttttttcgccgtttcctggccgatcacataatcatccaaatgctgacgaatttcatgaggcgttggtaatgcattacgctcacgatgtggtacaagctctttaatttcttcgcgaatgatgtcgttacataaatccacacattcatcgcagatatacactgacgggccagcaatcaattttcgcacttcatgttggcttttcccgcagaaagagcaatacagcagctttcctgaaccgtctttgcgcttatctgtcatcagtacaacctcactttatcaactgctcacccagattcgtctggcaaagcaggaaacttctgctattaccccgaacgtcatagctttaccaagtggtaagccgaatgtttatattatagcttccgggaataataaattaatcgcgatgggtgaaaatcttatcaaccaatccatactctacggcttcgtctgctgacaagaaacgatcacgttctgtatctttcgcgatctcttcaatcggtcttcccgtatgttttgccatcaactcattcatacgcgattttactttcagtatttcctgagcgtgaatttcaatatctgtagcttgcccctggaaaccgcctaatggctgatgaatcataacccgggaatttggcaagcagatacgttttccctttgccccagcagtcaacaagaatgctcccattgaacatgcctgccccatacaaatagtactgacatccggtttaataaactgcatcgtatcatagatggacattcccgcagtaatcacaccacctggtgaattgatatataagaaaatatctttttccggattctctgcttcaagaaacaacatctgagctgcaaccagatttgccatgtgatcttcaacctgaccggtcaggaaaataatacgctcttttaataagcgagaatagatatcgtatgaacgttctccacgagtagtctgttcaactaccatcggcaccaaagccatgtgaggcgcatattgatcccgcttgtcgctatatgacattttcgtctcctaatagaattcatgttggtgccattcataaccaattctacttgagataagcgatgatgaccatgattcaaagttagccagtcaagggggaattccccctgaaaaatttggcaatcatatacataatattaaaaaggatctgagggtaaacccacttttttcaagaaaaatcttgcctcttaatttataaaaaaacccgcaggttaatctgcgggttcatttcactgagatgataaattcattatctcatgacaaaactaaaacttatgccatttgattctgattcattaactcattgaaagttgtttctttttcagaaacttttgctttacccaaaagaacttcaacagcttgttcttctaaagcaacattacgaacattattcatcaattcttggtttttaccatagaattcgatcacttcttgaggagcttcataggcagaagccatttcctcaattaatgctttaacacgttcttcatcagctttcagctcattactactgataacttcgcctaataacaaaccaacaacaacgcgacgcttagcttgttcttcaaacagttcacgaggcagttccaaagcttgtttttcattgccaccgaaacgctgagcagattgacggcgcagaacatcaatttcgctatcaacaatagcagcaggaacgtcgatttcgttaaccttaactaatccatcgataacctgagacttaatacggttacgaactgcatttttcagttcacgctccatatttttacgtacttctgcacgcaggccatcaacagtgccatcagcaataccgaaacgtttgatgaattcttcattaaactctggcagctcacgctgttccacttttttcaacgtgattgcaaacttagccgctttacctttcagattttcagcgtgataatcttctgggaaattgacatcaatggtaaattcttcccctgctttatgaccaacaatgccctcttcaaaacctgggatcatacggccctggcccatagccagcacaaaatcggaagccttaccaccttcgaactcttcaccatcaacagaaccattgaagtcaacagtcacacgatcttctgcaccaacagcttcttcggtttctttccaattagcctgctgcttacgcaatgtttccagcattgcatcaacatcttcgtcttttacttcaacaacgggcttttcaacttcaatagattccagatctttcaattcaatttctggataaacttcaaactctacagagtaagtgaaatcttcaccatttttgaattgttctggtgcataacttggcgcacctgctggattaattttttgttcgatgattgcattaataaagttacgttgcatcagatcactcagaacgtcctgaatgacagaagcaccgtaacgttgtttaacaacgttcataggcactttgcctttacggaaaccatcgatacgaactttttttgctacattgaccaactcactactaactgctttctcaacatcggcagcaggaacggtgattgtcacacgacgcccaaggccttgagtggtttcaacagaaacttgcatctttttacctcaaaaaaatcatagtgctcggtcaactccagagaccatacaaccagcacatattttatgcaccaatcgcaacactctctaagaaccggggcggtcgcatttaaaaaccgagaatccctgatgtcagaagcgtcccgaaaccattctaaaaattagacgcgacattatagcgatgcagacggtgtgagtcgagaattgctgaaaaaagcccgaactattcatcaacttcacaggataacgattattcagcggctaaatttgcatccaaaatgtatcatatataaaacgtaaaaacggcccgaagaccgttcactgaatttattctattgtgtaagaaaacgccccaaattaagtatcaatcagcggatttcagacaacaatattacccccacgacatgccggtgacgctaaaacagtatcctgtaattcattccactctttttctgtgtaggtatgcaacgccaaagcatgaacacctgcggccaactctgccgataatacgctgtaaacggaacgatggcggttcagcatacgttcaccagcaaatttattactgatgatgacgactttaaaatggctttcagaacctatgggtacattgtgacgataactttcatcaatgacctcaagatatgagggattaaatgcaacctgtaatttctcttctatatcctgatacaccatatcattccccttaaccgcacagtagtcatactgccaaccatactaataattttagtctattctccatgagttatagcatcaacgcattaaaatatctttcaatcgaatcccacatcataaggtttttatatgcgtttaccccatcagagatatgccatgatcaaaaggcagtgctattattgacgtaatttatgctattgataagtattactggatatccttatcactgatgagaaaattaacatgttgaaaagaatcttattcccattcattacgctttttcttcttgctggttgtgccgctcccagcaatatcctgactatcgaacctaaaattacattgccaacagcagatccaacaatgggcgcgattaccatcagtatcagcggtgccgacaatcgtcagtctcagacacttgctcaagttaaccgcaatgcaaagctggaaatactgaaaccctcccgtgatctgcgttttctactccaagaaatcctggaaaaacagatggccgcccgtggttatatgattggctctccagccaatgccaatctgcaaattattgtgaacaatctatatgcagacgttaaagaaggtagcctgcgccataatatttcaacaaaagccgatatttccatcattagtacagcgcaaaatggcagtaaacaagttaagaattaccgcactagttacaatgtacaaggtcctttaggcgcaactaatgagaaaattgctgatgcagtcaatactgtattatcagaagtcatagcagatatggctcaagatccttccgtcagtaatttcatcaaacaaaatgctcgctaattaaaggattaattatttactctgcccgcaaagggcagggttttgggaggcacatgtcttatcgttatctcaccgtttttacccaacataattcacgaattctgcttttactcggctttgtttctggtttaccgctcgcattgaccgccagcaccctgcaagcatggatgaccgttgaagacgttgatctgaaaacaattggctttttttctcttgtcggccaagcgtatgttttcaaatttctttggtccccttttatggaccgctttatccccccttttcttggacgtcgccgtggttggctacttgttacacagttattacttatagccagtatcgcggcaatgggctttctccagccatctcaacatttatggtggctagccacactggcagtaaccgtcgctttctgttctgcatcacaggatatcgtctttgatgcttataaaaccgatttattgagtagcgaagagcggggtgtaggtgctgccgtttcggtatttggttatcgattagccatgttagtttcaggcgggttagcattatggatcgcagaccgctatattggctggcaacacacctactggttgatggctggactgatgctgattggcgtctacgcaacgttaaaagctagagagcctgaaattgacgctccgtcaccaaaaacactccagcaagccgcaatagagccattagtcgatttttttaatcgcaataatgcatggctgatactactgttaattgtcatgtataaaatgggagatgcctttgctgccagcctaagtaccccatttcttatccgaggtattggctttgatgctggtgaagttggaatgatcaacaaaacgctgggattagcagcaactatcgttggtgcattatatggtggttatttaatgcaacgatggagtttattccgctcactcatgatctttggcatcctgcaagcgatttccaatattggatactggctgttatccattactgacaaaaatatctacactatgggcagcgccgtttttctggaaaatatctgtggcggaatgggaaccgctgcatttgttgccctaattatggcgttatgtcataaatcgttctctgcaacacaatttgctttattatctgctttatctgctgttggacgagtctatgtcggcccaattgcgggttggttcgttgaattacatggctggccaaacttctatctattctctatagcggcttctgttccaggcttattactgttatttatctgccgccagactctggtttatacccagcgaactaacgattttatgccacgtactgaattcaaaaattcctatcgtctagcgcttggcttactatcattagcaagcatcttgctcacattctggttatttaccatcaccaccaatgctcttaactggactcatgcaccttatctggccgaaacattgctattatgggcagcacaaattggtatcacaggcatcattctcggtagctttctagattatctcgcattaagaaggaacaaattggcttaaaaggcgaaaacattaagttaatttattaaaggttgacgacggtcagcctttgatatctctgccctctttttaaatatttaagtgatagcgatcacacttcaaatagtcatttgcccaaaagtgctattttcgagtaattatttgattgttcaatattcatatccgcgtagaatcagactaccattttaagggttatttaatatagctttgaaacccaaaacctcttttcatggatgcgttagagaaatttatgagaacaaccattctggctactgctttattcaccaccgtctcagttccagcttatgctgaatatcaagggggctttgctaatatcagcatgaactacctcgactggactagccataccacacacaagtcagggcaaacctctcataaagacgactttgcctacttagaactggaaggcggagccggatttaactggggtgaactatacgggttctttgatctggaaaatgctttcaacaatcagcatgctgaaccaggggataaccaaagatacacttttaaaacaaccggtcgcttttatctggctgatacaggtttcaatctctatggtcatgtttatggtacttattcgctcccaggtacagcacatggcgggaacttccatgaggtaaataccctctatggtattggctacaacactgatttcgctggtgtctggttcaaaccgtttgtggcgctgcactatgttgaccaaactttctactccggtaataacggctatgtcgttggttgggttgcgggttacgactttcaactctgggaagaaaaattcagcataactaactggaatgaaatagaacttaatcgaaatgaacgctacggcaacggtggacggaatggtaccaatggtgcaatagcgttatggtggacacctcaccaatccttcacaactggcattcaatatcgatatgccgatcataaattgggtgaagacttctggcaggatgggattgtttacactatcaaatataatttctaattattgattttaattgtgagctatcaaaagtggctcacaattaatttaattcttaaataaaatggccgcagtggaaatttttaaagcaaatttttatatttttttcctcttcgctaaaaaatataaaataactttagtataaattcgtatttccgccctatttcgttacaattaaataaccttttcaagctaacttctgattaatcctccacttgcatgtgatcccatcgacataaagggtaacaacccctcaactaactattacaaatgtttacactccagtagccttaccgtagaatgcccgcactgatgaaacgacaatagagcttttgttatttggagtcgttagatgagacttatgaaatacaataaaggtattgggatattatcaatactcgcagctactcttgtgctgagtggctgcgatatggtattgatgaatcctaaaggcgccatcggcgctgaacaaaaaacgctgatactcacggctatcggcctgatgctgatcatcgttattccggtaatcatcatggcattcacctttgccctgcgttaccgcgaagccaacagaagtgctacctatcgccctaactgggcacactcaaataaaattgagctggtagtatggaccgttcctatcattatcattattattttagcaaccattacttggaaaacaacccacgagcttgacccatataagccactggtcagtgatgaaaaaccagtgactattgaagttatctctcttgattggaaatggctattcgtttacccggagcaaggtatcgctacagttaacgaaattgctttcccttccggggttcctattaacttcaaaatcacctctgattctgtgatgaactcattcttcatcccacagttaggtggtcaaatctatgcaatggctggtatgcagactaaacttcacttaattgccgatgaacctggcacttataaaggtttgtccagcagctatagtggccacggcttctccggcatgaaatttactgctaccgctaccgcagatcgtgaaggttttgaacaatgggttcaaaaagtgaaagcctctcccaagaccttggataccatgcaggcatttaacgagttagctaaacaaagccagaaccatccggttgaatacttctcaagcgttaagcctaacctgtatcaagacattattgccaaatttatgggcaacatgaatatgcatggcggccacggtacaacgacaggtcataacatgaatatgagcgaaactgctcatgccggagttgaggaataaagtaatgttgggaaaattaacacttgatgcaatcccattgcatgagcccattgtcatggtcactcttgctgggattctcttcgcagggctcgcgattgtcggagccctgacctatttccgtaaatggaaatggctgtggagcgagtggttaaccagcgttgaccacaagaaaatcggtattatgtacattatcgtggcgctggtcatgatgctccgtggttttgccgatgccatcatgatgcgtggtcagcaggctgtcgcctctgcgggtgaagcaggtttcctgccaccgcatcactatgaccagatctttaccgcccacggcgtcatcatgattttcttcatggcgacaccttttgttgtcggcctgatgaacatcgtggttccactacagatcggcgctcgtgacgtggcattcccattcctgaactcactgagcttctggtttttcgtcgttggcgttgcactgattaacatctctctgggtataggtgaattcgctcaaactggctggttagcttatcctccactctcaggtatagaatatagcccaagcgttggggtcgattattggatatggagtcttcagatatccggtatcggtaccttgctgactggcgttaacttctttgcgacgatcctgcgtatgcgtgctcctggcatgtccatgatgaaaatgcctgtattctcttgggcagcgctctgtactaacgtactaatcatcgccgcattcccgattctgacagttaccattgccctgctaacttttgaccgttacatgggtacccatttcttcaccaatgatatgggcggtaacatgatgatgtatatcaacctgatatgggcttggggtcaccctgaagtttatattctggtgttgccagtctttggtgttttctctgaagtgactgcaacgttctcgaaaaaacggctgtttggctatacatctctggtatgggcaaccattgccatcaccgtactatcgtttatcgtatggctgcatcacttctttacgatgggctccggggcgaacgttaacgccttcttcggcatagccaccatgattatctcaattccgacaggcgttaagatcttcaactggctgttcacgatgtatcgaggccgtattgagtataaaacaccgatgttgtggaccgttggcttcatcgtcaccttctctatcggtggtatgactggcgttctgctggcagttccaggtgcaaacttcgttctgcataacagcttattcctgatcgcacacttccataacgtgatcatcggtggtgttgtcttcggttgtttcgctggtactgcttactggttcccgaaagcttttggtttcacactgaatgaaaaatggggtatccgcgcattctggttctggatcaccggcttctttatcgcctttatgccagtttacgcgctcggatttatggggatgacccgtcgtattagccaagatatcaaccctgaattccataatctgctggtcgtctccgcgattggtgttgcactgattgccgttggtatcctgtgtcaggtcatccaattctacgttagtatccgtgaccgtgaccaaaaccgtgacctgaccggtgacccgtggggcggacgtactctggagtgggcaacatcttctccaccaccgttttataactttgctgacgttccacatgttcaaacccgtgatgcatggtgggatatgaaagaaaaaggcactgcttataaacgtcctgctaagtatgaagaaattcatatgcctaaaaatgccggtgcgggtgtaattattgctggctttaccttgctgtttggtttcgccatgatttggcatatctggtggctggctatcgcaagcttcgcaggcatgattatcacttggattgcaaaaagctttgatgaagatgttgattactacgtacccgttgctgaagttgagcaaattgagaatcagcaccatgaacaaattagcaaggcaggtctgaaccatgtcaactgaaactatgactaaccacaatcatgcccacgagcatcacgggcaccacgatgcgggagccactaaagtattcggtttctggatctacttgatgagtgactgtattttgttcgcatgtctgtttgcgacttatgcagtactcgttaacggaaccgcgggcggtccatctggcaaagagattttcggcctctcttttgtattggttgaaactttcctactgttattcagtagtatcacttatggctttgccatgttaggaatgaacaaaggaaaaatcggccaggttaacgcctggctcggtatgactttcctgttcggccttggcttcgtagcgatggaattgtacgaattccatcacctgattgttgacggccacggccctgaccgcagtgcgttcttgtccggattcttcgcattggttgctactcacggtatccacgttacctgtggtctggtctggattattatcatgataatccaagtaacccgccgcggtttaactgatgtcaataaaacccgtctgaactgcctgagcttgttctggcacttcttggatgtggtatggatctgtgtatttaccgttgtttatctgttaggagctatgtaatgagtcattctgataccgctcatactggagctagccacggtagcctgaagtcttatctgataggcttcgttctttcggtgatactgacagtgattccgttctggatggtaatggatggttctgcctcccatacgactatcctgacaacagtagttgctctggctgtggtgcagattattgttcattttatctacttcctgcacatgaacacttcgtcagaagagcgctggaacttagtagcattgctgttcaccattttaattatcggtattgttgttgttggctcactatggattatgtacaacctcaacattaatatgatggttgattaaagagctgcatatatgattaagcaatacctgcaagtaactaaaccaggaattattttcggcaatttaatttctgtgatcggtggttttctactcgcctcgaaaggggtgattgattaccctttgttcatctcgactctgctcggcgtttcattagtcgtggcttctggttgtgtatttaacaactacattgaccgtgacatcgatcggatcatggaaagaacaaaaaaccgtgtccttgtaaaaggacttattgatccgaaaatcagcctgatttacgcatcaatactgggtattgctggcatagtgctgctctatgcagcagccaatgctttagcaatgcaattagcgattatcggttttgtcgtctatgtaggggtttacagcctctatatgaaaaggaaatctgtttatggcacgttgatcggcagtttgtccggtgctgcacctccggttatcggttattgtgcagtaactggtcagtttgatacgggcgcgttgatcctgttactgattttcagcctgtggcaaatgccgcactcctatgccattgctatttttcgtttcaaagattaccaggcagccaatattcctgtactgcccgtcattaaaggcatatctgtggcgaagaaccacattatcctttatatcctggcatttatgattgcaacccttatgttagccatcagcggttacgccggttacaaatatttggttgttgcagcagcagtgagcgtctggtggctaggaatggcattatccggttacaaaactgataatgaccgcatttgggctcgtaaattatttatattttccattgtggcaatcacttccctgagtgtcatgatgtctattgacccgcatgtgccctcagaagccttcctaacttacgtccggtaatttttcctgatggcagtggcaatactcctctgccatcagttctctcatcctaatttccctctccttaatacttcaatattattaattcaattaactatttaccccttattgaaaacctatctacaatgacgcatcaaaatatttcgaggtaatcatgaacgataataaaatgacgccacttgagcttcgggcgacatggggcctaggttcagttttttctctgcgaatgctaggtatgttcatggttcttcctgtattaacaacctacggccttcatctaaaagatgccaccgaaacacttattggcatcgctattggcatttatggtttaacccaagccattttccaaattccagttggcctgctttccgacaaaattggccgtaagcccttaattattggcggattattgctattcgtccttggcagtattattgctgctctcagtgattccatctggggcataatcattgggcgagcgttacaaggcgctggagcgatatctgctgcaattatggcgctactttctgatttaacccgtgaacaaaatcgaactaaagcgatggcttttattggcattagcttcggaataactttcgccatagccattgtacttggcccaatccttacgaatgctattggattaaatggcctattttggggaattaccattctggccggtagtgccattctgataacactattggctgttccttccacagataaacacatgcttaaccgtgaatcaggcattgttcgtcacagtttcagtaaggttctggctgatagccagttgctgaaacttaactttggcattctcagtttgcacactttgctaatggcaagttttgtcgcccttcctctggtgatgcaacaagcagggctccctacccagcaacattggaaggtttacctgatcactatgctagtttcattcttatctgttttacctttcattatttacgcagaaaaaaaacgccgcatgaaacaagtgttttcactgtgtatcacgatgctgctgattgctgaaattgtattgtgggcggcgggacatcacttatggatgatttttatcggcatacaaattttctttattgctttcaatgtaatggaagctatcttgccatcactcatcagtaaagaagcaccagcgggttataaaggtacagcaatgggtatctattccaccagccaatttttaggtgtcgctttagggggtggcctcggtggttggttatatgaattaaaaggagcaccgctggtatttgcagcaggtatcgttctgacaatcatttggttcattatcagcacaacaatgaaacaacctccttatgtcagcagtatcagaatttctctaccagaaaatatcgtcaataaggcattgctggaacaaaaaattcttgttcagcccggcgtttgcgacgtcgttattgttccggaggagcatagtgcctacataaaagtagatactaagctgataagcagagcacaacttgaacaattgatagctaataataatgacacgatagattaagtatcaaaccagataacccctactcgctccgattcgacattaaggtaaattgggagtgggactcctggtcaggaatatcccactccacattaggctagatatatcaatccattaggcggaaaatcaatcccggaaattagtaaactggaatggctgtcccagctctgcgccacgaactaatgccataacactttgcaaatcatcacgagctttacctgtcactcgcacttgctcaccctgaatctgtgcctgtactttcagcttactatccttaatcagcttcacgatctttttcgccgtaggggtatcaatcccctgcttcaaagtcgcgtcaacgctgtaagtcttaccactgtgcaacatatcatcagggatattcaatgcagcaccatcgataccacgtttagccaacttttcacgcatgatatcaaccaactgatttacctgaaaatctgactcactggcaatcttgatagattcacttttttcatttaattcgaaactggcgttgacattacggaaatcccaacggctagtaagctcgcgctgcgcattttctaccgcattgcgaacttcatgcatatcaatttctgaaacaatatcgaaagatggcattatccatgacctcctgataatcaataagttggcatgataaccgctttccattgtcagcaaaagctctatactcagattcgcgggatcttatcatttctatccattaccataatagcgtctctcccggaggattatatgaagataaccgttcttggctgtggcgctataggaaaactgtggctagcagcattatcacaacaaaaacatcaagtacaaggttggctaaaaagttcccgatcttatttatctgttcatattgacgaaatgaatggggaaatattcaaccaaccaatcccaactaataacagcgaccatcttaccaacagcgaattactgattgtctgtctgaaagcatggcaagttgctgatgcagtgaataatttactccccaaactttcacctaattgtccaatcttattactacacaatggcatgggcacccaagaagaactattatcagcgcctaatccaatactgcttggcgtcacaacgcatggcgcatatcaggatgaccaacaggtttatcataccgcttccgggctaacctatattggttcagcaacatcaaatgcaactgggcttagctctctggctaatgtattacaccaatctttgccagatgttgcatggcataatgaaattctctctattagttggctgaaacttgccgctaactgtgtcgtaaacccgctgactgcgctttatgaatgccaaaatggagatctgcttcgctacccagaacaagtgaatattttgtgcgaagaaattattcaggttatgcaacgagaaaacatccataccactatcgacaacctgatttcctatgtctacgatgtgattaaacttacagcaaaaaactactcatccatgttgcaagatgtccgcgcaaagcgtcgcactgaaattgactatatcaccggttatttattacgccaagcccgggcacatggtctggcagcccctgaaaatacccgtatctataacctagtaaaacataaggaaagatgattatgaacccttcagcactcatctgcctgactcacggtagtgaagaaacagaagccgttacaactattgatttactggtacgcgctggcatcagtgttacgattgccagcaccgccagtgatggagaattggttttaacttgctccagaggtgtgaaactggttatacgattcggggttcacgtaataggaaccccgaaacatagaattgaaacaattaaggccgataaactttcacgttatcaaaaccctgttcagataaataaagtgcctgcaaacggctcattactccacgttcacaatagagcagataagtcttctcctttggcaaatcaccaaactggctgctcaacttatagaatggcaatgatttgatttccacaccattcaactgtaatggccgatcatcttgctcatcaggtgaacgaatatccaataacacatccgttggagcgaacgctgtcactgtttcaatttcaaccacttgctcactgctttgttctgcgatctgacgaatatcaacattctgagcttcactgacaactttttccaaaatattaaaatcgaaattcgcttcttctgcttcaattttagctttaacggcttttactgtcgggctttttgaaataacaccacagaattcaggcattgtacgagcaaaatcctcagtgcctatttcacgtgccaacctgataatgtgttctttatcatgagaaatcagtggccgcagaatcaacgtatccgatgcattatcaatcaagcgcaaattagtgagtgtctggctggaaacctgtcccaaagcctcaccggtaacaatcgcctgcacgccataacgctctgcaactttagatgccgctcttaccatcatccgtttaagcaccacccccatttgaccatcatcaactttttccaaaatttcagcgacaacaggttcaaaatccacagcaacgaaacgaactttatgggaactgccaaaacgattccaaagataatgagcaacctgtttcacaccaatttcatgagcagaaccgccaagattgaagaaacaatagtgaacacgacagccacggcgcattagcatatagctggaaacaccggaatcaaaacctcccgaaattagagacaatacatcttcctgcgttccgataggaaaaccaccaatcccctcatagcgggcttttaccagaatcaacacatcttgatcaatttccagattaacagtcacatcaggatgattgagttttacttttgcagattcaatatgctggtttaaaccaccaccaacatagcgttctacttcattagaagtaaattgatgtttacctcggcgctttacccgcacgcaaaatgtcttattgtggagcaattctccataagcctcataagcttgttcaaagatatgatgcatatcacgaaattcacgctcttctacttgcagaatatggtggatcccgggaatacgtgtcagcgcatcacaaatttgaacgccaaggttttcatctttagtgcgaacttcgatattatcccaatggcgaaccacggcaatattatctcctaacgttttcagcacattgcgaatattactcgcgagaattttaataaagcgcaaacgaacagtttggctcttgatcgtgatttcagggaataatttaataataaacttcatagtgagttatagtagtagttaggcattttgataaataaaactgatggtatgttttggttgtcaaatcaagccgcgaagtataacactatctcgtggtatagcgcgtaaaaaacacaaaaccagttaaggatttgtttgcaccagcgtaataggatagtctgcaactctcaggcgaactctgtataaatagtaaaaaattatgccaaagaaaaatgcaatatcagaaagtacaaacagtacgccagaaactgcaccagcaatgacatttgaaagctcattaaaagagctggaacagattgtcgcccggttggaatcaggtgaactggcactggaagaagccctaagcaagtttgagcgtggtatccaattagcccgccaagggcaacaaactttgcaacaagcagaacaacgagtacaaattctgcttaacgacgacacccaatcgccactgagtcatttctccccggatactgaataagcctatgtctgaacaaaattcaacccaatttaaagaacagcttaaaatctgtcaacaacgagtcaataacgttctgataagcacactatcttcagtggcatttgcaaacaacccactagttcatgcaatgcaacatggtactttactcggtggtaaacgcctgcgcccatttttagtttatgccgttggtgaaatgtttggattatccgcaaataatctggatgctccagcagcagccgttgaatgtatccacgccttttcattaattcatgacgatttaccggcgatggataacgatgatttacgccgtggacaaccaacctgccacataaaatttggtgaagctcacgcgattctagcgggagatgcattacaggctctggcgtttgaaatcctatctaaaagagaaatgccggatgttacaacagcagatcgccttgaaatggttgctgaattggcaaccgccagtggtatagccggtatgtgtggtggccaagccctagacttggccgctgaaggcagacacattgatctccatatgctggaacaaattcatcgccataaaacaggtgcgcttattcgttgcgccgtcagaatgggcgcatatggtgcaggccaaagtgggcatgacgccctgcctgaattggatcaatatgcccaagcgattggtctcgcattccaagttcaggacgatattcttgatgtcattggcgataccgaaatgataggaaaacgtcaaggcagtgaccaacagctaggaaaaagcacttaccccgcattactagggttagaacaagcacagaaaaaagcatacgaactgtatcaagaagccttaaaagctttgaataaactggaagataaatcctataacacaacaatgctgcgcgcacttgccagctttattattgaacgtaataactaaggtctgccggtaaatctacctgctggcagcgctattaataaacacttcttaacgagcatcaaatgagcattgatatagccaaataccccacattggcattagcggaaaatcctgaagaacttcgtatgttgccaaaagagagcctgccgaagttatgcgatgaacttcggcaattcctgctaaacagtgtcagtcgctccagtggtcattttgcctccggtcttggtactgttgagctgactgtagcattacattacgtctataaaacgcctttcgataaattggtatgggatgttggccatcaggcttatcctcacaaaatcctgacaggacgtcgagatcgcattgatacgattcgtcaaaaaaatggtcttcatcctttcccgtggcgagatgaaagtgaatatgacaccttatgtgttgggcactcatcgacctctatcagcgctggattaggtatggcaattgctgctcaacgcgaaggcaaaggccgccgtacagtttgtgttatcggtgatggtgcgataacagcggggatggctttcgaagcgatgaaccacgccggggatatcgacccggatatattagtcattcttaatgacaacgaaatgtctatctcggagaacgttggtgcattaaataaccatctagcccaacttctttccggaaaactctacaccacattgcgagaaggcgggaaaaaagtcttttccaatctaccaccgattaaagaactactgaaaaaaactgaagaacatatcaaaggcatggttgttcctggcactctgtttgaagaattaggttttaattacattggtcccatcgacggacatgatgtactgacattgactcaaacactgaaaaatatgcgtgagttgaaagggccacagctactgcacatcatgaccaaaaagggtcgtggctatgcacctgccgaaaaagatcccatcagctggcatgcggtacctaaatttgatccgaccactggcgcattacctaaaagttcagacaaccgccctactttctccaaaatctttggagattggttatgtgaagaggccgctaacgataaaaaattgatggcaattacacccgccatgcgtgaaggctctggtatggtgcgtttctcccgagaatatcctgatcaatactttgatgtcgccattgcagaacaacatgccgtgactttcgccgctggtttggcaattggtggttacaggccgattgttgctatctattcaacatttctccaacgtgcttatgaccaggttatccatgatatcgccattcagaatctacctgttttatttgcaatagatcgcggcggtatcgtaggtgctgatggtcagacacatcaaggtgcctttgatctttcattccttcgttgcatccccaacatggtcattatggcaccaagcgatgagaacgaatgccgccaaatgctacataccggctatcattatcagcaaggtccagtagccgtacgttatccacgaggaaccggaacgggagcagaaccccaaccatttgaacaattgccaattggtaaaggtgttattcgccgtcagggtaataaggtagcgatcctaaactttggtactctgttacccgatgcaataacagcagcagagtcactggatgcaactgttgttgatatgcgttttgtcaaaccactggataaagaattaatattagacatggccgataaccatgatttattggtcacactggaagaaaatgccattatgggcggtgccggaagtggcgttaatgaattactaatgcagaaaggccgcctggtacaaattctgaatattggcttgcctgatcaatttgtgccacaaggtagtcaggaagaaatcaaagcggatttagggcttgatgccgccggtattcaaaatagtatcaataaaaggctattttcctgagtgtatagggataataggatatttatcctattatcctcaatgtgtggatttacagattaatcacgtataatgatttgagttaaaatcgccagcagtctacaccccctactctgacgcctacgttaggaaatattagtgataatctgtcgaattgttccattattggaattgtaattaaataatctataaaccgattggtttgctgtagttaattttagtgagcgggaattgctatagctattatcccaaataatcgagactaacgctgaacaagtattatataggtaaagtttgtcaggtttcatgtaaagccgcaacgcatagcgaagcggctttttttaggattatagtaggaagtgcctcaaattagatgatatgtatttccgcattcttctctataaaaaggcaccattttcagaatcaagtaacgatgcttaccaaagtactctacacaaacccagcaatccagtgcagccgacttctgatatttcgtgcagtcgtcttctgaaaatgacaaaatcgataggggtcatgaccgtgccaaaaacgttcgtatttgatacggtacttgtacgctttcattatgtacattttgctaataggcacaccttagtgtacaatttcaatgcgtataaataggagggcgtaacaatgcctcagatcccagtagaaactaacgaccgaatgtcgctacgtattgcctcagaagaaaagtcgctgttgatgcgtgcagccgctttacaacataccaacttgactgagttcgtgctccgcaatgtgatgccagcagcacggaaagttatcgacgagaacgaacggctggagctgaccgaaagagatagtttgcatgttctggatcttttggataacccaccggcacccaatgataaattgttggccgcagcatttgccttgccgaaacaatcatgatgctaccaatctggcacgaagaacctataggcaaacatcatgatcgtggtgcttttgactgtggtgatgaggcgttgaatcagtttttacatcgccatgcaaggcagagccatgagaaaggtggggcaaaaacctaccttgcagttagcaagaacaatggaacggtattaggttactacagtctaagtcccgcttctattgcttatgaacgtgcaccggaagtgattaaacgtggtctggctcgacatgaagtgccagtatttcggcttggccgtctggctatagatctttcagtacagagtcaaggactcggtggtcagttgttgctagccgctggtcggcgctgtttattggtggccgcacaggctggcggggttgcattgctgattgatgccaagaatgagcgtgttgccgagtggtacgccagctatggtgctattccgctattagatgcccacctatctttgctgttaccattcaaaacaatacatgcagctctagtcactgcggggaagctttaaatgaacgaagcaaccaatcacaataaattacaaccaccaccagatatctctgttaagcgacagggaaacgcctatgtcatatttaacctgagttctggataagaaattgacgagaagcctgttccgggagcaaaattttggtgaacgccgaaaacagctccggggaggaacaggccaaggataagttagtggaaattttctgcgatgtcgacgatttttgccgttttttcatccctcagtggacacagttttgccttgataacggataccgtctacgtcaccgccaaggtcgcatgtctcccagtgaaatcatgactatcctgatcctctttcatctatcacattaccgtgattttaaacatttttatctggagcatatttggaaatatcaccacaatgattttcccaccttgctcagttatacccgttttattcgtgtcgcgccttccgttttggcaccactgtgcagttatctgactcaattaaaagggaaaccgactggcattgcttttattgattccaccagtttgggtatttgtcataacatccgcattccccgtcatcaggtttttgaggggatcgcaaaacgaggaaaaacctcgatgggatgatgtgatggacgtcccctttttcagcggtaaagagtgtcactttcatcacgaagaaacgtcgtaacatgaaagcgcgtatgctggcagagtgggataaaatcatgttatcaacgcgtttcatcatagaaaccatcaatgatcaattaaagaatatttctcaaatagagcattcgcgccaccgaagtataacgggatttctgttgaccgttttaggtggtgtgattgcttactgccttaaattaaaaaaaccatcactgaaaattttctactcagaagacgattttccagtgatggtttaaacagaattcgggttaatttagaaaaactttactgctgcgtcgatgacttttgccaaaaatttctaacactccctataaaccaatacttctttcatccctctaagcttctaattccttgaaaatctgcgtcattgtgtcactcagaacttccactaaattcctttatcactcgaacaattccgcatgtgtaccggttctgacaaactcgattgcatttttctgttcgtccaaaagataaattaaaagaaaatccccccaatatgacactctctaaatccagcccaatctccgattaactcatgatctttatattcagctcctagcggtgaatcattagcaatgaggagcattacaacagattttaatcggtgcatgtcatagcgcccagaacggctcaatcgttgccaatctttaccgaactgttttgtatagtctgagcgacgcggaaagctagcgcgcttacttgccgcagtctttttcaatgtcatgaattaaatcatccgcatcgttaaaacgtgcattcattgagcttctcgcctcattcatagcctcaacagtaactctgttagggattttcttgatctcgaaaggtagcgccttttctttggccaccatcgttacagcaatgcgtagaaagtcagacattttaatcccaatagcagctaaaacatcggttgcctcttgcttaattgctgggtctatacgtgtgcgaacataagtttcagtacccatttaatacctcgtacatgctgatttttgtagtacaatcgtagtcctaattttgatattaggcaatcttagcccagagaagaacatgctgaagtataaagcaaaaaatgagtccctctttaaggggcattatacagtctgtctgctaaccaattatattttgcactatgccacgctgacatctcatagaatccaaggcaacgatattacctttcagtggcaatctgttcaggcgttcgggaattgtagtaatttcattaggctttccatctacaccacacctcagaaaataaaaatctgataaaacgccagtaaccaaacaatcacgaaagaaaatccagcagcgataacatcatccaacatgatgcctaatccaccatgaacatagcgatcaaaccagcgaattggccacggtttccacatatccagaatacgaaacactataaaaccggtcaaaacccactgccagttaaccatagggattgccatcaatgtgatccacataccgataaattcatcccagacaatactaccatggtcatgaaccttcatatcatcagaagtacgctgacaaatcattatgccgaaaaacatcccaacaataataaccaaccagcaaatccattccggaaactgaaccagtaataaccagaatggaatagccgctgccgatcccattgtccccggcaccacgggcgacagcccactaccaaaacctgtcgctaatagatgccagggattactcatccgtaaacgatgctttgccttatccatgtgcttcctcggtaataaagtgatcgaaccctttcagatctaatttaatctctttattattgctgtaataacgaataccctctgattccgccataatctgtccaacacagctaaaaccagcaccggtatgcgccaacgcaatttccaacgcaccacgattcctctctgggacagtaaaacacaattcatagtcctcaccaccactcaaagcccacattaaagcttgttgtggttcaacgtactgtttcattgcatcagagtaaggaagcgcatccagatttattctggctccacatcggctggctttcagaatgtgacctaaatcagaaatcaaaccatcagataaatcaattgctgatgttgccaagccacgtagtgcttgcccttgtaaaatacgaggctgcggcctgagatggcgctgaaccaaccagttgtgagataccggatcaaaaatttgcaaacgattttgtaacagagccaaacccgccgcactatcccccagcgatccactcacataaatccaatcgccattttttgcgccagtacgccgtaacgccctgcctgcgggaactaaaccatgaatcgtcaacgtcagactcatcggaccgcgggtagtgtcaccaccaataagctgcataccataataacgcaactgctcaaacagactgtcactgaaaccactcagccagcgttcatccacttccggtaatgttaacgctaatgaaagccaggcaggatcagcgccgactgcggccagatcactcagattcacagcaagagatttgtaagctaaatcttcaggagaaatatcaggtaaaaaatgaacgcctgaaactaaggtatccgtactaaccgccaattgttgtttatcggctagtgtcatcagtgcgcagtcatcaccaatacctaaatttacatcacgccggttaatctcctggcgatcaaaataacgtgcaatgaggtcaaattcgccacatgccataataaaatcccaaaaagttactgatgatcacgaacataaggccggtatcccggccttacaaatcatcgtctacggtgggaaaaacccgacaagcagtagcttatctttttctgcgtactgccgggccagatttatccagtaccccgtttacgaacttgtggctatcttcagcaccgaagacttttgccaattcgatagcttcgttaatagccactttataagggacatcatcacgataacttagttcaaacatagcaatacgcaaaatggctttttctacctgacctaactcttcgagctgacgggaaagataaggggccatcaaagcatccagcttagccgcatttacagctactcctgacagcaattcgcgaaaataggttacgtcaacaccagtgacgtcctgctccgacagaaactgtaattcaacatcagcaatgctattgccagataattgccatgaatatatagcctgaacagcgcactcacgagcacgacgacgagcagcaggtttcacaagattccccttaattaaaactaaaatcagcctttaatggcattaattacattgaccatttccagtgcggttaatgcggcttctgcgcctttattacccgctttggttccagcacgctcaatcgcctgttcaatgctttctgtggtcagaacaccaaacgctactggaatttcactagccatcgctacactagacagaccagaactgcattcaccagcaacgtattcaaaatgagcggtaccaccacggataactgtacctagcgcgacaacagcgtcatatttttgggtttcgaccaatgtcttcactgttaatggcaactcgtaagcaccaggaacccagacaacagtgatattctctgaagcaacctgaccgatacgctcaagcgcatccaccgctcctcctaacagactgtcattaatgaagttgttaaaacgtgcaatggcaatcgccacacgagcttgtggagctgcaacaacacctttgattacgttcatagccttccttccatctgttcatatccgcaggggggcggattctatcatattctttcgttagctgcgcctgccgatttagcagcagagcataaaaacaggcaaactcacccacactcacatattcagtcagtatacaggccgcagatgcagacgaagatcaggcccaacttgctgtacatcgaaaatgtcaaattccggtgcctctgccagatttttgagttcaggaatagtgaacaaaccacgagccgtatcacctagcacttttggcgcaacataaagaaccaattcatccaccaaccctaaagttagcaatgcgcctgccagcaatgccccacactcagtccagactgtgttgatctggcgcttacccagctgcatcatcaatgacaccaaatctaccccaataccatgagcaggtaacagtatctgttctacattttcagataagtcatgttcatctactttagtgcgagccagccaacaataaccgggctgctgtatgacctgatgctgggggctaacacgattctgactgtcaacaataacacgtaccggttgacaaagattttcctcgggataaaccgcctgaatttctgcgtccaattcactccaacgaactgtcaagtgaggatcatcagctaaaacagtgctactggaactcagaatcgcgctacattgagcacggaatttttgcacatcacagcgagcttgtggtgatgtaatccatttactttcaccagaagctaatgccgttcggccgtcgagagaagtcgccatcttcaactgaatatatggaaacccggtacgcatccgcttcaaaaacccccggttgagagattcagcttcttccatcatcagtccatgttctactgcaataccagcctgttgcagcttataaagccctcttcctgctacctgtggattgggatcctgcatcgccgcaaccacacggctaacgccagccgcaatcaacgcatcggcacaaggcggggtcttaccgtgatggctgcatggctcaagcgtgacataaacagttgcgcctttagctttatctccggctatctgtaacgcgtaaacctcagcatgcggctcaccagaacgtaaatgaaaaccttccccaacaatttgtccatcatgcacaatcacacaaccaacgttaggattaggtgacgtggtaaagcgcccttgacgcgccaattccaaagcgcgcgccatatattttttatcgttattcactggttcaaccttgtaatctagcaatctcttcgccaaattcacgaatatcttcaaagctgcgatagacagaagcaaaacggatataggcgactttatccaatttcttcaattcatccataaccagattaccaatcatcttggatggaacttcccgctcaccggtagcacgtaactgagatttaatatagctaatcgccatttctacatcatcagaactgactgggcgcttttccagtgctttttgcataccacggcgcaatttctcttcatcgaacggctctcggatatcgtcactttttattactctaggcataactagctcagccatttcaaaagtggtgaatcgttcatgacactcaagacactggcgccgtcggcgcacctgcgagccatcccctaccaaacgagagtcaatcactttggtatcaacagcagcacaaaatgggcaatgcatatcgtttcctgatggttaatccgaactaaatttacagtttatccttaatctgaataaaaaacaccctgtcagtcggatactcacagggtgtttgaacagcatcaaggcagaataattaaggcagtaaagatggctgatcagctccttccttctcaaccttttgctggatcatgtgttcacgcttcatacccagtttcaacgctaaagcggaagcaacatagatagaagataccgtaccgatagaaacaccaattaacatcgctagtgagaaacccttcaacattgcaccaccgaaaatatacaacatcagcaccaccagtaaagttgttgcagatgtcatgattgtacggctcaatgtttgcgtcagagagacgttcataatttcatacgacgtaccacgacggatcttacggaaattctcacggatacggtcagaaaccacgatactgtcattcaatgagtaaccgataactgacatcagcgatgccacaatggtcaggtcaatctcgatacggaacaatgacagaacccctagcgtgatgatgacatcatgggcaagcgcaagaaccgcacccaatgctaaacgccattcaaaacggaacccaacataaatcaagatacagataagcgccgccagcaacgccattgcaccatcttgggcgagctcagcaccgacactcggcccaacaatttcaatacgattgacactcgcatctttatcaatggtgtcattaatgactttaataacctttttacccagttcctcattcgccgcacccgtaactggtggcatacgcaccattacatcacggctactaccgaaattttgcaacagcggatcttcaaagcccgcttttgccaggttatcacgcatcttatccagatcagcagattgactgagtttgatttcaattaccgtaccaccggtaaaatcgagtccccagttaaacccgcgagttgccatcacaaaaacagaagctaccaacagcagcaacgaaattccgaaagcaacgttgtcccagcgcataaagtcatagactctgcgaccgtagttcaattgttcaacagtataatcctgtgccacaacgtgctccttaaattgacagcttcttaatacgcttaccgccgtatagcaggttaacgattcctcgcgtacctacaatagcggtgaacatagaagtcgcgacaccaattgacgttgttatcgcaaagcctttaattgacccggtaccaacagcataaagaatgaccgccgtaatcaacgtggtcaagttagcatcaataatactggagaaagcgcctttataaccttcatgtatcgcttgttggactgtccggccattacgcaactcttctttgatacgttcgttgatcagcacgttcgcatcaaccgccaccgccagcgttagcacaatacccgcaatccccggcatggttaacgtcgcccctggtaacagagacatgataccaacaatcagcaccagattagccaacaacgcactgctcgcaatcacgccgaatttgcgatagtaaatcaccataaacagaattgatgcaattaagccccacagacaagcctctaaaccttgttcaatgttttgcagaccaagggttggcccaatagtacgctcttctacaatctgaatcggcgcgatcagagcacccgcacgcaacaataaggataactgacgcgcttcggttgcgttggaaaggcccgtgatacggaaactgttccccagacgagtctgaatattagcaatgttaatcacttcttcatgtttaactaacaccgaccgaccattagcatctttcttaccgctgtctttatattccacaaacaatgtcgccattggcttaccaacattgtctttggtgaaattagacatcgctgtgccaccggcactgtccagtgaaatactgacctgtggattaccatattcatcggtatccgggattgaatctgtaatgtgatcaccggtcagaataacacgtttatataacacaaccggattaccatcacgagtgctcttcacctcagaatcacctggcacacggcctgatgtagctgcggtagagtcaataccggtattgaccagacggaattccaacgttgctgtcgcaccaagaatctcttttgcacgagcagtatcctgaatacccggtaattcaaccacgatacggtcagcgccctgacgctgaaccaatggttcagccacacccagttgattaacacggttacgcagaatggtaatattctgctgcaccgcataagagcgggcttcgcgctgacgttcatcactcatcaccgctttcagagtattattgcttccaatactgaaaactaaatcacggtgacggccagtaagatagttttccgcctcagaccgtgctttctcatcacggaagcggatttctacaccgtaattatcaattttacgggcagtggagtaaggaatacctttttcacgcaaatcagtgcgcaggccatcaatattctgctcttgcagtttgcctaatgcggtttccatatccacttccatcaggaagtgcaccccacctcgcagatcaagacccagtttcattggttcggcaccaaccttacttaaccaagttggtgttgctggtgccaggttcagtgccaccacgtactgatcgcctaatgtggacaccaatgcttcacgggcacgaagctgaatatcggaattatcgaaacgagcaagaatcgcaccattttccagcgcaatagatttactcgcgatttgatttttttctaaaacattatggatttggaccagcgtttgctcactggcggcaatgcctcgcgcgccagtgatttgtacagccggatcctcaccataaaggttgggaagtgcataaagcaaaccgatgaggatcgcagcgatcagcatcagatacttccacaaaggataacggtttagcacggcagttcccttcgggaaaatcagaaattacagagctttcattgtacctttcggtaaaacggcagcgacgaaatcacgtttaatggtcacttcagtagtgtcattcagtgctacaacgatataacccgtgtcagaaacttttgtgacacgaccaatcaaaccaccattggtcatcacctcatcacctttggaaatagaatccatcagctttctgtgttctttggtacgtttctgttgtggacgcaggatcatgaaatagaagatcaagccgaaaacgaccagcatgatgatcaaagaatatgggcttccctgagccggtgcgccagcagatgctgctgcttcagaaataatactcattaaacttccctcattgttatcaaattcaatagtaatcaaaaaccagccgcaatatgctatacccactgaaaccagtcaatcactacttaagtcaaatacttaatgccggaacgggtttaccaatccgttgataaaaatcttcaacaaactgttcaagattaccttcctcaatggcctgacggatcttagccatcaggcgctgataataccgcaaattatggatagtattcagccttgcaccgagaatttcgttacaacggtcaagatgatgcaaatatgcccgactataattccgacaagtataacagtcacactgctcatccagtggcgaagtatcctctttatgtttggcattacggattttaatcacaccatgggtcacaaaaagatgaccattacgggcattacgggttggcatcacacaatcgaacatatcaatgccgcgacgaactccctccaccaaatcctctggttttcctactcccatcagatagcgcggtttgtcttgcgggatttgcggacagacatgttcaagaatgcggtgcatatcctctttaggctcccctaccgccagaccacctacagcgtatccatcaaaaccaatctccaccagaccttttactgagatgtcacgtaaatcttcataaatgcttccctgaataataccaaacaaagcatttttattctgtagttcatcaaaacgcttacgactacgcgcagcccaacgtaacgacatctccatcgaacgtttcgcataatcccaatcagcaggatatggcgtacattcatcaaaaatcatgacaatatcagaacccaagtcatactggatttccatcgatttttctgggctgaggaaaaccggcgtaccattaattgggttacggaaatgtacaccttcctctttgattttacgcatggcgccaaggctgaatacctgaaaaccgcctgaatccgtcaagattggaccatgccattgcataaatccatgcagatcgccatgaagtttcatgatttcctgccctggacgcagccacaaatggaaagtattgccaagcaagatctgcgcaccggtttctttcacttcttccggtgtcattccttttactgtgccataagtcccaactggcataaatgccggcgtttctaccacgccacgctcaaaaatcagacgaccacgacgagcttgaccgtcggtagtttgtaattcaaatttcacttaacctccaggcatcagataaacagtccgatgctgttgttcaaaatcagacaaagttgaaatttaccgttgaactgagatattcacataacactattttcaacaacttcaataatatattccagtcaatgccataatcattacattgaattaagaaatcttttccttgcaagcgaagggattacgacgaataaacatagcatcaccataactaaagaaacgatatttttctgcaaccgcctcttgataagcattcatcgtatttttataacccgcaaacgcagaaaccagcataataagtgtcgattccggcaaatggaaattagtaatcaacgcgtccacaacctgatattcaaaacccggatagataaaaatttgcgtgtcattaaaaaatggcgcaattaactcatcctgacaggcttttgcggcactttccagcgatcgaactgacgttgtgccaacggcaacaactttgttacctcgcgccttacatgccagcacagcatcaaccacatcctgtggcacttctgcatactcagcatgcataatatggtcttcaatggtctccacccgcacaggctggaaagtacccgcaccaacatgcaatgtcacaaaaaccatctccacgccctttttacgcagcgcttccaataatggctcatcaaaatgaagaccggccgttggtgcagctaccgctccgggccgttcactgtatacagtttggtacaactcacggtctgcctcttcatcaggacgattaatataaggcggcaaaggcatatgacctatgtcatccaaaatggacaacacatcacgttcatcatcaaaacgtatttcgaacaaggtatcatgacgggccaacatggttgctttaagactttcattgtcacctaataacagctcagttccctcttttggcgctttggaagcacgcacatgtgcaagtacccgcttatcatccaacacccgttcaaccagcacttccagcttaccgcccgtagcttttcggccgaaaatacgcgcaggtatgacgcgggtattattaaaaaccagtaaatctccggcattcagcttatcgagaacatccgtaaaaataccatgcgttaatgcccccgtttcaccatcaagcgagagcaaacgacagccactacgttgtggttgagggtaatgagcaatcatttcgtcaggaagttcaaaagtaaaatcggagacacgcattatatttaatcattcagaaaaacaagcggactagtctagtgccgcagccctgagggtgcaacaaataagcacataacttcgcggatttatattataattgccgaatgaattttctcgctcaccttcatttagcaactctggctgacagttccttactaggaaatctgatggctgattttgtgcgcggtaatccagagggacaatacagtgctgatgtggttgcaggtattcgtatgcatcggcgtgttgacgtattaacagatacccatccactggttattcaagcccgtcatttattcagtaattcatatcgacgggttgcgccgattactttagatattatctgggatcacttcctctccttgaattgggataaactggttcccacttactcattaccggcatttattcaccatgctcgtagtcagattgaacctcatctttattacactcccgaaaaatttcaggagctgaatgcgtttttatggcggcaaaactggctgatccgttatgcagatcttgcatttatcgcagatgtattaaaaggcatggctcgaagacatcccagattatcggctttatctggatcatttcaggatatagagcaacattacgctgatttcgacgcactattctggcaattttatccctatatgatggaaaaggcagaaaataaggatttttactgcttaccccaatagacgtttatgttcaaaatatcaccttcatttaatacacaccgtagaactccccctttctagctaatacaacctgtgtcagactgagcaaatatgcaccacagcttatgaagcaagcagtctcatcctagcacgcagaaagacatgacagtaaagaaaataaaaataaggtattgataggtaaaatctattgcaaagattagtattttatcctttattggtgtacgctaattccttattctatatccaatttttacataaaccccgcaaaactacaggagtaactcatggttctggtaactcgtcaagcccctgactttacagcagcagcggtcctcggcaacggcgaaatagttgggaatttcaacctgaaaaaacacctaaatggtaaacctgccgttatctttttctggccaatggactttactttcgtatgcccttctgagctgatcgcatttgaccaccgctacgaagagttcaaaaagcgcggagtggaagttataggtgtttcttttgattctgaattcgtccacaacgcatggcgtaaaactcctgtcgatcaaggtggtattggcgaagttaaatatgcaatggttgctgatactaaacgcgagattcaaaaatcctacggcattgagcacccagaagcgggtgttgctctgcgcggctctttcctgatcgacaaaaacggcgtagttcgtcatcaagtcgtgaacgatctgcctctgggccgtaacattgacgaaatgctgcgtatggttgacgcactgcaattccatgaagagcacggcgatgtttgccctgcacaatgggaaaaaggtaaagaaggcatgagcgcatctccagatggcgtagctaaatacctgtctcaaaacgctgctaaactataaccttagatattatccataattaggccagctggttattccggctggttttttttcactgaaattcctcgttttgccaccttgcgcacaaaaaccccctattcccaataactatcaccacttacaattaaatttacaattgtttaacattaaaatcagtgtaaataaaacaagtcattacaccgacaaaaataacctcaccaaaagacaggagcttacaacatgttgaaaacatggaaaacaccgctggtaataatatccctgctcgtctcgtcccacctttatgccgcttcagaaccggctgttgaagccaaaaatggtatggtcgtttcatcccaacatcttgcttcacaagttggtgtggatatcctcaaaatgggtggaaatgcggttgatgcagcggttgctgttggctatgcccaagccgttgtcaatccatgttgtggcaatatcggtggtggtggctttatgacaattcatttaaccgacggtaccgatacttttattaacttccgcgaaaccgcgccaagtgcagcaagtgccgatatgtatctggataaagaagggaatgttattaaaggagccagtttatatggctaccgcgcggcgggtgtgcccggaaccgtgatggggttagacagcaccctaaaaaaatatggcaagttgagccgtgaacaagtcatggcccctgcaattaagctggcacgagaaggctttatactggcccgtgcagataccgatattctggacaccacaatcaagcgtttccgcaaagatccagaagcagctcgtatcttcctacgtaaagatggctctccttatcaaccaggagatagattaatacaaaccgatctggcaaatacgttagaattaattgctaaaaaagggcaagacgctttttatcacggaaatattcctaaactggtcgccgaagccgctaaaaaatccggcggcattattaccgaagctgattttgccaattataaaatttcagaaacaacccccgtcacctgtcactatcgcggttataaatttatctcttccccgccgccaagttcaggcggagtaaccatgtgtgaaattctgaatattttggaaggttataacctcaaagaaatgggattcaactcggctgattatattcacacattgacagaagccatgcgccatgcctacatggacagaaatacttaccttggtgatccagaatttattaaaaatccaatcgatcacttactgagtaaacactatgctgaatctctacgtaaaaaaatagagccaggtaaagcaacattatcggagaatattcagccgggtattggaccccatgagaagccagaaaccacacactactccattgtcgacaaagaaggtaatgcagtttcaactacctatactatcaatggactttttggtgctgtcgtcatcgcccccggaacaggtttcttcctcaatgatgagatggatgatttcaccactaaaattggtgaaaagaatctttatggtctcattcaaggtgcgactaactctattgcccccggtaagcgcccactatcctcaatgagcccgacacttgtcacaaaagacaataagacattccttgttctgggctcacccggcggctcccgtattatctctattaccttgcaaaccgccttaaacattattgatcacggtatgtctcctcaagaagcggtcaatagcccccgtattcatcaccaatggttacccgatgaagtttattatgagcaacgtggtatttctaaagactcgttgaatttgctagaaaaaatgggatataaaatggtggagcagataccatggggcgcggctgaagtgattatggtcggtttacctaaaaccactagcacttcagctaagtcttcaggcaatgatgccaccgtatctggtcaagttcgtgaaaaccatctttatggtgccaatgatgtccgacgcccggctggtgcggctattggctactaatgaccaacagctaaaaaaatagctaatctgtgtaggcaatatcgggatgggatatccttttttcaggaatcccatcccatgctttccctgaacatctgacgatggcaaacagtcagagaaacaaacatcatcactgatgcatttgagtctcacgggtacctgaacgccctaaaacacggtcataaataccagccacaactaaaaccaacagggatggtgctagccaagccaatccttgatccgccagtggtaaacgcgttgcccagtttggtaacaaataaactaatacttcggatgacttaatcgcatccaaaataccaaatatcagactaactaacattaccggagccaaaatacgagtaaaattgtgccaccagcacagcgtaaaactcaacacaatcagaacgatacaaggtggataaatagctgtcagtaccggtatggaaatcttaatcaaatgactcaaaccaaggttagaagtcaacatggagaatcctccaaggatcagaaccaatgaacgataagacaggggcaaataacggctgaaaaactcagcacatgcacaagttaatccaaccgcagtcaccatacaggcaacaaaaatcagcacagccaggaaaacactgccaacaccaccaaaagtatgatgaacataggcatgcaaaatgaccgcaccattttctgcatgaggcactaacgatccactgccagcccccaacttgaacagggaaagataaaccagtatcagaccaaagccggcaataaaacctgcccacattgcataacgagttaataatgaagatgaggcaacgcctcttgaacgcgcagcgttaacaataacaatcccaaacaccatcgctcccagcgtatccattgtcagataaccattgacgaaaccactggagaatgggatttgctgataaacatcaatcgcgggaattgaatcaccggctggccaaagtaaagcagcaacaccaagtatacctaacgccaacatcttgatgggtgctaacacatgcccgacagtatcaagcaaacggcctgggtaaagggaaacagcaattaccagaacaaaataaataagactgtagataaacagggataactcgctggtactggtaagcggggcgatgcctacctcaaaagagaccgttgcggtccgtgggatagcgaataaaggaccaacagccaaataacaaactgtcgccagcagcaaaccagcaactcgaccaataggtgaactcagctcttcaataccaccgccaacttttgccaatgcgatgattgtaatgacgggtaaaccaaccgcagtcgctagaaagcctagtgctgctaaccaaacatattcacctgattgtaaccccaccatagggggaaaaataatatttcccgccccgacaaacagagcaaaagtcataaaccctaatgcccaaatatccttagatgataaacgatgtgtcataatgattattaatgttttgttaccatatttaatggcctgaataatataaatatcatcaacagttaagcccatattgacaatattgaaccctaatttaacgatttattatcaaaacaatattcaccaggtatctgttgaagacagattatagtgaccatgatagatagaatcgccaacaactgcccacaagtaaaacttttatagtgccagaaggcaatagataaaccagaatgcagaagtatatgccgcactctttttcaaaactagtgattgctgttagctatcattgaataaacactatatgatttgcgttttttttaacctgaaaaaataataatcaattacgaagattaattattactgttaatcaaactattcctatctcttctgctggttattttgacaggtacaatcaatccggccggaaaagtaaaactaaagatcgtccctttgcctatttcgctggaaactttaagatgagaatggtgatgatgtaaggcatgtttaacaatcgcaagaccaagaccacttcctccagtttgtctggaacgcgctttatctactcgataaaaacgttcggtcaaacgaggtagatgttcagcactgataccttgcccattatctttcactgtaaattcagcaccgtgggaattctttttccaactgacatcaatttgagtccctttaggagtatggttaaccgcgttataaaccaaattcgacattgcactgcgaagctgctcttcattaccgaatacttttagatcttcaccaatatcaaaattaatcttataacattcattacctagcgcaatcgcttcctgacgcaatactttaagcatcaaaggcacatcaacgacttcattcatatcaatttggggagcgacttcaattttggacagttgcaacaattgtttcaccaaaccgtccagcctccgggtttgttcctgcatcgtattcagcgctttcttatttagcgaactatcctctgctgcctgatcctgcatcacttccaaataaccctgcaagacggttagaggggtacgcatttcatgactaacattagcaaaaaagtcacgacgggcattttccagtgttcgcttctgagtcacatctctggcaaccattaagaactgcccctcagaataaggcatcacccggaactcaacaacgaacccattatttaattcaatggataaagggcgcgaaaaatctctggaaaggatatatcggctaaaatcagggtagcgaagtaaattaaaaatatgctgtccattgtcttcaggccaacgaaaaccaagtaaatgttgcgctaaacggttacaccagaaaatattaccttccgttgtcatcatcacaatagcatcgggtaatgattccgccccgctacgaaaccgtttgatcaacagcgccagctcacgacgccgctttcgattccgttgctgcatctggtgaataccatagaaaattggctcccaccctcctctccccgacggtggcaacatactgcgatccaaccatagccaattcgaaagtttcagcaagttataaccatgccatatcagcaccaaaaataccgaaaccaataaacaccaggacaaatgaccaataaatatcgccagaattaacgcaggcaaacaaaagagaaacagttctgaaaccagttttttccaagatagacgttctaacacattagattctccggtgcatggacttagtaacgggtagaaaaacgatagcccgtaccacgaacggtctgcaccattttatcatggccgccaatctctaatactttacgtaaacggcgaatatgaacatcaacagttctatcttcaacataaacatttgctccccaaacataattaagcaactgttcacggctatagactcgctcagggtgagtcataaagaagtgcagtaatttaaattccgtcggccccatatccagtgctttatcccggctggtcacccgatgggacgttgaatccaaaactaaaccatccatttcgatgatatcttccatgaccatcggtgaaatacgccgtaataccgctttaactctggcaaccagctctttaggagagaaaggcttagtgatatagtcatctgccccaacttcgaggccacgcacccgatcttcctcttcaccacgggcagtcaacatcatcaccggaatatcgcgaatattattattccgtttcatctgcttaattatctgcaaaccagaaccaccggggagcatccaatccaataacactaaatcaggatagggttcagataaacatgccaacgcagaatcataatcctctgcttctaccggctgatacccgtttttttccagaacaaaacagaccatctcacgaatcggagcttcatcttcaactaccagaatgcgtcttgccatgattagtcccgttaatatattgagatatacccgttatccttcaagttgcctctttgttggctgcactcgctcaccccggtcacatagtttgctatgttcccggggattcactcccttgccgccgcgattcatcttgaaatccatagggtataaacgttacttagtttgaaaaagcattatgcgtcagttttatgacaaatttatgaaatcctgccttggttatcttctctctgcaatcgatttcgcaataattaatttaacaattgccatatttcataatgaatgcgaagccgctcgtagatatattcacgaaatcagatttaaaagcgacatccaaaatataacgattataatcatgcttcactttaaccaatgacggcgaaaatatgcgtattattcacacttcggactggcatcttggccaatatttttttacaaaaagccgggctgctgaacatcaacattttctgcgctggctgattaaacagattgaacattatcaggtcgatgcattaattgttgccggagatatatttgacacgggttcaccacctagctatgcccgtgaactatataatcgctttgtcgttgaactacaaccgaccggttgtcagttaattagccttggtggtaaccatgattcagtagcaacattaaatgaatcaaaagaactcctttcctgcctgaataccaccgttattgctcacgcagaaaaagatcaacaaaaacagataaaaatactcaccaccaaacaaggcaatgccggtgcaattctttgtgcagtcccttttctgcggccaagagatattatgatcagccaggctggtcagtcaggagaacaaaaacagctcgtattacaagaagctattgcagaacattatcatcgactctatcagcaagcgtgtgaattacgtgatgaattgaatttacccttacctatcattgctaccgggcatctgacgaccgttggcgccactgttacagattcggtgcgggatatttatattggtacattggatgccttcccggcgcaagctttcccgccggtagactatattgcgcttgggcatattcaccggccacaaatagtggctaaatctgaacatattcgctacagcggttcccctattcctcttagtttcgatgaagtcgggcaagagaaaagtgtctgtttggtggaatttacccaagacaaactggaatccatcaagcttttacccattccgcaatatcagcccatgcaactcatcaagggcaacctgcaacacattgaacaacagttgcaaacttttaatgactatcaaggagagcaacccgtctggctggatattgaagttgcaacccaagattacctccatgatatccagaaaaggattcgatcaatggttgccgagcttcctgtcgaaatcattctgctacgacgtagtaaaacacaacaacaaaataggctagcacaagaaaacagggaaactctgacagaacttagcgttaacgaggtttttgcccgacggcttgcacaatcagcactcgaagatgaagaacataaaaaacgtctgaccacccttttcgaacaaacactgaacgatatctatcaggctaaaaacaaggaggagcaggcatgaaaattttgagtttacggctaaaaaacattaattcattacaaggtgaatggaaaattgatttcacagcagagccgtttgccagcagtggtttgttcgccataaccggcccgaccggtgcgggtaaaaccaccttattggatgcgatctgccttgcgctttatcacgaaaccccacgcttgacgatttctacctcacaaaatgagctgatgacccgacacactgcggaatcattggctgaagtagagtttgaagtgaaaggtgtcgcttaccgtgctttctggagccaacggcgagcgcgtaatcaacccaatggcaacctgcaagcccctaaagtggaactcgcccttagcagcagtggtaaaattctggccgataaaatccaagataagaaagaaaaaatcattgaaattactggattagattacggccgtttcaccaaatccatattgctatcccaaggagatttcgcggctttcctcaatgctcagccaaacgaacgggctgatttattggaagagttaaccggcactgaaatttacggaattttatcccaacaaatttaccaacaacataaacaagcacaatcagtgctggatattctgcaagccaaagcatctaccattgatttgctaacggcagagcagcatcaacaatatctggaacaacagcaacaactcacccatgcagaatcacaactcaatcagcagataaaaacagtgcaacattcggcgcaatggctgacacgtgaagaagaacttgagcaactcgtcactgaaaataacgctatcttacagcaggcagaaaaagcgcttactcatgcagagccgcaactgcaaaaactggctaacagtgaacccgcagaaacactgcgcccattgctggatgataaaaaccgaacacaatatgaacatcagagaaccagcaaacagttggaagagatgcatcagcaacttcaacaactgcaacagacgctcacaccgatacagcaaaaggtggctcatgcagattctgccagagcagagtatcaacagcaccggcaacaacaagaaaagctgataacagaacaggtgattccattagatcatcaaattgcggtacagattaaagagctcaatcttactcagcaacaaatcaacgaacagaaaacggtgcttgaaaaccgttgtcaacaatatgacacagcaaatcagcgcgccttatcattcaccaatcaaagaaaacaactggaaaactatttcgaacaacaaccttatcatcaatatttcggtgaaaaactggctttttggcaacaccaattctcgtggcggcaagaacatcaacaacaaattgaccaccaaacacaaaaagtaggcaagctcactgccgaaatcacgcaacttagcaataacctgaacaaacaaggggaagacttaaaacaacaaattgaaaataaccaaccgctggaactggcatttgaacaggccaagcaacaattttttactctgcaaaaacaatattcgccagagaaattaaaaaaacaattaactcaatatcaggaacagctaccgctgcaacataaactggagatcctgtcgccacaaatcttacaattacaagccgctattgccagtcatcatattcgcttacaacaaccggaaaaattattaaaagaatttcctgttcaaattgaatccatcgataaacaactctcagacaaacagcaacatttatccgatcttactcaacgtattcagttagaacaaaagattgtcagtctggaaaaagagcgggcacagctcaaggaaggttctccttgcccactatgcggtgctgaacatcatcctgcaattcaggcttatcaaaatattgaactgccaaaatcagaacaacggttaaaagatttacgccagcaatttgaagcgctgcaagccaccaaaatatcattggttaataaaaaagagttccaacagcaagaatacgaccatattttacaagaaattactgatgctgaaccacgattgaatatattaacgcaacaatggcaggaaacttgcgcaatattacagaccgaaatttctctttcagataaacccgctcttgaactatttgtgcaacaaaaccaatcggctcatcggctttgccaaactcaattaaccgaatttgaactggcagaaaaaacgtaccagaaaacagaaaaaacagtgaccgctcatcaagaatacgttaaagaaattgaacgaaatattgaactgagtaagcatcaacacaatatactgaaaaaacagttatctgaattgcaaccagagatacaacaacagcagcataaactaactgatgtcatcgaaaaaatgacgtcagaattacagcaatataatttatccctgccaatgctgaatgatactgaaaactggctgcaacaacgtagagaagagtggcagatataccaaaactgtcatgaaaactggcaacagatccaaaaagaagaagcggtcattcaaaatcaaattgaatcattgcataaacagaaagaagaatatctctcccatctaaataggcttaatcaaacagctcaacaacagaaacagcaactcgcagagacacaacaacagcgccaacaactatttggtgaacaatccgttacggaaatcactcaggcattacaacaacaatctcaaaagcttgaggaaatgcacaaacaagcattgtcacatctgcaacaagcgcaatccagcatcaaccaactgaccggtgccattcatgagacagaaaaaaacgataaccagtctgagcaacaaaaacagcaggcagaacagaatttcaatgctgcattagcaaaaagcccatttgccgatcagcacgccgttgaatcagcgctgttatcgcaagagcaacgtaaagaattgcgacaacttaaagaacagcttgaacaacagcagatacaagccaacgccctatgccagaaagcagcagaaaccctgcaacaacatcggaaaaatcgccctgagttacttaatcaatatacaaaatcacaactgaccgaacagttggaaaacatgactgatgagctaaaaagaaacaccttacaacaaggagagctgaaaaacctgcttggtaatgatgcaatacgccgtcaacagcaaaaatccttattggaagagatcagccattgccgacaaaattatgatgactggagttatcttaataacctgattggttcggctgatggtgctaaattccgtcgctttgctcaaggattaacactggatcatttggttcatctcgccaatcaacggctgaaaaaattgcacggacgctacgatttgcaacgtaaaaacagtgatggtcttgaactacaagtggttgatacctggcaagccgatgctattcgtgataccaaaacgctttccggtggcgaaagttttctggtcagcctcgccctggctttagcactatctgatttagtcagcaataaaacctgtattgattcactgttcctggatgaaggctttggcacacttgatccagaaacccttgatattgctcttgatgcactggatcatttaaatgcttccggtaaaaccataggtgttatcagccacattgaagctatgaaagaacggatacctgtacagattaaggttaaaaaaattaatgggcttgggataagtaaactctcacctgagtttcgttatgatcaacaatagcggaaaacaataaataaaaagtatttccaaagtgaactgaatgccgccattttttccttgaaagggtacgcccgccaacataaggcgggaaggaaatttcgataaagcattacttgctggttttgaatgtactgcgtgacttgctcttgccaacatataccctatggattaatttcacaggtaataaggaatatgcaataggaataataactactacaacagaacgagtatttgtttccacaaacaactcacctaatcgcgctccccatgttattagggtgtcatttcgtcctctataaagttgcttgagtatgaccggtttcagcttcgccgggcaaacgtaaaagtccctcgtatagccatcatcctgaataagaacaaaaatgccgatcttgaacatcggcattttgctgtaaaagaggagaataatttaatgctttaacgcttcaattttatcccggctcaaaccagtactggtgacaataatgtccaaactcacgccatgccgtaacaaggcacaagccgtttccagtttaccttcttctctaccttcaactcggccttcaactcggccttgttcgcgccctttttgttcaagctgttctgcaatagtcatcaacatcgtttcatgctccggagattgttcaatcagttgatggacaaattgtgagagatccggcgtatgtccattcagtaaaatatagcgtaacaccacattgcgctgctcagttgtattataccccgcattcaaaagtttcaccaattgagggacccattccagcatatcccggcagcgaatatgtttttgcaccagttccatcagggctacccctttatgtgtcaggatctcttcatcgctgagcacactgacgtccaccaacggaaactcctggcagtataagcgggcagcctgttcagggaacgtaaaacaatccagccaccggtttgagtaaggataaggacgaacctcaccatgataaaacagcaaaggcaccaccaaagggagttcagtatgaccttttttcaggtgggccgccatagctgacatggcataacccatcaaccgccaggccatcaacgggtcaggagtggactgatgctcaatcaggcaatagatataaccttgtccccgagctgtttcaaccgagtacagcacatcactgtgcagttgacgtaaatgccggtccacaaaactgccgggttccagtttcaatgtggctaagtcacacaacgactggacctcttccggcagataaaggtataagaattccctagccgtttcaggctgcgttaaaaaatatttgaataatacatcatggtgaggccgtttttctttctttgccacaatctgtttctctatttatctatttatctatttatctatttatctatttatctatttatctattagtcatcgccacttattataaaagctataatatctctggaaaactcgcaatcaagttacaaaaaacattttcccagattttctcaggcaagtctttaccgaatgcattaatataagatgcctaaagaatcaaataccagcaaagaaaaaacgaggaaacattatatttacaacaactactcaatgaaagttattggtagattcacataataagtgcaacatcgttaatccggaagtaaacatactcgtattcccttaaatcattttcttgagggtttttatacctatttaccataataaattatttaattactttataaaaaagtttattttccgattgaaaacgttattaaagccagtccctttaagaaaacagattgtctgattaatctatactctatggatttcaagatgcatcgcgacggcaagggagtcaatccccgggagcatagataactatgtgaccggggtgagcgagtgcagccaacaaagaggcaacttgaaggataacgggtatattcatattgttatttattttccctgattacataagcattaacagagtcaagttttttcactgatggatttatgatggacaggttttaaactgttattaaaacacattgttttaacatcggattttaagcgatataaaattttaaatggtatttttaccactttcgacggccgatttctgttaagtttaatcatactcgctattcatttttactgatcatgataatcacttatctgtttaatcattcattcttttttatccattatttcccaacgcgcactaatactgaccctattttaccgacaatcttgagtggttttaataagccacaccctttattttttgataaatcagccagtaaatggcctgatgatataaggatatccctttatgttttttcagataattaactcaactattataacttaaaccctattaaactaatctatcaaccaattttttattgcgttatttttatagattttctcgcaaaataacaacgaaaaagcatctgaatatcctcttgttagttatataaaatttttaatagctccgtattatcacttttaaatagttgtatcaggttaggtaaacgtaaaataatcggaggatagcattgccgataaatgtattaaatatgacagagagtcagccgttttttagccactctgtattttttaaatctggtattaatgaatgcacctgtttttttcaatccttaactaactaatcaccgataaaaagcagcttgcaattgcccataagtgaacatgcaagtaaaaagataagtttaaccttgttaaaaacatgataaaccggcctggaacaggtaaataattctattttccatctcgtatttaacgatgccattttcattaaactgatactttccatttaactgatacttggtttttttcatttttactttaataattctatattcctttttctacacttaaaaaacagaaagagtaaatgatgtgttaatggcattaaaatcaacgcatataccctatggatttcaagatcatcgcgacggtaaggaagtgaatccccgggagcatagataactatgtgaccggggtgagcgagtgcagccaacaaagaggcaacttgaaagataacgggtatatttctttaatcatctttaatgatcttaatctggttaacctgaaattttatcggctttatttaacgattatctctgatttcacataaatttcattacatccctgtaaaataaacttaaaacctgcttttcctgattttttctcttccaatgctaatatagcatcgaattttttatcctctgaaaaataaccttaaccacttctttttatctttgatgattaaagtttttacctgttctttcataatacgcttgccaatttcttccagattttaaaactacactgacagataattaacgatttaacgatttaacgatttaacgatttaacgatttaacgatttaattttaatggtttaatagattaaaagccatgtaataagtcacttacaactatttataaaccttaaccgcccaactaactcaccggcggctaaggttactcatacaattatctatgtctctattactgtaaaaaattctctcactaaaatgaaagtcccagtagcctgggcaaaatcgaaaaaacaccgcgatattacgacggattaatccgcagtaaccagttccagtatttgctgcctgacatgctcgaaaatgagttcgccaatctccgcactcgaaccggatgttttagaaagaacgcctctcgttgaaaattcttttttaatcggtacttgatagatccctgcacgtggaggtttatcgtgatcaggtcgctccgctctcactaaatccgggcgtaaatgcaacattaaactcgtttctgttaaccctgcatgctcagcatgccaaccgggaaaatcaactaaatgttcacgagtccaatcatcagataccaaactccaccagctaaatacgataacggaacgatcgttaaaatgcccttctgcccgtaatgcatctactgcttcgaaaataaaaccttcattctcaaaatgaccattaatgatcaccagttgcttaaagggtagtgaacacaagctcttaatggttcggctgatataagcggtaaatgttgatccatccaggtaaactgtgccgggaaattcaagccctccaccactctgtggcaatgatctggcagacaccggctgtaccggtaaggtgaaaccattaatatcctccgccaacacgcgggcaaaggcttctgggatcacggaatccacattcaacggcagatgaggcccatgctgttcaatcccgccaatcggccatatcaatgtcttaccttcaactgcggttaaaacctgctcactggtcagttccgcaaactctctaatttttttattattcatgatgttatcccttttcctcatcctttttctgacgtcatgacttgcgtatattcatgaacaatgcgctgcaatgttttatacatatgccgatgaagcgcggtataaacctgcaccgtattcgcccctgccagtaggtattcatgaacatcattaccatcctgtacgcctcccgacccaagtattggaatcgtcacccctcgcttacgcaggttataaatagcggcaagcaccattggtttaatccccggcccagagtatccgcaaaccccattaagcagcgcttcaccattcgctgtgtcgaatgcaattcctgaaatggtatcgctcaaagttatcgcatcagcccccccttctaccgcagcttgaacacgcccatacaaattatcgccaagcgagagtttgaccgcaaaaggggtgttcgttcgctccttcaccactttagtgtagttgaatactcgttctggtgtatcttccgtgaagtcgtccgcatgcaagcatgaaatgcctaactccaaaggggcatcggtcactgccgaaatacgaacagccaatgaagctaacgcctcaggtgattccgcatggatagaaacgatcaccggaagttgttcttccttaaattcacggagaagtgttaaccaatattcaacggttttcttcgaatatgtcgtattgttcagcatccctgtactgaataaataggtcttttctgtatgcaatttttccgagcgcggataaatcgtttttgtcacaaccgcccctgcgccgtgagcgataaactggcgaatatttttagcttgatcagaaagcagacccgacccaacaataattgggttttttatcttcattcctaaaacatcataggttggttcaataactcgattttccatcgtcactccacaaattacccattcaagcaaactcgctattaacccgcctttccattcaatagaaaggcggtatatcctcaaaaaggtgatcaatagctactcaactgcaaaattcctgaaaatctcgccaatctgtcccggattttgacggaaatcgtgaatatccaatttcgacacgttgcaaatatgctctaatccctttaacaaatgactaccaccattcacaatcggtagttgagtgatcaacaagacgggccgtttcagagcagaggcccaaccaagttcaatatgtgtaccgtcagtacgcagtaattcatcaccttgatgaaccggaagaatcggcatgaaaaaatcacactgctgcatccattggaaatcccgtttcgataccatatctggcgtataactaggtgtatcaatgccaaatttctcagtcaaatgcgccgaaaatacattaccattcaatgccttcaccgtcttaatcgccagttggatagtcgttctcaactcctcatgaaaaccgttatcacaaattgcaaattgaatcggcccaccaacgaaaacacttttatttgccaacggcataacgttccccttaattttcattactcaacagactatgagccgtcgtttcagaacatcgaactcagcacagccagaggataggatgcttaatcattcaataagttattgctcacaacaggccagtttgatctagctatatcgaggaagcaggttgttttcctcaagttcatccaaactatccacaaatgccaaataaactttttccagatgagtgtcatcatgcgcatcagagataaaccagcaacgccattcccaaatataaacccctctcatcaataggttgtagtaaagcaaatccatgttgtcgcgatgcattaatctaaaaaatgaggaaaatgatcttgcctcgataggaacccgacggcttaagaacagttggttcaaacgtgaaacaaacgattcagtacgctgagtcagtaccttggtaaaagtttcccctctcctcttgatctcttgcaaagtggctttcgcagcagtcatgcaaagcggatgttgaaaataggtcccaccaaagaatgtcggctccgctgcggggaaactatcatcgttgaaattccagtttccaccgtcaatcgaatcaagcatcttcttcctacccgtaatgacgcccagtggcatcccaccccctatcgttttgccatagatcacaatatctgcctcaataccgaataacccctggatacccgctggatgagatctgaaacctgtcacgatttcgtcaaatatcagcagaatatctaactccctggtcactcgacgcaaatgtcgcaaataatctggattgctcaatcctgggtcacgcgttggtacaggttctaccagcaccgcagcgatatcagttctattggttttgagaaactcaattgcctcattggaaccaaacccaaacaccgaaacatcagcaaccatattttcaggtatgcccaccgaaacgggttttgtcgcattagcttcatcatagtcacccgctctagccagtacggcatcccaatgcccgtggtaactgctagaaaagagcacaatatgattacggcgagtgagcgcccgtgctgcccgaaccgcattcatcaccgcttctgttccactattgacgaaagcaacgcgatccatgccggtaatctctttgataagttcagccacctctaagcctatctcatgccgagttcccaaaccaaaactgttgtctatttgttgagtgagcgctttaactacaaagggtgggctatggccaaacaaatgcgcaccaaaccccatcgtcatatcaatgtaatcattaccatcaatatccttgacaacaggtccggcaaatttggtgcagacaatcgggtaaagtagctcttttatcgagagtttaaagccaattccagaacggctatcggcaatatttttacgtaccgctaccgaatgaatttttgatttaatcgttcgctcgttatattcagatataaatgaagccagatacttttttctctcctcagattcaatcgatggtgcacttctcaacatccattggaaaaagcgttctttattaatcggtggaatatctgacgtatcggattgttcagaccttttttcctgatcagacaagacgggttgagtaaccgaatggttatcttccacaaccctgtttttacccaccatcaagatatattcactgagttgacgaactgtttgtaattctgcgaaaaattgccgcactgaaagttttacaccaaattgtttatggatgggctctaatgcttcgaataacaagagtgattccgcccccaattcaaccagcggtatttctagttttatctcttctttcgataaaccaaatgtctctgcaaaaatagtgattatttctctctgaataatttcaatattactcatatcaacctcactttcctcaaaatgaagacgatctctaccgtttttacagctcagattgccgttctttcaaatggataagttggcagcgggagccatttacgatattcgctctggtaaaaaatatcccaattgatacttcccccggcctgccagacagaggcaggcgaaatatacatctcttgcagtttactcaattgaggggtcaccactgtcgaacagatcaatatccggcaaacgcgaatcgacaggtaacataggcgcgggtctcaacgaactgatatctgtcaattgccccgcttcaatcaagccgtttaatgctcttctatcaattttgttgtgagcattacgcggcaattcatccgccagcatcatcctactgggcaacatgtagatggggagataagccttgagatgatcacgaatagcggactcttcgggaaggttatccttattgacagggacgaatattgcgactaaacgatcgagtccttcgtaagattcaacgataacagcggcgtccgcaatagcatgatgacgattgaggcaatcctcaatctcagcaatctcaattcgagaaccagagacttttacttggtcatctacacggccacaaaaatgaattcgttccccatcccaataggctaaatcaccggttttatacatacgtctatgatgaatatagggatcagcagtgaaacactgagtagtcaactgttcatcaggcgctgtgacaagcgcttcaaccaccagctcaaagcgctctgcaaatatctgaagacctgaatgtgagaaaaaatgtttatccgctttaaactcacatcttaagtgggaaccggcatccacaaatagcagttcaatatcaatctggccttcctgctgacaaaccctgaatggggaaatagtccgtcccgcccatgatacctgaacagaatcgccagccatctccagcgccacccaacgcgactgctctacatgccctagcatattcaccattgcctgaaacaatgggttacgaccatcatttcgttccgcagccaggtgttcgaccatttggctgagacaaaaatttcgattatcaagggccgataacaatcgctccttcgctgctaatagaaagtggtgaaatgtctgatcgacggataaacgtatgggtaatacattaaacaaacagccgataatgtgccgatgaaccgagtgacgcatcgacaccggcacccccataacgatatcagcagtttttgtctctctggcgatgtaagcactccatgcggccaacatgactgtaaagaccgatccacctatttttgaagcaagccgcttgatttttttggttgtctcttcaccaatactaaacagaacggatgacttgtcattagcgcctttgcgccaaaaactatcccattgcaatacgtctggcggctgctttaaacattcactccaataagctttcgattcctccgccgcttcactttggtaatacttccgttctttgacagcataatccttaaaatcctcagcgggcggtaaccaggaatcgtcatcttcgccaagtccagccagataatagtgttcaagttgatccaacatcagccccagtgaagtaaaatccgacacaatatggtgaacacacatatgtaaaacgtattcttccgcgctgacaacgtagataccgaaacgcagacacgacaatttttctaattgaaaagggatggaatgaaagctctgaacggcatcttcaagcgccttctggctcaagttcgttgcatcgaaaacctccaatgccggcggcaagtgttcattaatgaccaactttggttcgccattcacattaacgaaagtgcttctcaaggtggcattcttggcaacgagctggttagccgcatagcgaaaagcatcgatttgaaacgatccgtgaatacggaatgccatggaaatattatatttggaatcgccaggggtatcattgtcaatgaaccataaagcgctttgctgcatggacagcaattcttcatcaccaatctgtgggcaatctttatacataacgtgtcaagctccataaatacttaaacagtatccccaccctctggctaagccagcctcgttacggagtcagctcttctatcactatttcagttatcgcctgacgttgctcttcatgggaaaatttctcaggcgtgatcataacctcatcactttgtgcatttacatgataagcggggcatcttcaacaacgcttgccagatggtagatccctctaaagagtggtcagttctatctggcattcaactcccttctcctcaatcaattccagattctccgatcatttccaaccaaagttccatcaaacgaggtggtaaaatctgtagatgacaatctggcctggaagaaatagtgacctccatcgtatcggcatagatctctatatccatgctcaatggtatctcttgcgcatcttcatcgggtttcccaataccccacaaaatgaggactgacccacaacagcatattcaggctacccttcccaaaaacagccgctagcgccttttacgatttgccgatgttgttcatacaattcagcacaaaattgctcataatttgtggcattttcaagcgcaaggggctgaccattcactgacattctgtatgcctttgaaagatctcgccataagattctgctggaaataccgtcacagaccagatgattgaatatcaataccaatctttgatcacgggcacaattgccatcaaacaagcaataacgcaataacggcggatttgccaaattcatggcagccctaacctcagcaatgtagtttgatattaagcgtcggcgatcacatggactatcggtttgctctctaacttcaaaaacctgatgcaataattcacggctaggcggcacgaaatccatcttcatattcatcccgctaccaacaaaccgtgctctcagaacagaatacttatgcaatagatattcaatcgctaccttaagatgtgccggtgccaatcgctccaagggcattaatacttcaccgacacacaactgatcaacgctcagcgaatatcgcaaatcatataattgccctaattgaacacgcataatattcacctttccattgcaagccctgcgggcagaaacgaaattaaaacgttatgcagactcaatactcttctgcatacaaattagtcgaataacacagcgtttacttttgactaccagagaaagcgaacatgcagagtaaaaaaacgggaattgatagcccggctacccacatggaatgataattagcgtcatttattaaggtattaaaaacacagtgacgattttaaaagtagcaataaaaaaataaacctccacgaatcaatccagatatttgagctggaccaaaataattaatacattattactatcaaataagtaatttggttaatgttttgttttaaccataccctcactttacggcttttatgaactcttctacatatagatagagaaaagaggccgcccagaatactgggtcgaggaacttacccgactagccgccagtgtgttgggtcagggaaccagccaaaaagcggttcccttattcaaccattagtttcctattaagaaacgatgagtacaatcaatccggctcaccgatttcactgacgatgaatcgcagcatgagatgtattactcagtgaggagcggcggaaattgaaccacaccaacgccgccatcatcagaagaaacagggacgcagcacccatcacagaaaaaacagcatcgtcaaacgctgacttagcaaggctgaccaaagcctgccccgcatccggagccatctcttttgccgcaatcaatgcgccatcaataccatctttagccacatcgtagataggagaatccactggaatttcaatgaaatagctatagataaatgacataatgctacccatgatcgcaatgcccaatcccccacccaattcataggaaacttcttcaacggacgccgccatccctgcccgattaggcggtgctgcctgcatgatagtactggatgccgcagtcattgttgctccaagacatgtcccgagcgcaaaaaagcaaactatctgcaaaggtagcggcgctgaaaaactcgccatgagcgccagtatggcaatggcatacatcaacaacgaggttataaggaagcgtgcactccctaagcgaggaagaacccaaccactcacaggacttgcaacaatcgcacccaatgagaatggcagaaaatagagcccggattgcaaaggcgttaatgataataccagttgcaaacgctggcttaacaccagattaaggcccatcaaacaggcggaagccaccagcccggcgataaccgcagatgagaaggccgggcttttgaacaggtcaaaatcaatcaacggatgcacactgcgtttttgccgtcgaatgaacaacgtcagaaaacctatcgtcagagtggaagttatcaatattccgatataagaaggctcccgtttggcaaattctttgatggcataggcgaagcttatcaagacaaccatgatctgcaatgagccaataagatcccacgggtgagacgaatctgttttcgctgttgggacaaacaaccacgacagaatgagtgtcaaaatcaccagaggaacgttgatcagaaacactgatccccaccaaaaatattcaagcaatacaccgccaatcaggggacctattgccgcgccgccagaagcaaccgctgtccaaatcccaatggcaaatgatttctcatcttcatcttcgaatgtcaaagcgataatcgacagtgtggcaggcatcatgattgccgccccaacccctaataatgcccgagaaaccaccaacatttctggcgaataggagtaggccgctatcaaggatgagaagccaaagatgatgagaccataaacaaacaaccgtttatgcccgatgcgatctcccaaggtacccgcgcctagcaacaacccagagacgacaagaggatagatattcactatccataacttttccgttgtattcgcccccaaactgtgggtcagactcggtaacgcggtatataacacggtcatatcgatagcaaccagcgataacgcgactgaaacagcagtgagcacccaccatttttttatcgtattcatttcattcatttttactgcctatgtcatctccaggaaatctggcgtcatttagacgccataattatcatattcttgcaataaattgttaacgttaacgctaagagtgatatcacgtttcaactttttgtttaattccgtttccgttaccccctgaatagcgccttgcccaacaagcttctccactcgactacgtgacaatgcgagctttttggtcaagattgagatcaacctgataggaatgggatattcaagctgtattgtgatctctgccgctggaatttgagcgatgtcctgaagctttttaccttcgatgataaagtcaggagcagtgccgagttcagctctattttttgccaatacgcggtaatcaaatgcataccgtcgtatttcatcttgatcattatgcaaaaaccgttcatacaaattgctttccaatttgttgacatgaatcctggaaaaaatatcaatattccaggtgtaatcacatttctcacatttatagatactccacacatctaagacttttttctgcgcattaaccctaaaagtgccggctggataaaactccttttttacttcacagccagggcaacgtttcaaaatggcctgatagcctacgggccttactaaccagataacatttctatttgtcatgatagatccacgtttaaattggtcaagttagctacggctaaattggtcaatttcagatctgattttgatggcattctataacatcagatcttgaaaccctttatcaattcgttgcttaggtgacagaagacagaagacagaagacagaagacagaagacagaagaacttgacgtgaattgctataagcctgcaagcaatattttttctgggcagttttctgcatcagacgccgtttatttcgggatatcatcgccattatataccctatggatttcaagatgcatcgcgacggcaagggaacgaatccccgggagcatagataacgatgtaaccggggtgagtgagtgcagccaacaaagaggcaacttgaaagatgacgggtatagacgattaagagaaggcaaacctgacccacgttaccgcaggtcaggcacatcacggtgattttcctttatagaaaggagaaccatcacaactcacgctttggacaatcaatcacgtcgaaatttttgctgtagcaaatgtataattcatcacgattgatctgaatggtttttccctttaacgatgggttatttttctggaggaatttaattaactgctcattagatgggcgatcactcggcaataccaatccatcaaacagttcttgctgtttactgaaaaactgatctggcgttgtaaacgcgcaaacaccatgtttttcccactcactttgtaacaaatctgcccctggagaagcgcacagataaggtttaatcacctgataatccagtggcggcaaatcccctttgcaaagacgtggatgttttctgacatcagaccaatcacggcactgcgccattgatttactatcacaggtttgcgcccacaagccgtgaatcacccaactaaatttgttttcggagaaacattgcaattcaaacttttcatattcacgctgcgcttcagcaagtttgttactctttttcaggcgctcaatattctttgctttgcccttacaaaatgcaggagaataactaatagccagtttgaagtaatctgtcgatgcggttgcgttctgaccataacgatcacctttagcaacatagtcataatctttcggcggagtagccggtaagatacaagatgccccctcttccaatgttgatagagacgccaacgagtcagtcacttctggttgcttcgcacaacccacaatcagtaaaacgaatattgctgataataaattaaaaaaacgcatcttcattcctttatgggaaattatttccctgttgatggtaaacaaacaaaaacctgcccaaattagggcaggcgactattaaaattattttttttcagtcagatcaatttgatacaccgcaaaaccgatctcatcattttccaaatatttcactggatattgagaaaatgctttgatgaatttcgccgctttctcacttggagacgtttcgaaacggatatccaatttcttgtcagttttgattggcataatcgaccagttattctctgctttggtcgttactatccctttctgtttagacattttgacaatgtaagccgccaaaatagcgcggttctcatccggtgaagagaatgcgatgtgatcttcacctgtgccagcaaatttaccgccataggcgcggtaattattggtagcaatgagaaatttagcgtgaggatcgatcggtttaccttggtaagtcagctctttgatacgattcgccccttgatggatgatctggcaatcaacgtcgtatttagcaggttgagtcagatcaatcttataattcacgccacttatcatgtcgaagttataagtacggaagccgctccaattcaacagatactgcggctgagttgaatttggatcaatctggttatacatgccggccgaacactccaaccattcaatcacatcagcaccggtgactttcacaacagccagtgtattggaatagagatacaaatctgctgcgttacgaaaggttaaatcacctttttcaacttcaacaaactctgcgggtgcatttttacgcccgccaactttgaatggtgccgcagcggccagaacaggaatatccgctaaatcgggatcaccttgaataaaatgccgcgtgtaatcggcttgtgcatcattcacaatctgcactgtcgggtcactttgaatcaaagccaaatagctatacatattggcagacgctttgccaatcaatttaccgacaaaaccccgcgttccctgatgagcttgcccaataatttttgccaattcactatcacgctcaaccagtgcctttttattcactttgtcataaatcgggcgcgcttccgctttggcttccgtcactttccaggccccaccctcgttgtcgataaccatatcaacaacacctaaatgatcaccccattggccgggcataacagccggaataccgttaaccgtacctttggcaacatcaacgcctttaatatcggcaaattctttgcttggaaacacaccgtgtgagtgaccaaacataatcgcatcaatacctttaacttcactcaagtaataaaccgagttctcagccattgccttataaggctccttggaaaaaccggaatgaggaatagcaataatcaaatctgcccccgcttttttcatttgaggaacaaattttttcgcggtttcagtgatatcgttaacgacaactttcccatccagattgaccttatcccagataacaatctgtggcggtacaaaaccgatatagccaatcttgatggtatgatttttaccctcccggtcttttactggcgtatcaacaataatatagggggtgaaatagttcttaccggttttcgcatccatgatgttggcattgatataagggaacttcgcaccggcaatggcttttttcagataatccaaaccaaagttaaactcgtggttaccaaagttacccacggtataacccattgtattcattaactgatgtgctggatgagattccccttttttaagaccttttgcggccacgtaatcagccagtgggctaccttgaatcaaatcaccgttatcgaccagaatggtgttagaggcttctgctttggcagctttaactaaactcgctgtgcgtaccaaaccaaattgttctgtaggtttatctttaaagtaatcaaaatcaatcagattactgtgaacatcagatgtttccattacccgcaaatcaactgttgcagcatggacattacatgcgaccaataaggttaatgtggagactttcaacacattgttaaccatttcacacctcttttttaggtagttttggaggattcaaaattagctctcctactatcactgtcaacttacaaatacagatgagcgtcacctatcttttattttcataagctggattgtcgctgtacacatcatcatatgccgtttcaacgaacaaacgcaggctattgtactgagaaactgcaaaacgtttatctcaatccacaagataaatctgtttttttatagttagggtcttttcatttctatcacgccaaaagttacccgcaagcgtaccactttgccaagatctcactcctcccataacattaacacggtttaagttaagtaagatgacgggtatagtaatagttaattagctagaactagccttaactattcattaattttaaagcgattttcaggttaatcgctgacgtcaaaacaaaaaacataaaataatataacatcttaaagttaaagcattttttctcatcaggattactgaggatttcctgacaagttaataacacctctactgtctttattcatcaccattaatcctaaaataatcaaaacattatgatggaggtaactgcaaatgaaatggtatgtcaaggaagccctcgcaattaatcaggctataccctacgaggaatcaatcaatatcgaagcgggtttcggacctacagggctgccacacataggaaccctttgtgaaatcctccgagccaatctcatcaaaaccgaattggagaaagcaggtagaacagttaatttttatctcatttcagatgatttggaccctttcagaaaagtgcctttgaatattccaaatgctgaacaattaacgccttatctaggccaaccgataagcaaggtgccagaccctttcggaaatttcacgtcattctctgaaatggcggagtatcaacttatgaagctcgccacagaatacgaaatagagtgtcagctagtcagaaactctttagcctatcaaaatggcgattacaatgacgaaatcaaactattcctacaaaattttttagtgctaaaccaaatatgcaaggaatctaccggatctttaagacaaagaacctacagtatgatcatgcccatttctgaaagaacgggtgccgtacttgaacatattatcgttacagacgtgaaccctgcatcaggcgaaataacctattacatacctggagatgaagtcattaataaacccggttatgaatatggcgtagaaattcgggaattctataaaaatgaaatattggaccaagagcaaactatttcggtactaaacggtaaatctaaacttcagtggaaagccgactggggtatgcgcctccttgccagaaacattcattttgaaatgcatggtgaagatttgctggcttctgccgatgttgctcgccagatcgcgggagcattagaccggccaattccacgtttttacaaatatgggcttttccttgatgattcaggtaaaaaaatatcaaaatcgaaaggaaatagtttctctttagatgatattcgccatctgctcacacgagacgcaattcgcacttacctctcaaaagagccacagagatcgtctaaattttatgtcgcgctggcaccacatctcaatgatcaagttaatatttcgcaaaaagatggaaaaagactatctttttcgaagatagcaagaatattacacgcatcaaaaccagcaagtaaactcgcggctgaaaattttctaaatcgctataaaaaaccgggagaatccatttcagatcaggaattggaaataagttatcattattatatcaggacatgtgaaaatgaaaatcaagggttacaaaacattaaagaagaaaaatatttctcagccattgccaactcaataaattcaggagaaatatccactaaagatcaacttttccaacatataatcactacatatgaagaccatttttcagatgataaatcatcccaaatatggcctctgctctaccgagggttatttggtgataccaaaggcccacgaattaaaacatggttagatttaaattgcatgcagcatattttaacccattttagccatccatataaaaacccacataaaaccccatataaaaacccatcccaaaaaaatgaggaaaatatcgttaacaacgaaattaacaaatctcaaaaagagagattactaaaaaatagcattgaggagaacaaaacatatatgactaagttatacagtaaaattaatttcaccgaaatcaggaaaaaatgtgatgaactttcttccgctttacagaagaatagtgaggcgttagtcgaagcactctctggctatcaatgtaaaaacgtcaccgaagatgaaattctccgttcaatagatgtcttgaataatattgagaacaacagagaatatttcaaaaagaaaatttatggtgtgacatcatttctcccgcttaaccaacccatttacgcttctgtatgttttggttttatcccttcacttatggcagaaaacgtgtgcatacgcccgccgacagcaatgcatacacattacaaaaaatttgaggcggttattaatttatccgaattttctccaacattatctatttcttatgaagataaagagttatttttaagtcaacgcgtaaaaataactgatgcagtaatctttacgggaacgccagagaatgcgctcaaagtacgtaaacatttcagaaaaaataccttatttattcttaatggcgccggtcataatccacttattatctcaaaagatgcagatattaatctggctgttgaaagtgcaaaacgcgttgttctttacaatcaagggcaggattgtgctggtccaaatgccatattagtacacaatgatatatacgatttattcaagcaacgattaatctctgatttgcagaatattgaggatagagttggtccttatagtgactataaaaatatagtcggtcccaatagcgatattgatcacagcataaaaattgcttcattatttaaagtcaatagaccctattgcacctatggaggagaagttaatcccatcaatggcatgataaaaccaacggttttcgagaaagaattatcattaggtggcaattataaagaattttttgcccctgtgttcttcttacaaagatattatcaggatcaagatttaatccattatttttccgatcctttgtattctgctaatgctatgtatatatctttgtttggtaccagtgactatatccatcatcaactcagcgaacgccttcacttacccgatagtattctgagtaatactgatttacatcgggaagaacacggttaccttccctatggtggtcaagggccggcggcttcatgcctttggtacgaaggtaataggattaatggcagtacgttgccacagcgtgatatataccattatttaattgaaccctttgatacccctcccacgccaaagagtgaaaaacgccactgcgttcaagcgggaatttaaactactccggtgagtcctcacttcaacggatgacctgaccgcgccgtacttccacaaataagcacggcgtgtctcagcgttcaataaaaatcatcaatcaggataattgacacaagatactagggcttatccctgtgattcgctatcatgctaccttatgttggtcatgctcccgattcattgagcaaaaatatggggtaattttatgttgtggttcaaaaatttaatgatttaccgtttaaaccgagaaacttcactttctgcggatgaactggaaaaacaattgagtccgttagcattcaccccatgtggtagtcaagatatggcgaaaacaggttgggtgccaccaatgggttcacacagtgacgccttcacccatgtcgcgaataatcaaattctgatttgcgcccgtaaagaagaaaagatgttaccttcaccggttatcaaacaagcactacaagcaaaaattgaaaaactggaaggagaacagcatcgcaaacttaaaaaaacagagaaagactctctaaaagatgaaatattgcataccctgctaccacgggcatttagccgattcagccaaacttatatttggatcgatatcgccaataatctgatcgttattgatgctgctagtgctaaacgggccgaagataatttagcattattgagaaaaagtctcggttctctacctgtagttcccctgacatttaaaaacccaatagaattaaccctgaccgaatgggtacgttccggtgctctgccaacaggttttgctttaatggatgaagctgaattaaaagctattctggaagaaggtggcgtgatccgttgtaaaaaacaagatttagtttctgatgaaatcgctactcatatagaagctggcaaatgtgtcactaaactggcgcttgattgggaagaacgtattcaatttatgttgtcagatgatggtactttcaagcgcataaaattcagtgatactctgcgtgaacaaaatgatgacattgatcgagaagattttgcccaacggtttgatgctgactttattctaatgaccggtgaattaagtgcgctgattaacagcaccattgaagcactaggtggcgaagcagaaaaataacctcaacctttaatgctatttgccgctttgaactatttttcaaagtggcattattatctctttttcaaccttatataccctatggatttcaagatgcatcgcaatggcaagggagcaacttgaaagataacgggtatattgctctttcccccttactggcgataatatcaacctatttcagtgccaatgataacgttaaagctagtcacgataatcccattaatccaattaggtattcaatgaattcagctacaaaaggctaccaacctcctttctcaattacagctaaaatgatccaattagttgctgaaatcagtgagaacatcgggcggttaagcacagaacaggaacaaataaaagccctgcgattgaggcgtatcaatcggatacgcacaattcacggttcactggcaattgaaggtaacttacttgatgcaagccaaatcacagccattattgaaggaaagcgagttattgcaccgatcagtgaaatacaagaagcgcgtaacgctatcttggcttatgaaaagcttaaccattggcatttcacatcagagcaaaacttactggaagcccattatgttctgatgaagggattgctagataatgccggcagttatcgacacagcggcgtcggtgtaatggatggagaaaaagtcattcacatggctccacaggcaaaccggattccaaagctgatgggtgacctttttcactggttagactctactgatattcatccgcttattgccagttgcattttccattatgaatttgaatttattcatccatttgccgatggaaacggcagaatgggccggttatggcaaacattaatcttaaaccactggaaccctttatttgaatttattcccgttgaaagcctggtttatgaacatcaagctcattactatcaggcaattaatctcagtagccaacttgttgattgtgcaccgtttattgagtttatgctgcacatgatccgtgatgcaattctgacatccacccatcaggctacccatcaggctacccatcaggctacccatcaggctacccaacaagttaaacaactcattatggtattgaaaggggaaatgaaccgtgggcaactgcaatcagcacttggattaaaagatcgtaattcattccgtctgcgctatttgcaacccgctttggcagaaggattaattgaaatgagccatccagaaaaaccgagcagtccattacagcgctatcgtttgacggaaaaaggggtaaatttaaaaaatcaccacaaatagtgaaaagtaaccaattcctgccttatcaggggcttcgataagaacccgctaaaaaactggactataatatctgattaaatatcaatatattaacaaaacaattcaaccacgccagcgaaatactcactcctttcactattttgaaaaactcattaagtggacatgaacaccataattatagtgctttaatgtccacttaaaataactataatcaagtgaacattaaaactacaaatacataccctatggatagatctactgcacttaaacgttttattgactgggacaaaaaagggcgatacgtcttcacccttgccgatctcagaaaaatctttcccgaagatagccccaaaacacgccaagcgggcttaaatcgtctggttaaagaatcgatgctttcacgacctgtacgcggtgtttatctgtttaattttgctcataatcgcgatagttacgctattgaacatattgccaaagctctacgacgtggtgagtacaattacgttagccttgaatcagcattgagtgaatatggcgttatttcacagatcctgatcgataggctcaccgtgatgacaacaggccggaaaggtctttatcacactccactgggtactattgaattcactcataccaaacgccaacaagaagatatcttagcgagtatcacgcaagcaaaccgccctttgagactcgccaaacttgaatgtgcactacgtgatttaaagcgcgttggtcgcaacacccatttagtgaataaacaggagattacacatggtcaataaagcaaatttcgcccaacttatagagttagcaatgcaggtaccaggacgttcccatatgcgaccggttattgagaaggaactgttgcattacgatattctttattgccttgatactaatggattacttgatcaactcactttccaaggaggaacctctctgcgcttgtgtcacggagctccacgttttagcgaagatctggacttttccggtggtgttaactttaatcgtaatcaattacaagccatgaaaaaatgtttggaacattacattggcaaacgttacggttttgaagtttcagttaaagaaccagccgatttaagaaacgagcctgaatatgctggccttaatatagataagtggcaggtctcaattgtcaccgcgcctgagcgcaaagatctccccaaacagagaatcaaaattgaaattgccaatatcccttcttattcacaggaaccgaaggcattaatgaccaactacaattttctacctgatggctacgccgatacgctggtattaaccaaatcattggatgaagtcatggcggataaactggtttctctggtcaatacacaacactatgtacggcaccgagatatctgggatttacgctggttaaaacagaaaggagctaccctgcgtatggattgggttaataacaagattatagattatcggattagtggctattcagacaaattagccaatattctgacacgcttgcctgcaattattaaaggtgatgctttccgtaacgaaatgcagcgctttatcccacaggatgtccaggaacgcactctgcacaaagaaaaattctttacatttttaactaccgaaatcgctgatatgctacaacgggtacaaaactcactaaacagttgctcaacatccgagaatgaattcaatatgtagatataccctatggatttcaagatggatcgcggcggcaggggagcgaatccccgggagcatagataacgatgtgaccggggtgagtgagtgcagccaacaaagaggcaatttgaaagataacgggtataaacgaaaatatcactaggtgttagttactcgatatcgtagaaacagagcaaatctattcattttgtacagataatccaaatcggaggctttcatgggaacacgttatgaaaccgacgtggtagcttgggctaatgaacaagcagcgttactacgcagcggtaagctgagtcagatagatatagaaaacattgccgaggagatagaagacgtgggtaaaagtgaaaaacgcgagctagcaagtcggctggccgttctactggctcaccttatgaaatggcaatttcagccaggccgtcgcggctccagttggcaaagaaccatcaaagaacaacgaaaatctctatcgcgacgtactgataagacgccaagccttaagggatgtctggcagataaagagtggttagacgacgcatggtctgatgcagttgcaattgctgctaatgaaaccgggctggatgtttttcctgaatcctgtatctgggatatagagcagattttatcccaaggtttttatccagaataatcttacaaatttattgaatacacaaattattaacgctgggtaaaaccagcgttaataatatatctcacttttatcctcatttattatatggcttaattcaataaaatcataatacatataagaatacctatcatcttatcaatcacataagcgccattaaaaaaatattatttccaaaaaccatctaattacatgaaatataaccacccattaaaccattaataacaaacacctatttactcctaatcaaccttatttcaataaattattcacccttattagacaggctattataaatagcctgaataactttattctccaattattaacagaaagataaaataatccatcctaatatcttcattgcatatataccctatggatttcaagatgcatcgcggcggcaagggagcgaatccccgggagcatagataactatgtgaccggggtgagtgagtgcagctaacaaagaggcaacttgaaagatgacgggtataaattaatgatgaattagctctaacgaatacaacgttaccgttgaaggtttcgcgcctttatctatcaacgttaatttattattagctatagacacattaatctggttagtcacctctggtggagttattttttccagcgatccgccttgttgaatacgatacgctttaactttaaatttcttacaacctatatgatcaatcaccacagtaacgccttggtcactatgagtataatcacgagttttaggtcttaaaagagaatctagtggcagttgttgtaccggatctttttgcactaccgcattattagattgaatggttgtcggatcaacaccaccaaaccatctatttttactacaggtatccgttaattgatctaatgtccggttagtatccaaatagtattgtcgatataaatccgcaggaacgggggctacattaccatcagaaaaactcttatccactttataatttgctgcaagaatattaattttattacccgatttattttcagccgccaaaaccgttaagccggttgaaaaatctttttgaccacttaatatataaggtgtttttaatattttagcaaaaagaccaaaagattgagctgaataggtacagaaatttctaacgcttgggtttttaggattaggctgatcattaaacaaaccaaaagataaaccatcaccccgataataatgggccaggtcaactttggtatattgcatataaatcaacgaggaggcgatatatgctgcgtttttaggactctgcactttggtaaatgtatttctcgacccaaaaggactagagttccactcagtacaaatactctctgtcttagtaaagccataagtatgcaaacttttctgaatcgtattacccatatcaataatgttttgcgggtctccagtatcaacgtatccatgccaagaaaagaaatctaacggtacatgattatcccgacaatatcggaaaaatccatcaatataatgccctcctgcatgattactaaacgaaatacctgcaccacccactttagcatcaggatcaaccgtcttaattaatctcactactttttcatataattgataatacttttgtggatcatccgtattccagaaaaacagtaaatcaggctcgttccaaatttcccagtagcttatttttctcggcaacccaatgctggcataatttacaccataacgattcaccaaggttttaactaatattgcataaatatcaaaatcctcgggtatttcataaccaccatcaagtgaacgcccaatacgaaacagaagttgtcgctgaatattatctggattcagatctgcttgattattcagaacatcacgtagataagcatccgtcatttcataattggcatcttttaatgcaagactcacatcatgatttctcattccgagagccgcattgggaaagagacttctgacatttgcaatatcagcaacaagctttttagccgcgggtttattttcctcagacacattaacaatcatttgattttgattgtttttcctatccacctggaagtaattatctatatccccaataccaaagccgtcatgcagccggacatgggtaattcccatctgattaaattcattatctaaatcaggaaaacctggcgctatagatttaggaagaccattgacaccattaaccgttttaagacatgagttatgtcccgctgataaatcccgatgatttttattaaatgaaaaaactttagtcataataccctctatactcattaagaaattgtatccctataaaccaaaaataatatcaaagaataaatagatttatctgacaactcaataacaataaatgaatggaagacccagataatagttagatatcactttcaaccacaccttaaaattctcagctattactttgaatttattggattaaacaaacaattacattaacacaactatttatgataataaaattgactccgtgacttatttaaccgcagaatcattaaaagaaaaaaagatatatcaatcaaccaacaatgatattaataacaataataaaatagcacgcaataaaaccatacagagagtagattatatttaaaaatatcgtacaaaagatcatcgacatatattaaaaacatgttttcaaccttaacaagccaccaaaaaatataaaaaatccatacaatttaattaactgttatcaaaaaggctctttccagagcctgttcgattaaaataatttacaataatatctccattgaatataaaattaattatcctctaactctaacgaatataatgctactgtctcaggcttcgctcccttatccactagcgttaatttattattagctatagacacattaatctggtcagttacttccggtggtgtcatttgtgccagcgatccaccttcttgaatacggaatgctttaactttaaattttttataacctatatgattaattaccacggtaacaccttggtcgctatcggtataatcacgatttttagctctcaacatattattatccggaaatggcttaaccggttcatgttgtactaccgcgttatcaacgcgaacggttgtcggatcaacaccgccaaaccatttattcttactcccagtatccgttaattgattcagtgttcggctggtatccaaatagtattgttgatataaataatcaggagccgcattaccatcggcaaggctcttatcaactttataatttgcggcaagaatatttattttatttccttcggtattctcggcagccaaaacagttaaacctgtggaaaaatccttattaccacttaaaatataaggtgtttcgaacattttggcaaacaggtaaaaggattgagctgaataggtacagaaatttttaacacttggattttcagggttgggctggttgttaaacaaaccaaaagatgaaccatctcctcgataataataagatctgtcaacttttatatattgcatataaataaaagtggaagcaatatatgccgcatttttaataccttgcacttttgtatatgtattttttgtcccaataggacaagaattccattcagtacaaaaactttctgtaccggtaaaaccataagtatgcaaacctttttgaactttattccccacatcaataatgttttgtgggtctccagtttcaacgtacccatgccaggaaaagaaatctaatggtacattattatctctacaatatcgtaaaaacccatcaagataatcttcttgtgctctatcaacaaacccaatacccgcgccaccaactttagcatccgggtcaatagctttaattattcttgcaattttggcatataattcataatatttttgaggatcattactattccagaaaaaaattaaatcaggttcattccaaacctgccaataggttatttttcttggtaaaccaattctggcatagtttaaagcgtagcgattcaccaacgtactgactaatattgcataaatatcaaaatcttctggtatttcataaccaccgtcaccagtacgtccaatacgaaacatgatttttcgctgaatattatctgggtttagctcagcttgattattcataatatcgcgcagataagcatcagtcattttataattagcctcttttaatgcaagactaatatcattatttctcatcccggcagccgcattgggaaaaatgcttctgatatttgaaatatcagtaagcagttttttagccgcaggtttattttcctctgggacattaacaataatttgatttcgatcattgactctatccacttggaaataattatccatatccccaataccaaaaccatcatgcagccggatatgggtaatttccatctgattaaattgatcatctaaatcagggaaacccggcatcaaagatttaggagcaccattcaagccattaacctctttaagcaatgagtgatgccctgccgataaatctcgatgatttttatttaatgaaaaaattttagtcacaataaacctctatattcattaagaaatgacattgttataaataaaaaataatatagaagaataaatatatttccctgacaactcaacaacaataaatgaaccgaatacttagagaatagttaaatattacttttaactatattttacaattaccctatattaattttaatttattatatcaatcaataatcacatagatataattatttacgccaataatcgaccctgtgatttatttaacaaaatcagcactaaagaacatatacttcaataataaattgatattaataacgacagtaaaaaaacacccaataaaatcatatagtgagtgaattatattaaataatatcgcataaatttattaatatatatcagacggattctcctaaataatcttggcaagcctcttttgcaataacgacataaatacggttaattttgctggcgggtgagcaagtgctcgtagtaaataaatatcttctttacgtccatctggatcatcaaatagaggaataagtttttcagaacgaatatctgtggataccacccaattaggcagaagcgctattccaaatccactcactgtggccattctcaatgtttcaaagtcatcactacgaaagatcctattattatcgctgaaattaataacactacgatagcgtgaccagcaaatacccgcggggtcatgatgtttatcaagcaaatagtgctcatccagttcagtaagtgttgtcggtgttccatgcctttgaatatagcctgggctggcacaaataatccaagtttgtgtggcgatacgtttggaataaagtgtgctgtcctttaattcaccaatacgaataactacatcaagacgatccctgaccggatcagtcaaccgctcggtttgatcaagttcaatccgaattttaggataccgcgtgaatagttctgctagcatcggaataatatgttgacgtccaaacgttggcaggcaagctacacgtaataccccttgcggctcgccattcaacgccgctaattcagcctggatatcgacaagatcattgataataccttgcgcccttgcaaacaaaatctcccctgcatccgtcagcgataaaccgcgggtagagcgaaagaatagttttgtctctaacacctgttcaaggttgtctatctgacgtgtgatagaggatgcagccataccttgcaaacgagcaacggcagaaaaactccgtgagcgggcaacatgaatgaatgttgttagcatatcggtacgtaataaatctttcatcgcaatttttacctatacatttcatatattacaaataatacacaacatctgatagcgctctcatttttgcattctatgcaaaacaatttcgctcgctctttttattcccactatctcaagatagtgccagaattatttcatcataattccggccaaatgctgagcattcccatgtcaaatacagcaattaaaccaaatcctatttcttctatttctctcattttgttatctactgcttgtggttttgctgtagcgaatatttattataaccaaccattattgccaacaattgggacaagttttaacgttaatggttcaatatccggctggatcgcgacactaactcagattggctatgcggcggggcttctcttttttgggccgcttggagatacgataagccgtcgcaaactgattttctgcctgttaatcggcaatataatcagccttattttatgtgccacagcaccaaattttacatgtcttctgacaagtagcctgattgtggggataacttctatttcagcacaaatcattattcctgccgtatctggttgggtaataccagaaaagcgtggccaagcggtaggcagtctgatgagtggccttttcgccggagcactacttgccagggcattaagtggtgcagtcggagagtatttcggctggcgtgaaatgtttatattggccgctttaatcgatatctgcctattttttctgatctggtttgtgttgccagaaatagaaacaccacacacgatgacttacggccaacttcttatttcactcggtaaattggtaaagcaacaaccccttttgcgtgaagctgcattatccggttttttactgttcgccgcttttaatacgctgtgggggtcgctggccttattactttcccaaccaccttacggatgggggagtgatatcgcaggtctttttggtttgatgggtattgtgggaatgctagcttcacccataataggttcgttgacagatcgcttcggcgggagaacgattgttgccacaggcgctttattagtgacactggccttgtgcctaattagcggcacgagccacaatattctatttttattcgcgggtattattctgttagatcttggcagcagagcgggtttagtggcaaatcaaacacggttatatacattattacctgaggctcgcagccgactaaataccgtatttatgacctgttatttcgctggcggcgcaataggttcctctttgggagctgtcgccgcttggcatttttcttggtatggtgtcgctttcagcggcggaggatgcgcattattagccgcgctatgggttctatttaatccaaatagccgcaagcaaatatgattttacacactgcgccccaagctatcttttatgatagattgccaccagccagaagataattggcatcacggtattaactagcagattagcagccggtaccattcactctttggaggccaattttttccagttaataagtgtaaattcaatggaatttaaatagcaattaaccaaaagaaatcaacataagtggtaataaacaaccatgtaatttattagatttaaagtatatctgaaaacaatttagatgatactaggttgacaaaatcagaaatttgcaccaacatcaaagttgacaaacttgaatttttgcacctttagagaaaacagcaaatgccaaacatccgctacccttgggaattccatccacagttaagtgaagaacgtttaagtatcattgcaaaagaactactcaatgtgcttgatcatacctatgagcagctttcgacaccattagatgataattacacccgaggaacctgtacatttggccgccaaaggcaatgtcttattcagctctgtatgaaaggtacttatgattggctaaaactcactaatcctaatatggatacgaccatcgaaatagaaacaatcccacttcgtttttttactgatgacccagaaaaccccaaaaaatcaggcttctttcgccgtaacagtgtagaccaactctgggcaccagaaatcacgataccaacaatatggcgctttattgtagaaaaaccccagtttgaaggcgaaggtgcgcaagttcattttgctggttacaacgagcatgaagaaatgttgtctcaatggacttacgataacagcaaaatatctactctgcattctacagataacacaccgccatctgcggtaacaatcgaattggatcctatcagtgctgcgatgcctgataaatccagagaaaacaagcgcaacaacaagtagtaggtgacaagtgttcaatggttctaatttgcgattagctcgtctgtatcacgagctatctcttgagcaagtggctgagcgggttaataaaacccgccaatatattcagcggctggaatccggctttgctgtgccaactaatgaactttctaatgaattagcgactgtattgcaggttactcctgcgttctttgaaacccaaatacaatctcctgtgaacgaagaaattgttcatttccgtaaacgcagcgcaattagagtagcaacaaaattagcagcacttgcaaaggctgagttatacagacgattaatcgtcgtttttgaggaaaatctaaatttaccgtcagtgttatttcctgaattaaaagcaaactccccggaagaagttgaacgagcagcagaaaaatgtcggattgattggggattagggtttgggccaattgaaaatgtaactcgcctggctgaaaagctaggtgcatttgttacctcgtttgactcagtatctgatgatgttgacgcgttatccgttccattagatcgacctttcattgtcagaaatacagccaagaagtcaccatgccgacaacggtttgatattgcacatgaaattggacatattgtgttacacggcggaatatctactggtgacagaataaccgaatctcaagccaaccaatttgcctctgccctacttttaccacgaagtgcgatggctaaatatttccctgccccgataagcggaagaatcaactggcgaggtctaagtgagttcaagttaacttggaaagtaagtaaagcagcaattatttatcgggcacatcagctttcccttttaaccgatacgcaatacaaaacggcttttttggggcttaaacgtaagggagaagctattgaggaaaaagaggattatcttattccccatgaaaaacctgaattatttcatcgggcaataaaagtgcttattaatgatgtttgtattgatattgaaacattagctgagcgtctgaaaattacagtgccaatgctgcttgaactcgctaacgatagttcactttatgagcttaatgatcaggcaaattctgtaaatgtcatttcgatgttttcatatcgatccagaatagcgtgattattttccatcctgttcaaattaggctcttattaatacaaaccaattatcattttatccgatgcaccgtaaaaccccgtccttcagagggtgtcaactcaaccgcgctttccagcgcggttattcaatggaagaatcagtgacaattaacctgatgaaaccgcttccatccctaccaagcccactttcagatagcccgatttacgcaaagaatccatcacactcatcagtgtttcataatccacagttttatccgcttgaaagaagatggttgtctctttattagattgggtggtctgatccaataccgccgccaaagtatcataatcgaccggttgatctccgacataaagctggcgatcagctttaaccgtcaagaataccggtttttctggacgcggctgtggttttgccgacgaagcaggtaaatccactttaatatcaacggttgccagtggtgctgctaccatgaagataatcaacagcaccaacatcacgtcaataaatggtgtgacgttaatttcatgcaattcgccactatcatccagatcttcattaagacgtattgccataagtcaccttgtcttgctatttgctaaatccagatcacggccaagcagtaatattgactgtgccgccatgtcaccaacctgaccacggtaagcaacgatcatacgggcgaagatgttatatatcacaacggcagggatcgctgcgaccagacccagtgctgtcgctaacagggcctccgcaatacccggtgccacaaccgcaaggttagttgtctgtgagtgagcaataccgataaagctattcatgatgccccacaccgtaccaaacagaccaacgaaaggagaaatcgccccaatggttgccagatagccattgccacgccccatatgacggctgatagccgcaacggaacgttccaggcggaaagcggcacgttctttcgtgctattcaggtcagtgctctcagaagataactgacgttctgcctgtacttcactcagcaataagcggctgatactgtgtttgttgaaaccttcggcaatttccgcagcctgatcaaggctcttaacgtccgttaaagctaatcgctctttacgcaaacgacgaccagatgccaacagttcagtgccttttgagaagaacagagcccaagtaataacagaagcaatcaccagaccaatcataacggtcttaaccacaatatcggcgttctgatacatgccccaaatggacagatcagtcgcaaagccactggaaagattggcttcatcagcaggaattttaggtgcaacctcatccgttgcaaccggcgtaacttgagtggattctgtcgtaggtaccgcttgcggtgcaatctgatttgcagatggtgcagttgtgtccgtcgttgcctgagtagtcgcgggagtagaccctgcaatttgtacggtttttgacgtggtattgttatctgttgcagatgctggtgctgtatcagccaatgctgaacctgtcagcccgaacgctaatattattgaagcagtcaaatttcgcatcagttggcctttactccctttgctataaaccttgttatttagcagtgaattacttttcgtcatctcactaaccttatttatactgagtcttcaccagattgaatgaaaatgcaggctgataatatcaaacattaagtgatttgatagtaattatcattattgtttaataaaaaagtattatcccttcacaaaataaagttaaacaacccctactcacaggtaatgagatgaattttcgtcaagttgtcttaatctttttgtacaaaaaggtctaaatcttttaacgtgttaactctatttttttacaccatttcaaaaattgaagtgttaaaggtggcagtggatcatggcagaaaaaaaactggaaactttactggtcaatgcaggtagaagccaaaaatttactcaaggcgcagtcaatcccatcattcagcgaacttcatcggtgatcttcgattctgtcgccgacaaaagacgtgctacgcaaaaccggggcaagagcgagctgttttatggccgccgtggtacacagactcatttttcttttcaagcagcaatggctgaactggaaagtggcgcaggctgtatgctttacccttctggtgctgccgcgattagtcatgccattctcgcttttgccgccgcaggcgatcatattctattaaccggttcagcttatgacccgacgcaaagtttctgtgacaaaatattgtcacggatgaatattaccaccgattatttcgatcccatgattggcgaagagattgctgatctgattaagcccaataccaaagtggtgtttcttgaatcccccggctccatcacaatggaagtacaagatatccccgctattgtccgcgcagtgcgccaagtcaatccagatattgtcatcatgctcgataatacttgggcggcaggtgtgctgtttaaagcgctagaattcggcgtcgatatttcgattcaatcaggcaccaaatatattattggtcactcagacgcaatgttagggattgctgtggctaatgaacgttgttgggcgcaactgcgagaaaactcctatttgatggggcagatagccgatgccgatacggtctatatggccagtcgcggattgcgtactttagccattcgcttgaaacaacatgaaaaaagcagtattgaagtcgcacactggctgcaacaacgaaccgaagttgccgctgtctatcaccccgctctgccttcctgccccggtcacaataattttatccgtgatttcagtggcagtagcggcctgttctcttttcaattgaaaaagaagttaactccccaacaatttacggattatctggataattttcaccattttaaaatggcattctcatggggcggttttgaatctctgatcctaggctatcaaccagaagagataaaaatgatgcgtcaatacgatatttcacaaaggacaggcactctgttccgcctgcatgtcgggctggaaaatgttcaagatttgattgatgacctcgcagagggatttggtcgaatttcgacttgagtaatcttattgttattcaatgtaataaactgaaaaacttaacatttgaaatcataatgaagcgataatatagatatattgccagtacaatgcatttgcattacactttgttgaacagattctcaaatcagcataacgaggtagaaatatgcacgcattaccaaatgttgagttcgaggttggtgcagaatccaagcttaccagtcgcagccagacaaccatcccaacatctgtccgtaaagcgcttaagttaaaaccaggtcatgacagtatcgcatataagattttatcttctggtgatgtacttatcagccgtaaaaatagtgaagaagaaaaagatcttgtcatggaatcatttctggactttctggcaaaagacattcggagacatccgggacaagtacaacaattagatgaacaactcattaaccaggcgaagtcacttatcgctggaatagacatagatctgagcaacccattatctgctgacgatgagtaaagactatgtatgatcgagtatgtgtaataaacggatgggctctttttgctcatccgtgctttgtagaacaattaaaacaatcaatagataaggtagaacaacttcaacaaaaatatccaaatgactacttgaaaaaaaatgatacaaaacgcttggctgcaatcataaaactcgttactgaaattattcccaatgacccaactaatatagcctttcgtttaggtgacacattaggtggcaaaagaaaacactggttcagagcaaaatttttccaacaatatcgcctttttttccgttttcacgctgaaagtaaaattattatctttggctgggtaaatgatgagagaacaaaaagggcatatggtgataagcacgatgcttacaaagtatttggtgaaatgcttaatgcaggacacccaccagacgactggaactctcttttaaaagaatccattgattcaccacacttaactaaacttattaatgaacattagtcatagtttctccttatccgggataaaatcaagccatgccaaagcttttactgtaaactgactttatatatacagatgcaataaatttattttatatgccctatggatttcaagataacgggtataacagttacaggataagcaatggaagtactaaacgggatcatgcaggcattatggcagcatgacttttctaaacttgccaaccccgatgttctctggattatctatggcattctattcgtgacactggttctggaaaatggcttattacccgccgcttttctgcccggtgatactctgttaatccttgccggtgcattagttgccaagggagtcatgagttttatcccaaccgtttttatattaacagcggcggcaagtatcggttgctggtttggctatcttcaagggctatggcttggcgataccaaacgagttaagaattggttggcacaacttcctattcagtatcgccaacgagctaacgagctgtttttcaaacatggtttggccgcgttactgattggccgttttttggcttttgtccgcactctgttaccaacattggcgggtatatccggccttaacagtaaacgctttcaagtttttaactggttgagtggcctgctatgggttgtcatcgtggtcggttttggttatctccttaatcagatcccgtttattaaaaatcaccaagatttggtgatgaacattttgataattttacccatagtgctattgctaagtggtttaagcgcctctttgttgatgtactggcgccacaagaaaatctcggcgacaaaacgtaaataaaagtcatcatggtttacaagcagcagcagggtttttatccttaacttaatgtaccaatattatatataccctatggatttcaagatggatcgcgacggcaagggagcgaatccccgggagcataggtaactatgtgaccggggttagtgagtgcagccaacaaagaggcaacttgaaggataacgggtataggctaaggctcagccactaagtgatactcttggtatcgatgcatcaccaaaccggtcaatctatggacttggccatgtattgattacaatacatggcttagatcacgccgattgtattacttccttcaattacgcttaatatcaacttaatatcaattgccataatttcaactgatattttaagtctctctttttataggagttagtaatggataatcaacctattatcagacttgctgatgggaatcacatgccacaactggggcttggatcatgggcctcagatgaccagcagatagcagaaacaatccatgctgcactggatatcggttatcgggcaattgataccgccgctatctacaacaatgagaaaggcgtaggcaacgcgttacaagaaacagatatcccccgtgaagatatctttgttacaactaaattgtggaatgacagacaccttgatgcccgtgctgccttgacagaaagtctggaaaagttgcaactggattatgttgacctttacctcattcactggcctgcaccaccgcaagatcaatatgtcggtgcctggcaacaattgattgaattacagaaagaggggcttattcgcagtattggtgtttctaacttccaacctgaacacatccagcgactgatcaatgaaaccggtgttcatcccgtcattaatcagattgagttgcacccgctgttacaacaacgtcagctccatgcctggaatgccacacataatatcgttaccgaatcctggagcccactggcacaaggtggtgaaaatgtatttgataatcaactggttcaacatctgacacaaaagtatggcaaaacacccgcgcaggttgttattcgctggcacattgataacggcatgattgtgatcccaaaatcaaccacgttatcgagaattaaagagaactttgatgtgttcgatttcaaactagaaaaagaagatttgaccgcgatgactacgctagatatcggtaaacgtctgggaccaacccctgaaatattcgttgatttcagtgaattcattcagcttcttgagcaaaatagcgctaataatcagtgctgaaaaacggctgataaaattgatagggtgatcgtggacaaagtagaattaaaacgtgcgcggcatcaccgccgcgccccaattttgctgagctattttcttggttctaccgattatcactcatctggttttttccattattgattgaccggtatagtcactaactgcccaacagagccgcgatcggccatttccagaatctggctgtaatagaggaatgggaagtgctcataagagggctggttcatataaaccagcaattccacccgcccatcaacccaaaccgtatccttccaaccataatcttgcggttgaggggcctcaccgttgtggttaatcagcttaaactgcacaccttcaatatggaatggttgtggggcagaagcatttacgatccaacgctcccacgttccttgctggctagtaatatccacccgattcatatcccataacgcaccgtttattcccggcgtattatcatcaagataaatttcccggttacggattacactggaaactggcgtaacatcatcaatcaaacgagatgggagattatctgtcaccagagataataaaccggttgctttaatggtcaaaacggtgctggaaatcaacaccgtagagggttcaaacaacccacgcaacttatcaagtaccccagctgattcacctgcggtaacaacaacttcatcctctttggacatatcaattaatacctcacgccgttctcctggcgcaagggagagttgctgaacggctatcggcgcaggtaacagccccaaatcagtgcctatcatatagaaaggacggccatcaccaatctgtaactgatatcggcgggcattagatgcattgagtaaacgtaaacggatccagccacgagatacctcaataaaaggattctgtacgccattaactaacagagtattaccgataaatccactatcagaggccggctgatactcaggaaccccaaagttatccaaccgtttatcttgaagaataaccgggaaatcattaacaccatagtgtttcggcaacggcaaatgacggctggtttcatcttctaccaaccacataccagccaaacctttataaacatgtggtgccatccgattaggtgtattggcatgataccagcaagttgccgcctgctgacgaataggcaacactggcgaccagtcagaccccggagaaatctgacgggcaactccaccggtcaatgtacccggtaattgtaatccgctgacggtcattgaaaccggctctgctagccgattgctgtatatcagtttgacatcatcgtttttatgaacccgtatagtcggaccaaggtattgaccattaatcccccatacactggttttatattgtccatcaaaagtccaatgcgctttttgtaaagtcagaaataacggctgcccaccacgggattccaataaagggggaaccggcaaagcagtctgctgatttttgctggcccgaaccaataaaggagcggctccgatacacatcgccaagcctgatacctgaataaactggcgccgactaaatgacatattttctccgcgacaaacctaattaaattccgggcctatatggctcaaaaatagttgagacactgcaatcattcatcccggaagcgaataactcaatattgaagttattaaagcttattatccttttgattgcgcttaacaaaaacattatttatcaagcgctcatcataacgcgaatatggtgggaattaaactatctgaatgcattacacgaatctttcccgatcagcatcagtacatgtcatttccgactaataataaattgtggtcatggacaacgaacaaaaatcctcacatatgctaaatatgtgaggattaaagtacgcttaacagctatcgccttggttagacccgcactttattataaaagagtggctccaaacaacctattatgaatacttaccctatttctccattgcagccaactcttcatccaatgcatctattttagctttcatcactttatgacaatattctgccagctcacgcacctgctctttggtatagccagaagtatcaatgggaggcaacatttcaacaatgacgggaccattattccagcgattcagcttaatacgtccattagtgatagaagaaacgcagaccgggacaatcggcactcccgcagagatcgcagcatggaaagcgccagttttaaatggcaacaaaccacgaccacgactacgtgtcccttccggaaacatccaaacagaaagatgacgatttttaatctgctccacaacctgagcaatcgtgccatgtgctttagcacggttagcacgatcaatcaggatattacctgccaaccaataaagctgaccaaaaaatgggatcagcaccaacgtttttttacctactgtcactgtgcccggctgaaccgcattggacatagttatcatgtcatagttgttttggtggttgccaatgtagatactcggaccataatgcttagcttcagcaggaatacgctcaataattttgacgccaaatattttcgacaaccgaccaaacatattcccaaacaccataacatggtcaggatgacgtggcctgaataagcagtaaatagcaccagagacacacactacaatcgaaaacagaataacaataatgccgcgaataattgctaacatagccgcctcttatttaatcccactatttagttacgttagtattagtagcagaaggtggagtctcaacctgtacccgttcaatacgctgcaacccacgaggtagagacgttcccttacgaccacgttctcctcggaatttctgaagatcttcaggacgcagcgtcaatttacgctttccaaagtaaagtgtaatagacgattgtggcggtagtatcaataaccaactcaacaggtcattttctgcggctgactgaacagaaattatcttattccctttccctttagaaagttgcggcaaatctgcaaccgggaacattaacatccggcctgcgcgggtaattgccaacaacatatcatcctgcggattatttatttccagcggcgtcatgacgcgagcattttccggcaatgtaatcagtgccttacctgctcggtttttagcaaccaaatcactaaaagtacagataaaaccataaccagcatcagagaccatcagaaactgctgttcatccggtgccatcagtacatgttctaccgttgcccctgcgggtacagtcaatttacccgttagtggttccccctgccctctggcagaaggtaaatcccgcggatcaagcgagtaactgcgacctgttgtatcaataaacacaaccggctgattgctcttaccacgagccgcaccacggaagctatcacctgctttgtaattcagaccggccggatcaatatcgtgacctttcgcactacgaacccaacccatctcggacaatacgattgtcaccggctcagaaggcgtgatgtcatgctcactcatcgctttggcttcatcacgttctctcattggagaacgacgctcatcaccataagtggccgcatcagccatgatctctttcttcaacagggtattcagtttgcgctcagaactcagaatcgcctgtaacttatcacgctcttttgccagttcgctctgttcgccacggatttttacctcttccagtttagctaagtggcgtaatttcagctcaagaatggcttccgtttgcgtctcacttaaaccaaaacgtgacattaatactggttttggctcatcttcactacggataatgtgaatgacttcatcaatattgagaaatgcgatcagtaagccttccagcacatgcaggcgcttaagaactttttccagacgatggttcagacgtttacgaacggtttcccggcggaataccaaccattcggagaggatctcaaccagccctttcacggtcggacggttatccaacccgatcatgttcaggttaacgcgataactcttttccaaatcggtagtggcaaacagatgattcatcacctgctccaaatcaacccggtttgtgcgagggacaataaccagacgagttggattttcatgatcagattcatctcgtaagtcatcaaccataggcagctttttagcccgcatttggttagcgatctgttccaacactttggcaccagaaacctgatgcggcagcgcagtgatcacaacattgccatcttcttttgaccaaacagctcgcatccgtaccgaaccacggccatttttataaatcttacggatatcttcgtgagaagtgatgatctccgcttcagtcggataatcaggacctttaacgtgttccatcagatcatcaagggaactctgtggcttatccagcagcataaccagtgcattcaccacttcacgcgcattatggggcggaatatctgtcgccatccccaccgcaataccggtggtgccattcagcaaaatatttggcaaacgcgccggcagcattttcggttcctgcaatgtgccgtcaaagtttggcacccaatcaacggtaccgtggcctaactcagccaacagcaactcggcatatttggacaggcgagactcggtataacgcatcgcggcgaaagatttgggatcatccggcgctccccagtttccttgcccatccactaaaggatagcggtaagaaaatggctgcgccattaacaccatagcttcataacaagcaccatcaccatgcggatggtatttacccagtacatcacccacggtacgggcggatttcttaaatttggcggtattgttcaatcccagttctgacatggcataaacaatacggcgctgaaccggtttcaaaccgtcaccgataaaaggcaacgccctatccatgatgacgtacatggagtagttcaggtaggcggtttcagtaaatgagtggagcggcaaacgctccactccatcgtgagttatctcactcattcgttaatttcctcagaatcttttgactatccctgtgggtgttacacttcaatgtctaccgtatcgcccttctcttgcagccagttacggcgatcttctgaacgcttcttcgctagaagcatatccatcatagagaaggtttcctggtagttttcatcatcgatagtcaactgcaccagacgacgggtattcgggtctaacgttgtttcacgcagttgcatgggattcatctcacccaatcctttaaagcgctgtacgttaggcttaccccgtttgcggcttagacgatccaacaccgcacttttttcctcttcatccaatgcgtaatacacttctttacctagatcaatacgatatagaggcggcattgccatataaacatggccgttcttaaccaatgttgggaaatggcggacaaacagggcacacaatagcgtcgcaatatgcaaaccatctgagtctgcatccgccagaatacagattttgccataacgcaactgactgagatcgtggctatccgggtcgataccaatcgcgacagagatatcatggacttcctgtgatgccaacacttcatctgaagaaacttcccaggtattcagaatcttccctttcagcggcataatggcttgatattcacggtcacgcgcctgttttgccgatccccccgcagaatctccttctaccagaaacagttcggtaaaattgagatcctgtgatgtacagtcagccagttttcccggtaatgctgggccactggtcagttttttacgcacaacctttttcgctgcacgcattctacgttgtgcgctagcgatcgccagttcagccaactgctctgcttcctgaacattctggtttaaccataagctgaaagcatctttgacaacaccagaaacaaaagcagcagattggcgcgaagagaggcgttctttcgtctgaccagcaaattgcggatcctgcatttttaccgacagaacataagtacagcgatcccagatatcatcggcagcaagcttcacaccacgtggcaagatattgcgaaattcgcaaaattcacgcatcgcatccagtaacccctgacgcaacccgtttacatgtgttcccccctgcatcgttgggatgaggttgacataactttcagccagtagctctcccccttccggcaaccagagtaacgcccagtcaaccgcttcggttgcaccactgaaagtaccgacaaaaggcgcagccggcaatgttgtcaggccattaaccgcagccatcaaatagtcggtcagaccatcggcataacaccatttctgttcagtaccgttgatcttgtctttaaaaacaatttccactcccggacataaaacggctttcgctttcagcaaatgggtcaagcgggaaacagagaaacgagggctatcaaagaaactttcgtcaggccagaagtgaacaccggtaccagtgttgcgtttaccacaacttcctattactgtcagctcctgcactttatcgccattctcaaaagcaatctgataaatctgactgtcacggcgaacggtgacctcaatccgcttggacaaagcgttaaccaccgagatccccacaccgtggagaccaccagaaaactgatagtttttattcgaaaatttaccaccggcatgtaagcggctcaggatcaactcaaccgctgaaacgccttcttctggatgaatatcaaccggcatgccgcggccatcatcaatgacctccagtgactgatcgctatgaaggatcacttcaatatgtttagcgtgacctgccaaagcttcatccacgctgttatcgatcacttcctgtgccaaatggttcggacgcgttgtatcagtgtacattcccggacgacggcgaaccggttccagaccactgagaacttcaatggcatctgcgttgtaactagattgagtcatgttgtaattctgttggttgcttcttgattaaagggctaatcagttttgtatactgttgataataccagtcgttcaaacatttttggcaagttttttctcgccatcactagaaagcccaagaaagttgatgatttgtgggaaatagtgttcaaatccgataaaggcatgattaccaccagattcaatagtttgcttacataataccagataagcaaccgcctggcggtaatccagcacctcatctccggtttgttgcaataaccagataagatccggtgactccaatggttcaatccacatgcttttgagatcatgaatatggcgcgattccaacgtatatcgttggtttgtataagggttaatattttccccaagataatcccgcagtaattcaaacggacgcacggctggattaacgaccacagcgggcaagctgaaacattgtgaaagccatatcgctaaataaccaccgagagaagagccaacgatacccaaatcatccccggcatgctccatcaccagattttcgagcagctcagccgcttcttcaggataagggggtaactgaggcaccagcatgtcaatgtcaggatgatgctgatacagccacgcttttaaggcattggcttttgcagactgcggggaactattaaaaccgtgcaaatagagtaaggttgacatcagaccgagcccctcaattgtgcaataccactggccactatgctcctgtgcgacacaccacagatggtgaggcttggcaaatccaataagcagagagtaacacagcaacacaaagagacaaacacaacctaatatccatccgaatctaaatcagggcagaactcattacttgccagtctatagacctgagttgtcaaaccaaattcgccattatcggcaacagacaattcgagataacgccatcccggagcaacagtatcaagcataaaattggtacaatgtggtttgaattgcaaacatgttgatggtgtcgccatcatacggatgccattccaatccagatccatctcttgatgtatatgcccacaaagcatcgccttaactcgtgaataactttgcagatactgggccagaatatgtgaattgcgcaaactatgctgatccagccaggtacaacctgatggtaatggatgatgatgaagcaggatcaccgcgtaacgttcagggtgcctatccaggcaatttttcatccattcaagctgatattccgacaactccccgtggggaacgccctgcacctgactatcaagcatcaaaagttgccagtgcttaccgactaaaatctgtttcgacggagaaacgccagccgccgccaaggcatccaccatcgcaggctgataatcatgattaccgggtaaccagacacaaggtgccggtaaacgggcaataccatcagcaaaatgtcgataagcttccaacgactgatcctgcaccaaatcacctgtcgctacgattaaatcaatatcagcattttgtttgaggatggcatccagcaccgcttggtaactgcgataagtattgatacccaataaagtatcttctttgctggcaaaaagatgcgtatctgttatttgcaatattttggctgtggttccctctaccacaggcagttcaaactggctttccaaatggtttccttgtcctataagtcatcaacgagcatcataactcgttttaacgcaagagatctgctgactggcacacacttcccttttctcggttaaaaattaggaattatctgaattccattctttttttaacttttcatggtgtaatgccagccattgtatcgcaataactgaagcagcattatcaataattccctcttccatccaatgataagcttgttcacgacttaccacatgcacccgaatatcttcatgttcaccagataatccatgaataccggtcgctgtcgtggcatccacttcccccaccatcacagagatacgttccgttgttcctccgggactggagagataactcaacacgggtctgcaacgtttaacttcgattccggcctcttccattgtttcgcggcgcaccacctgttcgacatcttcgccctcttcaatcataccggcaacaatttccagtaaccatggcgtcgctttcgtctctattgccggaatacgtatctgctctatcaatacaacctcatcacgacgtggatcataaggtaacaatgcaccggcatggccccgctcaaaaacttcacggctaacctcttcactccaaccaccggcaaacagacgatgacggaaacggtaatttgtcagtttaaagaatccattgtacaaactttttttcgcgataatttctatatcctgcttatccaacatgactggcgttaacggcttcttatgcataaaattctcctaaatagttccttacttgctagccactaagatgatattaatcaagcagagttaaaaaattcactcgttgatggtgtaaagttaagctaaattaaggcaatatggcacaaacggctacctttcgctgatagcatactctgctagaatcagtaacatttcgtttttcaccaaggcaacgtaagagtctatcccaataagcgtaattggtgcaggccgtttttgtaaatgaacagtgaactcaggctgtgcgcagcacctgaagcattcactctttatcacaaagcatggtaaataaaatagcctaatgggatagacaacgagcaaaatagctgtgcaatcaaggaattacaatgaagaaactgctctccatttttatcgctatgagcctgacgggattgagttcgatgagtcaagctgaagatcttttgcaagtttataagcaagcaaaagagggtaaccctgaactacgtaaatcaatggctgaacgtaataaagcttttgaaaaaattaatgaatcccgtagcccattattacctcagttggaattaaataccggatacgcctataacagtggttaccgcgatcaacgtgacacagaaagcaatacattgaatgcaaagcttggtttgactcaaaccatttttgatatgtctaaatggcgcctattgaacttagaagaaaaaacggcaggtattgctgatgttacctaccaaagcagtgaacaaaaactgatcttggatagtgcaacagcttatttcaaagtactgcgcaccattgatacactctcctacattgaagctcagaaagcggccatttaccgccagttggatcaaacgactcaacgttttaatgtcggtctggttgcaattactgatgtccagaacgcccgagctaattacgatgatgtactcgctcaggaagttgccagccgtaatgagctggacaatgcattggaagccctgcgtcaggtcacgggtatttattaccctcggttagcctcactaaatattgatcatttcaaaacacagaagccagaagcggtagatattctgctaaaagaggcagagaaacgtaatttaagtttactatctgctcgtttaggtcaggatctggctcgtgaacaaatcaaagcagcccaaaccggccatatgccaactattgatttaggcgcttctaccaatgtttcaaatagccagaatcatgcaccaggcagatcaaacaactatagcggtgaaaacagcgttggcctgacacttcgtctgccaatttatagcggcggtgccaccagttcccgcgttgaacaagcacaatatggttttgtcagcgccagcgaacaattagagagcacttaccgcaatgtggtacagactgtccgttcttcctttaacaacatatctgcttccatcagcagtatcgacgcctacaaacagcttgttgtttcggcgcaaagctcgctcgacgcaatggaagcgggttatcaagttggcacacgtaccattgttgatgtactgaatgccacgaccaagttgtacgatgccaaacagaagctatccaatgctcgctatgattatctgattaatcaactgaatattcagcatgcactgggtacgttaaatgagaaggatttagttgctctgaataattcgctaggtaaacagctctcaacttccgctaacagcattgttcagggaacaggaaccccagtaacttctgctcgtaactgatacagtctttcacttccactaaattaacggcccgccatcaagcgggctgttttatttccaaccaactatacccgttatctttcaagttgcttctttgttggctgcactcactcaccccggtcacatcgttatctatgctcccgaggattcactcccttgccatcgcgatccatcttgaaatccatagggtatataattgggttctgaaacaataaacagatatttttcttaatgaaaaaacacataaattaaaataatccttcaaatggattccagctctggctattcactttttctttcagataataggcatagttagcagtggttccccatattgctgaaaacgcaaatttaatccccatgtcgacagcaggaggaatataaatactcaagacactttccataatctccaatataattatcactacaacaccaacaccaacaccaacaccaaataaagtcaggttctttcgccataaacctaaaacaaaaaagtaaataaaaccaaaaaagaaggcaataaaattcatgttcaacaatatacggcgcatatagggttctactttcatggcagctttgtgctcaggcgttttaggagcaccattctgttcaaagaatgcaaagcgcatctgccatttttccgaatattgatttttatccatgctacttaattccttaattaaaatagaaaatacaataccaataatataatcacaaaaagttattaatttaagattatttgctagagacataaagtaaaaaacataattagtagattcacttacatcatcatgttacatattaaatcacctttaattcactgaaatttacgagattaagattaatatcataaaatattaatttcggcactgtttttctaaaaaatagatatttttcaacattaaaaccagattaaacggaataccaaataatcaatatccggccatatctttgtcagacaaaaaatcaagctagcaattcgaaggtttatgctttaattttgttcatatttcccctatccttaaagctatttcataaagaatcatagacatctaaaatctgggtatacgacgatgacaataaagcggaccaaagatattaatcacgacacattccgtaaggcttggcgtaactatcgccttgcacctgtggcaatagctgtcagtgcggttttcatgttatctgcctgtgaaaagagtgatgaaactgtctctctttacatgaatgcagatgaatgttctcaagccaatccatcacaaagtgagcaatgtactactgcttacaacaatgcgttgaaagaagcggaaaaaacagcgcctaaatatgccaccaaagaagactgtattgccgaatttggtgaagcacaatgtactcaaaccccggcgcaagctggccttggcaccactacttctagtacctccaccaatggtgaagcacaggcacagcagcagcaaagcggcagcttctggatgccgctgatggcaggttacatgatggggcgtctaatgggcggtggctcagcaccatcacaacctctgtttagctccaaatccgctaccagcccggcaaacggtcaattcgttgattcgacaggtaaaagctatggccctgcaaccgcaggtggccgttccatgacagtacctaaaacggctatggcaccaaaaccagcaacaaccacaaccattacccgtggcggcttcggtgactctgtcgccaaacagtcaaccatgcaacgcagcgcctcttcgggctccacatcccgttcagtgggaggctaaccacggatgaaacgtattgctattactgaacgtccggattggcatgaaaaagcgatagaatatggctttaattttcacaccatgtatgacaaaccttactggtgtgaagaagcttattaccaattttctcttgcccaaattgaagaaatcgaagctaccaccgctgaactacatcaaatgtgtttgcaggtagtcgagaaagttgtcgatagtgaagaattgctgactaaatttcagatcccaaaacattgttgggattttgtccgtagttcctggattaccagccagccgtcactctattcccgtttggatttggtttacgacggtaaaagcccggcaaaattgttggaaaataatgctgatacgccaacctcgctgtatgaatccgcttttttccaatggatctggttagaagatcagatgaatgccgggttactgccagcacatgccgatcaattcaacagcatgcaagagcaattgattgaacgctttgctcaattgcgtgatgaacatggctttggcttactgcacatggcttgctgtcaagatacggaagaagatcgtggtaccgttcaatacttgcaagattgtgcgctggaagccggtgttccaaccgagttcttatttattgaagatatcggtctgggagaaaaagggcagtttactgatctaaaagaccaggtgatcagcaatctattcaaactctacccttgggaattgatgttccgtgagattttcgctaccaaattggaagatgctggcgttcgttggttagagcccgcgtggaaaagtattatctccaacaaagcattgctacccatgttgtggaagatgtttccaaatcatccaaacctgctacctgcttattttgccgatgataattatccggcaatggatagctatgttattaaacctctgttctcacgggaaggggctaatatccgtattattgaaaaaggcaaggaaattgccagtgttgatggcccttacggtaaagaaggtatgatcgttcagcaatttcatacactgccaaaattcggtgacaattatacgcttattggtagctggctggtaaatgatcagccttgcggtattggtttgcgggaagacagtgaactaataacccaagatttatctcgcttctacccacatattattttggattaattactcaccaaggaggaattaaagtaggttgccacaacgccaaagattcctccttcaacaatccgataaaaacgttgtattcttataagcttatatacccgtaatcattgaagatgcttgattttatccgaaatggagatcattatcctcgctatgaaaatatttattacatcagaacaaaaaatcaaacttgaacgtcttcacgacaccactcgtgatggtcaggtacgagacagaataaaagcgatccttctggcttctgaagggtggagttctgtgatgatagcccaggcattgcgactccatcagaccaccgttgaccgccatatcagtgattaccttaatcaaggtaaacttaaatctgataatggagggtctgatagtttgctttcccgagaacaaactgattttttaatcaatcacttatctcaacatcttttccatcacacccatgaaatcgtggcctatgttgctcagctctggaatattacctttagcattcccggcatgaataaatggctacaccgtcagggtttttcttataaaaaaccttgtggcgtccctcataaattcgacgcagaaaaacagcgacaatttattgaatattatgagaatcttaaagtcacagcgaaagacgaacccatcctttttcttgatgctgttcacccgactcaaggcaccaaactcagttatggctggatgcgaaaaggcgagaaaaaaaccgtcaaaacaacaggaagccggactcgcctgaatatattgggtgccctcaacctgaatgccattggtcgtacggtgttccaggaatatcagaccatcaacgactacaacatttgctgttttttcaatgaaataagaaagtcttatcctgactatcatcaaaaaattcaccttattgtggatggagcgggttacaacaaagctcatcttgtgaaggagtgggcttatgttagcaatattgagttacattaccttcctccctatagtccaaatttaaacccgatagaacgattatggaaggtcatgaatgaacaggttcgaaataaccgttatttcgcggataaacatgaatttcgagacaacgtcttcaaatttttcaccacaacgctaccggatatagcggactcgctgatgtctagaattaacgaccattttcaggtgctaaaaactgcatcttgaagtttcttgggtatataccctatagattaatctacctctatcaatgtcaaccttattcgtcatttttaaatatctctgtactgtagctcatgatattaaaattgcagttataactgtccatattttaagctaaaatttagtgtcatcactttacaatcttttttgacctcattctattagactgctcacgaaatcgattcctttatatataacacaaagataatttaaccaatgaaatttttagtgacgaaacatcaatgcattttcacacaatgggcaagaaaatccctgtctcaccggtcagctatcaagccttaaaaaataaagaatccagccgttattgatgctatagtattcaataactattattggtttttattggaagctcttatgtccatatcagcaaaacagacaattaccgcacagataccgatcaaactagctacagccataaacgatttagccaaagagttagaccgctcaaaatcgtggatcattaaagaggctcttacctcaatgattgaggaacgtgaacatcgccaccaaatgattttggctggcctcgcggatgtcgatacaggccgtattgtgaatcattcagatgttattaattttgcatccaagctgaaaaaatcataatcatggaggtttattggacacttaaagctcaaaatgatttggagcgcatctatcattttgcctgtcaatacagtaaatcacatgctaataatgtgttagaccatctaattatcagcactacagatctggcactgcaacctaagatagggattcctcagcctagatataagccccgcgaggtacgtaaggtactttttagtgattacgaagtccattacgagatatccaacgatacaatttacattgtagacctttggcatacccgcgaaaaccgttagttaaaaaccatcctcacaaaaggatattcagtataacaagttcatgatctggtgctaaattctgaatttgactagccattctgacctgttccagtacgtcgacatgggctttcagcttaacccaacttgaaagccccaattcatgggcaattaccccctgagcatcactcaaccggctgtgctgttgaatgaactcctcttatgtcaaatgcggataataacaacaagaacgttcaattcaaccaacctgcacagacaacatactcagcgaaccagactcaataccatcgacaggaatggaaaccgcttcttttctatcccacgttcccatgatatacagcaacggtaaaaagtgttcaggagatgggttcgataatagaccatcttctctgtccagtgcatgaatcaaaggataaggttgctcataactggtaaggttatcacgcacataatggttaaatgattccgcccacgggtaaggttcagcattaggatcttgccgcttcatggctcgaagattgtgtactacattaccactccccaagattaaaacaccttcatcccgtaaagcagccagctttttccctaattcatagtggtacgtcgctggcttggcatcatctatactcagttgaatcacaggaatattggcccgtggatacattttaaccagaattccccaagttccgtgatccaacccccactgatgatgatcggcataaacttccacaggttccagcatctcttgcactaaagcggccagttcaggcgagcccttagccggatattgagtttcatacaattcctgtggaaaaccacgaaaatcatgaatagtcttcggctgtgtcatggctgttaccagtgtgccattggtataccaatgagcagaaatcgccagaatcactctgggtacaggcagtctttcaccaagttcacgccacacattggtatagcgattttcttccagtacattcattggactgccatgaccaataaacagtgccggcattctggaaatattcataatgacctctcacaccaaatataggtaattttaatacttgctgacaggttacgccttttagataagcaaaacagtgggctaatggtgatggagtttttcaaaaaaactgaaaagccacagcttgcgcaaactgtgactttaaaaagtatgtacgttataactgatatttcatctggttatcggacaattaggtttcagcttgctttctgttctattgcctggcgataaatcaccagatcttcaatagtgactaccggcatattatgtagcttcgcaaattgcactacttcaagagtacgcgccattgaaccgtcatcattggttaattcgcacaatacacctgccggtttaaatccggctaaactgactaaatcaattgctgcctcagtatgcccttgacgaaccaacacgccaccaggttgagcgcgcagtggaaaaacatgtcccggacggttcaaatcacttggtttggcattatcagcaattgctgcacgaatggtcgtgatgcggtcagccgcagaaacccccgtcgtcactccttgagcggcctcaatggttacggtgaatgcagtctggaacgggctagagttattttctaccatcatgggcaattgtaattgctgacggcgctcttctgtcagacataagcagacaataccactgccataacggatagtcagtgccatttgctctacagtcattgtttcggccgcaaagataatatcaccttcattttcacgatcttcattatccagcaccatcaccccctttccatcacgcaaagcgttaatggcgtgttcaacacgttctgatgatgtgccatattcagaaagtagcgtctgattcatggtaaagaaacctcattaaaatttatggattaccagaatcagggcggtcttgaggagttctcgctataacatcatgccataacattaatatcatgtgtgaataccatagccggaacaacaggcgagcacaaagcccgacagatgccgttattctctcccatccggactatcaccgtcggctccagaattacactggatctgctgacctccgctttatcattaagataaccacaaacggagcgctcgcgggcttcaccatgccactcaaaaaatggactgatgtttaccgccggtggggactttcaccccgccctgagataagccagtgaactataacgctaatatttgccagcggcaatcaacaaaatcaaatatgaaacctagctcacaatggtttatggttttactatctggtattacactattcagaaattatttatgtcataaaaaggatgcatcatgctcgatcccaaaaaaattgaacaaattgcccgccagatccaagattctttaccaaaaggggttaaagagtttggtggtgatgtagaaaaaaaattacggatgattttgcaatcccaacttggcaagcttgatttagtgaatcgtgaagaatttgatatccaaactcaggttctgttatgtactcgtgaaaaattgaccgcgatggaacagcgtttaagtgaactagaagcgaagtttgagaataagaatgttccatctgctgataacacgacaaaaaaagaagagtaattattaccatacataaaaataaccgtgataatgagcagaatgtgatatctgctcattacacatccacaccaatcagagattaatgcttctggttttctttaccgtaatgctcagaacgtggaccatacagcaaactacgactaccaccggctgtcagtaagcggttacttgtaatgccagcgatttcatgacctttatccataatggtattagctatctgtgaaactacggcggataccaacatgccaacaagattattcgaattgctttgattttcagttgatgaaaccattgctcgaccatgccacagttgtttaccactacgcaaatccaccagcttcgcggaagccgttacacgcgtatcactgttgataatctgatattgcgtaccatattcttcaatatccaaatagagcgctgaatctgcaccaaaaatatcatgcaattttttgtaactgatatcctgaacatcctgtgccgctgtcacaccattttgctgaaatgtctcttccacaacagcaaccggaaaaacgtaatagccagattctgccaatggatatgtcacatgagaaatcaggctgtgccctgctttaacttccagagatttgtttaccgccggcagaaccagaatagatttaggtttgctttctttaaatgcagtgtaatcataagggacagatttactacatcctgtcagcacaaatgccgccaatagacttaatgcgacgagaatacggttcattgcatagttcctttatttttacttaatagaaaatccataaatggcgctgactcagggaacaattttttctctatttcaaattgatgaaatgcttctgaaacacgacctgttttgctataaagcaagccaatctgagcatgcagcccaggcggtacagacttatctttggctttcgctctttcaatcacctgctgcaaagcctgtaactgttcttcaaaccccatcttatcctgctgataatactgataaattgtaggttggtatttatcccactcataaattgtttttggctgagtgacacaacccgctaaggtcatagctgccagcaataagcccgcttttttcattaatatcatgaatatatatccctatatttcttaattagatggtttccatgcaccggtttcaacactttcaaccagacggtttactgcttcacgaatagccagatccaatactttaccattcagtgtggaatcatagctggcggtaccaccaaagccgataatttcacggttggataatttatattctcctgcaccagccacagagaaaaccacttcggaagtttctacattcaccacatttagcatgactttagaataagccacctgtgatttaccacgccctaacaagccccataactgatgatcacccacttctttacggccaaattcagtcacatcaccagtaataacgtaagcagcacctttcaacttctgcgatttaccttgtaaacccgcttctgctttcagttccgccatattggtgcgttccagcaccgtaaagcgcccggtctgttgtaaatgcgagattaaaatcgttttagattgattaccgaggcgatcaacgccatcagagaaaatgccattttgataactggaacggttttcaaacttaccaatcgcaattggactacgaacaccttgatatactgtattataagaattaactttttgtacctggacggtattagaagattcagttgtacaccctgctaatattgccgaagccaaacaaattgaagataaaatcaacttaccttgcataagaacttattcctacgtaaaaaatttatccgtttatctactaactttaagatgtaaaagttatagataacatattccattaaaaaatcatttacatcagaaatcattatgaataagccgacgttacgtgaccagcattttatgccacaaagataaaaaactatctgttacatcacacttcttctgataaatcccccacaaaatagataataaaatcacactaacttaaattgttattataataattgtatcgttaattaaatgactcgcacacgatattacaaatatctataccttatggatttcaagatgcatcgcgacggcaagggtgcgaatccccgggagcatagataacgatatgaccggggtaagtgagtgcagccaacaaagaggcaacttgaaagatgacgggtatatattatttatgatgaaatatcactcaattaagtacaaattaaataaaaaaatagccgggaagatttcatctcttacccgactttcattctaataatatgatcaaataaataatttacagtgatcaatgcagtaatatcttctgactattttcaatgacaagctaaagcattatttactgatttttaatcgccttgatgatattggttgtcgaaataccatcttcaaagttcaacactttgacgtctccgcccgcagcccaaacttcttcactaccagcaatttcttccggtttataatctcccccttttaccaatacatccggcaaaacatccgcaatcaatcgctgtggtgtatcctcttcaaatggaacaacccaatccaccgcgcccagagcagataacacaatcattcgttgttctagtggattaactggacgactctcacctttcagccgtttagttgatgcatcactgttaacagcaacaattaaccgatcacccagtctacgggcattctccagataagagacatgacctgcatgcagaatatcaaagcagccattagtcatcacaaccctttcaccacgttgacgagcatcaacaacagcctgtttaagctgaaattcggtcatcacaccgaaacctgtttcagcgcggccacggatagcattctccagttcaatcggcgaaacggtcgacgttcccagtttgccaacaacaacccccgcagcagcattcgccaggaaacaagcttcattcagtggctttccagccgcaatcgccgttgctaacacaccaataactgtatcgccagcacccgtaacatcaaacacttcttgcgcctgcgtaggcaaatgcagtggtggctgatcaacactcagcaaactcattccctgttcagaacgggtgatcagtaatgcctgaagatccaaacccttaactagccgagttcccttctcaaccaactcattgtcatctttgcagtggcccacgaccgcttcaaattcagacagatttggcgttagcaaagttgcacctcgataacgctcaaaatcattacctttcggatcgattaataccgggactttggccgcatttgccagtttgatcatttcctgaacctgactcagtgcacctttggcgtagtcagatagaaccaatgctccaatatggggtaacgcctgttcaatgcgctcaaacattggctgtgcatcgacgttatcgaaaccctcttcaaaatctaagcgaattaactgctgattacgggaaagtaccctcagtttagtcactgtcggatgggttgggacagaaacaaagtcacagcgcaccttgacgctgcgcagtttctcactcagcgcatgtgctgcgtcatcaatcccagtcaaaccgattaaatgtgaatttgccccaagagcagcaatattcatagcaacgttggcagcgcctcccggacgctcttcaatggtattgacttttactacaggcaccggcgcttccggcgaaatccggctggtcggcccataccagtagcgatctaacataacatcaccgacgactaaaacctctgcacagtgaaaatccgggagtgtcattttcatcccttgctccaaatattagatatcaaattggtgccaaatattatcatatgaccgtaaaatccctacaccaaaccggtaaacccgttattattcacccaaccactgttgccaactacgacgtacccgttcctgctgctcactgaaacagtggattgatactcgactggaatgcgtctgtaacgtcagatgatgtagttcatcacgcatagaaacgtaagcctgcgttaatccggctgcctcatcttcatccataatttcataagccgccattaattgaaaaattcgcacattatccgaccaacgcaccaaacgctcattttcagccgcataacgaagcaccaaatattgagcgataaattcgatatcggtgataccccccggatcagctttaatatcaaattgatctgaatggtgactgcctaaatgtttatgcatcttttcccgcatttcccttacctgctgacgtaacaacgcgggttctcgtcgcgtacataacgtctgatggcgtatccgctcaaaatcccgatgcaagttttcatcaccaaataccatacgagcacgtaccaacgcctgatgttcccaagtccacgcttgattccgctgataatcagcaaacgcaccgatggtactgactaacatgcctgattcgcctgaaggacgcaggcggacatccacgtcatacaacacaccagaggaggttcgagcactgaacaagtgcataattcgttgggcaagacgcaaataaaattgccgggcatcaatcgatcgatcgccatcagtcatcacatccatcgggcagtcaagcaagaaaaccaaatcaagatcagaaccataacccaactcccaaccgcccaatttaccataaccaatcacagcaaatcccaatccttgccgctgactcagatgtgatggaacaccataacgttttgccatttgcccccacgcctgtaaaaccaccgcttcaataatcgcttctgctaagtaagtgagatgatcactgactttcatcaccggcaacacgccagtgatatcctccgccgcaatccgcagtaattgcgcctgcttaaactggcggagcgcctctaattgctgctcttcatcatcttctggtatccgcaacaaatattgccgcaactcatctttataggcattcagcggcaaaggttcatacagaaattgtggatcaagcagctcatccagcaacaatggatgacaggcaagctgagtcgcaatcatcggtgaagcagcacacagccggataacatgtgccagtacagcttccgattcaagtatcagttccaggtaagttgtacggctgacaatacttaacaacagagggataacccgctctagcactatattaacatttcgattattaacatcttgattattggcatcttgtcgcaaacaaacttttgccaacaaacgtggcatcagatggtcgagcacatcgcgcccacgcgggccaatggttcttttacccacatcatggcggaacacagaaataatatgcaatatctgctgtgcaatctcttcatccaaatgtggagcgagtatgattaactcttctttttcgagatcttccagccacagacttttaaatggtacatggctaggttcctcatcactattatcactgtcatcaccaattaattgcgtaaaaatagcccgaacagcactcatcttgttgttcaattcaattattagggcgtcccaactttcaaatcccataccccacgtcagtcgtgaacgattcagctcatcttctggcaaagtctgagtttgttgatcattaattgactgtaaaagattttctaaccgccgcaaaaaaaggtaaccgtcagcaagttgtttcacctgcaatgattgcaaaagcgtcaacttcgctattatttgcagagttggtaacaacgcctgagattgcaaacacagttcacgtccaccacgaatcagttggaacacctgggcgataaattcaatttcacgaataccaccagcgcccagtttaatattgtctttcaagccacggtgccgcacttcccgttcaatcatgcctttcatatttctcagggattgaatcacactgaaatcaatgtaacggcgaaagataaatggtctcaacattcgacgtagctcttcaccatacgcttggttgtccgaacccataatccgtgctttcaccatcgcataacgttcccaatcacgcccttgctcttgatagtaatcttccagtgcaacaaaactaaacaccaatgggccactatcaccaaacgggcgcaagcgcatatctacccgatacacaaaaccatccacagtttgctgatcgagcactttgataagatgctgccccaggcgggtaaaaaactgggtgttatccatttcacgccggccaccttgggtaatgccgttttcaggatagacaaaaatcagatcaatatcagaagagaagttcaactcaccaccgcccagttttcccataccgataatcaacagcggttgtggttcgccccgctcattacaaggcgttccccaatcctgacaacaacgctgatacaaccaatcacgggcagcaataatcaacgtttcagccaacatactaagctgttgcagagtctcctgagtcgtaatgctatgtagcgcctgcgaccaggctattctgaccagaatcttgttacggaactggcgtaaaacccgcatgagggtattttcatcctctactgatgcgagtaactgttgcagccattcagtatattgatgccactcctgcgcttcaggtggatgttggcggatctcaactaaccattcaggatgagcttgcaggttttcaacaacaaaatcgctcagggataatatggcctgctcatgagcagcaacaggctcaacgttcaaagtcagttgatgaaaatgttcagtcacacgctgtaactgggccagaagcggagttgaaagtggcaacatagagaattcctgttatttaaacggagaaatttattaaccacatagatttattaaccacatagtcagtgccaacttacattgcaaatagagcgagctataacatagcgtttcagcttctgtttccatatccaataatttctggttgatagcaactaattggttatccaactgttccgactcactagaatattcgatcgtctgctgaatcaaagtcagtacttgctttaagccatctcgaccgtctgataaaccggccagccaacattcctcttgctcctgccaatgggctaatattgacgtaagtaccgaaggcaatgactgccgcatatcaatttccacttgagttgaaggccaaactgcttttggttttccctgagctaattgataaccacgggccgctttgcttctatttccttgccgcaagccatttgattttgccaattcaaccgccaatgctaatacatcggctatgattcctcgctttaactccagttcaaactcacagattggctccttacgattggctgcaataatttctccctgatcgagcaccacttcaatctcactttgtccataagttactacccacttctcacgcataaagtcagtactgaataatgcattcaaacgggattgcaatgcttccacatcacagttgtcaggccagatgtgcggtggaaacagagtcaatgccaattccggctttgccaatggcacattatattccggtcgctgatgcaacccgccaaccaccttacctgctgttttaaccgtcatctcatattgatcatcaaaaccacggatcctcaaccccatatcaagaccacgcagttgattatccgacgtttcaaaatagatattggtcaacttttggggagaaaaatagtcatgcggaagtaacaataattgctggcgaatggtaggaataacttgtggtttggcaataagttttaattcaatttctacactcatatctacaccgttgatgacaatctttgctctcatcttaccttgatttcgctttttgctacgatgagtaagaaaaaaattaaaattttccttttctgcaagttatgatagccattaacaggaaatgcttcgttcaatagataacaagccccgtattcaaccaattagaaaaatgtcattttggtttactgattgctctagcaaacttaactctttactatcaaattctaaactcaccatagataaaaaacggttgaaatcacaatgcgaaaactacatttacttctcacggcgttaatgagcctcagcttttcgctcactacctacgcggaaggaaaacgctatgtatctgatgagttatctacctacacacacgccgggccgggtaaccagtatcgtattgccggtacactgaatgccggtgatgaagtcacattgataagcatcaatcgggatagtaattacgctcaagttaaagatgataaaggccgccttgtctggctacccgttaaccaactcagtaataaaccaagcctacgcacccgcctccctgagttggaacaggaagtgaaaacattgacagagaagttagccaatatagacaataactggaatcagcgcactgccgacatgcaactgaaggctgccaatagtagtagcattgttgcagaactgaaaaaagagaatgagaggttaaaaaacaaactgacggtagcagaaaaaaagcttgatgctgcaaatctgcaacttgatgacaaacaacgtaatatcattctgcaatggtttatgtatggcggtggtgttgcaggcgctggtttaatctttgggctattactgccacatatgatccctcgccgtaagcgtaatgaccgttggatgagttaataaggaacatgttaggtgagagtctatctggttggcggcgcagtacgtgaccgactgctaaattttcctgtaaaagagcgggattgggtcgttgtgggtggaacatcagaagcgctgttatccttgggatatcagcaagttggcaaagattttccggtgttcctgcatcctcaaacccatgaagagtatgccttagcacgcactgagagaaaatccggcctgggatatacgggtttcacttgttatgcagcgccagatgtcacactggaagacgatttgcagcgtcgtgatctgacagttaatgcgatcgctcaaacacccactggtgaactggtcgatccttatcatggtgttgatgatttgaacaatcgtattctacgccatgtttctgatgctttttctgaagatccgctaagggtattacgagtcgctcgttttgctgctcgtttcgcccatttagggtttaccatcgcgtccgaaacacaagcattaatgtcaaatatggcaatcaatggcgagttatcagtactcacaccagaacgtgtctggaaagagaccgagaaagcccttgctagcccttcccctcaggtcttttttcaggttttacgtgattgtggtgcattggcagtgttgtttcctgaaattgataatttgtttggtgttcccgcaccagagaagtggcatcctgagattgacaccggtattcatacgttaatggtgctgaaagtagcgactgaattaacagatgaagtcgatagtcgttttgctgctctatgccatgatcttggcaaagggttgacaccaccagaacagtggcctcaccattatggacatgggccagcgggcgttaagttagttgaccaattatgtcaacgtctgcgtgttcctaattctgctcgtgatttagcaaaactggctgctcaatatcatgatttagtgcataccgtcactcaattgcggccgaaaacattacttaagttgtttgatgctgttgatgcatggcgtaagcctcagcgaatagagcaattaattatcatcagtgaagccgatgcgcggggtcgtaccggttttgaaaatacaccctatccacaaggtgattgtctgcgacaggcattcaaagttgccagccaggttcaggtgaaaaatattgtagacagtggattacgtggtgctgacattggtcatgagttacgacgtcaacgtcagcatgcattggcgcaatggaaacaacaagacgatacagctcaagacaatactgttacctgaaacatcccctgatatcaaacactaggcaatatttgagttaaattgatatcaggggaaccattcactacataaatacccagtaaacagcggctgccacaataaagcggtagatagcaaatgggataaaagatatacgcttaatcaatgccagaaaagttttaatggcgactaacgcgacaacaaatgcagtaacaaaaccaacagcaaacattgggatatcagaagcgctcaaaaagtgcaggctcttatataaatctaatccacttgctcccatcatcatcggtacagccaaaataaacgagaattctgatgcagtataacgattaacccccatcagcattccaccagaaattgtcgcacctgaacgggaaaatcccggccataaagccagacactgaaaacagccaatcataaaagcctgacgataagtaatatcatccagcccctctgcttttggtgttttaggtttcaagatttctgcagtaatcagcaacacaccaccaataaccaaggcgtacatcacgctttgtgggttaaacagtgatttgatgacatcgtggaacatcaacccaagtgtcaccgcaggtagcattgctaaaataatatgactcagtttcagtttgccattggttttaccttcatgaggaacttcaccaaagtggataccaatgagcccaaataagcgacgccaaaacacgactaccacagcaaggatagatccaagctggataataacttcaaatgtttcagctttatcgccagtaaatcccaacatatggccaacaatgatcatatggccggtagaggaaacaggaagaaattcagttagcccttcaacaacaccaaggatagctgcatgaaacaaggtagaaaggtcagtcatatagagaggtcgcccattaataaatatccgaaacaagtagcatggaataaactcagctaccattattcccattgtcattaatcaattgacataattatcaaacctggcaccactgcatgccagtctatgtaagaacaatgacaataatatggcagccaaattcactactgatcagattatttttttctttcaataataacaccaacttgacgagcctgcgcgacagcacccggtttactcacttttatccgtacccacggcgaattaaaacgttttaacagcagatccgctacctcttcagccactctttcaaccagagcaaaattctgattttctacatgattgatgatcgcttcgctaactttggcataatccagacaatattcgacatcatcactggatgatgcacgtttattatcccatcccatttcgatatcgaacactaacttctgtttaatggtctgttcccagtcgtaaacaccaattgtggtaacaacgactaactcctcaataaatacgatatccatcacgtcattttcctgtttttcaacttgtcggataccacttccgactaaatatgcgtattatccatgactagtctaagaaaacgaccattattattggggagacattatgagtgctatcgcgcttggcatgatcatcttcgcgtatctttgcggttcaatttccagcgcaatacttatttgtcgcctggctgggctacctgatcctcgtcaacatggctcaggcaacccaggcgcgacaaatgtattgcgaattggtggccgcagtactgcggcaatagtactaatttgtgatgttctaaaagggatgatccccgtctggttggcttatcaactctatgttccccctttctatttaggaattacagcaatcgctgcttgtctcggccatatttacccgatctttttccaatttaaaggcggtaagggtgtcgcaactgcttttggtgctattgcggcaattggttgggatctgacaggtttgatgatgggtacttggctgctgaccatattattgagcggctattcttctttaggggccattgtcagtgccttgatagcaccattctatgtctggtggtttaaacccgaatttactttccccgtagccatgctctgctgtctggtgttactacgtcaccatgataatatccagcgtctgtggcgcggccaagaaaatcgtctctggaacaagctaaaaaagaaaaaagagatgaccgaaaaagaaaaaaaacgaacagaaaaagagcaaagaaaagaagattaacaacaaggctggataaagaccagcaactcattgagttactggtcttttatttgaagatttataatggaggtaattccgacaatggccagcgggctttgactatcacgccaagtgagtcattcacctctccttttaggcggatcatgccggcaagcgcaatcatggcaccgttatctgtacagaattcagggcgcgcataaaatacttcgccacccaattttgccatgacctcttccattttaatccgcaatgcccggttggcgctgacaccaccagccatcactagtcgcttgaacccggtctgctcaagcgctctcttacatttaatcgctaatgtatcaaccactgcgtcttcaaaagcgcgggcaatatccgctctggtctgctcatcatcgctgttgttatgaatagtattagacgcaaaagttttcaatcctgaaaaactgaaatccaacccaggacgatctgtcatcgggcgaggaaatacaaaacgcccaacttctcctttctgagccattctggagagtaccggccctcctggataatccaatcccagtaacttagctgttttatcaaacgcttcaccagcggcatcatctattgattcaccaagtagctcatatttaccgatacccgtcacactaataagctgtgtatgaccaccagacaccagcaaagctacaaacgggaactcaggactgttatcttccagcattggagcgagtaaatgcccttccatatgatgaacaggaatcgcaggaacatcccaagcaaacgccagagaacggccaatcgtcgcccccaccaacaatgcaccaaccagaccaggacctgctgtataagccaccgcatcaatatctttacaggttaatcctgcttctttcaaagcagcttgaattaagggcactgttttgcggatatggtcacgtgaagccaattcaggcacgacaccaccgtaatcagcatgcagtttaatctgactgtataattgatttgccaataaaccggcttcgtcgtcataaattgcgattccggtttcatcgcaggacgtttctatacctaaaactcgcattacactacctatattccacagaagagagccagtttatcattaataagctaatttgcgcggcttacatgctgactatttttgctgcttagtctataatcactcctctacataaaatccctgtgtggttatcatcaatattacggaactgatttgcagatcaccgtcgtagtgttgttgtttcaatttgctgcggcgctttacaaagccgtgttcattgaagtaaaattccgcaccattttaagatggctggcatcccacgccagcaagaccgatttctattgaggtgagaggcacatgccggtaattaaagtacgtgaaaacgagccattcgacgtagcattgcgtcgctttaagcgttcctgcgaaaaagcaggtgtattagcagaagttcgccgtcgtgaattctatgaaaaaccaacgactgaacgtaaacgcgctaaagcttctgctgtaaaacgtcacgctaagaagctggctcgtgaaaacgcacgccgcactcgtctgtactaatccttgcggttgatccgcatagtgattgaatttgcagacaatagtagttgcagataaaggccgtgctttccgaaagggagcgcggcttattgtcgttcatcaacaggcgtaaaagggcttatggctggacgaattccgcgcgcatttatcaatgatttattagctcgtaccgatatcatcgatctgatcgatgttcgtgtgccacttaaaaaacagggtaaaaatcaccacgcgtgctgtccatttcataacgaaaaaacaccttcgtttactgttaatggcgataaacagttttatcattgctttggttgcggagctcacggcaacgctatcgattttctgatgaattacgatagacttgagtttgtcgaatccatcgaagaattagcggctatgcatggtctggaagtcccttatgaagcaggttccagtcacagtcagatagaacgtcaccaaagacaaaacctttaccaactgatggataagcttaacagcttctatcaaaatgtattaaacactcctgctgcacaacaagcccggcaatatctggctcagcgggggcttagtgaagaaattatccaccgtttctcgattggtttcgcacctgctggttgggacaacaccttgaaacggtttgctcataatgaggaagatcgtcgacagttaaacgacgccggaatgttggtcgcaaatgataatggccgtacctatgaccgcttccgcgaacgaataatgtttccaatccgtgaccgtagagggcgcgtaattgcatttggtggacgtgttctgggagatgcactcccaaaatatctcaattcaccagagactgaaattttccataaaggccgccagctatatggcctctatgaagcacaacaaaatcacagtgacctttcacgattattagtagttgaaggttatatggatgtggtagcactggcgcagtttggtatcgattatgcagttgcctcactaggtacttcgactacatcggaacatattcaattacttttccgcgctactgataacgtcatctgttgttacgatggtgacagagccgggcgtgatgcagcatggcgggcattggaaacagcgctcccttatctgaatgatggtaggcagttacgttttatgtttttgcctgatggcgaagatcctgattcactagtccgtaaggaaggtcggaaagcatttgaacaaagaatggaacaatctcatacattatccgaatttctgttcgaatcattgctaccacaagttgatttgagtaatcctgaagggaaaacaaaactcagttcactttccgtaccattgattaaccagattccaggggaagttctgcgtctctatatgagacaagaacttggcaatatgatgggcatccctgatgcagtgcagttggaacgtctattgccgcagcatctggaaagtgggaataattatcagatgccgcagctaaaaccgacaactatgcgtatacttataggactgttggtacaaaacccacacttagccgctttagttccccccctacagggaattatgcaggccaaaattgcaggcttaccattatttatggagcttgtggaggtttgtcttactcagccagggctgacaactggacaactgctagagcaatatcgtgataataaatttagtaaacaacttgaaaaattagctacatggaacgatatacaagtagaagaaatagcagaaaatacatttcgtgacgcgttggatcatcttgttgattcagcgttagaagaacgtttagacattcttatcgccagagcaagaactgaaggtctgacaccggaagagcgcgaagaagttcgcttaattaatgaatcccgtgccagaaagtaaacactgaattcacggcttaaatgccgcattaggtagggaaataaccctacattttgccgctataagtgggcagcggcaatataacgaaaacgcccttaaaagttattgttggcagattagtttcgccgaccgacaccaacccaaatactctgaagtgtggataccgtcttatggagcaaaacccgcagtcacagctaaagctacttgtcacccgtggtaaggagcaaggctatctgacctatgctgaggtcaatgaccatctgccggaagatatcgtcgattccgatcagatcgaagatatcatccagatgatcaatgacatgggcattcaggtaatggaagaagcacctgatgccgatgatctgatgctagcagaaaccgctaacgacacagatgaagacgctgtggaagctgctgcgcaagtactgtctagtgttgaatctgaaatcggtcgcaccaccgacccggtacgtatgtacatgcgtgaaatgggtaccgttgagttattgacccgggaaggtgaaattgacattgctaaacgcattgaagatggcatcaatcaggtacagtgttccgttgctgaataccctgaagcaatcacctacttactggaacaatatgaccgagtggaagcgggtgaggctcgcctgtcagatctcatcactggtttcgttgacccgaacgcagaagaagaacttgcacctactgccacccacgttggttctgaacttccacaggaagagctcgatgatgatgaagacgacgatgatgaagacagcgatgacgatagtgatgatgacaacagcatcgatccagaattagctcgccagaaattccaagaactgcgacaacagtatgacatcacccgtcaggaaattaaggaaaacggtcgcaatcatccaaatactgcggccgaaatcttaaaactttcagaagttttcaaacagttccgtctggtgccaaagcagtttgactatctggtcaacaacatgcgttctatgatggatcgcgttcgccttcaagaacgccaaatcatgaaaatgtgtgttgagcagtgcaaaatgccgaagaagaacttcatcactttgttctccggtaatgaaaccagtgacatttggtttactgctgcaaaagcaatgaacaaaccgtggtctgaaaaactccttgaagtggaagacgaagtacagcgtagcctgcaaaaacttcgtcaaattgaggaagaaaccggtttaaccattgaacaggtgaaagatatcaaccgtcgtatgtccatcggtgaagcaaaagcccgccgagcaaaaaaagagatggttgaagccaacttacgtttggttatttcaattgccaaaaaatataccaaccgtggcctgcaattcttggatctgatccaagaaggcaacattggcctgatgaaagcggttgataaatttgaatatcgtcgtggttacaaattctcaacttacgccacatggtggatccgtcaggcaattacacgctcaattgccgaccaagctcgtaccattcgtatacccgttcatatgattgagacaatcaacaaactcaatcgtatttcccgccaaatgttgcaggaaatggggcgtgaaccaacgccggaagagctggcagaacgtatgttgatgccggaagacaagatccgtaaggtactgaaaattgccaaagaacctatctcaatggaaacgccaattggtgatgatgaagattcacatttaggtgatttcattgaagatacaacgctggaactgccgctggattctgcaacctcagaaagcctgcgctcagcaacccacgatgtcttggctggtctgaccgctcgtgaagcaaaagtactgcgtatgcgtttcggtattgatatgaatactgaccatacattggaagaagtcggtaaacagtttgacgttacccgtgaacgtatccgccagatcgaggcgaaagcactacgtaaactacgtcatccaagccgttctgaggttctgcgtagcttccttgatgaataatcaattttattcattctgactaaaaagcgtctgctccggcagacgcttttgtttttaatatcggcgatactctaaatcctctgacaatatggtatttatgcagaaatatcatcacaggttcctcttatataactcaattaacattctctctagccgatagataaaaaagtcgttttccatccggtgattaagaaagaatgaaagaaatatgattatcattaaaataatcacgtatataccctatggatttcaagatgcatcgcgacggcaagggagtgaatccccgggagcatagataacgatgtgaccggggtgagcgagtgcagccaacaaagaggcaacttgaaggataacgggtataaaatagatctttatcggaataatatatgaccagatggtgcaaaatcgcttctgaaaaattaatccagtaacggataaaaacgttaaatagaccataaaaacaactaatatatatcactccccgttttcactacttactaaaaacgcaattttgcacataaaatgatcatacgaatttacaaagctagaccgcgagcaaaactgtacgtataatccctcccattcaacggccccttagctcagttggtcagagcaggcgactcataatcgcttggtcactggttcaagtccagtaggggccaccagattttagctgataaatcagtacattaggccactcaaacaagagtggcttttttgtttctggtagtcagtggcgacagagattttttcataaagccattacccagatgaaaacacactagccagcttcaatttctgagcagaaagttaggctatttatcaacctcttaacatcatcactttttctacccttatccctgcttcttcttgaagataatgtgagaaacatagatcaaatttaaaagcttgttctgaacaccaaatagaatcacaaattgccaagacttcaattctgtgtctatgcaatttttctgtacttaaaacattggctggtttctgacaataagggcaaataatgagctgacttagtgaaatactcttctccctgcctatatagctaccggtctttctaatcaaaggtaaaacttcactagtaacccatttacgaaaacggtggggtaaagttcctttctttacggcatcacgacatcggattgtcagaaaatacattcctgattcattgataatgtttactttttgctctccaccaagagtgtcacttaaagctacatccttttcatcatcaccaagttttgcgatagcttcgcggctgtttgtgattttcaaagcatcacatacatcttgtgccacaaaccaaaaattgccatttttaatcaatgtacgtacttgctgattttcaaaaatgaatggagttacggataggctagccattgctgactccttacttttctttgagaattgggtttaccatttaagaatatggtgtcgggaggctcaaaacggcagtaagaaaccgcggacttattccccttgcgggtgttgtattagtcgccctcccgacattgaatcagagagatgacagccgaatagctaccattaaaaattaggcataaaaaacccaacactaacggggttggttttgaccgcttacttgaggttttgagtccccatgcataaaacgataataaattgttttcagaagatcaactacaattttctatgtgcattaagatctagtctccagtacgattttatcttgactatcgtactatgtacgaatatcatatttccatatataggcaaggatgttttttatggaatatctggtttttattgaaactcccgtatttagtagagaacgagcagaactgttaaccgatgatgaatttaggctattacaggagcacttactaaagaatcacgagcagggtagtaccatcagcgctactggaggatgtaaaaagattcgttggcagcgagaaaggataggaaaacgtggcggagtaagaattatctactatgccataaccaaaactgggaggctctatctccttttgatttaccctaaaaataaaaaagatgacttaactccaaaagaaaaagaggtacttaaagccatcagtaacaaattacagtaattaacaccgcgcagatacgcgacaatgttcatacaacaggagagactatggacaaaagactttttaacgatttggttgaaagcatgaatcagatggtagcaattgaaaaaggcgaactttctgtttttgatgaaaatatccattaccatcgcctgcctgatgtaaaaaacttacgtgaaacctttggcttaaaacaaagtgaatttgccgaagctgttggcgtttctacatctctaattcaaagctgggaacagcaccgccgcattccttctggttcatcactgaaactacttaagatgcttgaacgtaatcctgcgcttattaatgaattaagcacactttaatactttcactttctccttgtcataatgcaaaaggataaaataatttcagttctgtatatcctgtaaagccgtgctctatctgatttctatgataaagcacggcttcctttcgtgatcttctttttcacgtaaaatagaatttttcctttaatatcattgcattgtaattatcttcgtgatcctcttttgatccaaaaactgaaatttcctgaaaaaattttctgatccaaagcgtgcaggcgggtgcggtgtagtgccgttttcgccataagttcatttatttcgtcataagcgccgcgagactgttgtggtcaataaccgcttgaacaccggttcaagtccagtcgggattaccaaatttaagccgttagatcaatatattgggccacttaaacaagaatggcttgcttgatcaaaggcggtaaatgttaaaggccaccgggaggttacccgatggccttagctacgtttccgttatctatttcagaaatgcacggatcagctctaaaagcgcgattaactctttgagaacgatgatagcagtatcaataaatgctttcacccgtttgctccagttaggagcacgacttaaccagccattgcctttacgctgcctgtccagctgacttccatcaagtcagttaaggaatatcgcgctctgaccgaggcactgaagcagcaccacctgttcttcagccaggacttacgaaaacttgcgtcagagatacacaggccagaacgctaccccaaactaacagccgttgattataggtttattttcagatgattcaatcaattaaaatggtgagttggaaaaaacaaaaaaccaactggtgaggttggcttttttgttttacccatacagggcgcgggtatcttttgtgctattaccgagattggtagcctcagccctagcgcgatattccttaactgacataaccagtctaatacctatagcataaaatatcaacctagggtgcagagtaaaaaagctcatacaaatggaatgatattcacccaatcacaggggaatacttctgtttcaatccatcggatttataggccgtgttccttatcgcgctggcattctccagcatacctgtgttgtggtgcgtatgggcggcaatctgttccgccagtgccttaaccacatccaacgtctctaacatcaaggtcatgacattgatttgctggctgcccacccaaaccacgagcgcgacgatttcttgcctggcgccggcgatgctctgcttaagcaggccaattttctctatcagcttttgcccaacttcaacattggcctctttccccacactgacaacgaaatttgatgaggtcaccatactatagtcaccgtctgcaatttgccggacagcgcccgccagtagcgtagacgtgcccaagaccgtggttttatccgtggcctgtatcgtggtttcccgggcaactacgttacgtgtttccgtgtctgccctgacttcacggtgcatggacgattcatcaatagtttggtcagtctgacgaatccaatgcccttcctgagtcactctctgcgagacttccgcccgctgctgctgcaattgttcgcctggcttgatatcgggcaaggtattaccctggcttaatgtctgccggataaagggcttgtccagcctgcctgcctcaaaagcgatttcaaccaccgttccgactggcggatattggaacatacccgattcactgcccgccatcggcaaaagcagcggaaccgcgtgataaacaggaacagcggtatcctgaccatcatcagccaataattgcacatcaaccgcatagcgtggccggaatgggtcggagatatcgccgctgaccgtattttcagggtgtgcctcaatgcgggcaaatttgggtaaatgcagccctgccgataattcggggtaggcggcatcaatctgacgctgcattggcgatgaggctactccgtaaaaagtggcttttttatttccaacggtcagtaacaacaaaacggcgacaaagattttcttaacggccctactcttcaaccaagaaaacaaagctgctttctaaagtctctgtgcaataacactataagtcgacacatagtttttcacctgagcaaccgaaaagttttcagccagtacacgcaattcttccaaaggaccactaacaccttcaggaaagtttcgttcgatgttggccttaacatccaacaaccaatgcaccacatcaatattagacggcaataccctcatatccttaataacgaagccacttttctccaacacttgtctgaaatagctgggtgttttgcggttagcacaagcgagacgatcaacggtgtcaggaatatccgatttataattatccaactccatattatagagattttcagaaataatcacctgaccaccagcgctcacccgtttgaacaatgcactcatagccttttcatacaacgagtccggaaaatgtgaaatgacaccacggataatcaccagatcataaggttcctgcggatcaggtaagcgatcaatatcctgtgcattgcacagatacagattgatacgctcagaaagtccatattgtgcgtgaaattcagcacaataccgcaactgctgctcgctgatatttactccatccaaacgcttacattcaggaaaacgctcagccagatatttcaggatataaccccaaccacaaccgatatccaaaatacgctgaattggtggcctttcgatctttgtttccaaaccagccaatagcagctgacgatcaaaataacgaatacctgagtcatccaatgaaattggtagctttgaagcaggatcatcgtaaacaccaaactggaataacagtgtatcgccaatcaccttacgccagcattctggatctccgcaataagtttgtaccactttactttcgtaatcgttggtggtttccccctgaatgatgtgatagggcgagacagactcaacatcagtgcaaaacacattatcaaagctactcatgaacttttccttattaaacggtttttaaaagcgtcacacccttaatttgtcaagattttcggcgtattggtaaatttcaatgaaatattcatatctaattaatccaatgctatggctaccgataaattacattgttatcaaatcagcctttgccactcctcaatatcttgatacgaaagaccattaatgatttttttgaaccaaaccgtatacacatcaggagcattattaattagcgccctcaatttcagaagattaacccatttataatcggatacttcgtcaaggttaattatcggttctttatcaaagcgtccaataaaaacatgatcatactcgtattcaatcaaattattaggaagtatcgcgtgataaataaatgacgaaacctttttcaatggacagtcaaaacccatctcttcgccaagacgccgatgtgcagcggcctccagagcttcaccaaccctagggtgaccacaacagctattggtccaaagcccggctgaatgatatttggttgccgctcgcttctgtaagagtaaatttcctttattatcaaaaacaaagatagaaaaggcccgatgtaacatacctttctgatgaatatcagcttttcccgctgaaccaatgggattatcatgtttatcaacaagaacaagtatctcatccattattaatgccctttctgtgaattgaatcatataaaatcataaattttaattaacaataaaaatacaatacatattctgcaagtactaacttaactttcaagaataagggggttttcataacaacatgatataaatcacaaaataaaaatatttcatccattctcttctgacattaatgtaaaaacagaacaaattaatagaataattattaatgttttaattaaacggattcaaaaaagaatatatccgacattaatcatttatcaccaatactcacctgctaaatttgttacagatcatgagctcgggtatcacaacaagttatagccgtttttctcatctttctggatgtgcttttacagcaaaaagcatcacagaaaactaaacgaataataaacaaacatgagaaaatccccttaataactaaacattcattaaacagctgttgattttttatcttaaaaaaatataaataaacatccgttgaagttttgtttaataccaaaggagtatactcacggtttgcaagtcttcttccctccagtattttttagaactagataaagaaatgaaataaatgaaatatatgtatcaacctgccagttcaggaattcggctgttcacagatttagtcggaaaaaaaattagccctagccctcattggtattctgcccagaatcgcactaaatttgccttacgtagcgctctgatgccaatatcgacactaaaactattaaaccagatagttaatacgccgttctatttggatattttgaagaaacagccttgtttaccttctaaattacatcgcccttatctaagtattaacttcaatagagggcagacgttacgtgcaataaatgaacattaccagctattatttactgggttaaatcagtctattgttaataaaatatttcgctccaatgcatatccattagcggttatcaatggtaagagtggaacttacactatttttctagattctatggattgttttaataaagaaggtgagctcactctatttattacaacaggagatagtaaaactttggcaagatgcgctttcacactactcactattgccggtaaaaaaacactgttcatcggtggactacaaggttccaaaggcgatgcaacccttgaaattatccgcgatgcaacgaaagattgttatggattatttccaaaacgcttactgattgaatccatttgccgtctcgctgcccactttgaatgccagcaaattctggcagccagcaatgatactcacatctataagagtctacgctattggcataaaaagaaagacaaattagtcgctgattacgactctttctgggaatcattaggtggagcaaagggcaaaaataaggatttccatctccccttatccattgaaagaaaaccgcttgaagatatagccagtaagaagcgggcagaatatcgccgccgctatcaattactagatgaactggataatggaatgcagcattctctgccttcaaattaaatcagaatcaggccgctacttttcacagagcggcctaatttttaagatgactcttatctcggtttaaccatctgccattcaagatgtattttaaccgccggccattcaccactgataatgctgtaaacacaagtatccctgatactgccatctttagatacaccatgactacgcagaattccatcaagttttgcacccagtcgctctatcgctttccggctctgatgattaaaaaaatgagtgcgaaactccactgcgatgcatcctaattcttcaaaagcgtatttcaataagagatattttacttccgtattaatatgtgtccgctgaacagaacgagcataccaggtataaccgatttccaaccggcggacatcagaatcaatattcatatacgtggtcatgccaaccgctttacttgttcgatgatcaacaatagcaaaaggcagcatagtacctttttcatgtagcaataaacggcgttcaatctcgttacctagctcagccggcgaagggacactggtgtaccacaatttatgcagctcactttcttcaattgcctgtaaaaactcatcatgccgttggtgtgtcagaggttctaaagtcaccccttttcctgccaaagttacccattcagtcatctgttttttcataataaccactgagttataaattaagtcagaatagaagagttcaccctattccagaatcaaaactggaatcaagttaatatatgaaaaatcaatccccgattaaagcaaaacccacacttttaacatctcaggcggctgtcgaatcattcagaaaaaaatactaaaactgggtaaacaaatcgcctgactgaatcagtcagattcttttcactaactcgatgaaataacctgatttcatgaccttcatcacattcatttaacatttttttcccaatcaaccttattccatctaaatttgaaccatcactcatccgaccactttgagttttgactggtggtttagaacacaataataatctggttataattgacaaacacccgatggagattgcaatgagccattatcctcacctgttcgcccctctagacctggggttcaccacactaaaaaaccgcattttgatgggatcaatgcacactggactagaggaacatcccgatcgcgcccagaggcttgcccgcttttatgctgaacgggcagccggaggcgtggcattgattgtcacaggcggcatttcgccaaataaacaaggtgttatagggaaaggcactgcattcctagtagatgaaaaagatcttattcaccataaagttattacagacgcagttcatcaggctggtggaaaaattgcaatgcaaatcctacataccggccgttatagctatcaaccacaccttgtcgcccctaccgctattcaggcaccaattaatccattcatgcctcgtgaaatgacagaagaagatattcagcaaaccattgctgatttcgctcattgtgctcaactggcacaactagcaggttatgatggcgtagaaatcatgggttctgagggttatctgattaaccagtttctgactacccgtaccaatcaccgccaagataaatggggtggaagtttcgaaaatcgaatgcgttttgctgtggaagttgttaaagcagtccatcaagcaacagggcgagaatttattctaatctaccggctttcgatgctggatttagtcgaagagggttctaattggcaggaaatcgagcaactcgcagttgctattgagcaagcgggggcatctatcatcaataccggtatcggctggcatgaagctcgaatcccaacgattgctactatggttccccgcgccggattcagttgggtaacgcaaaagctgatggggaaagtttctattccattgatcacaacaaacagaattaatgaccccaacattgcagaacaagtgctggctcaaggttgtgccgatatggtttctatggcacgaccttttctggctgatgctgaattcgttatgaaagcccagcaaggacgggccgatgagattaacacttgtattggctgtaatcaggcatgtttggatcagatttttgtcggtgaaatagcctcctgtttagttaatccccgcgcctgccacgaaacagagatgactgccgagccaaccaccacaccgaaaaaactggcggttgtcggtgccgggcctgccggattgtcatttgcagtgaccgccgccagtcgtggtcatcatgtcactctgtttgaacgtgacggacagattggcggacaatttaatattgccaaacagatcccaggtaaagaagaattccatgaaacactgcgttattttcagcgccagttaacaatccatcatgttgatgtacggttgaaccaaaccgcaacaccagaagcactttctgattttgatgaggtgattatcgccagcggcattgtgcctcgccaactcaccattgatggtattcatcatgaaaaggtactgagctacttagatgtattaagagataagaaaaatgtcggtcaacgtgtcgctatcattggcgcaggtggtatcggtttcgataccgcagaatatctgagtcaaccaggaaaaagtactagccttgatagcaccactttcagcgaaaaatggggcattgaccataatctgacacatcgtggtggtttatctcctgaaggccctaaaccaaaaccttctccccgaaaaatttatctattacaacgtaaaccgacaaaagttggtgaaggattaggtaaaacaacaggttgggtacaccgaaccaatctacacctgcgtggtgtgaaaatgctcaacaatatgcaatatttgaaaatagatgatcagggattacatattagcagcaatggggaacaacgctgtcttgccgtagataatattgttatttgtgccggacaagagccactgagagaactatatcaaccgctacagcaagcgggaaaaaccgtgcatcttattggtggagcagatgttgcaacggaattggatgcccgacgggctatcgatcaaggtactcggttaggtcttaaaatttgatgataaataatgacggtcatagacagaccgtaagacagggtaaatcctcaaaccgcgccattcctggcgcggatattttactctttcttacctaatctttttaaaccaaaatacttcaattaattacgttgagttaactgatccgatgacagacggtcatcctcagcctgacaaacagcagcagtaaacaatacatcggtagaagagttcagactcgtttccgcagaatcctgtaatacaccaataatcaaaccgactgctacaacttgcatcgcaatctcattggaaatcccaaacatgctacaggccagagggatcaacaatagcgatcccccagccacaccagaagcaccacaggcacaaatggcagaaaccacgcttaacaataatgctgtaggcacatcaacaggtatcccaagcgtattgaccgcagccagagtcaacaccgggatagtcaccgcagcgccttccatattgatcgttgcgcctaatggaatagaaactgaataagtatcttcatgcagattcatacgacggcacatcgccatattcactggaatatttgcagccgaactgcgggtgaaaaatgccgttacgccactttcacgcaggcaagcaaataccagtggataaggattacgacgaattttccagtaaacaatcaacggatttacaacaagtgccataaccaacatacaactcagtaatacaaccagcagttggacatatcccagtaaggcattaaaccccgtttctgcaattgttgcagacaccagaccgaaaataccaaccggtgcaaaacgaatgaccacccgaacaacctgagtaaccgcttcagacatgtcatgaattagagacttagttgaatccgccgcatgacgcagggcgatacccaaaccaatagcccaggcaaggataccgatatagttaccgttcagtaatgcattcactggattagcgacaacattaaccagtaaccctttaatcacctctataatattttcaggaggcgacatctgagcatcattgacagctagcaccagcggtaatgggaatataaagctaccggccacagcaaccaacgcagcaaaaaaagtacccaagatatagaggataaggattggacgaatattggttttttggccttttttatggttagcaatagaagacatgaccaaaatccataccaataccggggctactgctttcagggcgccaacgaacaacgtcccaagtaaactgactgatttggcaaccgaaggtgccaaccacgctaacagtatccctgcaattaaacctaccaaaatttgtttaaccaggcttccttgtacaatgtaatgcacgaagccacgtttttgtttttccatagctgatccattttattaacagttctgttaaacctataccctatggatttcaagatgcatcgcgacggcaaaggagcgaatccccgggagcatagcgaactatgtaaccggggtgagagagtgcagccaacaaagaggcaacttgaaagataacgagtatatatttttttgtgtttgcttcctcagtatagggaaaccaagagtagagaaaagcagcgatagttaaaatatacaacctcgccagcacttattaacaacacattcacatttgtgtgatcaaaacggcaatttacacatttacaaaatacaattatttgtttttatgtttaaccatttcgcagcaatttaagacaagaagaaaccatatctccccattcaaaaaagatatggttatctgttaaaaaatagttacctaattactggttctctgtcgctttgtatttatttacccaaacattaataatcattgttactgccaaaatactggctacagctcccagagaaccccctataggaatatgataaaaatctattatcagcattttaataccgataaatgccagaatgactgataaaccatatttaagcattgtaaatttctctgccaccccagccagcagaaaatacatcgcacgtaatcctaagatagcgaaaagattagaagtcaaaacaataaaaggatctgtagtgactgcaaaaatagcaggaatactgtctaccgcaaaaataacgtcactaatttcaaccagaatcaggaccaagatgagtggcgtcgcatataacaaacccttttctttcacaaagaaacgttctccgtgaagattatcagtgatgcgaatatgcgcttttagccaacgaacaaaaggtttatcgcctatcggagaatcatcctctttaaccaacgccatcttaacgccggtaaccagcaaaaagaggccaaacagataaagtatccaactaaattgagaaaccagccagctccctgcaaagatcatcacggtacgcagcacaattgcgcctaagacaccgtaaataagcacccgacgttgtaaatttgccggaatggcaaaatagctgaataacatcagccatacaaacacattatcaacagcaagcgctttctcaagtaaatacccggtaagaaaagccattacctgactattagcaaccgctacccctacagtttctctgcaataccaccataatcctaatgcaaataagagcgacaaacttacccaaattacactccagacagcagcttgacgaaatgacattgcttgctctttcttacgcccctgtaaggatagatccagcagcaacataatcgtaattaaaacagcaaaacttccccataagagaggactacccacagagttcattttctttctctcataaacaaaaacggctgaagtctcagaagacgccagccgctgctatatttcttccccacatcgtggataaggatgtattgcaagcaaccctcgccttctggcaaggtctcacttacaacacagaaaatgtaccatcaggtataagttcaaggttgcccggctaccggatgctgttgcatcgtaatgacgataaaccggctaaggaagttactcccctttgctgcggtgaaaaataaatcaaattcagacaagaatcaatctaccactgaaaaaatattgactcatagtcagcggtcagcagtcagcggtcagcggtcagtaaatcataagtgaataaaatggtaacaaaaacagattaaaatagtaggacaaacagtcattcatttaaatgcaagaaacctaacaagcccgccttatagacccatttcttatcctattttaatgaacgttcaattgatcaccaaaattttctgtttagtcacccctgattttgttacagtggcacaggctgcgtcatttgcctttttcaacagtgaaaaggcatgaaaaccaaccaaataacgtaaaataggatgtaatttaatcggtttagcctcatgctttcaggatgaacgaacaaaggcattttaggaacacctgatggaaatagtaaaagaacttatatatgcactttggtaccaggattatgaaactctggccaacccatccctattatgggccatttacatcatgctattcttgattctcttccttgaaaatggcctccttcctgctgcatttttaccaggagacagcctgcttatactagttggcgtattgattgccaaaggtgcaatgagtttccctctaacgattgtagtattaactgccggagcaagcttaggttgttggattggttatcttcaaggaaaatggttaggaaataccaagacagtacaaggctggctctctcaccttccagcttattatcaccaaagagcttacaatctttttcaccgccacggcctatcagctttacttcttggccgcttcctcgcatttgtcagaaccctcttaccaacacttgcaggactgacaggtctacaaaacagtcgtttccagttttttaactggctcagtggcttcctgtgggtcattatccttacctctttgggttatgcatttggtaagacccccattttccgtcaatatgaagacttggtaatgaatttcctgatattactgccacttgctttacttattattggttttagcggcagtttgctcgttgtatggcgtaaaaaaacttgccaatcccctcaaaaaaagtaattaattccaataaaatctaatatccctccctgctgcagataaaagtatcgtttgcagcagaatagtgaaataacgctaatgttttttattcaccttccaaaatataagctatatttagtgatagtcttttcctgcatcaggaaaagcaactaactaagtcaaatacacacaccttacattgaggagtaatctacatgtcaaagatcaaaactaatgaagatctacacgttgaactaaaatcactcgcagatacactggaagaagtgatcaaaagctctggtgataaatccaaagtcgagctggaagaacttcgcggcaaagtagaggaagtcatcaaagatactcgttctaaactcagcaatgccagtgatatggttgttaagaaaacaaaagatatggcgggccgtgctgatgtctacgttcacgataaaccttgggtaagcatcggtattggtactgttgtcggtgccgtattaggtgtagtgttagctaaacgctaatatgatcaactcatccaaatctcaaggccccggtaaaggggtccttgacattctccaacgtattgcctctgttgttatcgagataatagaaactcgtttacaactcatcgttgtagagttggaaaaagaaaaagccactttgatacagctggtagtcatagccagcctgacattactgctcaccgctttcggcctcatgtgtttacttgttatgattttttgggctatcgatcccagctggcgttttaccgtattagcaagtactactggcacactactcgttctggcgcttattggccttatatggaccatcaggaaagcgcgaaattcaacattacttagtgcaactcgcgagcaattaaagatagacagagaaatgttggaggatcatagtaatgagtaaacaacgccagaaaaaaaagctgaaagaacagcagctaatgagaaatatccaactacaacgcctcgaactcaccaacaatacacagctctggaagaacctcactgaaccttatgacaaaagctggcaaaagcttttgtcattaaaaccctatctgggacctgcaatccatgctatctctttgtatggccttcgccatcctgtgaaattttatcatttgtctcgtcatatcattcgactattgaaatggaaatagtaataattcttcataatatccctcattgatgatcactttagttgcttacattcaaaaactttgtataaaattgttaataatccttgcttacaactaagttcatctacctttagtatacattccatccgttaatgattaacaaattgtgctgtttcgggttggtacaagttaatcatcaaacaaactattattatttttcctgtgtcttaggagttgttaatgaaaaaatttgaagatagtgccctgttactggctcgcattttgatgccgattctatttatcgttgcaggctatggaaaattaggtgattcctacgcgggtacccagcaatatatgaatgctatgggcgtccctagttttctattaccactgacgatcttacttgaattaggtggtggtctggcagttctgtttggtttgttaacccgtaccaccgcgttatttacctttggcttctgtgtcctgactgccatcctcttccacagcaattttgctgaaggcatgaaccaaactatgtttctcaagaacctgactattggtggcggttatctgttactggctatcatcggcccaggtaaattcagtatcgaccacctgataaaaagaaactggtaatatcttgctatggctgttctgaatctgaaaaataaccgctcacaggtaaaaggtgaaacgatcaaaagctcaaagattttatcagccaactatccaatattgggtctaaagataaatagtaatccgggggatctagaagatctttcggcttactttagccaatagatccaacttttattaaatcatagtgactttggtaagatatacccgttatctttcaagttgcctctttgttggctgcgctcgttcaccccggtcacatagtttactattgctcccggggattcgttcccttgccgtcgcgatacatcttgaaatctttagggtatatattgacatcagggcaaccattctgacttagggaaaaaccattggtgttattgataaattcgaaagtctccctgttttcatcactgtctggtaccccaaaaatagaatcatcaatactcagcgaatagaaatcacaaaatttagattaaggcaaattacacctacccatgatgtctgctcaaaaagattaacacagccaaccagacagtctgctgtactggctggcgccatttacgaatgttagattcgttgtgccataatttcatatttcgctaagcaatcatcgaatcatgtttttttacagcctgtcttctaatttgattgctcacatcgcttctacttaccgactaacaaacaatttagggatttcccgcaaacaccaagatttagcttcccccatactgtctcgccgccatgccataatgacatttgtctcatggctatattcagagctaatcacccgcaaacgcccctcagtaatatcttgttccaccataggataaggcatggtagcaacgcccaacccagccaagagagcacggcgtttatcttccagagaacttactgttaaacgctgttgcttatctaacaactgaaccgttaataccggacgttccctcgctgtatctgccacagcaataccacgatacttcactctcgtgacatcagataaaggctccggctcttgatgtataggatgatcagggctagcaacatagacattggtaatgctgtaaagctgacgtgaattaatttctgccgatgcgcgaaaatgcatatctggtgcaataacaatatccgcccgacccgtttccagcctctcccatgcccccgccaaaacttctgtcaataaagagagctgagtattcgatttttgagcaagctttcccactaatggaaataatgaagaagcaggaaccaacgcctcacaaacaattgtcaggtgagtttcccaacctcgcgctaatgcttctgcatcagccgttaatttatcagcagcttcaagcaattgacgtccacgctcaagcagcatacgaccaacattggtgaatttagttctgtgacccgaacggtcaaacagcactacatccagctcctcttctaatttttgcatcgtatagctaagtgcagaaggaacacgaccaagctcatcagcggccgcagcaaaacttccccgccggtcaatcgcatccatgacccggagagattccagtgtaagcgctcgttctttgctcatatttttctcaatcaggaaatttgaatatgctgaccagattaactggctaacatttcgccgtccagataattactattgtttgtgtgtgtttttgtaaggtaaccgccattatgattataaatagaacagcaaaacaatgtgggaaagctgactatggttggctacaagctcgttatacattttcatttggtcactattttgacccaaagtttttaggttatggcgcgctacgtgtactcaatcaagaagtcattgcccccaaagccgctttccaacctaaatcctatccacatgtggatatattgaatattattctacaaggtgaagcagaataccgtgacagcgaaggcaactatatcagagcccgtaaaggagaatgtttactattttctacccgtcaaggcatcagctacagtgaacataatgccagtattaataagccactaacgcgcttgcagctttggctgaatgcctttcctcagcaggaaagcttaccattgcaacgaatggaattaccagaacaaccactggctatgctagcttctccaaccgcagaagatggcagtatgcaattacgtcaacaagtgtgggtaaatcatatttcccttaataaaaatcaatctcatcatctgcaattgaaaggaaaaaatgcctatctgcaatctctaaacggaaatataaaaataagaggcaattctaaggataacaatttaattaaatgcggagatggcgcttttattcatgaagaaagtcgtctggttttaaaagcagatacggaattccaaggactgttaattgatctggctgcttaaaaaagtgaaagccccgtcagattccaatctaacggggctaaatttgtgaagttgaccgataagccgggttctgtcgtggacaatcattcatctaggccagcacttacgcactggctcaagcagcctacccgggttcgatacgggccgtacctaatgaacccctatttggccttgctccgagtggagtttaccgtgccacgaactgttaccagccgtgcggtgcgctcttaccgcaccctttcacccttacctgatcctacattaagtaagccatcggcggtttgctctctgttgcactggtcgtgggctttcaccccccagacgttatctggcaccctgccctgtggagcccggactttcctctcctccatctatcatccaaaggattaatgataaagcagcgactgtctagtcaactccgcggcggattataagaggtttacccaataatgtataggcatttaccgattatctgccctaatttagcaattgctatcattcttcattctgtcccaatccatgacgataaagtgcatttttcttcacaccatgaatctctgctgccagtgcagccgcttttttcaagggcagttcttgttgaagaagcgccagcgttcttaatgcctctggaggcaaaacatcgtcatccagttttttatagccttcaacgatcaataccatttcaccacggcgacgggtttcatcttccttcacccacgccaaaagttcacctactggcatcccctgaatggattcccaagtctttgtcaattcccgcgccaaaacgacgtaacgttcagctcccaacacctcaaccatatcttctaaactttcgatcagacgatgggtggattcataaaaaattaatgtgcgtggctcctgttgcaaagcccgtaaagtatctgtccgacttttacgctttgcgggcagaaatccttcgtaacagaaacgatctgatggcagaccagcagcagacaaggcggttatcgccgcacaaggtcctggaagtgggacaacatgaataccggcttcacggcaacggcgaaccacatggtaaccaggatcattaatcagcggcgttcctgcatcagagactaatgcaatactttgcccttgttggagttttgtaattaattgatctgctttctgctgttcattatgatcatgaagtgcgaacatgcgtgcattaatggcaaaatgttgaagcaacaagccagtatgtcgcgtatcttcggctgcaatcagatcgacatgctcaagaacttcaagcgcacgctgagtgatatcacccaagtttccaatgggggttggcacaacatatagcgtggatgtcgtaaccactgctcgattaggttgattcattgtttcatccgaatggccgatttaaaattgagcatctttgaaaaaaacatcgctggatacagtatgctttcctcaatttttgtgcgtatcaaaactggtttagtctgttcagctatgctggcagtcatgatcatcgcaggatgtaccgtacctgaccaacagggacaacaaccttcgcaaactcaggacaaaatcagtacagaaatcgcccgttatcaatctatcattgatgccgctcatggcgaaccttctcttgatgtcatccgtgcttatatcgctcaggaaccactcgtgaaagagagtgcggttcgtcaaaaaaatatcgatgatacctggcaaatgctgacccgtctttcaccacaagagcgccgtgggttggtcatcaacgctgatgaaaatgttctgcaaggctggctggacttactcagtgcctatcaggataacaaacaggactccgacaaactacaggcagctatccgtgactggaaaattcgctatccacaaaaccctgctgtacagtcactcccaactcagttacagccagcagccatccaacagcaagatacgaatatccgtattgctctgttcctgccattaagcggccaagcaaaagtattcggtgaagccattcgccaaggttttcttgatgctcaggccggtttaccaagtccatcattgccaacagaaaacccggaaaatttatctataacagacagtgatagtgcgtcagatagcgtggcttctaccaatatgtcccctagtgaaggggcgatcataaactcagcaataccagccactcaaacaacacctgtcatagccaatgcgccgattaacacacaacaggtcaaaatctatgacacaacaagccagccattggaaaacttatttattcaggctaagcaggatggtgtgaatttaattgtcgggccgttacttaagccagatgtggttaaactcgttcagataaatgcggcattaaacatgctagtacttaacgagttagacaatgctcaaccacactctaatatctgctatttttctttgtcaccagaagatgaagcgaaaaatgctgcggaacatatttggcagcaacaaaaacagaatcctctgattttggtccccagagggacttttggtgatcgcattgccaacgcctttgcacaggaatggcaaaaacaagggggacatactgttctgcaacaaacttttggctcttctgccgaactgaaacaattaattaatagaggtaccggtattcgcttgaccggaacagccgtcaatgtcaccagcaatcaacctacatcaatcgctattggtgatctggaaatcccccagataaacaccgatgtcgttcctacttctactggcggctcagtggatgcagtttatattgtttctaccctggatgaactgacgctaattaagacaatgattgatatggcaatcagttcccgcgataagcccgccctttacgcaagttcccgcagtaatcaggcgggcgtcggtcccgatttccgcctggagatggaaggaatgcaattcagtgacattcccttaatcgccggtgctaacttgccactgatgcagcaagcagtcagtaaatttgcgaatgattactctttgatgcgcctttacgctatgggtattgacgcctggtcattagcaaatcaattcagtcaagttcagcttcaaagtgatttccatctcaatggtgcttctggagtgctgtccgttcaggaaaactgcaccattttccgacaactctcatggatgcaatatcatcaaggccaaatcactgcgatttaattaagtaacttgccgcttgtcaccaagcggcctttcaattcaaatgactcatttcagaatgagaataaaaagtaggatgaaaataaaaaagctgacaagttatttgctggggcgcaactatgaagcgcaggcaaagttgtttttacaaaaacaaggattatcttttatcgccgcaaatgtgaaagttcacggtggtgaaattgacctgattatgaaagacaagcaaacttgggtctttattgaagtccgttttcgcaaatcaggacaatatggagatgcattggcgacaatcactcgtagcaagcgtaaaaaattattacacgctgccgcagtttggctgtttcaacgaggtgaatgttttgaaacctcttcttgtcgctttgatatttgtgctattactggtcaacaatttgaatggttgcaaaatgccttcaatcaaaatgagttcactcgttaaaatgatactgagtaggttataaacgtgctggatagaattaaagtctgttttacagaaagtattcaaactcagattgcagccgcagaagcattacctgatgctatctcgcgagcggcaataatgatggttcagtcattactgaatggtaacaaaatcctttgctgtggtaatggaggctcagcagcgactgcccaacggtttgctgccaatatgattaaccggtttgaaactgagcgcccaagcctgcccgcattgtcacttaacgcagacaatgtggtcatcactgcgatttcaagcaataaacagcatgatgaaatttatgctaaacaggtacgggcattaggtcagccaggcgatgtgttattagcgatttccacacatggtaatagccgtgatattgtcaaagccgttgaagccgccgtaacccgcgatatgacaattgtcgcccttactggctatgatggtggtgagcttgccggcttactcgggccacaagacgtagagattcgtattccatctcatcgcagtaccagaattcaagaagttcatatgctaacagttaactgcttatgtgacttaatcgataatacactttttccccatcaggatgactaaggagccaataatgcgatttttctccctattagccacgatttgtgctgctgtaatgttgcaaggatgtattggtgcggtcgtggtcagttctactgccgtagcgacaaaaaccgcaaccgatccccgcactattggtcagcaggttgacgatagtactctcgaagcccgtgtcagtaatgcgcttaacaaagataagcagctcaaagagcaaacccgtattattaccactgcctatcaaggaaaagttttactgacaggccaaagcccagactcaagccttccagagcgtgctaaacagatagcatcacgtgttgatggagcacacaccgtttacaatgaaattcgtcaggggaaacctgttgaattaggtactgcttctaaggatacctgggttacaactaaagtacgctcaaaaatcctggctagtgactcggttaagtcttctaacataaaagtcgttacggaaaacggcgaagtctttctactgggcattctgaccaaacaagagggtaatgccgccgcgaaaattgccagcgaaactaacggtgttaagcgagtaacaaccgcatttacttatttgaattaaatatattgattgaaagtgatgacacgataaatctgtcaaacattcaggtatcaggccgcgtcattttttggcgctggcgttttacccttttcatcatctcacgtcaaactgaataacttctcattcttccttcaatcatctttcattaacccatttttctcaagataactccccccgcccaacaaccgcatttgccgcaaaatccattgctgacgctgtaagacataagccgaaggtgagttaactttatagcggtgtggattaggcaatacagcagcaagtaaagccgcttctgatgccgtcaatttactggctgatttatgaaaatagtgtttagatgcctcttcaacaccaaaaatgccatcaccaaattctgctatgttaaggtaaacagtcagaattctactttttgaccatcccagttcaatagcaaaggtcatcccggcttccaacccttttcttaaccaactacgtccgtcccacaaaaataaatttttggccgtttgctgagaaatcgttgaagcccctctaagtctgcctgaatgattttgattacgctcaagtacactttcgatagcatcaaagtcaaatccccaatgttgtgggaatttctgatcttccgcagcaataacagccaatgcgatatttggcgatatttgtccttgccctacccagtcagaatgagatacataagaaaaattaaccgataaccaagcactaatctggcgctcaaccataaccatggaaaacggcactggcaaaaatgaaaatgcaacaacagaaactatccataagataataactgagattgcgatttttttaagccagtaccataaaaattgaaaaggatttcgcatccagttactcagtcatttccaatacttttctgacaagtttatcaattccctcttccgcctgggaaatagattcagcaagcatgtaggctggtgtcgtcacaattttgttttctaaatcaacaacaacatcatttaccttgcaaatgatatggacgcctcccattgcctctacttgagcaaccgtttctggatcattgccgaccgttagtttcaccggtttattaagtaattttggcaacataacaggcgcaatacacataaatcccattggtttatgttgattatgcatagccctcaccaaacttaacaattccttatttatttcgcaatcaactgtcttagcggcaaagtcacataaattctttgcaacaccaaatcccccgggaattatcagggcatcaaattcatcggcatttgcttgtgataaaggcttaatttttccccttgaaatacgggcagactcctgtagaacgttacgttcttcccccatttcttcaccgttaatatgattaataacatgaagttgtggttcgtcaggcgcaaaaaagctcgttttaacacctaaacggtctaaagaaagcagagttaatactgactcatgaatttcgctaccatcgaatacaccacatccacttaagacaaccgcaactgatttcatacctcactccatttgtagtagattattgcttaaccctttagggggttaaacaccaatcttcatcacagattttaatgaatcttgtaacaaaaaatcttatctttgctatgttggtacttgtatgatgtacggagaattcctcatttactcgccgcaaccaaagatatatcagataggcgtgtaaaaagttttccctggtgttggcgcagtattcgcgcaccccaacctcggttggggttattttttttcagcgtccgtcaaccattcccccaaaatttccgtatcctttctccattcttgctttaactcatcaacccattcctgaacattatcccaccatgcaggtaaatcaggtgattgaatctgctgggccagttgctgtaaatgacgcaatccaaccgatcccgcagcaccttttatcttatgcgcttcctccgtaatgcctttctggtctttcgctgtcatgtttgagtccagaacagataagtaacccggcatcatcttttcaaacacactcagactattgcgaatcaattggggcccaacgagctcgatgtattggttaagcatttctgtatcaagtaaatcttcatcttttttcatcaatcctgactcctcttcttccggctgcatatgatgcacagactgttccccccaatattgttcaataatggcagttaacgcattcacagaaagcggcttactcaacacaccattcatacctgcatccaaatactcttttttgtcttttaagacatttgctgtcagtgcaatcagggggggcagatcctttttggcatatcgctgacttaactcccgggagatatctaacccggtcatatcgggtagctgaatatcaagcagtaccagatcgaactctcctggcttaaacacttctagcgcatctttaccgttcatagcgacttctacactgttacccaacttctccaataccgagcgagcaacaatcacattcagctcaatatcttctaccaataagatatgcaatgctggaagtggataatcttctgtatcttctttgcataaaagattctcctccatagcaggggcaatgatagacagtgtaaaccgagaaccttgtcccggttcactttccaccacaatatcccctcccatactttgagccaaacgtttggataccgccaatccaataccggttcccgttgctggacaaccaccatgactgcctttcacttgataatacatcgcaaaaatcttctccagctcatcatgtgggataccaatccccgtatctgtgacttcaaacagcaaacgctctccctcttcgtaccagattcgaacagtaatctcacctttttgcgtaaatttcaccgcattgccaatcaagttccatagaatttggcgcaagcgagtaccatctgtcatgattctggcaggcagtggcagttctgggttcatgacaaatttaatatctttcggttgcaccagcagcccagagaggttttccagatcggacataaaaccagtaaaatcaattggctgattatcaatttgcactttacgccgttcaattttatccatttcaataatgtcattgaaaatattaccaagcgtgatggcactgacatgaatcgttttcagatagttattttgctcagacgtcaactcagtatcgagcagaatacggctcaaaccaacaatgccatttaaaggcgtacggagctcatggctaatcgttgagataaaagtggtcttatccctacttgcattctccaaagcgtcctgataacgcttacgttccgttatatcgcgcccaaatcccataagcccatgtctttttcctacccgatcataaaaagggactttccgaagctcaaaacaggctttccgaccatcgggataaactagccattgttcataagtgagtgcaacattatgacggaacactttttcatcggttttcattaccttgcgagcaacctctttgtcataaacatcgtttggtgtcagcccgacaagttgtttctggcttttacccgtcagcaattccatcgcccgattacaaccagaaaactcattattttcattacggtaatagaccaaatcaggagaagcatcgagaaaagatttcaacaatacagattgttgttccaattcaatctgcgtctgctcacggtgtttcatctcttctttgagtttatccaacaatatcagatgcgcctgctcagctttctctctttccgagatctcctgattaagcttaataatgttgtcttttaattgctgattaagttcccgatcacgctgacgcataacttccaacttttcaactaacttagataatcgctgacgggactcttcaagctgttcaacaacaactgaaagaaaatagacagcccaaggtgtaatcaacaaaccaaaaaagattgagcgaactaaatcaatactttgcactcctccctgaagcagaaaagtgaccaccatctgtacacccatagcaagaacgaccagtgcagatgcaagcagtaatgagaagcgcactaaccccaatttcatcattaaatcaacataatattgggccaggcccctgagcagcttcatttcataaaaactcccgttaaatatgaccattccggatcataccgtaaaaaaccggccacttcgttgaaggaataacagaaattgttgaccgggtaaaacaatagtattatttaatagttttagtgatgacttcccaaacattattctggctttttattcatgccggtcttttcgcacaatccaagcatgaataaataatcaaacacattgacaaaataagcataaaattcttttttactcgtttaatagcccaaaaagataaaactttattcttataaagaaacaaaaatacacattaattccgtaaagttaatattagttagattttaaatctaataaataaaagtttaacagcatatacaaaacagatattacactaatattagtgatataaatcacattaaaatcctaacctgatctatatcacacaacatgaatgttaatttttctacttataaatcataacattaactttacttatcacctgaccttatcttatcccggtgatatttgacctgatttatatttctagttaacttggaaagtcactggaaatcatctgtcagattctcatctgaaccataattatgcagtgacacaatatcatttaagtcaccacctgtttatcacaaataaacaagtggtggttgcttgagggcgcaattcagacgccagtaaaaaatattaatctcacaaatgtctgtgagtttctgtgagagtcggacagaacctcgggaggttcacactatgctatataacaaatctcaagaaaaggataactgtggctttggactgatagcccatattgaaggggagccaagccacaaagtagtacgtaccgctatccatgccctagccagaatgcaacatcgtggggcaatcttggcagatggcaaaaccggtgatggctgtggtttattgttgcaaaaacctgaccgcttttttcggatggttgcacaggagcaagagtggcatttagcccgcaattacgccgtcggtatgctatttctcagccaagatcctcagattgcacaaaactgccgggcaatcatcgaacaagagctacaaaatgaaaccctgtcagtcgttggctggcgtgaagtccccatcaaccgtgatattctgggcgaaatagccctttcaagcctccctcatattgaacagatttttgttaatgctccggctggctggcgtgcacgtgatttagaacgccgcttattcgttgctcgccgccgaatagaaaaacgcatcaacgacagcgacttttatgtttgcagtttgtctaacttggtgactatctataaagggctgtgcatggcggcagatttgccccgtttctatcccgatctggctgatttacgtttagaatcggcaatttgcctatttcatcaacgcttctcaaccaataccgtcccacgctggccattggcacaacctttccgctatcttgcccataacggtgaaataaacaccatcaccggtaaccgccagtgggcacgagcaagagcctataaattcaagacaccgcttattcccgatctgcacacggctgccccttttgtcaatgaaacagggtcagattccagctcgctggataatatgctggaactgtttctcaacggcggaatggatttaatccgtgctatgcgattgctggttcctcccgcatggcaaaacaatcctgatatggatgaagatctgcgggctttttttgatttcaactccatgcacatggaaccgtgggatggccctgcgggtatcgttatgtcagatggacgctacgctgcctgtaatctggatcgtaatggcttgcgcccagcccgctatgttatcaccaaagataagttgatcacctgtgcttccgaagtcggtatctgggattatcaaccggatgaagtggtggaaaaagggcgcgttggtcccggtgaacttatcgtgattgatacccgccaaggccgcatccttcatgcagaagaaacagacaatgacttaaaaagccgccatccctataaagaatggatggataaaaacgtcaagcgtctgaccccattcgaagaattactggaagatcaagctggtcatcgggatctgaacgatcaatccttagcggtctatcacaaacaatttgcctacagcaacgaagagctagatcaaatcatccgagtcttgggagagaatggtcaggaagcgaccgggtcaatgggggatgatacaccgtttgccgtcctttccagccgcccacggattatttatgactatttccgccagcaatttgctcaagtcactaatccgccaatcgatccactacgcgaagcacatgttatgtctctcactacctgcattgggcgggagatgaacgtattttgtgaagcagagggacaggcacaccgattaagttttaaatctcctattctgctctactctgactttcaccaattaatcacacagcaaagtccacactatcgcgcagaacaattagacttaactttcaatccacaagaaaccaatttgcaaaatgccctgtttgcattgtgtgaccaagctgaacaactcgccagagatggcgcggtattgttggtattatctgaccgcaacattacgccgaacaaattacctatacctgcacctatggctattggcgctattcaacaccgtttggtagaaaaaaacctacgctgtgataccaacctgatagtagaaacagcaagtgcccgtgatccacaccatttcactgtactactgggatttggtgcaacagcgatctatccctatctggcttatgaatccctcgccaaaatggtcgataatggcacaattaataaaccttatgctgatgtcatgcttaactaccgcaatggtatcaataaagggttatataaaatcatgtcgaaaatgggcatctcgactatcgcctcctatcgctgctctaaactatttgaagctgtcggcttacattcagaattaactgaattctgcttcaatggcgtcgtcagccgaattggcggtgctaatttcagcgatttcgagcaggatctgcgaaacttatctaaacgtgcctggcttgctcgtcaaccactcgatcagggcggactgctgaaatatgttcataacggcgaatatcacgcttataacccggatgttgtcagcactttacaggctgcggttcatagtggcgaatataacgattacttgaaatattctcgtttggttaatcagcgtccaattaccacaatccgtgatttgctggcgataaaaacagaagctgagcctctacctattgaagaagtggaacctgccgaagagctatttaaacgctttgatactgctgcgatgtcgattggagcattaagcccggaagcacacgaagctctggctgaagccatgaatacgttaggtggtttttccaactccggcgaaggtggagaagatcccgcacgttatggaacaaaaaaggtttcccgtatcaaacaagttgcttccggtcggtttggtgtgacacctgcttatctggtcaacgctgatgtgattcaaattaaagtcgcgcaaggcgctaaacccggagaaggtgggcaattaccgggtgataaagtaacaccgtatattgcaaaactgcgttattccgtacccggcgtaacacttatttctccaccaccacatcacgatatttactctattgaagatttggctcagttgattttcgatctaaaacagatcaaccccaatgcgctgatctcagtaaaactggtttcagaacccggtgttggtactgttgccactggcgttgccaaagcttatgccgatttaattactatcgcaggttatgatggcggtaccggtgccagtccattgtcatcggtgaaatatgccggatgcccatgggaattggggctggtggaaacccaacaagcgctagttgctaacggattacgtcataagatccgcttacaagttgatggcgggttgaaaacaggcgtagatattattaaagcggccattcttggcgctgaaagtttcggtttcggtactggaccaatggttgcccttggatgcaaatatctgcgtatttgccatctcaataattgtgcaactggggttgccactcaggatgagaaattacgtcgcgaccactaccacggattacctgaacgggtcatgaattatttccgctttatcgcccgtgaaaccagagagatcatggctacattgggtgtcaaaaatctaactgatttaatcggccgaactgacctgttggaagtactggaaggtatttcagcaaaacagagcaaactaaatcttgatccgctcttagcaaccgcagaaccccatcagggcaaaacattatattgcaccgaaaacaatccaccatttgataatggagcactgaataaaaacttactgactcaagccgctagctatattgagaaccaacaaagtaaaactttctattttgatatccgtaatacggatcgttcagtgggcgcttccctttccggttttatcgctgctcgatatggtaatcaggggatcgcagcggcaccaataaaaattcatttcaatggtactgccggtcaaagttttggcgtctggaatgccggcggtctggagctgacactcatcggtgatgccaatgattatgtcggtaagggtatggctggcggtcgcattgtcatacacccgccagtgggttctgccttcaaaagccatcaggcaaccctcattggcaacacatgcctctacggtgcaaccggaggcaaactgtttgctgccgggcgagcaggagaacgcttcgccgttcgtaattcaggggcgattacggttgtagaaggtatcggagataatggctgtgaatatatgacaggaggtattgtctgtattctcggacgcactggcatcaattttggtgcaggaatgaccggcggctttgcttatgtcttggatgaaaatgatgatttccgtaaacgggttaacctagagttggttgaagtactggcagtagatgccttagctatccacgaagagcacttgagagggcttatcaccgagcacgtcctcctgaccggttcccaacgcggtgaagatattcttgctaactggcaacagtggctgagcaagttcgcgcttgtgaagccaaaatccagtgatgtgaaagccctattgggacatcgcagtcgttcttccgcagagttgcgaattcaagcgcaataaggagccaagatgagccagaatgtatatcagtttatcgacttacaacgcgtcgatccgcctaaaaagccgctgaaaatccgcaaaatagaatttgtggaaatctatgagccattttcaacaagtcaggcacagacacaggccgatcgctgtctttcttgcggtaacccttattgcgaatggaaatgtcccgttcataactacattcccaattggcttaaactggctaatgaaggacgtattatggaagcggcggatttatcccatcaaacaaacagcctgccggaagtttgtggtcgtgtttgtccacaggatcgcctttgtgaaggcgcttgcactctgaatgatgagttcggtgcagtaactattggtaatattgaacgctacatcaatgataaagcgattgctatgggctggaagcccgatatgtcacacgttcagcccacgggcaaacaggttgcgattattggtgcaggccccgcggggctagcttgtgctgacgtattgacccgtaatggcgtacaagccgttgtttttgatcgtcacccggaaatcggtggattactcacctttggcatacccgcgttcaaactggaaaaagaggtcatgatacgccgccgtgaaattttctctgagatgggaattgaattccggctcaatactgaaataggcaaagatattgccttatctgaactgactgagcagtttgatgcgatatttcttggcgtaggaacctatcagtcaatacgtgggggactggcaaatgaagatgctgatggtgtttatgatgctctaccatttctgactgccaatacccggcatttgatgggttatcccgccctaccatcgcaacctttcatcaatatgcaaggcaagcgggtcgtagtgcttggtggcggtgatactgcaatggattgtgtcagaacggctattcgtcaaaaagcggcttcggttacttgtgcttatcgtcgtgacgaaaccaacatgccaggctcccagcgtgaagtcaaaaattccaaggaagaaggtgtagaatttctgtttaatctgcaaccagtcaggattgaaatcaaccattcaggtcaagtttgtggcataaacatggtacggactcaattaggccaacctgatgagaatggacgccgccaagctgaaattatcgcaggctcggaacacctgcttaaggccgatgcagtgatcatggcattcggctttaaaccacataccatgaactggctaagtgctcatcaagtaaccttggataaacaaggacgcattgtcgcaccagagtactcagacattccctttcaaactagcaatccgcagatatttgctggtggagatgctgttcgtggctcagatctcgttgtaaccgcaattgccgaggggcgcaaagccgcacaaggcattcttgattatctcaacatctagtcaaccaagggagcttttcagctcccatctctttctatcatcagtttaatactttatattaattggattacccttacacaaaaaagtaagtgaatttaatgaacattccacacttattactgtcatacatgatattttggaatattttttctcattaatgtgggtcttaaataaaatactccaattaaccgacaccaatatcacgatacttattcaactataaatactggaaatattaatgaagctaataaaaaccttaattttattatctccaatgctgtttatcagtcatacagcacttgctttatcacagcccttaacatctgaaaatattaataaagaaattatgaatagaggtaccaattctgtagtggcagaattaggtgaaataggagccaaacaagaaatcactcacaacatttctactggtgatagtaaatggataaaactggcttttaaattaacgcaaagcatacacctgggttttgccaaagaagttcgctacgcattatccttagcattaattaataatcctgctgaagtccttgctaacgtagataaagaaaacaatatatcattggctgatatctgcacaaccccaccagaactggggaccagagagaataaaatagaatttgtagataaggttaaaaagagcttaagcgctatcacagatttcaaagctaaaaacagaactggagattgtttttgggaattagaaaaagcctacaatacagaattctaatcaatgaatttgaaaaaaaataaggaggcaaaccgccccctcttttaacgcttattttactacccgtaaagcagggtgccctctcgtcggttttggtggctcatcatcaggtgaagttccactattatcttcagcatcgggcaatgtatccgtaactaataccagattatctgtcgcaaatgcagaggtatcagccttatcctgatctgaagcggatttaaaaagatattcatctttataagctgcttcaggctcaaacatcattcccgcccgattttcacggccataaatcgctataaccgccgccatcggtatattaacccgacggggaacaccaccaaaacgggcattgaagcgtacttcatcattggttaactcaagattaccaacagctctcggcgctatattcagcaaaatttgcccatcacgggcatattccattggtacattaactccacgtaaagtcacgtctataaccagatgtggagtcatatcattatcgagtaaccactcgtagtgagcacgcaacaaataaggacgacggggagacatttgagacagctccataaatcagctcctggattgcaagcgcatttcacgttcagcttcggttaatgaagctaagaatgcatcacgctcaaagacacgctgcatgtaaatttgtaaatctttagtaccagaactcggtaattctatacccaacaccggcaaacgccacagcaaaggagcaagatagcaatcaaccaaactgaattcttcgctcataaagaatggcatctctttaaatattggtgccactgctagcaactcttctgctaatcgtttacgagcagtattggcctcttgagaattgcctttctcaatagtatgcatcagggaataccagtctttttcgatgcggtgcatcatcaaacggctggaaccacgggcaactgggtacacaggcattaatggtggatgaggaaagcgttcatccagatattccataatgatgcgggaatcatatagcgtcagctcacgatcaaccaaagtcggaactgtctgataagggttcagatcgataaggtcctgtggcaggttacctgcctcaacctgctcaacttcaacactgacacctttttccgccaatacaattcgcacttgatggctaaaaatgtcggccgggcctgaaaacagagtcattaccgaacgtttgttggcagcgacagccatgaaaacctccaagtttatctaaaaagggaatgaatagccccacacgaccacgactattcttactcattcattctcatcccttatgtttctgcgccacaacggtgaatacggaatgtgctactcaacacaatttatcgtttcaacacaatttaccgtttcaacgcaatcattaccgtttcaacgcaattactaccgttcagatagtaggcagacaaatggatgaggcaaaaattggcactagtttaccagattttgtacattttgggggaagtgtgtggataattaagtaaaaaacccgccaaaaagacgggtttgcacattaaataattgccataaagacaaaaaattaacgtttggagaactgtggacgacgacgtgctttacgcagaccaactttcttacgttcaacttcacgagcatcgcgggtaacgaagccagctttacgaagatcagaacgcagagtttcgtcatacgccatcagtgcgcgggtgataccgtgacggattgcacctgcttgaccagaaataccaccacctttaacagtgatgtacagatccagtttacccaacatatcaaccaactccagcggctgacgaacaaccatgcgcgctgtttcacggccgaagtaaacttcaagactgcgtttgttgatgacgatattaccgctacctggcttaataaagacacgtgcggaagagcttttgcggcgaccagtgccgtagtattgattttcagccattgcctataatcccgattaaatgtccagaacttgcggttgctgtgccgcatggttgtgctcgctacctgcataaactttcagtttacggtacattgcacggcccagtggcccttttggcagcatgcctttaaccgcgatttcaattacacgctcaggacggcgggcaatcatctcttcaaaggtcgcttgcttaataccaccgatatgaccggtgtggtgatagtagattttatcagaacgcttgttgccggtgactgcaactttttctgcattaacgatgatgatgtaatcaccggtatcaacatgcggagtgtattccgctttatgcttgccgcgcagacggcgagccacttcagttgcaagacggcctaaagttttgccatctgcgtcaacaacataccagtcgcgttttacggtttctggcttagctgtaaaagttttcattaaagcttacccaataataagttacacgttggtgaacactcaaggttcagaaacttgccgaggttcacacgactcttgtccagcaaacctaccccttcgaatagcctatgccggcactatatgcaagtttttgggaaaaaaacattgctgtaacgtggggtcgcaagattatagagaagtcaaaaataaaaatcgacccccatttgaatatttaaaatcagttttccgtctgaaatagataagcgaactcaaacttaaggtaaatgaggtaatttgagatactcttcactttgcatctcttgcaaacgggataagcaacgctggtattcgaaaaccaacaacaccccttggtaaatctgctccatcggcaccgccgcattaattatcaattttacccggcgttcataaaattcatcaaccaatgccaagaaacgacgagcagcattttcattacccggcattatcgctggaacctggtataacaaaaccgtgtgataacgttttgataaaacaatgtaatccatctgactacgcgcatcttcacataagacgttaaatccaattgccaatacaccatcagcgtcacgaattgccggcatccgccgatggttaatttccaatatagaagcttgttcaccgctattaccggccaaaagaataaacattcgatccatcgctcgtttattatcttcattcagcggtgtgaaatagagatgagcttgagtcaacgtgcgcaaccgatagtcaatacccgaatccacattcataacgtcacaatattttttgatctgctcaatagcaggcaaaaagcgagctctctgtaaaccattacgatagagttcatcaggaggaatatttgacgttgcaatcaaggtaatccccctgacaaacagcgcttccaacaatgcaccaagaatcatagcatcagtaatatcggagacgaaaaattcatcaaagcaaagtacatctgtttccgttttaaaaccatccgccacaatatccagcggattttcatgcccttgtaataccattaattcttcatgtacccgcagcataaaacgatggaaatgcaaacgtaattttctttcaccgggtaaactctggtaaaacatatccattaaccaagttttccctctaccaacgccgccccacatataaagcccttgaacaggtgcacagctcattgacgtcgtttttcctaacagtttactcagacgccctttcaagctttgtcgcctcacgggattgccgggagaaacattaatcagagcatggtgaatggtatccaattgagctacaacttgacgctgaacatcatctggttggtatttgccctcagaaagggctttttgataacatgatgaaggggtaatcaatgatggcatgacaataacaatccttaaaataatcgcccgttttttatcgtttttatgattcagattgaccttattaccggatcaattgtctacaataaggtccacaataagatctataccctatggatttcaagatgcatcgcggcggcaaaggaatgaatccccgggagcatagcaaactatgtgaccggagtgagcgagtgcagccaacaaagaggcaatttgaaagatgacgggtatacaaacaaatgtaaatcatgatcaatattccactctaactagattaacggttatagtgacgataattaagtgaaacattctgcggaacaacgatgtcgatgaaggagtagctatgacttgggagtatgcactgattggattggtggttggttttgctatcggagcgctagttatgcgttttggtaacactaagctgcgccagcagaaagccttacaaactgaactggagaataataaatcagaactggaagagtatcgtaaagaattagttggtcattttgcccgtagcgcagaattactcgacaatatggctcgcgattatcgtcagttatatcagcatatggctaaaagctctcatgaactgatgccgaatatgccagcacaagaaaatccatttaattatcgattgactgaatcagaagcggataatgatcaatctccggttaaaatgccaccaagagattattccgatggtgcttccggcctgtttcgtccgatgaatgaaaaaaaccagtaaataccctgctgtggcacatcgtgtgccacagcattaattcaaatgtaaaatctattatctacctacaagttttgtttttttgtttttcaatcatgtaaatacctgtaaagaatcatgctaaatctgtttgcccgatgaactttatttaataattaacagtcatagagtaatcatggcagcttgccagaattaactcaattagccttctagcttaggtatacaagagaacaaaattagatgaaaagaaaacacttattccttagtgcattagcaatcagtatcgggttgtctgcaatttctgtccctacgattagcaatgctgctttacctgctgctatcgccggtcagacattaccaagcctcgcaccgatgcttgaaaaagtcctgccagccgttgtcagcgtgcatgtctctggtacgcaagtacaacaggaacagagtatacctgaagaattcagattcttctttggcccaaatctacccatgggccgtgaaagtacccgcccattccaagggcttggttcaggtgtcatcattgacgctgccaaaggttatatattaaccaacaatcacgttattgagaatgcagataaaatccgtgtgcaattgaatgatggacgtgaatatgaagccaaattattaggccgcgatcctcagacagatattgccttgctgcaactgaaagatgctaagaatttaactgcaattactatggccgattccgataagctccgagttggtgattttgctgttgcggttggtaatccattcggccttggtcaaactgcaacctccggcattatctctgcgttaggacgtagcggtctgaatctggaaggattagaaaattttatccaaacggatgcctctattaaccgtggcaactccggtggtgcactggtcaatttgaatggtgaattaatcggtatcaataccgctattctagccccgggtggtggtaacatcggtatcggctttgctatcccaagtaatatggcaaaaaccctgagcgagcagcttatcgcgcatggtgaagtaaaacgcggtatcctcggtattaaaggtactgaaatgaattccgatatcgctaaggcattcaatattgacgcccaacgcggagcatttgtcagtgaagtcttaccaaaatccgccgcagcgaaagcaggtattaaatccggcgatattcttatttccgttgatggtaagaagattagtagctttgctgaactgaaagccaaaatcggcacaacgataccaggtaaagaaattaaaattggcttattacgcaaaggtaagccaatggaggtttctgttacgctagaaaacagtgaaggtcaaacaaccaaagccggaaatctaacccttgccctgcaaggtgcaaccctaagcaatggtgaagtgaaagggacttacggtgtgaaaatcgatagtgttgctcaaaactcaccggcggcgttatctggcttacagaaaaatgacctgattgttgggatcaataatgaacggatacagaatattaatgaactgcgcaaagttattgattctaaaccgccagttatagcgctgaacattcttcgcggagaagagagtatttatctgttgctaagaaattaatacttttagtaaacatatttaagacacagcgtaatgctgtgtccagaccgctgacaaaccccattgaaaataatggggtttgttcctttcattacgaatcataatacaactcattttcctcattgacccgattcaatcgcccgtcagggcgttattttcgcttcgcgggcattgactggctcgccctccagagataaaaacaacaaagcatcgcgaccagcaaggctatcttcttgatattttgggcagttgccgccaaaagacactgtatttgcaccttctgcaacccgcgaaaatgggcataacggtgcccgtgatgttgcttcgcatccgcaaaactgcgctctattgtttcctttcgtcgcttgtaaacttttttaccccattccgttagccggttttctctggcctgctctttactggcctcccagatatgacgggttatcgtttttccgcctttcgcgtgcgtgcaggcatcacgctgcgggcaacactggcagatagccgccggggcctgataatgccggtatccctgacggtcggttgtggtataaatcagtttttctccctgcgggcagacataacaatcctgtagctggtcataggtgaaatgtttcttctgaaaggtatttggtcccttattcggccggcgataacctatgatggggataatgcctaactgttccgtcagataacaaaccggggccgtaaaatagcccgcatccaacccaaccgcgaggggattgagagcaaaacgctctaactgacgcgtcaaacgcttgataaaaggctggctgtcgtggacattacccggtgtggcgtaggtatcggtgataataccgacttgcccatccacggtacggtggtcaaggtaaaagaaccccctgggtttgttggtccggtgcataaacccgctttccggatcgacggtactgaccttcgtctttctctgccgttcctttagggctggcttcaggctttttttccagctgccgcccggtcttgagtgacggctttatccagtgcgtcaacataggcgccggggggaaccgaccgcatgacattctccgatttatgcggattggcactggctttcaggtgggtgctgtcggtatagagtacgtgtccgcccacaaatcctttggctatcgcctgttcaacaatgtggtcaaaaatctgttggaagaccgcggtatgattgaaacggcggcggcggttctggctcagggttgaggcatcagggaccttttctgtcagtccgaggcgcagaaaccagcggtaagccacattaacctgaatttcctgtaccagacggcgttcactggggacgccaaacaagtagccgagtaacatcattttaatcagcatgaccggatcgatagcaggacggccattattgtggcaatacaacggggcgactaattcgcggataaattcgaaatcaatggcagcatcgacttgacggaccaaatgatttttagggaccagctcgtcaagcgagagcgtttctggcgggaaagtctggagaggggggggtcttaacatggtggcaagctccgttgagtgaacggaacttaattaaaacaaaatgccggataaaaaaccagcactttgtcaataatctgagacacagcgtaatgctgtgtcttaaatcactgatatccctcacgacaggtggtcttgtaaatcagtttttctggaggactcaatatgagaaccgtagtaatattcaaaagcggcaataactgagctgtaagtttacctcgcgacctcgatttcgagggagtgaacgaattggagattattcgtgaaggcgatatcattattctgcgaccgattaaacccagttggaattcctttttacaacaagaaaaaactgactctgactttttaaccgaacgactggatattgtggaagaaggacgcgttaagttatgaaaaaatatatacccgtcatctttcaagttgcctctttgttggctgtactcgctcactccggtcacatcgttctctatgctcccggggattcactcccttgccgtcgcgatccatcttgaaatctttagggtttatcaattttttttaatgattgcccatgattttcgtaaacttcttacagaccatgtaaaacctcttatttatatttaagcaaattattttaatacggttaatcctgttaaatattttcactcttattattgaattaacgctgtcatttggttaatcaatttaagaccgatttttcctgatgttttctcttccaatatcagtatagcatcgaattttttacccgttttaaaaaaaccttaatcacttatttttacctttaatgattaaagtttttacctgctttttcataatacacttactactttttccagattttaaaaccacactgacagaccataaacgttttttttaactactgttttatcatattatctgaataagcgaaagtttctgtcacgccttgttttcaaatcacatgaaaaacgaaaacccgcatgatttaatctgaacgaatctcaacgttatgaagtaaataaaagcgctaaaacgaaaagttaaagacagtaaaaaaagcgttaaaatccctcagattgtagcaaaatgcgataaaacagagtttaatactcatgcaaaccatcaatacaaattttttcattttattattaatgaaaactcaatagtgataatcgaagcgctaaaagtcagtaatccgagatacagcataatgcagtgtctgttaatttctatgttatcctgcagtgactgattaactcacactgaataatacccatgattgccaagttgctgcgctctgcttttttaggattacttatcgctgtaattttactgatgaccattccatcactgcgccctagcgggctgacatcagcaattaccaataacagtaatgacgaagttccattcagctttaataaaggtgtccgtagggcagcacccgccgtagtcaacgtctacagcagcaacatggggagtttttctcaccaaggccgggaaaaccatacccttggttctggcgtcatcatgagtgataaaggctacattcttaccaataaacatgtcattaataatgcaggacaaattattgttgcactgcaagatggtcatttttatgaagccctcgtcataggctctgacagcttaacggatcttgccgtcctgaaaattgatgccgaaaacctacctgtcataacgattaatccaaatagagtggcgcatgtgggagatgtcgttttagccattggtaacccttacaacttggggcaaaccattactcaagggattattagcgctaccggtcgcgttggattaagccctacccgccgtcaaaacttcctccagaccgatgcttccattaatcagggtaactctggcggagctttgattaatacccttggcgagctagtaggtatcaatacattatcattcgataaaagtgaaaatggtgaaaccccagaaggattaggctttgctattccgactgaactcgccaccaagattatgcagaaacttattcgtgacggacgggttatccgaggttttatcggcataacgtcacaagagctgccacatattcgctcttctaacggcagtattaatcagattcaagggttacgagtatttcaggtgactacaaacggaccagcgcaaaaagttggtattaaagtgggtgatatcattaccagtgtcaataacaaacccgctatttccgcggttgaaacaatggatcaagtggctgaaatacgccccggcagcgtggttcctgtcactttattgcgcaatgggaaaatattatcgctacaagtgaccattgaagaatttgaaagttaatgataatccacgatatttcagtgaataaccgattaattaaaatagttaataatcagagtgaatctgtatcaccaataacttaacgagcccccacatagctctagttattgatcctttagctggccgattagtaatttcaatgggtaactatatataccctatggatttcaagatggatcgcgacggcaagggcgtgaatccctgggagcatagagaacgatgtgaccggggtgagcaagtgcagccaacaaagaagcaacttgaaagatgacgggtataagtactgtattactactacttacagtttttgatcttataacgagatttagggattatgatgctttcttcaataagaaacttacactatcaagacaccaagacaccggctcaacaataaatttcactctcctttagtcaacaagccccagctcactcatcgattaagtatgagtatataaaacataatttatgtaacatttacctcacatcttaaaggttattattgataaaatcattataataatttatcaatactttcttggagtactatgcaaaaccatctattcttttttattccaatgaactaagaaatatcatcgattaaaggagaacaatatgagtgataaagaaaaagttaaattagtacgtttacttaaacaagtaaaaggaaaaaaaggctccaagagtcagacctcaaaatctgacgcaatcgctgcttaccactattaatctttaagctaacagcaacctacataggttgctgttttgccatatatggagtgatgtatgcaattaacatttatcggtcatcaaagttggctaatctctcacaaaaatacaaatattttggttgatcctgtcttaggcccaacaatgggaaactcccgatatataaagttcgaaatataccctccaagagatattgatataagcaatatgccatcaatcgatgccgtatttatatcacatgaacatgttgaccatttcgatatcgatactctatcaatatttccaaagggaacagatatttatatatcactgcttatgccaagctgtataaaaacagctttagaacatctagggcataatgtcatattacattcatttaaaaaagaaataagagtaaaagatatcaaaataaagtcattctctgctccatatgaaacaatattatgggagtcaagggtaactcaatacttagtatcagatattaatgaagaaaaatataacggttttatagcagtggatgcaataatcagcgaggaatacattgaagggattggtgatcaatacccaaatccacagtggatcatagtagcaaataattcacagtgtacaccaaaacaagctcaaggagcatatacaaatttgctaccattagaatcgtcaagacttagtggcaagaattatagaggagtcaaattacttaactctatattaatagactatcttgatggcatccctgaggaaactaagatattgatttgtggcaatgggtttataaatcccagagaaaattatggtccattcctattctcagataataaggtattgtctgaaattgccaaccaattatcaattaaagagaacgtttgtggcccatatccaggtgaagtaatagaagttatagatggaaatctttcaatcagtttatctagctggatagaattaaataaaaacaaacacttagatctaaaaaataagctaattaagtacatggatgaagaatctggagttgagctcagtccatttattcctgtactcggtgaacttagtgaaacagaagaaaaaaatgggttagctacgattgaaaatgaactaactgatatggctcgaactctagctattgatcctttagttggccgattagcaatttcaatgaataactatataaatggtgaattgagtgataaccgaattctaataaagtttaaagataaagattttgggtatgtttattctgtatcatcctgtcaatttaccaaaacttacacacatgagaactatttaagtgaatatccctttggtgttgaaatatatattcaagatttcgttggtctatgtttaggtaaaatacaaatttgggacttagcagggacgagtatacgcagctggtatcttggtggaatatatgagaacatcattgtgtttttctataagtactttggagagcaaagaaggcctgatttagcacttaaagtatacgaagaatatatctcacaaaaataaggtagcaaatgaacacctctgcaattaagaacgatttaagaaagcaatatagtacttttatcttatttcctattgaaacagtaattaatttattatcttcttttttttcattttccatattaatttacataataacattgcctttgactaatagtttagaggaaagtagtattggcctgattatcttcttaattgcaatattgagacctgccttaagtgtaattaataacataagcctgttccttattaataaaaaacaggcttatattttatcaacatttaatgattgctttacaagtaaaaaagatgctcagcagaatgagcacgacattgtaaattactcctcgtatgacactagtgttgttttgattatatctaaggtaatttgctttatttatctttccattctcatggttattaatgttgaaggtggtacagttggcttactatcattgtgttctatattgataccattatcattttttctatttaaaaaacgagcccatctttctaagaaactagcaaaaataaggaagctgagatatggatttattggagataactttgaggccctgactgctatattgttaactgggtaccaagggggaaaatttctaagcttgaatagaattattgatactgaagaaaaagtaaaacgcattgattcattatggagagctgtagatattgcatcaaatgcgtttttaaaagttattcctgtcctctttataatcctgattggcaaagaaatagacaatagtgaaaaattactcattcttttatattctctaattctggttggcgaatatcttggtttgattagattactaacaccattttatgatggttatctggccaaattgtcaattattagtagatataagaattaccaatacaaaccagatgaatactataacctagatggcacacaaggttttattgaaaaaaccattctggggaatatatttttatcaaaaaagttaatcaataggagaatattaaacaagctatgttatgaaatttttcaaattaataagtatattaatttaagttcaaacattaatgaattgtcaagaggacaattaaatcttatttttgccgtaaggaatgtatatatggctataattaataattacaaaggccatatttattttgatgtaaataggactggctgggattctaagttattacttgatttagaagatgtcatttacaaattaaaaatagaatatcaaattgatattatactattacatcttcataaaattaaagatatagaattagaaacaaaaaatgaaaccacaaaatctacgttagatagtaaagttagaaaaatgaaagatcacacaaaaattgccagatttttatctatttttagctataactctttaattggaattatattactgcttattgctagcttttcattattcgaattaggaagaattacatacaatgaatatgatagtgaaacctatagaataatatccatatctctattaggtctaatttcatttgtctcaggatcatatttaatagagtttaaaataagaaaaaaagcaagaaaagacatatatagatatattaaaaacaactctagtgaagaaggattcaacttattcaagcatgaatacaatgtaataataaatagatttaccatgtatgccaaagatgttttctggtttggttcgatattttccggaaccctatttttattttttgactctgacaattttataattatacttggagctatgtttatatttcttgctagcatttatttattgtatcctacgtacaaggataatagaaataagcactataaagaactccactctctatcaatttacttttcttatcctaaaaaactacctcgatgtaatttggttaatcgtttctgtcaggatactatcctatccggagtgcatcgtttgtatacaatagcatcacaacgatatataattaactctgtagcttctatattaggttttctaatatccagtttaataattttttactctctatatccaaatttcgaatcagacaacattacggctgctataaacttagacagtagaatagtaattttttattttgcaatattcggatacttatcggagattgtatctatccaaagaataactaaacatgtaaatttttatcataagagaacaaacttatcctctaatttatcaattttagagcaaagattagaaagtgatagagttatacaattagtaggaaataatggaagcggtaaaactttttttcttaagagattatccgaaataaaggggtatatatatatagaccattatttcgatcactacctagcaaacgataaatttttagattacctaaacaaatctaattcagatgtgattatatttgatgagtttgattgtaggaaattaatagataaaattgataaaaataaaaaaataatcatcgtctcacatagggaagtcattggctcgaaattgaacattagcgaggtggtatgaataatatttatattattggaccatttggcgcaggtaaaactatgctaagtaaattaatttctaaaaaactagaaaaagaactaattagtttagattctatacccaatagatttcaagatgcatcgcgacggcaagggagcgaatcctcgggagcatagcaaactatgtgaccggggtgagagagtgcagccaacaaagaggcaacttgaaagatgacggatatataagatggtccatatatgaaaagatgggctacgatctaaattatgttgagcaattagtaaaaaaatgtagatttatagacttatatagatacaaccataaatttgaatcagagctggtcaaaaaaattgtcaaaaatgcatcaaataatgtggtcgattttggtgcaggacattctgttattgaggacgatttagattttaaatatattagaaatcaaatgaaagaaaaaggcactactatttttctagataaaagctctcatattggagttaattatctccatccagaagaagtcttcttaaacaattatttcttggcgagtaaatgtaaccaaaaactatccgatatcacgataacggtagataacaaaagtaagttacaaatattggatcaagccttatcggcacttaagtcaatagaggttatatgaacattatattcaagtctgataaaaataagctctagaaacattaaattaacattgagtaccctacggatcagaaatcacaaatgggtacaattgtgaggtagccatgaaaccagaaaatttacgtaccgataacaaacgcccatttaccagtaaagagtatctgaattcactccaggatagccgtgaaatttacatttatggtgagcgagtcaaagatgtcactatacatccagctttccgcaatacagccgcttcaattggtcaattatatgatgctctgcatgcccctgaaacccacaatgcgctctgctggaatacagacactggtaatgaaggttatacgcacaaattcttccgttttgcgaccaatccagatgaactgcgccaacaacgagatgccattgcagaatggtcacgccaaagctacggctggatgggacgcacccccgattataaagcggcattcagttgcgcattgggcgcttaccctgaattctatggtcaattctctaacaatgcccgcgcatggtataaacgcattcaggaatcatgtatgtatttcaatcatgccattgttaacccaccaattgatcgtcacaaaccagcggatgaagtcaaagatgtttttatccaactggaaaaagagactgatgcaggtattatagtcagtggagccaaagtcgtggcaaccaactcagctcttacgcactacaacttcattgttggctctgcgcaagacataggggataaccccgattttaccctaatgtttattgctcctatgaatgccaatggcatgaaattgatatcccgcgcctcttatgaattagccgcaggtaccaccggttcccctttcgattatcctctctccagtaggtttgatgaaaatgacgctattttagtgatggataaggtattaatcccatgggaaaacatactaatttatcgcgatgttggtagctctcgccattgggctgtacaaagtgggtttgcccgtctgttccccatgcaggcttgtgtacgtctagccgttaagctggatttcattacagcactgctgcaaaagagtctcgaatgtaccggagtggtagattttcgtggtgttcaagcagacttgggagaagtagtggcatggcgcaatctattctggtcattgacagatgccatgtgggcagaagccaagccgtgggaaggcaatgcctatctaccggatactcaagcgattcaaacttatctcgttatggcaccgatagcttatacaaaaattaggaatattattgaaagtaatgtcaccagcggcttaatctacctgccatccagtatacgtgacatgaataatccagaaattaataagtatcttgagcaatatgtacgcggttccaacggcatcgactatgtagaacggattaagattttaaaattaatgtgggatgccattggaagtgaattcggtagccgccatcagctatacgaaatcaattatgctggtagtcaagatggagtccgcttgcaatgtctgcgccatgcttatagttctggcaatatgaagaaaatgatggatttggtggaatcctgtctttctgactatgacttgagtggctggacaaaaccatatttacacaataaccaagatattaacttgttagataaattactaaagtaaattaatgatgggaagcctatttatgcctgtagaaaatgaacttgcctgcgtttcagaaatgcagaggaatacttaccaatctggtatgggtttatcaattttaaacaggattttcatccgatgatggctaaatccgtagcctactgttgtttaaagagctatctcatcaagtaccaaactcgatttcaccaccaaagtgagactctcttcggtatcaagcgccctcaacacctactttaaaaaactgttgagggctatttaaatgagaactatttttacacacaataatgtgtataaaaatggtctgtgtctgactctatatatgtgaatatttttagcattataaaaaaataagaaagttggcgattgtcacagctacccgacaattacccccatttcttatttccaagttaaggaagtacaattactttcccgttgatttcactcgttcaatgtttgcgccaagtccgcgcaacttatcttcgatatgttcataaccccggtcaatatgataaatacggtcaacaaccgtcacgccttccgcaatacaacccgccagaaccaagcttgccgatgcgcgtaaatccgtcgccatgacctgagcgcaagataattttttaacgccatgacaaagcacggtattactttcaatttccgcatgcgcccccatccgaattaattcggggatatgcatgaaacggttttcgaaaatagtttcggtgatcataccagcaccttccgcaaccaaatttagcaagctgaactgcgcctgcatatcagtcgggaaaccggggtgcggagcagtacgtaatgtcacagctttagggcgcttaccgtgcatatcaaggcttacccaatctttaccaattgcaatatccgcacccgcctcacgcaatttagctaataccgcatccagcgtattaggctgagcatgacggcaaactaccttgccaccggatatcgccgccgcaacaagaaatgtccccgtttcaatccgatcaggtagtacacgatatacaccaccaccaagacgttctacaccttcaatggtgatatggtctgtacccgctccggtgatttttgcacccaaggtattgagaaaattagccgtatcttcgatttcaggttcacgtgctgcattctcaataactgttgtcccttctgccaacgttgccgcggtcataatcgtgactgtcgctccaacgctgactttatccatcacaatgcaagcccctttcagacgcccattaacggaagccttaacgtagccctcttccagcacaatttcagcacctaactgttccaagccactaatatgcagatcaaccgggcgggcaccaatcgcacatccccccggtaaagaaacttgcccctgaccaaaacgcgccaccaaaggacctaacgcccaaatagaggcacgcatggtttttactagctcataaggcgcacaatattgattcacatcgcgggcatctacaaatacagaaccattacgttcaactttagtcccaaggcgattcaacaatttgatagtggtatcaatatctttcaattctggaacattttgcaactcaacaggctcttcagccaacaacgcggcgaacaggattggcagtgcagcattttttgccccggaaatagtaacctcacccgacagacgagtaggccctttcacacgaaatttatccatctgtgacgactctctttatataatttgctgttcgcggcgaggcaaacaacattaaaaaccgttgagcttgcgatcccgtttccaatcatccggtgtgtaggctttaattgacaaggcatgaatacgattatcagcaatgtattccatcaaaggcgcataaacggcttgctgctgttttacccggctcatgccggcaaacatttcaccaaccacaataacctggaaatggctgccatctccgttaacgatgacttcatccagtgctaatttatccatcagcacttgtttaatctcattagtatccataattgctcaatgttctgtacccgtcatctttcaagttgcctctttgttggctgcactcactcaccccggtcacatagttctctatgctcccggggattcgctcccttgccgccgcgatgcatcttgaaatccatagggtatgtagttagaaataaataatagacagccatctatcctaatagaatcctgcttattcttaaactatgaaaacgcccttgtaacatctctgcttacaagggcgctgattatacccgttatctttcaagttgcctctttgttggctgcgctcgctcaccccggtcacatcgttatctatactcccggggattctctcccttaccgtcgcgatccatcttgaaatccataggatatatacaggtaattaatgagattatcggttagctatcaatgataatttcttgcaaatcatagagcgtaatcagggtattaagccgttcatcaatgccagaaaagcgcaatttatcccctctcatttgcatatgatgtttgaaacggactaaaagagctaacccggtagaatccacatattcaagttgtgacacattgatgtcattgatctcgaccaataatttctctttttgctgccagagaggaagcaaactattacgatctaaagtgcccttgagaatcaatgtttgccctgttttttcccagatcagactctcacccatcttattttttctcttccaatgtgattggctgacgagcgctgatttcaagctgcttagttaagccatcaataccttgctgacgcaagatagaggcccattcactctgtttagtcgtaatcatactgacgccctctgcaatcatatcgaatgcctgccattgacccgttttgctgtttttgcgccattggaaatcaagacggacaggagggcgaccattcggatcgataatagtgacacgaatagcaataacattgctgtcccctaacggcttttccgggtcaatctggtaagtttgattatgatacattgccaaagcctgcccatatgcctgctcaagataagattcaaatgcagcaaaataaatcttgcgctgctctggagtcgtatctttatagtatttccccagaaccaatgcccctgcgtatttgatatggacataaggcagtagctcctctttcaccactttacgcagataatctggattttgacgaatttgtgattggctgtttttcaaacgagtaaaagtcttttccgccgcatcctgcattaacttataaggatttgtttgatcaaccgcgctcgctaatggcgcaataaccagcagcaccaccattaataatctcttcaacataattggttcctcttaatgatattcagttgctggctagggtgtcggcgtgtgctctgccccactttggacattatcaccactcttatacaagaactggccgatgagatcctcaagtaccatcgctgatttggtatcctgtacgcggtcaccctctttcagaatacgggtgtccatatcgggatcttcaaacccgatattcagggcaatatattgttcacctaataggccagaagtacggatggaaagagaactggtatcagggatacggtcatattgcttcataatatccagtgccacttgcggcgtataagttttttcatcaagagagatacttgcaacacggccaatcaccacccccccaatttttaccggtgaacgcactttcagaccaccaatattgtcaaaagttgcgtataaacggtaagttggctggttgcctaccgatttaatgtctgccacttttaggcataaaaagacgattgcagccagtgcaatcaagacaaaaaatccaacccaaatttcacttttcttgctttgcattggcttagttcccaaacatgagtgctgtcagcacaaaatccaaacctaaaaccgctaacgacgcatgaaccaccgttctggtcgttgctcggcttatcccttccgaagtcgggatcgcgtcataaccattgaatagagcaatccaggtcacagtaatggcgaaaacgacacttttaataaaacaattaagcaaatctttctgccactcgatagcagactgcattgaagaccagaagaagccactgtcaatccccttccaatcaacaccaaccatcgcaccgccccaaatacctaccgccacaaaaatcaaggataatagcggcatactgataaacccggcccagaaacggggcgcgatcacacgccgtaatggatctaccgccatcatctccaggctggaaatttgctccgtggctttcatcaagccgatctctgcggtcagcgctgatcctgctcgaccagcaaacaacagtgccgtgaccaccggccccaattcacgcaacagagatatcgccaccatcataccaagactggcttctgcgctgtatgttgtcaggatcagatacccctgtaggccaagcaccatgccaataaacagccctgaaacgataataatcaataatgaccgaacacccacgctgtaaagctgctgtcggagtaacggccattgtctggcgggttctggcttgccaattatcgcgcggaaaagcataaaacctgcacggccaaaagaggcaaacacctcaatggcccgtcggccaagtgccgccagcgcctgtgttaacattaacatcccattatcctaataactcagttttgtaatccccagccgggaaacggaaaggtaccggcccgtcagcaataccatccaaaaattgccgtactcgcctatcaggattagagtgcaactgttgagctgtaccctcagcaataacctgttgttcagcgataatataagcgtaatctgcaatgctcagaacttccggtacatcgtgggaaaccaccacacaggtcacgccaagtgccttattcagctcatcaatcaacttcactaaaacccccatcgtaatcgggtcctgaccaacaaaaggctcatcaaacataattagttcaggatcaagtgcaatggcacgtgccaaagctgcacgcctagccataccaccggaaagttcagaaggcatcaaattagcagcaccacgtaaccctacggcctctaatttcatcattaccgtggtctgtataatttcttcaggcagattcgtatgctcacgcagcggaaaagcaacgttctcaaacacactgagatcagtgaataatgccccagattgaaacagcatgctcatcttcttgcgagcagcatacaagtgagaacgggataaagcaggaatattgtcgccatcaaaccagatctcccctcgttcaggacgtaactgaccgccaattaatcgtaatagtgtcgttttccctatcccagaaggccccataattgctgtgacttttcctctaggcacaattagattaatatcagcaaaaatcaaacggttaccacgggaaaaatacataccacggacctcgatgagatttgctgtctgttgattcattattgatagcccttaacggttaataaattggctttaatatttggttcatatattaatcatatatactacaaaaaaacgggaaaattttcgctattaatgtgatgacaaattttacttttctatccaccgccgtcagaatataccccatctaactgggcagacaatttttgtttagaaaatcaaccagcgttgacatcaattcggaatataccttacaagggacgcttcatgcttctgacctttttacttctaattaccgggttgattttactggtatatggttccgatagactagtatatggcgctgcaatttttgcccgtactctgggactgccgccatttattattggtattaccattgttggcattggaacgtctctacccgaattaatggtttcagttactgcaatgctagatagtcaacctgatatggctgtgggtaatgttattggctccaacattaccaatctgctactaataaccggtgctgctgcatttattcgcccaatggaagtaaaatcagatatcctgcggcaggaactgctgttgatgctactgctcaccgtcttctgtggttatttgatgagtgatcactatctcagccggatggatgggttggtattactcgcttccgccatagtgtatatcttactgatgataaaaatggttgctctaccgcgccgcgccgaagcggatatttatacgcaagaacaggctgccgaattaccggtcgaaggcaataaacacattgccctactttggattctattagggttacttattttacctatggcaactcgtatggttattgataatgcaactgttattgcccgcatttatggcatcagtgaattagttatcgggcttaccgtacttgcggtcggtaccagcttgccagaattagcaacctctattgccgcagcattcaaaggcgaagatgatattgcattcgggaatattataggttcgaatatattcaatatatcaattgttttgggccttcccgcattactctcaccagcagccatttcacctgaatctttccatcgtgacttttgggtaatgatggtagccagcataatatttactgcattttgtctgggtcgtaaacaccgattaaaccgatttaaaggtgtcctgttattaagctgctttatcgcttattttatcgtactgtttatttccaattacagcattgaataaacacagaatgagtaggaaaaagaaatgcctaagattgattttcagcaagcgggtaaaaaagtattacacatagaacgtgatggattaacagaacttgaacaacatataaacggagattttgaccgtacctgtgaactgatgttcaactgcgaaggtaaagtgattgtcatggggatgggcaaatccggccatatcgggtgtaaaattgctgccactttcgccagcaccggtacaccatcctttttcgttcatccgggagaagccagccacggcgacctcggcatgatcacacctaaagacattgttttagccatctcaaattcgggtgaatccagtgaaattttgtcgctgattcccgcattaaaacgccaaaaaatcccgcttatctgcatgactaacaattgcaacagtagtatgggaaaagccgccgatatccatctgtgtatcaaagtcccacaggaggcctgtccgctaggtttggctcctacaaccagtactactgcaacactggttatgggcgatgctttagcggttgcattgctccaggcacgcggctttactgctgaagatttcgcactatcacatccaggcggcactcttgggcgcaaacttctgctactggtgagtgatttgatgagtacaggcgatgatattccaaaggttaatcgtaacgccaccttacgcgaagcgctgctcgaaatcacccggcaaaaactgggtatgaccgtcatttgcgatgaaaataggtatattgatggtatttttactgacggtgacttacggcgagtatttgatatgggcgtcgatttgtacaatgtcaaaatttcagatgttatgacaacgggcggtatccgcatcaaaccgcatgcccttgcagttgatgcattgaacttaatgcagtcacaccatatcacgtccttattagttgcagaggacaataaattgcttggtgtattacatatgcatgacctgctacaagcgggtgtggtgtaaccggagaaaacgccttaatgagccaattagtttatttggacacctgttatggtccagttgataaagacgttattgaaaaagcccgtaaaatccgcttgctgatttgcgatgttgacggtgttatgtccgatggccggatctatatgggcaataacggtgaagaattaaaaacatttaatgttcgagatggttacggaattcgctgcttaattacttcaggaatcgaagtcgctattattaccggtcgtaaagcaaaattgctggaagatcgagcaaacaccttaggtattacacatctttaccaaggacaaagtgataaggttttggcgtaccaaaaattgttagatacactgggattaagaccagaacaggttgcttacatcggcgatgatctgattgactggccggtcatggaacaagtggggttatctgtcgctgtggcagatgcacatccattgctcttaccaaaagcgcattatgtcacccaaattgcaggggggcacggcgcggtaagggaactttgtgatttggtgctttttgctcagaataagctggaagaagccaaaggattatcaatatagtaggttgaagtgaaacgagaatggatagaatcaaatcctggttggtgataactctggtattaatcatcctggcgttaattggctggaacttgtctgattcagatgagattaaatcatcttctgccacagataacagtcagccaacctatcaaagtcaggaagctataacttttgtttatgaccctacggggaaactgacgtataaactggtcgctgatgacgtccaaaactatgcagagtcaaaacttacttggtttactaaaccggtattaattacttatgactcaaatgccattgctacatggacagttcgtgctaacaaagccaaactaactaatgacaaaatgctctatctttacggagacgtacaggttgacagtctaactaatacgtcacaattacaacgtattactacagagaacgctatcatcaacctgaccactcaggatgtttcatctgacgatcaggtcacactgattggtgtcgggctaaaatccgtcggtatgaaaatgcgtggcaacctgagaaacaaaaccgctgaactgattgaaaaggttaacacctactatgaaatccaacatgaaaaacagaatccgtaatgcttttattgccagtgctatctttgtagtcagtcttcccgctatggcactgaaagatgacacacagaaacccatttctatcgattctgctaaacaagcccttgacatgacagggaacactgccacatttacagaagatgtgatcgtcaaacagggttctatcgatatccgcgctgacaaagttgttgtgactcgcccagatggcgattctaagaaaatggttattgaagcatttggcaatccggtaaccttctatcaattacaggacaatggcaaaccaatcaagggccgcggtgccaaaatgcgttacgaaatggataaagagctggttacactcactggcaatgcctatttagaacagttagacagcaatataaaaggcgaccgtatcacctatctagtcccaactcagcagatggaagcgtttagtgacaaaggtaaacgagtgaccaccgtcctactaccttctcaattacaagaagaaggcccaggggctaacaacaagagtaaataacgatatatggcaatactaaacgcagaaaacctggcaaaagcttacaaaggccgtaaggtcgttgaaaatgtcagcctaaacgtgaactccggcgaaattgtcggcctgcttggtccgaacggtgcagggaaaacgacgactttctatatggtcgtcggtatcgtttcacgggataccgggacaattaccattgataatgaagatattagcctactgccacttcacgaacgggcacgccgtggtattggttatttgcctcaggaagcttctattttccgccggctaagcgtattcgacaacctgatggctgtattggagatccgccaggatctgactcaagaacagcggaaagaacgtgccgaagagctgatggaagagttccatatcagccacctacgtgacaatcttggtcaatcactttccggaggtgaacgtcgccgcgtagagattgccagagcgctggcagctaatccgaaatttattttgctggatgagcctttcgccggcgtagatcctatctcagtcatcgatatcaagaaaatcattcagcatttgagagattatggactaggggtccttatcacagaccacaatgtccgtgaaacattggatgtatgcgaacgtgcttatattgtcagccaagggcatctgattgctcacggcacacctaatgatattcttaataatgaacaggtgaagcgcgtttatttaggcgaaggtttccggctctaattcggccaggagaattgatttaacgctatgaagcaaagtttgcaactcaggcttagtcagcaactggctatgacaccacagctccaacaagctattcgtttgttgcaactttctacgcttgaactccaacaggaaatacaacaagcgttagaaatgaatcctttgcttgaacaggatgaagaacatcaggaaattggcaatcaggaacttcccgataacgaaacggaagctatggatacgcttgatgccttgcaacaaaaggatatgccagatgagttacccctggatgtcagttgggatgaaatttacaccgctggcacaccttccgggacacgcaatgactataacgacgacggcgaactgccactttaccaaggtgaaaccgttcaaaccctgcaagactatttgatgtggcaggcaaagttgacccctttcacggaaatagatgcggcgattgcgacatcaatcattgatgccgtagatgacactggctatctcactgtaccactagaagatatccttgccagcctcggcgacaaccaactcactctggcagaagtggaaactgtgctcaagcagatacagcatttcgatcctatcggtgtcgccgctcgtgatctaaaagattgtctactcgtccagctatcaatgtttccgccagaaacaccttacctgaaagaggcaaaactgatcgtttgcaaccatttggagctattaggtcattgggatttccgcaatttaatccgtctgagccacttgacagaagatactctgaaagaggccataagtttaatccagtcacttgcaccaaagcctggcctggcaataaacactggcgaatcagaatatgtcatccccgatgtactggttcgaaaagaaagtgaacactggcaagtagaattgaatacagatagtatcccccgtttacacattaatcagcattatgcagagcttgggcaacatacgcgcaatgaaagtgacagtcagtttatccgcaataacctacaagaggccaagtggcttatcaaaagcctggaaagccgaaatgatactctgctgaaagttgcgcgttgtattgtagaacagcaacaggaattttttgaacatggtgaagaatatatgaaaccgatggtcttggcagacattgctttccaggttgatatgcatgaatccaccatttccagggtgactacccagaaattcctgcacagcccacgtggtatttttgaattgaagtattttttctccagccatgtcaatacagaaagtggaggcgaagcctcttcaactgcaatacgggctttggtgaaaaaactggtagcagcggagaactccgccaaaccattaagtgacagcaaactgacgagcatgctagccgatcaaggcatcatggttgcccgacgaactgtcgcaaaatatcgagagtcgttatccattccgccatcaaaccaacgtaggcgtctggtttgaaatgaacagagaaggaagacaatatgcaactcaaaataaccggccacaatattgaaattactgatgcattacgcgacattatcactgcaaaatgcagcaaactggatcaatatttcgacaggatcaacctgactcaggtaatcctccgagtggaaaaggtacaacaaatcgccgaagctactgtacacattaacggaggtgagttgcacgcatcatcagaacatgaagatatgtatgcagcaattgatggactggtcgataaactggcgcgtcaattaaccaagcataaagacaaactgaaacatcattaacagttatttaacaaaaaatgtagtaacaacagcagagtattgctgtaaaacagtgcgcaaatacaggatgccacagataacctatggcatcctgtatcaataagcacctaagtgaataggaaaatgaataatcaagcagatttactactaagttcggtgctttccctcgcatgtacgcgcaataatgtacattgttcgagcaaaaaacgggctttagagattatcagtgagctagcatctcagcagcttaagttaccagaaaatgtcgtattcgaagcaatattgacccgagaaaaagtaggtactactggaattggcagtggtattgccatcccccacggtaagttagatgaagaaagctcagatcaagcggttggcgttttcctaaatctggaacaacctattgctttcgatgccattgataatcaaccagtcgatttgctgtttgctttactggttccaaacgatcaatgccaaacacacctacacacattgtcattgattgccaaacgtcttgcagataaaaatctctgccgtcgtttaagatcggcacaaagtgatgaagaactatacacaattatcactgaataactgttgcaatgcatggatagcaatagaagcaatagataagagtggctcataataaccactaaaaaattaaggggagttgcctcatggtgctgatgatagtcagtggccgttccggttcaggtaaatccgttgccttacgcgcactggaagatatgggtttttattgtgtagacaacttgccggtagtattactaccggaattagcaaatacgctagctgaccgcgatatttctgctgcggttagtattgatgtaagaaacatgccggaatcacctgaagttttcgaagaagctctgactaaactaccagcgagtttctcaccgcaattattattcctcgatgctgaacgtaatacattgatccgccgttatagcgacactcgccgtctgcatccgctatcaagcaaaaatctttctctggaaagcgcgattgatcaagaaagtgatctgctggaaccccttcgttcaagagctgacctgattatcgacacttccgaaatgtcagtccatgaattggctgagatgctaagaacgcgtctgctcggcaaacgggaacgtgagttgacaatggtctttgagtctttcggcttcaagcatggcattccaattgatgccgactatgtttttgacgtacgtttcctgccaaacccacactgggaccccaaattacggccaatgaccggtcttgatcgtcctgtagccgctttcctcgaccgtcatacggaagtgcataacttcatctatcaaacccgcagttatcttgaactctggctacccatgcttgaaaccaataaccgcagctatctgaccgttgctattggctgtaccggcggtaaacaccgttctgtttatgtggcagaacagttggccgattattttcgttccagaggaaaaaacgtacagtcgcgccaccgtactctcgaaaagcgaaaataatgactgtcaagcagagacttgaaatcaaaaatcggctgggaatgcacgcccggccagcaatgaagctgtatgatctagtacagctctttgaatctcatgtcattttacgcaatgatagccatgttgaagccgaggccagcagcgtaattgctatgctaatgctggattcagaaaaaggcagctatattgaagttgaagccagtggcccagatgaagagcaagctctcgcagctattattgatctatttaattcgggatttgacgaagaataacgttgctcactcacctgaggattatcatgtccttcactgttttcattagcagcacaaaacagttcgtgatcatgatctctttattttccagtaagaacagcctactatcaggttaatcattttaaataacacccccctcctcatggtgcggggtgttattttgtattggaatccatttggagtgtggtatgactaaaccagcaattatcatcaacgaattagacgcagaacgtttagattccctgttggaacagccagcgtttgcagatactagtatcgctgacgctttgaatgaggagctggatcgtgcagagattgtaccgccagcagaaattccatcagatgttgtgacgatgaacagccgggttcgttttattgatctgacaagcaatgaagaacgggtacgtactttagtttatccagcgtcactgcaagacagttcagatcagctttctgttatggctcctttaggcgctgcattattgggccttcgtatcggtgacgaaatcagttgggaattaccaaacggcgaagaaacccgcgtcaaagtattagaattactttaccaaccagaagctgccggtgaatatcacagataaaaccctattaaatcaatacaaaaaaccactatcgcacaagtggttttttgtctttgataaccaaatagcgacaaaatggcgacaggaattttatatcttcaattacttttcaactaaccactatacattatgaggtaattataatgttcgaaaataataacaatctgtcaattcttaaagaaataagagacacttaaatattcattggctctgatatagatgaatcaatatcttcaaggaggttggataatactttctgctacaagtggtacaaatccagataactatcctattcactcagttttattaggtttcattccttaacaactaatttcagctctatgtgttcagtaaggccgcgtcctacttgaattcttaaaatcagcgcggcttctggtcatgatcctatctcccacgtaaaatagaatttttcctttaatatcattatattgatatttttcccgtgatcctcttttgatccgaaaactgaaatttcctgaaaatcttttcaatcatttcagtttgtgattcctctcacttctccggtgctggcacggtttggcagcttgccttgtaggattttaaaactgaaaaaattttttgatccaaagcatgcaggcgggtgcggtgtagtgccgttttcgccataagttcatttatttcgtcataagcgcagcgagacaaaccgccaccagggtgtttatttgattcttgccaccatcaaagagggaagcaggaatatgaaaaaagactggcataccgccgatattatcgctgcgatacgtaagaagaataaaacgctggcatcattatccagagagcacggtttaagctcttcaacattagcaaatgctttaacgcgcccctagcctaaaggggaattactgattgctcaggaaattggtgtcacccctgctgaaatatggcccagtcggtacttcgacgaaaataagcagcctatcaaacgaaccgtccgaaatgatttaccaaacaattctgatatcacataagttatttctatatccaaaaaagtaacgacaacttttaaaccactaagctaatataacacgctgaattatcatttttttattacacttactgcccattctttaatatcagaattgtattcaagctctatgaaagtataaaaaagcccgcatgttgcgggcgagataattgtatttcagaccatcagaacacgaacccgtagcgctgattgataccacatttaaaaaggcgtcctagcgttattatgtgtatgactcgcggtaaactatactaatctgttgtctatttccccatactaccggaacaataatcgcttgaacacaggttaaagtccaatagggattaccaaatttgagcttttagatcagtatctaagcccacttaaacaaaagtggcttacttgatcaaaggcggtaaatgttaaaggccaccgggaggttaccccgatggccttagctacgtttccgttatctatttcagaaatgcacggatcagctctaaaagcgcgattaacgctttgagaacgatgatagcagtgtcaataaatgctttcacccgcttgctcccgttaggagcacgacttaaccagccattgcctttacgctgcctgtccggctggccctcatctgtgttagcaggagaatatcgcgctctgaccgaggcactgaatcagcaccacctgtactcagccaggacttaagaaaacttgcgtcaaagatacacaggccagaacgctaccccaaactaacagccgttgattataggtttattttcaaatgattcaatcaattaaaatgatgagtagataaaaataaaaaaccaactggtgaggttggttttttattttaacccttggatagggcagtttgtctttgtgctatacgagattggtagcctcggttctagcgcgacattctcctgctaacataatcagtctacaccttaaaaaaggtgttatcaacctatgtcatagcgtaaaaaagctcatacaaatggaatgatattcacccaatcacaggcgaatacttctgtttcagcccatccgatttatagcccgtgttccttatcgcgctggcgttctccggtgcacctgtgttgtggtgcgtatgggcggcagtctgttccgccagtgctttaaccacatccaacgtctctaacatcaaggtcatgacattgatttgctggctgcccacccaaaccacgggcgcgatgatttcttgcctggcaccggcgatactctgcttaagcagacccatcttctctatcagcttttgtccgatttcgatactggcctctttccctacgctggcaacgaaatttgatgaggtcgccatactatagtcaccgtctgcaatttgccggacagcgcccgccaatagcgtagacgtgcccaaaaccgtggttttatccgtggcctgtatcgtggtttcccgtgcgactacgttacgtgtttccgtgtctgccctgacttcacggtgcatagacgattcattaatggtctggtcagtctgacgaatccagtttccttcctgagttaccctctgagaaacttccgcccgctgttgctgcaattgttcgcctggcttgatatcgggcaaggtattgccctggcttaatgtctgccggataaagggcttatccggtctgcctgcctcaaaggcgatttcaaccaccgttccgactggcggatattgaaacataccggattcactgcccgccatcggcaaaggcagcgggacagcatgataaacaggaaccgcggcatcctgaccatcatcagccaataattgcacatcaaccgcatagcgtggccggaatgagtcggagatatcgccgctgaccgtattttcagggtgtgcctcaatgcgggcaaatttgggtaaatgcagccctgccgataattcggggtaggcggcatcaatctgacgctgcattggcgttttggtctgcgactgaccggtcagtttgttgacggcttcccatgtaatgaccatgttttcattgttcagattgaccttgttcagccggtactgattgatcactacacctggacgcaacgatgggatcatgggaatggtcatcgcattgcctgcggactggcactggctaaatgcattggggatctctaccggtttccccgcaaacatcgaatgcgccccgctgcccacataaaccgaaccctccggcaactgatgccagagataatcctcaatcgaaaaaacctgcccaagattagccagcaactgatagccggtcccatgatgagtaaaatgcgggatgggtgtctccgtataaggggcatccggcaatatgaaggtcagtccgctgtgctcctgcaaccagtccgcaatctggctcagtgttggatgctgaaatgaacacgaccataatcggtcaaacacaccaaccagttcacgcacaaaaagacgctgataaccgttttgggctggctgtgagcgtgccacataacccgtaaaccagcgtaataccaaatccgtgtaacccacgtccagccgcaccagttttccggtgtagtccgttgtcgtctccgccgtgataaagccacgaccacaggatgccagctccagcataatattggcgtcaaccaggtgaatttcatcaccggaaagatagagccggttaatcggtgtcattatttagccggtcctattgtgtcattaatcggtttcaatactttgctttcaaaccagcttaatttttccggcgcttcttttgcggcggcggccccctgacctgtttgctttctggcctgaatattatcggcagcacgggcatcacgtttctcagcaacagataaatgttcacgtaaagtaaatgtgacctgccatgcctgtttaccgtcgatcttactggcatcaatggtatgggtgaatgtcccgatgcgaaagttgatagcacctgcggtcaggttagcgacacgataacgtttcagacttcccttatctttggcctccgccagtgcaaacaggcgtgacagcgttttttgctcagtaaacggaatgatccccgtaacacgtaactccttgggcttaataccttgctccgctacggcggtactggatgactggccgctttggtctgtgtcctgaaataccaccgatggggttacggtcagactttttaatgggatggcctcgccatcaagggccagtgtgataatttggctcattgtgtagcatcctttctaatgcgcgaatatcgtccccggcaaataatgtcgccagcgtgtaaacggcgtcctgttcagggatatcctgacgcagtttttcggccagtaatgcgccattccctttccctgagaatgcccagacacaggccgatttgttcctgacgccattcagagcggcagtcacttgttgtaaggcgttctgtcttaccgtcgtgaagtttgttaattgtgatttcaatcccgcaatgctgctgccggcgctaacctgtgtttcagcctgtgcaatcaatcgcgcattcacggccatgcggctggttgatgttgaaaacggttgaaatggaggcaaaccgctgtccggtttcccaggcaattgcattttggtgatcgccagacgttccgctgtctttgccatacgagtgacctgagaaaataccgacaacggcaacaccgccgaaaatggggttaaatgctggataaattcattatgcgtcttcgcgcagatcatgagtaccacggcgctcatgtttcccgttccccggattttatttgccagataattgatggcgtttgccggactcaggtagtgaccgctgtctgctttctgaccgataccgtatacgaacggatggacgggtagcatcgagcaatgcatccccgtcatattcggggagatgcgcatcaatttccgttgccaattcatcacgcgggttgctcaggccagttgatatcgggggcagtagaaaggtccactctgttcacccgcacacgatattttttccattccacgagtgctgatttttcggcatccgtggcgatatccagatcaatggcatcctgtaagggtttaattgctgcatctgcctgctgctgtcgcgcgatattttgctgttcagcctgttcagtttgatgagattttagggctgatttatctgtgacccattgcttactctcccacttatcaaagggggtttggggtgattgcagggtaagattatctggcaacgcgccgatggcggtaatattgatcggctggcctgtatcggttacatacgccgttttaccccgatagtcaggcacatgtcgccaggattttttatgctacgacaaatcgcaacatcatgcgtgtcaggtaattcaggcgcatccagatacgcattagccgcaacagaaaaaccgcggggcacgctatccatatcggccccaatatattcccgtgtttcaggatgacaacgataaaccgcaacccatccgctaacaatagctaacccatcctcatcaaaccgggccatttgaatatttgcactatatttagacattattttaccctcgtaatataaatcactgatttgttaacaggccggttttcatttgcggtcggcaccactctggatgcgtcaaatgtccatgcaatcaccccaccaccggcaccggctgcccgaccgcctgccttatactggtagctgaatgcaccagacgcgttgctcccgctctcaatagtgggcttacctaatgatcccgtgatatttctgatcgcgtccccctgaacactccctagcgaacgacccgagtccagcccccgccctctatctaaaccacgcttaaacagccccctgtcatcgggtaatttcagatcgggaaaaattttggcgagttcagggtaatctgccgcacggaatgcgcgtccctcattgggttcatatccggcgggtatcggcgcagtcgaatgccattcgatagtggcgccaatcgggacaccaaccgtaatcttttgctctacggcaccgttagcattgagaaatctggtgtgcaactgtgcatcggcatcaatccaaatttgccccgtgtcaccccctacaccgatactcacccctttggcccatccattttcccgaccacaagaaaatggcccagaataatgtctgccgggtagctcagtcatataggtagtctggtgataggcaccaacatcactcgccatcaaactgatatcagacgatagcgatttcccgttaattctcctgtcattcggtacagcattcattgcctgttcgacggtttccactaagccgatgtttttgacaaattcatttttattgggaatatctgcgccgttctggtttttagccaggcgactatcggcgttttccctgacaacggttaatgccgcattaacagcataatcccctttcggctgtttcccatgcaggccgctttccaatgcctgctgagtcacatattcccgtttcacgctatcaatctcttgatgaatagcggaaatattacggtcattcaatgaccctttaatacgcaaatccatcacatcaccgtgaccatcaacccccgcaaccgcaaagacataatgcggataccctgccgcatcgatgtagtttttaagatcattgacggcgacgatatgaacgacggttttccactgattcaccaaattgccttgatagctaaaatccgcataaacgcgggtatcgcgcaggcggttaagtgtttggtcaaacgccagctcaccccgcaacccgccgatataagccagcccctttttgatcgtgtaccggtcatcacgacgaaccacggaaaacccatcaccgaaaaaagccgcctcaccgtaactgtcggtattcatcagacgctgcatttcatcgatgccagataaacgggcggtaaaatcaatctgccaggtttccgccgtggtcataatagcggcctctttggctgccccttcaaactccagtaaaaaagagcgcgtcagcacatttccctgtaatccgttcgcggtcttaatttttttctgagctggggcatgggtaatcatgccaataatgccagaagccttatttatcaggccaatccagttaaaatcaaaatgaccgacttccgttcccaatgtgacactgtaggctaccgcgttttcactcgctaaccctgttttgttcacagcctgacgatgcacaatatgactttctgcgggtaatgtctcatcgcgattgatggcaagagtgggatctaaatccggcacataagcaaaaacaaactcatccaacaccacgggctttcccgccgcggcctgctgtgctttccatttttcaaagtctactgtaatcactgacgccatattatttccttataatgatgcaccgtaggtcatattaggtacggtaatcgcctttaaactggcgctatcaaaaacggactcacccgacatgtaacccacttttaatagcaaaggcggcgaggacatggccgcgtaataacagcaatattccgcgcccaaactgcccacacgcataaacagtttattattcgccatcacttcaaaacggtagcggcggcaagtgcggccatactgacgaatgatgctcatcagcaaatcagggttttcagcgacttgtccgtcactgacgcgcaaaataatcacatcccaatctatcgccggttgtcgttccaatacttcaacatggccgacacctaaacgttcaaagatagcgataaatcccgcgacactgcccgcctctctggcattaataaacgcgtatttcacccgtttacgaaataatgtcagcggttcaccgttaaagcgctggatatcccgctgataggccaacatcggcagtaattccgccgaacaagtttccgcgtccaattgggctaacggccatgtcagccagcggtaaatcattaactagaactcacgcacggcccaaagcagtttggcgggttctcccttatccatccatgacggcaaggccagccgcttgagtcgttccctgaactcagacatgcttcacctcaattatcagtgattgcagcctgggcacacttaaatcactcaaaatgtcacccaatgaaaaagtcagtgattcaatctcggcaaattcacggtgtatttctcgccccaggttggaaaaggaaaatcgggcatacggccaggtttttttcacgtgatattccctattttcccgaaaggcgcagcggatcaggttttcaacatccgtttttaatgttgttacctgttcctggctgtagttcgccaaatttgccacaaacagcgtgaccaataattcatggtgcgtttcgggcatcggcagacactgcatatcatccccatgcccatgatgcccctgatgggtgatgtaatcgttcaccgcctcaataaagggctggctgataaccccagaatccagcaacaaataggcgtttgctgttccggtgccatcctcttaatcccacaatactgtatatttatacagtatatataaatataattaacaagtgaagtaattatgttatgaaatagtgtgttatgtgacttctatcatttctgattccattttcttcaacatgttcagataatggccttttgggtcacgaataatttcattagtatcaatcttgatacccaatttttcacttaacctactcattatcatttttgttgtttcagtatgcgtttttttaactttatgtagatgaccgaacatagataaacaataacgctgtccatctatggtcatactccccccctccagtaacgaacgtgccagcacatcactcatcgccaaactctgtaattttgccgattcatgaactcgctgtattttttccttctcactcatttgatgccaaccgtaatagaattcatctaaatacagatcacttccttgactaaccgtatttcgtgcttccgtacagttattgataattcattgataaatatgtatttaattgattttcttatggtattcacaggattagaattactttaccaaccagaagctgccggcgagctccaccgttaattcagccagcccatttgatccgggctgactaaagtcatcggaaacgagtatctcttattgaccagcgatactcatttccggcagtaagactgaaccacactggatattactccgcgtttcaatatcattcccaatagtgaccatattggcccacatatcctttagattgcctgcaatagtaatctcgctgacaggatactgaatctcaccattttctacccaaaaaccagcggcaccacgggaatagtcgccggttactgcactgactccctgccccatcagttcagtgactactaacccagttcccatctgacgcagtaaacctgcaaaatcttgaccttgccctgcaatgcaccagttatgaatccctcctgcatggccggtgcttgccattcctagcttacgggcagaataactcgtcagaagccaagtctgtaatataccatccttgataatatcccggttgcaggtagaaacaccttcactatcaaatggggaagatgccagccccgccagcaagtgtggccgctcttcaattgtcagccatgatggcaggatttgtttgcccaaatgatcaagcaggaaagaggatttccggtaaatactgctaccactgatagcaccaaccaaatgaccaaaaaggcccgttgcaacctccgcagcaaacaacaccggtgctttcatagtcggtaatttacgtggcgacaaacgagataatgcacgacgagcacactcctgcccaacccattctggcgattttaaatcttcaaaacggcgattaatggtatacgcatagtcacgctccatatcgccatcaagttcagcaatcacacaactcgacattgaatgacggctggagcaataactttgcaacataccatggctgttaccaaacactctgataccataatggctgttaaaactaccaccttcagtattggtaatacgcttatcggcctgtaatgcagtttgttccgcacgagcagccagttcaattgctttatcagcatccaactctgttggatggaacaaattaagatctggcgcttcaaatgccagtagcgctttatctgccgggccagcacatgggtcctgagaggtataacgagcgatatcaaccgcagcctgaacagtgcgagcaatagcatccgggcttaaatctgttgatgatgcactacctttacgttgctgatggtatacggtaatccccaacgcaccatcactgttgaattctacattttctatttcaccaaagcgggtgctgacactaatacccgttgttttattaaccgcaacctccgcagcatcacaacccgcttttgccagctctagtgcctgtgaaactgcattttccagttgtttgcgttgttccgcaatttgatccgtgattttcattacttacccgtaatttgatgaataaagggaaaatctgtcgggaaaacaggacctttttatccacacagccaatgccgagtggtaatccggcgtttttcccagttacaatacacaatattaggatgttaacacccaccgggctacaggtcatgcaccaaaaatcaacctgccagctccggcctttttaaaaggaaaaccactatggcgaagcagcctgaagattggctcaatgattatcctgctgaagaggaagaagaagagataatctgggtcagtaaaagcgaaattaaacgtgatgccgaagcattgaaaaagctgggtacagaattggttgagctcagcaaaagtgcgcttgaacgcgttccgttagatgaagatctgctggccgccattgaacttgcacagaagataaaaagagaggggcgccgtcgccaattacaatttattggcaaactgctgcgtacccgggatgtcgagccaattaccattgcgcttgataaactgaaaaatcgccataatcagcaaatcactctgctccataaactggaagaattacgtgataaattgattgatggcaatgacgatgttattgatgaggttgtggcgttattcccacaaaccgatcgccagcaattgcgtactttgatccgcaacgccaaaaaagaaaaggcggcaaataagccacctaaatcttatcgtcagattttccagtatcttaaagatatggctgaatccgcttaacgacctaaaacccggaaggttctaatttctgttaggggaaaatattaaaactaagttccccttccagttcttcttctgcttcttcaaacaaaagcactaacgaggagaaatcacgttctttctgctgcgtaaaatggatgaaattgacctctacaggtaactcaattccgcctgtcacaacatcccacagagcatccaaattactaccaaactcgtctcctaactcaaattgttcagaaaactgctgatagaacattttcagatcagggatacggtcaaaatcaaactccactttatgcatagaattactccattaaggtaaaacttctgtaatgatccaacgtcagataaatcagaccatcagatgaataaagcaatctgtcactccctcggtgcccacaacggtagttaacatctgcttcaaaccactgacgtttcggtttcattggtagctttttttcacgattagtaaatttgtcaccaccaattgctctacccggcagaacttgacataaatttccctgttttgcattccagccaagatcgcgggcctgcttcttagtaatataaatatcgggcaatttattattctgtcgtaagtaagccaccacattattctgttcagttagcccttcaatccgttgtattgctgaggtactcctacctgtttctggctcctgcaacagtgtcttatcaacacctttagcaaaagtaccacaagtcacagccaaaacagtcagtaacacacctgctagccaagtcttcttcatgactatccttataatgatctatctcagataaacagccaaaaatcaggctgttcctccaacggtcaagttgtccagtttcaaagtaggctgaccaacaccaacaggtacgctctggccctctttgccacaaaccccgacacctttatctagatcaagatcgtttcctaccatagagatctgctgcatcgcctcaataccggaaccgataagagttgcacctttcactggtttggtaattttaccgttctcaatcagataagcctccgatgtcgagaacacgaatttaccggaagtgatatccacttgaccaccaccaaaatttggcgcatataaaccattttctacactacttatgatctcttctggcgtggaatgacccgccagcaaataggtattagtcatacgaggcattggcaaatgggcataagattcacggcgaccattgccagtcggcgcgacccccatcagacgtgcattcattttgtcctgcatgtaacctttcagaatgccattttcaatcaatacattgtattgtccaggaacgccttcatcatcaattgccaatgacccacggcgaccttttatcgtggcatcatcaaccacagtacagagttctgacgcgaccttctcaccaatctgaccagaaaacaccgaagtaccacggcggttaaaatcaccttccagcccatgaccaacagcttcatgcagcaatactcccggccaaccagcccctagaacaaccggcatagtaccagcaggtgcagcaacagcggaaagattcaccagtgccatacgaacagcttcacgggcaaattgttctgcacggatctgaccactagccacttccagaaaatattcataaccgtaacggccaccaccaccgctggtgccgtgttcacgtttgccgttatcttccaccagtaccgtgacagataagcgaacgagaggacgaatatcagcagccaaggtcccatcggttgccgcaaccaacacccgttcatagatccctgtcaggctagcattgacttcctgtactctcggatcttcagcacgagccacctgatccacacgctgcaataatgcgatcttttcttcacgggaaaaactttgcagcggatcaattgctgcataaagctgagaataggtcacttcgccaaaggtatgaactttaccattcccattttcatggacgatgctacgggcagcctgtgcactttgttgcagcgcattcaacgtgatctggtctgcataagcaaaacccgttttttcaccactgattgccctaacgccaaccccctgatcaatattataggaaccatccttaataatccgatcttccaacacccaagattcatggtaactggactgaaaatagagatcggcataatccagtcgacgttcagccagttgaccgagtactgaaaacagatcttgatggcttaatttatttgcagccagtaagtgttcactgacagaagttaaactcataattgctactctttaatttgcggtattttttcaatcaaggaagtcaactgcggccggaagcggttatgtttcaccactttcatctgctcacgcataatcttcaagctatctgccctgacattcagttgtagtgcactgactgcatcgggatttttcttaatcactttcccccagccatccactgccattgagtgaccccacgtctgacgggttccatgtacaccaacctgagccggcgctaacagaatacactggttctcaatagcgcgagctcgtaacagtggctcccagtgtgcttttcctgttaagcgggtaaatgccgcaggaacagatatcaactcagcgccttgctcacgtagcgcctgaaataaccctgggaagcgcagatcataacatatggtcattccgagacgaccaacaggtgtatctacaacggtaatatgttccccacgctggaaaacagatgattcattatatgatccatgttcatcattaatattgacatcaaacatatggattttgtcgtaacgggcgcaaatcttaccctgatcatcaaacaacagactactactggtaagtcgttcaggattttcacgactgataagcggcatagaaccgattaataaccaaacaccataacggcgagcaatctcactgacagcttgctgcaaaggcccatgcccctgctgttctgcatgcctacgatagctatcagcattagcaaacaacaatgcattttccggggtcatgacaaacttgatagtatccggcaactgcttaatttgttgttcaatttgcgccaaattatgtttgatattctcaccgctacataactgcaagagtgcaacattaacgtttctcatgttcctctattctccttaagctgacgcagaacttcatcaattttcggttgttcaagattaccagtaatccggtaacgaataacggatatcttattccataacggccccaaaaccttggtcgctgcgaataatgcagcacctgccatcggattgatgacaaaagccgtcgctactcccacagtagcagaaatctccggcgtgacgatggcttctatattgatctgttggcgaacaagatcgatctcacctttcgttattacatccgcaatcaacccatcgactcgtaaattttcagtcttgagtatcccattttttactgaaacatcaccacgaattgaatcaaattcaaaatcctggctaaaggtatcgctgaaatcgagctgtaatttacgtaacaaagcatcaaaactgactaattttagtaattggctagcacttcccccacccaatttttcaatagcacctttgcctaagtcactcttaagattgccattcagcgtctgaaaattgggtttccacggtgtatcccaccaattaaaatcaaaaccgaaggtaaacggtgaattaacaatcggtacaactataccaaggtaagatgccatctcatcaaacttttcaccagaaaattgccccataatacgagtattattccctacagccccttcttgccaacgacctgccaaagttaatttactgacactgttttctactattccatctcttaataccagcgaattaccttctggaatcagggagccagacaccttcccaagtttcaatcccataatccaacattcagaacagatgatgtctaatgaaggccattggttcaacgaataacgcagagttgtgcctgtctgagattgcttaggtaaatccgattcagcttgctgagagctatgttgcagaggactatagtacagatggctcaaattcatttgccaagagccactattacggatattaagtttaccgttgatttcccgactattagccgtgatctgcgttccccaaagctgtttttccacatccaacgataactgattccaacgttgtccccccgcatccaatgatggaagtgatatatgcagatgctgtggcaacattgacatacctgccaatgaagaaccagaagtcagaggcgcaatcaaccctaaccactcttccccctcaactgccggaagattcaattccaatagggatttttcaggcaattcaggaattttatcgctgccttgtaaaattccacgtgacagttgagtgcttttccctgccagacgccattgagtattaaatgcatactgtttatccaaagtgccttttacttgcaactgctccatatcaccatcagccagaatatgaagagcacgcggttcatccgctttcaggacagataaataactatccacttgtgataaatcaacgtcgattttcatatcatattgaggcttgccctgaaacggcaaactgacaccgaccttcccttcccaatcaacagagccagaaaacgctttagcaatcgctggtgaaaatttagataattttgccacagcccaacgcgcattcagaccaacatcgactcggtagtttttgggtaaacttttagtagaaaaatcaactgtaacaggctgcccaagccattgggccgataattttccgctttgtaaattaccattatcaaagcgaaaccggccactcacatttttcatttcgctatctagaggcttaatcaacaagtgattattttttaaagtcacctcgccacgggcatccacattgccaccattgagtggaatatccaaatgcaaattacccgcaatctgaccaccaacctgcaatatatccagcgtttcaccaacagaatttgctaacgggctacgggtaaaatattcatgaatatctttgccatctcccaaaagatcagcgtcgattaataatttcttgctacgataattaggaattactgctgaaagattactcgctttcacttcaccaagtgccgtttgcggagcaaacatccatagaccgttattctggaaattaagatcaatattgaaatccagcagtgccggccagtttggttggtactgaaaagtcgcatgacgcaatggagcaaaaacttgaaactggccattattctttgcaaatgggaaatcttttggattgccttgaaaaacaaaagtcgcgttttctatctgccctttaataattgaagctgttagatagtcagtcagtggtgtccccatcaaaggttctggaaaatatctccaggcatcacctgcgtcataaacccgtactcccgccagaatacttagcgccggaggctgttctttaggctgttgataacgaaaatcaccattgacccacaatgatttcgcctgcaaatccaatccttgactccaaagttgtaaacctcgcctaccttgccgccagagtatttcgccatgactttgggatatctcaaacggtgccagaaacatatctcgataatcaacgacactattcttcaatgtaaaactcagtttgccttgccgcaagctgccattaaaagcaccagaaaaattatcaatagaaggcaattcctgccaacgctgccaactgacattctgccattgcatactgattcgggaatcatctgccattttaggtgtaatatcgagggcaagatactttaccaatccttgtggctgacgatgctgccaatccttcacaatatcaggggtcaaaaaagaaaaagtcggtaaaatgctacttagccgttcaagttgaatgttttttgcccggacacgccaatgatcatgaccatcaactctcttggcttccggcaaatagagcacagatacttttcctgacggccattgctgaccatcagtgattaaatttgccaattcaggtgcatcaaacaaccaaccaccatcttggcgacgcatccgtaacaccagatcactgacagaaaggttgtgggatttgttagcaactttccaattagcttttccctgacggagttgcagttgaccaccatcaatccgaccatctttcagcataatccaactagacaaactaaactcagcatccttcagcccagtattatcctgcaaccaatggcttaaccacggatgaacatcaacattatctgcctgtaaataaatagtaccgttatccaatacgccattagtgtcatgcaaatcaaatttaacttgtatatccccatgctgattattgatcgaagagaggctaattttcccttgagctcggtgacgattatctttattcagccaggttaattgtggtaatagaagatcagcccgttcaccagaaggagtaaggaaagtaaaacggctatcttgcagattaaaatgatcaaactgctccagaaacagatcagaaaatagatccgattgggaaaacatattaccgttttgatcattaaacagcggttgatagtaatctacttgtaactgataaaaagtaagatcgcggaaattccaacgcattcttagtaaagataaccagatatccaatgcaaccgtgatctttttggctttcacatctgcatttgcggtttttacactgatatcacgtaattcaaaaacaggcccgaaagattcccattctcccgcaatatatccagcatcaataggtacaccaataattgactcaattttagcgaataattgtgggcggtaatcattaatatgtggcaggataaaacgtaatccactaacaagcaaagccacaatgataatgactattgcggctgtcgctaataatactcccggcagtcgcctcacacgcatctccttggttaccaatgctgttatgtcagcaaatcagatggttacatcataactacgtcaaattgttcctgactgtagagctgttctgtctgaacttttacctgcttaccgacaaaaatctccacttccgccagtgcatgagattcctcccctttcagcgcttcggacactgcgggtgaggcataaataaggaaacgatctgcgtcaacggcccggtgcacacgcacgatttcacgcataatctcataacagacagtttcaacagatttcacggttccccttcctttacaagtagggcaatcgccgcaaagtatatgctcgatactttcacgagtccgcttacgagtcatttccaccagtccgagttgtgaaaaaccattaatcgtggttttaacacgatctttactcagcacctgctcaagagaagccaatacccgtcggcggtgttcctcgctattcatatcgataaaatcgataataataataccccctagattacgcagccttaattgtctggcaatagcttgcgtcgcttcaatattggtattaaaaatagtttcttccaaattgcgatggccgacaaatgcaccagtattaatatcaattgtggtcatcgcttcagtttggtcaataatcaaataaccacctgattttaattcaactttgcgatcgagtgctcgctgaatttcattttctacatcaaacagatcgaaaataggctgattaccgttataaagttccaatctggctgtcattttaggaatatattcgcgaataaattcctgtaactgagtaaaggtcaaacgagaatccacacgaatacgatcaagggctgctccagcgaaatcacgcaaaatacgatgagccaaagccaattcgccataaagtttatttttagtgacattgcgctttttacgctccatcaccttactccacaatcgtttcaagaaagccgcatcctgagctaattcttcgtcgccaacgccctcggcagccgtccgaataatgaaaccaccatgttcatcacaatagtcagcaacaatatttttcaggcgattacgctcttcttcactttcaatacgttgtgaaaccccgacatgagatgcgccgggcataaatacaagatagcgggaaggtaaggtaatatcagtcgttagccgagcacctttggtgccaaggggatctttcactacttgaaccattaaatcttgtccctggcgaaccaactcagcaatatctttaacatgaaagttcttttgctcctcaccggcaatacattccgtatgaggcacaatatctgaggcatgaagaaaggcggctttttccagcccaatatcaacaaaagcagcctgcattcctggtaatacccgacttacacgacctttataaatattgccgacaattccccttttggcttccctttctatatggatttcttgcaaaatcccaccatcaatgtaggcaacgcgcgtttcggatggtgtgatattgactaataactctgctgtcatgagttccccttcccatcaactaacgcaaaaaactttgtgattaattcgtgtgtttccaccaatggcaaaccaacaactgagtgataactaccattcagcgttttaacaaagcaacccgcttttccctgaataccataagcccccgctttgtccatcggctcaccggttgctacataatccaaaatttcctgtgtggataattggcgaaaggttacatctgtaataactatatcacttaaagtacgctgactatctgatatagcaatagctgtaatcacctgatgactctgaccggaaagtgcactgagcattgcaacggcatgttgctcgctacgtggtttttctagaaccttaccattcaatacaacaacagtatccgctcccaacaccagaaaatcctccggtgcaatagccactcccgctagagatttatcttttgctaatcggctgacatactgacgcggagtttcaccctcttgccgttgctcctttacctgaggagaaagaatttcaaatttaaagtccaataattcaaccagctcacgccgccttggtgagccggaagccagataaagggttttcatgatgatatcgtccttactactacctatctcattaggctatttcatttgccattttgaggttatatacactactcatatcctcaagttatttggaaagaatggcctgcatcagtaacgcctgctggaataagctctgtcaggacattaaaaacagcaatccgaccactaatgtacattaaactgacgacggatttttcgcattaacaggaacaaccacggccaaagaataccattgaccaaactgttccagaacacttctggatgaaaagcaacatttgataacaaaaattctgcccaaaaaacgctgaaatccatcagtaccgataaagcaacgacaaccaaagcctgctgccaaagtgccatattgcgaaataattgaaacttaaatgacaccaaataactcacaaggctgtaagccaaagcgttaacacccagtgtcgctccctgaatcaaatctacgatgatccccaatataaaaccggtaccaacactgactctatgcggtaacgccatcacccaataaatcaacaatagtgccgaccaagttggccgatacatataaatttgctccggccacggcataatttgcagcaccattgcaatcaagaaagataaccaaatgatccaacgcccatgactccggtattgattcattaacgatttcccgaatttataaatttagccgacgttattgtcgattcagcatcttttactctttctgttgtcttggttgcttcatcagaaacagacgatggtgctggtggccccatttcatttgcatgtggcaatacctgaggcatcatttgcattaaacgttcgttggctacacgataaacctctgatggcggcaatggttcagatggattattatccgccccccacaacaacaacaaataacgcaaacgctgtaattctgccgttggccgagcatgaatcacagtataagcccgttgattatcgactttaactgacgaaaccacagcaaccggataaccttccgggaaacgcccccctaacccagaagtcaccaacacatccccaacccgaatatctgtgttgcttggtaataactcaaactgcaaatcatcagtacaacctgcaccagcaataatagccctgatatcattacgtaagacctggattggtaaagcatgagtcgtatcacaaatcagtaatacccggctagtaaactgactgacagcaacaacctgaccaacaatgcctttatcactgataacaggttgcccttcataaacaccttctcttgatcccttatcgatgacgacctgatcactataaggattagccctaccggagatcacctgcgtcaccatcatgtgttcatcctgacgtaaaggtgatcccaatagctcacgcaagcgggaattttcttgcttaagttggcctaacaacagcatatcgctatttttcatcaataattcttggcgtaaagcacgattttccaatcgaagttgttcacgggaagcaagggtttctgacacaccatcaagcacttgacgcgggccattggcgagaaaataaaatggactgactaccgtatccatataattacggactttactgagagcatcaaggcggctgtctgccacaaccaaagcaatggcaacaataacagcaaagaaaagtcgtaattgcagggaaggccctctgctaaaaattggcttcataagctgcgctattccaaactgtactgtttcataaacaatggaattcccagacagcaatcgcaaggaggtctgagctgcccgtcattccccccctcacttgcaagttaacactcactcctcgctgaagagttcaccgccatgcatgtcgatcatttcaagtgctttcccgccaccacgagcaacacacgtcaatggatcttccgcaacaatgaccggaataccagtttcctctatcagtaaacggtcaagattgcgcaataatgcaccacctccggttaagatcatacctcgttctgaaatatcggaagccaattctggtggacactgctcaagagcgaccatgacagcactgacaatacccgttaaaggctcttgcagagcttcaagaatttcattggagttaagcgtaaagccacgtggcacaccttcagccaagttacgaccacgaacttcaatctccagcatctcatcaccaggataagcagaaccgatcgtgtgcttaatacgctcagccgttgcttcaccaatcagtgaaccataattacgacgaacgtaattgataatagcctcatcaaagcgatcaccaccgatacgtacagaagatgaataaacaaccccgttcaaagagataaccgccacttccgtagtgccaccaccaatatccacaaccattgagcccgtggcttcagaaacaggtaagccagcaccaatcgccgcagccataggttcttcaatcaaaaacacttcacgagcgccagcactgagtgcagattcacggattgcccgacgctcaacttgcgttgcaccaaccggtacacaaaccaaaactcgcgggcttggacgcatgaaactgttgctatgaacttgcttaataaagtgttgcagcatcttctctgtaacataaaaatcggcaatcaccccatctttcatcggacgaattgcagcaatattacccggtgttcgacccagcatttgctttgcttcttgcccaacggcagcaacacttttcgatgaacctgcacgatcctgacggattgcgacgacagaaggttcattcaatacaataccctgacctttgacgtaaataagggtattggcggtacccaagtcaatagacaagtcgttggaaaacatgccacgaaattttttaaacatagcgaaaggataatcctgcaagctggggacggaacgaaacccgtctactctaccaaccacatgaagcagcgacaaggcgcacaagcacctgcttcaataaaaaagtggctacgttattcatatcaacaacgtgatattctacgttacttctcccaaacggagcagaaaaaaactgcataaaaatgggttaattttaccaattaccgctttttgaccagtagttattccggtaagttcacatcagacccatgcctctgctcacgatgaccaacacttaactacaagtatgtagtctgtgtagtgagcaaattaatgatgtaataaactgcgactaaaatacaatactttctgctaaaaaataataaaaaacagaattttctgaaatagagcgccatatgcaactaaactggaatatgacaacgagactacaggtaaaaatgcgaataaattctgttttataatccaccaacactttattttttcttatataccttatgtaaattacccatttttatctatccttatttaatgacaaaatcaattacagagaacagaacgataatgaaagccttgttacttaagcaacaacagaatcaattatcaacgtccatagaagaagttgatgcttctcatcttcccgtaggagacgttaccgtcgatattcactggtcaaccctgaactataaagatgcattagccatcacaggtaaagggaaaattgtccgccaattcccaatgataccgggtattgatttctctggtattgtacacagtaccgaagatccccgttttcatatcggtcagcatgtattattaaccggctggggggtaggagaaaatcattggggtggactggcagaacaagccagagtttctggcgaatggttgacacctttacctgccggtttggatagcagacaagcaatgatcattggtactgctggctttaccgcaatgctgtgcgttatcgccctggaacaaggtgatgttaagccagaaagtggtgatgttattgtgacaggtgccagtggtggtgtaggaagtacggcgatagcactactctcacaacttggctattccgttgttgccgttagcggtagacaagaaaatcatgaatatttgttatccctaggggcaaaaaaggttttgccacgccatgaatttagccaaccgcctcgcccattggaaaaacaactttgggccggagccattgacactgtaggcggtaatgtattggcaacaatactggcccaaactcactataacggtactgttgccgcctgtggcctcgccggtaatgcaaatctgccaacaacagtgatgccatttattttacgtaacgtacgtctgcaaggcatagagtccgtcactgttccatcagtcaaacgccccgccgtgtggcaacgcctgcaaaagctattacccgcttctttttatcagcaagcaaccacagagataacgctggaacaaaccgtggaatacgccaataaattgatagctaaccaggttacaggacgtacattggtaagagttcgttaagaattgtgattagcctctaaagtacagtggttttattcttgacattttttctgataagaccagtatttagctgctaaatgctacgatatcattataatgtcgcgctttgtcgccgaaatgaacttgtggctgttataaaaagatgacaactcgttaatataggattatgttggggcagttgttgacaaattgccggagataccagcacaatggcaggaaagtttcacattttactccttaacggccctaacttgaatatgttaggaacccgggaacctgatatctatggcagcttaacgcttgatgatatcgtcagcaaattgtctgaagaagcccatcaatcaggggttaaattcagccatctgcaatccaacgcagaatttgagctgataaatagaattcattctgcacagggtaatactgattttatcttgattaaccctgctgcattcacgcataccagcgtggcactgcgtgatgcattgctgacagtaaagatcccatttattgagatccacctctccaatgttcacgcgcgcgagccatttcgtcatcactcatacctttcagatcttgctgttggtgtaatctgcggtttaggagtagatggctatagctttgcattacaggcagcggtaaaccgcttgtcaaaattcaactaaatgaaacagaagagtacggaatcacactcatggatattcgtaagataaaaaaactgatcgagctggttgaagaatctggcatttctgaactggaaatttctgaaggggaagagtcagtgcgcatcagccgcgcattagctccccagagttttccggcagctcaacaatatattcccgttcaagcacaacaacctgcgctggctaatgttgttgcgccttctcaagctctaccagaagcgatcagcagcagatcggctgcaatcgacggtcacgttgttcgttccccaatggtaggtaccttctatcgtacacctagcccagatgcgaaaccatttatcgaaatcggccagcgtgtcaatgtgggtgacaccctatgcatcgttgaagcaatgaaaatgatgaatcagatcgaagccgacaaagcaggtgtggttaaaaagattcttgtggaaagcggtcaacccgttgaatttgacgagccattagtcgtcatcgaataacgaggcgttcccatgcttgataaaattgtaattgctaaccgtggtgaaattgccctgcgtatcctacgagcttgtaaagagttggggatcaaaaccgttgcggtacattcctccgcggatcgtgacttaaaacacgtactgctggcagacgaaactatctgtattggcccggcagcttctgcaaaaagctacctgaatatcccggcaattatttctgcggcagaaatcacgggtgctgtggctattcaccctggctacggttttctatctgaaaatgcagattttgctgaacaggttgagcgttctggctttatttttatcggcccaaaagcagaaacgatccgcctgatgggtgataaagtttctgctatcaatgcgatgaaaaaagcaggcgttccttgtgtacctggctctgatggcccattgtctgatgacacggagaaaaacaaagccttcgctaaacgcattggctatcctgtcatcatcaaagcatccggcggcggcggcggtcgcggtatgcgcgtcgtccgcagtgataaagatctggaacaatcaatcaatatgacccgtgcggaagcaaaagctgctttcaataacgatatggtttacatggaaaaattccttgagaatccacgtcatattgagatccaagtattggctgacggccaaggtcaagcaatttatctggctgagcgtgattgctccatgcaacgccgtcaccagaaagttgtcgaagaagcccctgcaccaggaatcacgccagaaatgcgtcgcagtattggtgaacgctgtgctaacgcatgtatcgaaattggctatcgtggtgccggtactttcgaattcctgtatgaaaacggtgaattctatttcattgagatgaatacccgtattcaggttgaacatccagttacggaaatgattaccggtgttgatctgattaaagagcagttgcggattgccgcaggtatgccactttcaattaagcagaaagatgttgttattcgtggtcacgctattgaatgtcgtatcaatgccgaagatccgaacacattcctgccaagcccaggtaaaattacccgcttccactcgccgggtggatttggtgtgcgttgggaatcgcatatttatgctggctacaccgttcccccttactatgattcaatgattggtaagctgattacttacggtgaaaatcgtgacaatgccattgcccgcatgaaaaatgcattggcagaattgatcattgatggcatcaagacaaatatcgagcttcaacaggcgataatgaatgatgaaaactttcagaatggcggtactaatatccactatctggagaaaaaactggggttacaggaaacttaaaacccgtttaatagcatcaatacctttgaaggagcgcttaaacgctccttcggattgctgacaaagtgcggctttttagccgacactttgttttaatcaagttctgttctccaaacggaatttaccaccacgttaaaacccaccttgaggtaaaatcagtatggttttaaaatctggaaaaagggcaagcgcatcacgaaaaaaccggtaaaaacgttagtcattaaaggtaaaaccgaaagtgattaaagattttttaaagcaggtaaaaaaactcggtactatactgatattagaagagaaaacatcaggaaaaatggcttttaaatctattaaccgcattaagaaaattttctcaaacaaaagattttgcatgactgaaagacgttttccaaaaatgaagataatcgttaaaaaaagctgagaagcttttagattaaacatggaaaaaagaacaaaaacgtttatacccgcttaacttgaagatgcaggattcataacctggaagttgtcattaatacagcacgacaggttcccggcaagttccggtaatatttccgtaaaaaaacgatgtattgcctgcctgaataaggccgtcaaggcgaaataatggttattcctgacctgttcattcatcaccttccacagcctttctatcgggttcagattcgggctgtatggcggcaagtaatgaagctcaatattcatcacataagcccagtctttcacctgcctgcttcggtggtaaccagctccgtcaaggataatatgaaccttctgactgaccggataggtctcacggatggcaatgaagaactcggcgatgtgataactgtcgatacggtcatactcgcgtactaccgttttgctaatatcggccagattcagggcccccatcaggttcagacgggtacggcttcccgtggttttcactgcggttttctgcccttttcgcatccagccataagccagtttcgtcccttgcgtgggatggacgccatcaatgaacaggataggctcatggtctccggcttcctgcttgagtttcccgtaggtttccataaaggcccgttgctgctccgcgttgaacttgtgtggcacgccggtcggttttttataactaaatccattatggtgcagccatttattcatgccgggaacagtgtaactgatatcccacgcttctttgacaaggcggataacagcctgtgtggtgggcagaagattcgcggtcagataagcgataagttcctgagtctgtgtttcgctgagatggctctgagagccgccattttcgggcttgattttgcggtgattaaggtaatcactgatatgacgattaacggtcgtttcatgaagacgcagggcctgagcgatcatcactgaactccagccctcagaggccagcaggaccgctttgatgcgatcacactctctcttatcacggcaggtgtgatggaggtgttcaagttcggctttttgttcatcggtaatgaatattttcatgactgataccatgagcttcatttgggcgaaaatcaagcagtttcaatgagcacaggtatataccctatggatttcaagatgcatcgcgacggcaagggagtgaatccccgggagcataggtaactatgtgaccggggtgagcgagtgcagccaacaaagaggcaacttgaaagatgacgggtataaaagcattaaagatgattaactcagttatccatcaattaccaaatctgtcatgaccatttaaaagcgaaaatacagagatattaaagcttttatataaaaggcggaggcggatttaactaaatacatgcaacttttcaaaaggagagttaattatatttaatcgaagccatcaaccatgaatagaaagtcgaaaagaaatcagcatgcaaaagaatattatccgaacagatgggtattaacgcgctttatcatcgttattttatgaagaaaaccataaaaacaacgcaataaaagaatggataaaacgattaatctggcaggattaacaccctgaaaaaaagggggatgatctgaaaaaacatcaagggtagtgatttattaaaacgactcagaattgccggtaaaacagcatcaataaagggtatgattaacgttggtttaacgtaaaataagatatcctatagtgattaaacttaataaaaatcaagtggtaaaagtgtagtgatcacaaaccgtcaaaacactatactgattaaaatcctaaattaaaacagtgactttaaataacagtttaaaacctgctcatgataaaactcaaagtggagcctgtaatttaaactggctttacactattttaactcgccaataatatggcttttctacaattcgattaaaccgttcctctttataaaaaccattgcccgtcaatttcacaaatgatttggatattgctatatcgtttttgaaagcgcgagcatgattatgttctagtggtgttgtagtcaaataatttcagctagtttcatagatctttgttgcaactttccatattcaaccaacaacggataattatcgtcttctcagtcgatgaatctaatatctaatccggagccaacatccgcagtggattcagtaaacagatatctcggatgtgttcttcaccaaggccagcggttttaaaccagcgttcactatcgttcaaccattgcttaacatctggctgaactggctgtccaagatcggagctatagacaacattattcacctccgataacacttcaaaaaaatcctcagttgtctgataaccaagataaacagttaatgccgtttgctccacataaagccaatcatgtttacccaacgccttaagatcttttgcttttaatcctgtcataggactggcaggttggttcagcatgaacttacaaccaccagcagcggtaatcgcatcaataagttgcgtaacttcataacgtgaagcatggcctgatgacaacacaacattatgctgctgcgcaaaactaattaactcatggatctcgttatgcaaccgcccattgctatcgacaacagacaaaggttgctgtgctaaagtttgtgcgaaagcatttgcccaagtacgtttcattacacttttatggcttgtagggacaatagtcggcagatgaaccagcaaccgcggaactttacagaactggtactgactcagtgactggataacagagttaattgccagccctccagaggttgcattcaatactaccgaaccaaaaaccggaagtcctgcttcctgagccagtgacgacgaagcagtaacactccccaaatggtttttaagtacaactccaccaccatgtcggacatattcccttccagcttcaagcacattgtacctccgaatgtaactatcggggcgagcatgataatgtacatccagaaaacgaagttttctctcccagtattctataaacatctgactcattgcacagttttccaaggtacggcatatcccagtttttcgcgggcgttaaccagatcttctccgttagttatagcctcaataatagcttgttcagttttgtcaacattttccgcacgctcaataacggtgagcaaatactgctgcgggatggctaacgcaccattatcatcagcaaaaatccaatctcctggagatataactacaccgccaatatctaaagtgcattgtgttgcagcaaccttggcacgattctttccggataccatataaacccccgtcgtaaataagggatattccaatctgcgaacctcagacaagtctctggctgacccataaattacagagcctgcgattcctttttgtacagctttaaaagttaagatattaccccaactggtacaatccgtacgcccctgattatcaaccactattacatatccagcaggtacttcatcaatgtagtttccagcattaagaaacttgccctgttccggaatgataggttcataacgtacagtaaaagcgggtccagccattttaatcccgacattactacgtggcataattccagccagtccagcaggaatatgcaaactatccattgcatccgatatggccgcgctgtcaagctccattaaacgctttttaatttgatcaatttgtgtagtttgcattacatttcctctttcgatgcacgtgcgcacaggacactccaagcggcatattctggtatagattgttgcagtagcaatttattacatggaaaatccaccgaatgttgtcgtccttcatcatctatggttgtcagggtcatctgcccaagcatttcttcaccagacaaaaatgaacttatagaaggaaacgcagtaatattcaccgaaagagactttgaaggattatttactgcatatgttgtgtgtagatatgtatttaattcatcatcatctgtgaaccagttaatacggtattgctcactgagtttttccatagcagtcatctggcaatcactaaccaatttgttttcaaacatggcaccaaaattaaccaattgccgtacggaaagaggggcatcagcaggagtaataacttgtactactacataaggcgctttccacagatagtgaatatcacactcaacaccatcaaagaatgcgttcaccatcgtaccgactttactttcactaacgccgattagtgtccaatggtagtttcgctctctcatgccagctactggagggatagaatgttcttccgacaacattaatcgcatttgggacggaggtcctggcaacacaactattttgctactatcaacattaagactgaagccaggtgctgtacctgtaacattgggaataacctttgctccagacggaaacatggcttggaatcgattagagtgatcacaatatactcccagtttttccaattgtttctgtatttccacccagacgttatcacgtatttccaaaggactacctgccacttttgctatcgcctcacgagttttatcatccagtgtcgggccaagaccgccacacacaacaatgagagtatcctgccctagcctacgaaccactgcggtagcaatctggttaatatcatcagcgcaaacctgatgttgcttcactttatatccctgctccgtgagatattcactaatatcctgaagattagtattaggatattttccactcaggagctcatcaccaacagtaataaccgatgcagaatagctagtgcattttttacttagagtactaataatagcctgcgccatttgttgggttgttgcgctaccacccagatcataagtaacagttcgtccttcacgtatcacattatctactgcacagttaatttgctgtgctgcatcagcaaagccaagatgttccagtagtaatgctattgtgtaaaacatcgctgccggattggctttatttttacctgccataccaggcgcactaccgtgtacaggttcaaagtatgcaatatcactaccaatattagcgctaggcgctaaaccaagacctcccattacgcccgctgccaaatcagacaaaatatcaccgaacatattctcagagacaatgacaccaaattcatgcggtttttttaccatccataaagctattgcatctacattgtggatatccgcttttatttcagggtaacctgccgcaacggtatcgaaaataccttttgcaaagtgcccactttccctcattacatttggtttatccgcaaaggttacacgggagtagttattttcctttgcatactcaaatgcagtgataaacaaacgttctaaaccaaaacgggtttgtagacggactgtccatgcagcttcttcaggaccatatttatctatatttgggtgctgtaaccaagtcgttgccgtagcgggaattcctttaaaatcgaaccctgcatatagtccttcgctgttttccctgataacacaacagcgaaatggtttacggtccccttctacataacgtactgggcggatatttgcatataatcccaaacgctggcgtaattggataacaggtgacacataatttctcgttttcacacgcagatgcggtggcaacgcttgttgtgcttcttctttacctttactagtaatagcgccgagtaacaccgcatctactgaagctattttttcccaagtattggcaggcactgggttaccttctctttcccaacaagtccaaccaatatccccaatttccaatgtcacaggaagatttagagcctgaaaaacgggaagagcggcatcgcatacttcctgaccaataccatcaccaggtaaaataagaatttttttattcataagatttttagccaatcgttaattacattgttaataaataacggcttatcttcccaaggccgcattcctgctccatccacgacaacaaaacagtgcgtaggattagtattgaccacctgattacattctgtggctaattgcgaacgtccgccaactatgctcagaaattttcctttgtaattgcacaatattgctctggcatccagttgtagcaacagtgaaaatcccactatcatacgttcccgagcagtatttcttaaatgaccaggtatcgcaggcattttaggaagtggagtcccaccttcaggaataacaaagtcatgtaacacagaaatcgcttcatctagctgatttctattcagtaatgctattaattgttccagcttattagtcagtaacgaatcagcatacccaggaccactcactgagattactcccgtgaggtttttcaggcgcgacgcaagcaattgcgccagagtacctgacatcgcaaaaccgataagcaaataaggctggaaaaaacgttgattaagttcagattcaataatattaatagcgtagtcaggatcagatgaattaattaaggataatgtatcaataatagacacctgatatcccattttctgtaataatatgcgcaatggagtgcaaaaatcgccatgatcccaaaacggcatcacaggtgcgagaattaccgcttcaaggctgaaacatccagcatggttattatgctgtatcatgtcgttgctcctcgcaaagatttaacaacctgaaacgcataattaataccatttcgtaacccttcttcgagagctgttttattctccacactcaaattgtacatacccatcattatatcgataagatcgcgcctggaggcggcaaaaaaacaatgggattgcagttcattgagttgattaaatactcgttcaaggtcatattgtttactattttggctcagattgagaaatgatagccagctttccaaattgagatttccggcaccttttcccatccctgatagagaactatcaataaaattgactccagctctcatagcttcaatactgttcgctgtggcaagacccaaattatcatgaggatggaatcccaattgcaattgcgtggcagactttaacctataaaacatctgcgctacctgttcagggagcaaactaccatttgaatccgccaggtaaataatatcagcacccgcttgttcacactgtttggcaacttcaataattttactgatagagagctgactcactcgtgtaaaattaatacccacagccattccagtagttcgagcaatctcgcacaaccctaagcatggctgcgggttatcagctttaatacataacctaagcaaactaacgccattcatcttcattgcataaatatcatcagcattgatattgtgaggatgagcaatgactaccaatcttgcctcaggtaccgattgatgaatatctcggatataactatccggagacatacctgttaggccaatattagagataggtttgaaaccttcattccgcacctaattcaggaataaaccgctttatattgtgcacctaataaactcaaaagctcatggtggtaagattgcattcctgtcaccattttatgttcttgaaattcaaaggtgctgatcccttcaaaggccagaaatacccaacgcgcggtgggggattgtgtcggtttgttcttcatatcggggaaaaacggcacattttgtttcaattcatggcgaattttatgttccagcgccgcataaaccatgagacaacatgtcatcaccattaacagcgcttctatccgctccggttttttcaggaaaatggcagacgtcaggaattccggacttttcaggaagcgaaaaccccgctccaccttttgttgtgccttataattagccagtaacgccgccatatcaagccgtccttcatcccgttcattggtcgctaaaataaacctcccgacccgcaatctggcctgcttcaccttgtctaaccgggtataagcctgaccggctaattgataatgaaccgatttggggggttgatgcttgccgggtttcccgcgccccgcatacgcggtaatcgcctgaatttccggcgaggcgatgccgataaactggcattgagactcaaaatcatgcagtgcctgtaaggcatcctcccggcaggcaaagggctttttgcccagtttgtcgaactgtttagactcgttttctgtttccctgagtgtgtttttccggaaagtctggttttcacgtttttctgccgccgtactgttcaccagtaaccaacgctgaggaacgccgccatatgatgacgtcacccagcagcctgaatagccctcactgatggggctgaattgctccgctgtcacgttcaggagagactgtttagcttccttgatcgtcaggggaacacgcgtaataaatcgttgtttttgctgatgaagcgaagcgatcgcggcttcagtataaagggcggcatcggccacaaagtagcggctgttttgtgctgctttcaggcattgaatatgggttttgatcgtctgggcaaaggctttggcatcattcgtattcccgctcatagcctgcatatagacagggatacctgcctgattttcgcaaatcagttcaaggacaacctggttcagttcaggccggtgatcccggctataacccggcaccagtgcaatacgttttgtgtcatctcccaatgcgctgtcatagtcaccatcgacatgaaaactcgtgatatccaaatgaacggaatcgggatttaaccctaatttatcaaccacttgctcagcaagcacctgataaacttccgacacccccgcttcatataaggcatccagtgtacggccgagcacatcatcattaaggtgttcagcttcaatgtcagcaccaattaaacgcgcaatcggcttatgttgaaaaaagccggaaaacatgtgcaatgtccggctgtgaaaccccagcccgttaaggatcatcgccagaaaagcgtcgccgtgagagacagtatgcgatgaatattttgggataatggcatcaatcatgcggggtaaaccggcttcatgacaaaaagcggcgataaggccaagatgatcgagacgtttaatggcaggtataggtgtggacatattcgctttccggcaaataaaagtaatagatcaaaattggcgattaccgtcaaccccaccgatgtcatcaatacaaaaaacctgtgtaagatcacattatttttaaatcagaaatacggtgcggaatgacggttgaaagaaccattgcgataaccgatttcaaaccattccacgccacttttagtcaacgcttcaacatgctttatagcgtattctgttgtaaaattaaaattattcaggtatccaccatcacgtaatgtgacatctatattattaaccatttttcattcctattttagtttctattatttgtttttacttacttattttctttaccgcctctattacccgttatataaataatactaccgaccaaagaaacaactgtgatgatagatgccactttaataggttcatggtgagatatataaccaataaacaatgatgccagtcctgcactacctaattgcaatgttcccattacgccggaagctgtcccagccgcttgagaatgcgtggcaattgccgatgcagtacctagtggcaataaaaaaccattaccgaaagtcaatactgatattgttagcacagaagttatcaatgggtaggaactaaaaaacatttgtatcgtgaaagcaatacctccaacaacaaagatgagataaccatgagaaattgtctttctcacgccctgacgacgacttaattttttagcaataagattacccaacacataacttaaagagagcattatataggtgtaaccaacatatttttctggtaatcccatagcggtaagaataaatggagattcaatcaaataagaaaaatatgccgtataagcgaagcaaggtattgctgcatagtaaagaaattctttatttattatcacttggtaagtactaaccaatacatttttaatacttaatttttggcgtttatttattggtagtgattctttcagaactagcaagcacaatataagcgtgactgttataaataaagtaagaaataaaaaacaggatctccagccataatattcacttaacataccgccgatcatgggtgcgatagcgggtgacattcccacaaaagggaaaataatcagatacaaattggctgcctcttctttctccatcagatcactaataatggcacgacttaatgtaataccagcacaagcgcctattccctgaaataaacgcaataatagtaactcactaatatgtgtactgtaaaaaataccgattgttgaaatcaaccatataatcatcccagaaataagaaccgtttttcttcctaaacaatcacttaatggcccataaataagttgagaaaaggctataccaaatagaaatatagttattgtactttgtatactagattcgctaacgtgataatagtttcccatcttactcaaggcgggtagaaatatatccgatgaaaccaacccccccatagaaagaaaagccattaaaacgataaataataaagatttatttttcatggaccataaccaatcaatataataaatattatccctgaataaattccgtataaaataaaagtcatgtaccagttaaatttacattaaatgcacacaatcacttatttaatgaaaaaaccaataccttgcatgtaagaacaacaaattactttgcatattatcttgtgctgcaagaattaagaactctttataacaacataaagacaaaatcccacccatgctttagattaataattttttactctataaataccccctccaagtattgagatacttttacacaacttctttaataattaacttttacaaaaataaattcatgtaaatattaattaaaaaaatagtaacaccaacatcacttttagcaaacaaaaaaacatagaatttaagttcaaaaatgaataaaaaaaacacaaaacacaacatataatactaaaaaaatcattttgaaattccagcacgaacatgtacttgccctttttgtaccaagcacaatgctgtctggacatcattcgtcagtacggagcagcgcctgttgtcatcagtcaaattaacggtcgcgattataccgtagttaacgtcaatacctttgaagacgttgactctgcggcttaaatatttcctgaatgaattcgcatcttgccgtacaatccttcccttcccatcctaatttatttaattaccggaagaacgaatggacagacgatttgttcaatcccataaagaagcactttgggctgtgttcctaacgcttgcttaccttattggctggctattgacagcctatttacccagcaatgctcccggtgtcaccggcttacctcgctggtttgaaatggcatgtttgttactaccagttgtattcatcatcctctgctggttaatggtgaagtttattttcaaagaagtcccgctggaggatgagaatgcaaagtgaagttatcttacctctgcttggctatcttgcactggtatttctcctgtcagtttacgcttatcaacgccaccagaaaggccccttcctgaccgaatatttccttggcaaccgttcaatgggcggctttgtattggcaatgaccattactgccacctatatcagtgccagctcattcatcggcgggccaggagcagcctataaatatggtctgggatgggtattactgtcgctgattcagttgccggcaatatggctttccctgggtgtgttaggtaaaaaatttgccattctcgctcgtcgctataatgccgttactcttaatgacatgttgtatgcccgttatggcagtcgttttctggtttggtttgccagcctaagccttttagtcgcttttgttggcgcgatgaccgttcagtttattggcggtgcacgcctgctggaaactgctgcgggtatcccttatggtactggattaatgattttcggtatctctatcgctctctataccgcatttggaggctttagagcgagtgtcctcaatgatgccctacaaggactggtcatgttgttaggcactgttctactgctggtagcgattatctataaggcgggaggtctgtcagaagcggtcaccacattacgaacaattaatccggagctggtttccgcacaaggtgcagaccatatcctcaacgggcctttcatggcatcgttttgggtactggtctgtttcggcgtaattgggttacctcataccgccgttcgttgcatctcctaccgcgatagcaaagctgttcaccgtgggatcatcatcggaaccatcgtcatgacgatcctcatgtttggtatgcatttagcaggagcacttggtcgagcgattattcctgatctgaccattcccgatcaggtgattccaacattgatgatcaccgtattgccaccattcgctgctggaatttttctagccgcaccgatggctgccattatgtccacaattaatgcacaactgctgcaatcttctgcaaccatcgtcaaagatctctatctaaacttgtttccacaacaaatcgtgcaggaaaaaaaattagcccggatttccagtttttctaccctgattcttggtttattgctacttttagccgcctggcacccccccgaaatgattatctggctgaatcttctggctttcggtggcttacaggccgtattcctctggccattagttctgggcttgtattgggaaaaggccaatgcctatggcgctatcagttcgatgattacaggggcaacaagctacactctgcttgctagtttcaatatccatctattgggcttccatccgatcgtgccatcattgctacttagcctattggctttctggatgggcaatgccatcggccagcgattaccgccaaaagccgtcagaccacactaagttggtcacttttaatctattttcaattaaggagaattttttatgccctggatacaacttcgattaaatactacaggacagctcgctgaatcccttggagatgctctaatggaaaatggagcagtatcagtcacctttcaagacagccacgataatcccgtattcgaacccttaccaggcgagactcgtttatggggagacacagatgtcatcgggctttatgatgctgaaacagatatgaaagcagttatcagccagctcgaacaagttcctgagttgggtgaaagatttattcataaaattgagcagttggaagacaaagactgggaacgtgaatggatggataacttccatccaatgcgctttggcaaccgcttgtggatctgtccaagctggcgcgacgtccctgatccagatgctgtcaacgttatgctggaccctgggctggcttttggtacaggtactcatccaaccacatcgttatgtctgcaatggctagacagtctcaatctggaaggtaaaacggttatcgattttggttgcggctccggcatactggcaattgcggcgctaaaactcggtgcaacgcacgctattggcatagatatcgacccacaagctattcaggccagccgagacaacgcagagcgtaatggcgttctggagcatttaacgttatatttggcgaaaaatacaccaaccgatcttgaatctgatgtagtaattgctaatattttggcaggccctctgcgtgaacttgcccctgtgattggtgcattaccaaaaccgggtggcctgttaggtttgtcgggtattttaacgaaccaagcagaaagtgttattcaggcttatactgataaattcgtaatcgatcctgttgcggaacgggaagaatggtgtcggatatctggggtaaaaatagcaacaaattgaaattattttattttgttataatcgaaagtgtaaacttcaatcacttattgatggtaatccgtgctatcagcaaacttactgatagaaaaatcctaagtgataaactttaccaataacatataacaccatgttatttatgaataattatatttaccccagcagaaaagttggaaaaaagttgtaacaaatgacgatttgctcaaagtttggcctttcatattttgcgaaaaatgcgtaatatacgcgcccttgcagtcacagtatggccactctttcttcgtctatgcgtatcggacaataccagctgaaaaactgtcttattgcggccccaatggctggcataactgaccgcccgtttcggtcactatgttacaaaatgggtgcaggtatgacagtatcggaaatgctttcttccaaccctcaggtctggaagacagacaaatcccggctacgtatggttcacagtgacgaaccgggaattcgttccgtgcaaattgctggaagtgatcccgatgaaatggcagcggcagcgaagatcaacgtcgctaatggtgctcagatcattgatatcaacatggggtgtccagccaagaaagtgaatcgtaagctagcaggttcggctttactacgttacccagaattggtcgaaaagatcctttctgccgttgtaaacgcagtagatgttcctgttacgctaaaaattcgcactggatggtcgccagaagaacgaaactgtgtaaagattgcccaattggccgagcattgtggtatccaagctctggcgatccacggcaggactcgttcctgtttgtttaacggagaggcagagtacgacaatattcggacagttaagcagactgttgccatcccggttattgccaatggcgacattactgacccgcttaaagccagagcagtgcttgaatacaccggggctgatgccctgatgataggccgcgctgctcagggaagaccctggatcttccgggaaatccagcactatctggcaacaggagaactgctgtcaccgatgccgattggcgaagtgcagcatttaatgaacgagcatatacaggaattgcacgacttttatggtccaagcaaaggagcccgtatcgcacgtaagcatgtatcctggtatctccgggagcatgctcctgatgaccagttccggcgcacattcaacaccatagaggatgccagcgaacagctggaggtgttgggggcatatttcgaaaattttgcgtaatataaagaaaagagctgacagaactatgttcgaacaacgcgtaaattctgacgtactaaccgttgctactgtaaattcacaagatcaggtaacccaaaaacctttacgtgattcagttaaacaagcactgaagaactattttgctcaattaaacggtcaagatgttaatgatctgtatgagctggtattggctgaagtggaacagccattgttggacatggtgatgcaatacacccgtggcaaccaaacacgtgctgccctgatgatgggcatcaaccgtggcacactgcgtaagaaattgaaaaaatatggcatgaactaatcactaaagttagttcattaaaaaaggcgctgtacctcttggtaaagtgccttttttgccaaaccaagaaaagtaatgccgaattttgggggccttacgcaacaaaatgcagattattaggttgcctggcaatcctaaaatctgcatcaagcctctttcttgcctatctcacagcgatatatacccgttatccttcaagttgcctctttgttggctgcactctctcaccccggtcacatcgttatctatgctcccggggattcgctcccttgccgccgcgatgcatcttgaaatccatagggtatagaacggtttcgttacttattgccttaccctataattccattttggttagagtatgttagtgtccttttcagacataaaattttattttaaatactcttttaaccgtaatttaccaatattcttctctgatggctgactacttacaatccagaatccgtccaacgtcagcttattccgtaactgatatattattttcagtccttattaacatgaaaaaattgattataactaacaataaaataaaacaaccacagcacatcaagacaacaccaagatgttggctccaacccgctagcgcaagacctatgcctaacatcaaataataaagcaagcctaatagcgctcctgctgttcccaatctatccgtataattaatcaatgcagaagccaagatattagggactgcaattccgtaagacacaacaatcaaaaccataggcaagataaacaaccaggtatcttccagaaccattatcatcccccctcctatcagggtgataatagaagcaagcaacattaagttcgatgaatgccaccttttgttcaacaagaatctatttaaaaaggcaccaataccggctcccagcgccaaaagcaatccggtataaccaaacatctcagaggaaagtcccaaccgttcaaaatcgaatggggccaattgataatagctaaacaaacatagattaaagaacgctattaacagcgcattgcaccaaattgctacatccttaagcatgataatcaaagtatctattaacgatattgttaccattgacactgggcgggtttcaggcagacaaatagcagaccaacctgatagtaataccgcaagtaaagataagccggaaaagacacctttatatccccagaagtacaccaaaatagaaccacttaccatgccaactgccggacttactgctaaagctacgcccatgatagaaaacacacgagctaattcacttccttgataagaatctctcattattgtttgagttcctaccgagcctactgcggcaccgaatgcagataacattctggcggccagtaataattcaaattggacgctgaacaatgccattaatgaagcaccgctatagagtaataatccactcaatatcgttggccgtcttcctatgagatcgcacatacgcccccaaacgactacaccgatagcaaaagcgaaaaaatataaagataaagtttgagcggcttgctcagcactcactttaaattcctttgcgatattggttaatgccgggctatagatggtttctacaatttgtggaaacatcattagcgctgttgccagcgtaagtccaagtttacgttgcattgtatttttcttaatcaattagaccataaaacgtaaattagcatgctctcaattgtcgcattacaataataaagacaatttatttattaaataggacataaatatgacatggctttctcgtgatgatagttttgatcctgatagctttggagtaccggtagtagggattgcggctgaactaggccagcatgactcaggatttcatcaacatgaaatgggacaattattatttacccagcaagggtgcatcaatatcaccctggcagatcacttatgcatacttccaccaactcgggttgcctggattccaccgcgtattattcatagagcagaaataaaaggctccgtcgggtatcgttcgatttatttagatgtaaatcggatcggatatttagcagaacacgttgaggtattggaagttacacctctgttacgcgaagtattagagagaatagcgctggctccctttaatacagattggttacaaggatctgctgctaacctattggctgtttgttttgacgaaatccatctggcaaaaagagaaccgacattattaccactcccttttgaccgccgtttggcccgtattcctatgaccacactgccaccaacactcaaaatactggcaatgaatatcggagccagcgaaaaaaccatcagtcggatatttcgccgagaaacaggacttagctatcaacaatggcgacaacagtggcgtttaatcaagtctatagaattactagcaaaacagggtaatttgtcatctgtcgctagcgaattagaatttgccagtgatagtgcttttgcaatctttttcaagaaaatgaccggtcgatcaccaagagaatatatgtctgcttataaggaacgtagttattgaagtaaatagttattgaagtaaatagttattgaagtaaatagttattgaagtaaatagttattgaagtaaatagttattgaagtaaatagttattgaagtaaatagttattgaagtaaatagttattgaggtgatatacaaaaattgccgacatcaaaggaaccattcaccatataaacatagacgtcggcaagtgcatcaaataattaaataaaagctaataacattctacgtacataaaatatacttgttaaaagctattatttttcatcatcatttattaactgataagatacagcgatatttgctgcctgacctgctaatgggctgtaatcactggacaaatatatccctgcaatatagtgactttcaccaacataaaatttcctatatcgagatgttccaggtgcgccaaatgacaatgaacgaccatcactcaaagtaaagaccgcttgatcaacagcaccattgccccatacttccaaactggtaattcgactgccattcagagaaatagatgccgtctcaccagatattgtacctaatcgatggctattaccatcatcaaaaacaacggtcagccctccgactctcggagcccctccaatacgcacaatatgccccgttaacgaatctatctttcttctttttcctccattaagagccggtttgagaggtggagccatatctttctctggagtcaatgcctgaattctggcttttgctgtttgacgatcaaagaaagtagaataacttaaaacatcaacatagattctattatttaccgactcggcttcacttaatttatcccaaatactgatatattcaaccccatgtaaacgacagtgaccatgaacagacataacattatttgcaacagtgtcagccgtcgagttattaagagcatcattaagctctctatcatatatattattaatataactattagcctgttctaccgtctttttgattaatcctcggactttttcaatatcaatatcactaagcccgatttcatttcttctctctaaaccagcaacccaatatgttatctgcatcataaccgtagtagaaaacatgggtaatatttgatagttaacatcatccgaaaaattattaaattttttgtgataaccatctatattttctgccagattattaaaagcactcctcgcttcttcagatcctggatgcttatcaagaaggtcagcaacggttgccattcgctcttgtatatatgcaatatcaccagcaaggatacctttaatcgtctttaacgcagactcctctatcatcctctcaatttgtttgacaatcccttcccatatattttctttcgattgaggccagaataaaccgactaaaaaagatatagcagggccaactgaaggtataaaagatattcccccgatgattgcattttttacaatatcagtaacatcccactctactgcactcgtttttacggcatattcattagccacaatggttcttatgtctaaaacattttctgtatgcataatggaaccctttaattaaaatgagatgtttaaaccaaatttgccgtcacataagcaactttatccgtattattatagataacaaatttactataataaaaagagttattaggcacgtttaacaccttctcttctcctaatcctacatctatagaaccagactcaaaccattcagaggtaaaactatgagaccagtaaaatttagccgtgacactatttgatagcccggtatttacaactctcagagatcttctggattctggaattattggtgtatctattctaaatacttccacactagcatgaggtgatatagtcacatcactcaaaggaccaactgcatttaagtctttatgtactggaacaggggaattagaataaaactctgctttctgctcatctgaatcaacaacaatggttattctagacatatttattttcctcattaaaatttaaataaaattcactcaacttacatataaatattttcaaaacacagtattaccacttaattaaagatgctctttaaccattatagaaccactatttcctttgaaatttaattccccaatatattacatggactttacataccacaataactcacaagaatattaagatatacacactataagtaatgtcattaatgagacatatctaaagcaagtcacaataatacaaaactatagcagatatatagttcatgtcaacgctctgcttcaatgaaattactattatttaagagttgatggaattatatgatatataaaaaacacatataaaaacatatataaaaaatttaaatataaattatttccattacgttattaacctggatttataatattaatattagttactgtagcgctatataattctattctttattttataaatttaactttatccagtggactataataattcaccaaattcattcacaacgttaaaatgacaataaataaaatagtctggtatcccaagaatatatttccgttatatccgcatcaataatatttttcattactaattggttatatcctctacaagataacggatgaatattcttaaaaacattctctttctaatgaaagaaaattaaattaatagcaaaataattttaactgtagattttagccactaaaattatactgaatacaattcatttacctttcattactccaccaataaactatacccgttatctttcaagttgcctctttgttggctgtacttcactcaccccggtcacatagttacctatgctcccggggattcactcccttgccgtcgcgatgcatcttgaaatccatagggtatatattgcttaaaatatgacgagaaaacacagaaaaaataagggcagatttcaaagtatttgaaaccacactcgttgccccaatctcagataataccaaacttaaagcactattaatggcgtaatggcgtcctcaccttgggaaaaaccaccttcccagtacgacgaggataatcaaccatctgaattcccttcctgtgaaaaagaatatctctctatccccccaaatacgcatttctcacagcttcattaaccaataatgcagacccgctgtcttctagtacgatctgaccgttttccaatacatatcctcggtcagccaatttcaacgcctgatttgcattctgttcaactaaaaagattgtcatcccctcttccctcaactgctggatagtatcgaaaatctgaatgataactatcggcgccaatcccaatgaaggctcatccaacaacaataactgtggctgactcattaaagcacggccaattgccaacatttgctgttcaccaccggacatcgttccagcccgctggtgacgtctttcctgtaaacgcggaaatagatcataaacccgctcaatgcgctgctgatactgagtcttatcagcaaaaaaaccgcccattgccaaattctcttccactgtcatacgagcaaacactctgcgcccctcaggaacaatcgcaatgtcctcacgcataatacgagatgtcggccattgggtgatgtccttaccacgaaaaataatagaaccttcggttgctctgggttcactacataaggtactaagcaatgttgtttttcctgcgccatttgcaccaatcagagtgacaatttctccctgctgaatattcaggctaacctgatgcaacacctgaacttccccatagtgggcagatacccgcttaaattccaacataattaatacacctcgcccagatatgcccggataacatccggattgttacgaatctcttctggccgtccttgcgccaaagacattccctgattaacaacatagatacgatctgaaattcccatcaccaatttcatatcatgttcgattaacaatacagaaacttgatgatgttccctcagttcagcaattaaagcattaagttcctctgtctctttcggattcagccccgcagcaggttcatccagcatcaaaatttccggacgagctaccatacagcgggcaatctccaaacgccgttgctgaccatatgccagattacctgcctgtctgtttgccagtggtaacaagccaatccgttctaaccaagttatcgcccaatctacagccttagattctgcctggcggaatgccggcgttttaaaaagaccggcaaaaagacctcttttcagatgctgatgctgcgccactaatagattctctatcactgtcatctcccggaacaaccgcacatgctggaatgttctgataacgcccatacgagcaatagcctgcccagataacccttccagatgtttttcccgcagctttatcgtaccgctagtcggacagtaaaatcctgtcagacaattaaagatcgtggttttccctgcaccattagggccaataagagaaacaatttccctctgatttaacctcagggcaacgttgttaaccgccagcaagccaccgaagcgcatggtcagatcggaaacttgcaataatggtgttgtactcatgcttgctttcctccctgtacctgtcgttccaatttaacatgacggcgttttgtcggtagcaacccttgcgggcgccaaatcatcatcaataccatcattgcccctagcagcaacatactgtaggcattcagatcacgcatcatctcacgggaaaccaccaacaaaatggccgctagaatcaccgcagtctgtgagcccatccctccgagtactacaatcgccaacacaaaagcagattcagcaaaagtgaaggactctgggctaacaaaaccctgccgggcagcaaataaagtacccgcaaaaccggcaaatgccgcactgatagtaaacgcagccagtttaattcgggttggacttaaaccaagagagcgacaagcaatctcatcttcacgcagcgcttcccatgcacgacctaatggcatacgcagtagccgattaataatcaatactgtcagtattaccaacagtaacaccaccagatagagaaaaatgacccgatcacttggatcgtatttcaaaccaaagaagttgtggaaagtatcccaacccccctctttcacactacgattaaattccagtccgaagaaagtgggttttgggatctgactgataccattcggaccaccggttatttcagtattattcaacagtagaatgcgaacaatttcaccaaaaccaagcgtaacaattgccagataatcacctcgcaatcgcaatactggaaaacccaacaacaaccccgataaagcagccgttaaccccgccagcggcaaactctgccaaaatcctaatccataatagtgacttagcaaagcgtaggtataagcaccgatagcataaaaacctgcatacccaagtaccagcaaccccgataaaccaaccacaacattcaaacccagccctagcatgacataaattaatgtcagcgtagcgatatcaacactaccacgggagacaataaacggccagataattgcagcaataatgaccaatattgccagtaacttttgtcctttggttgagccatcgaaatccggcaatgaccagcttttaatcggtactttcttcattatctgctgaacagccggacgcaataattggaacagaaacacaaccgcacagccaataccaatccataaccatcgcacttcatcggcatgatggacgaccaactgcgtaccatccagcgataactgcatccccatcataaagacagacaacacaaataaagcggctgaggcgataatggcattcacccaattagcatgtttcataccttttccacctctggacggcctaaaatcccagtcggcataaacaacagcacaacaatgagcagagcaaaggaaacggcatctttatattctgtactcagataagcagaagttagggcttcagaaattcccaagatcaaaccaccaatcatcgcccccgggatactgccaattcctcccaatactgctgcggtgaaagctttcatgcctgccataaaaccgatatacggatttattacaccgtagaactgccccaacaaaacaccggctattgcagccattactgcaccgataacaaaggttaaggaaatcactcggttagtattgattcccaacaaactcgccattttcacatcttccgcacaagcacggcaggcacgtcccatgcgggagtagcggataaacattgtcagtatcagcatggcaagaaatgtcactatccagatggtcagttgcattgcgctaatactggcagaaaatccatcactttcgcctaatacccactgcccggtaatcaggccaggcaatgccagatcgcgagaactttgtgacagactgacatagttttgcaagaaaatagacatcccaatcgctgaaatcagggcaatcaggcgtttggaatggcgaactggcctgtaagctactcgctcaatactccaaccataagcagcggcaatgacaattgatgttaaaaaagcagcagtaatcagcaaccagcccaaatcaattcccatcatgatcagagccgcaatgaccataaaggagacatagctaccaatcatgtaaatttcaccatgagcgaaattaatcatcccgataatgccgtaaaccatcgtatagccaatggcaatcaatgcataagtactacccagagtcactccatttaacatctgttgtaaaaaatagagaaattgctccgacatacgttgtacctccggaatagcagctcctgacaaacaggagctgacgaccgttctgatgaccttacttcacagaagtagaagaaccatctgcatgccattcaaaaataccgaattcgaacccttttagatcgccaacggcattccagcttagtctccccattacggtatccactggattcgctttcaggtcttgcaccaaatcagtcggttccatactaccggtacggttcattgccgcagccagagattgcagagcagcataggtggtccagacaaacggacctgtcggatcgcctttctttcctttgatcgcttcaacaatagctttattcaccggtacctgatcgtaacgcttaggtaatgtgactagcatgccttcagaagcgactccggcgatattggatagcgaggagttacctacaccttccggtcccataaagcgaatattcagaccagcctgtttagcctgacgcagaatttgtcccatttcagggtaataaccaccaaaatagacaaaatccacattctcttttttcaggcgggcaaccagagccgaaaagtctttgtcaccagcagtaacgccttcaaacaagacaatattggctcccgcttttttcaatttatcaagaacagatcgagccaacccttcaccgtattgctgtttatcgtgaacaatcgctatatgctgaggtttaatcttttcagcaatatattttgctgccgttggcccctgatcagaatccaacccggtcgtacgcagaatcatctggtagccacgagttgtcaaattggcattggttgccgcgggtgtaatcataatgacgccttcatcttcgtagatatcagatgccggttgagtagatgaagagcataagtggccgataacataacgaatgttatcattaatcactttattagcgacggccacagcctgtttcgggtcacacgcatcatcatattcaacccccaccagcttattaccattaataccaccatgagcattgatatctgcaatcgcctgacgtgcgccagtaaattccatatcaccatattgagcaactggaccagacattgctcctacaatcgccactttgatctcttgtgcccacagtgagtgactcatcatcatggcaatacagcctgctaatagcgttttacctgctatgattttcattttaagtttatcccctgttgtgattggtctaatttattgtgtttaccttttagatctccgattatctaatgggataaccgtgatcttttgtgatcactgattagataaagtaatttttattaataaaattttatttttcatgttattaaaatagcatttcatgcttaaaatcaaattaacaaggtagctaaaagcattaattacagaataaaataccgccaaagttgattggaatttagacaaaacatagtgtgatgttctggttaaatattagtaaagcaatctttaactcgaaagatcgaccatgttaaaaacatttttccagtaacgtataaaagcggttacataacactccattgaaaattgatatgggaaaaccatgaagctaactattgaacaacttactgttttgtcagcacaagatattattgatctaaagaaaatctggcctcaacaggctccagagcaatggcaaagttggttaaaaaatgaaaataaactgttcgctgctcgctttaatgatagattactggccgcagtaaaagtgactttcagtgatcaatccggcctgcttaaagatttatgtgtccgtgaaataacacgccgccggggggtgggtttatatttgataaatgaaataaaagctcagcatcccactgttaatcaatggaagttaagccttgaagggttctcagatgctaacgaaccggcattaaaaggttttatgagcgcctgtagtttttactacgataccaagtcaaattcttattctagctgacccattttccagaccgcagccacattgcgggcagttaccctcaaattctcatgcccgcaaacaagagcgtcagaaagagaacagacgccggacataattgagaaaacggcatccaatccatgctcatgaacaatgctatagtcctgacttatactgccaaccaatgcaatggttgaaatagcatactttttggcgatacgagcaacaccaatcggcgttttaccgtaaatagtctggctgtctattcggccttcacccgtaataaccagatcagcgccttgtactacctttgccaattccagcgtggagataacaatatcaattcccggttgcaatttagcgtccagccaaccaagtaaaggaacacccattcccccagcggctcctgcaccgggtacgtcaataaccttaatgccggtcagtaattcaattttttcaccataatggcgcagagctgcatctaattctttcaccatctctggtgtcgcccctttctgtggcccgaaaatggcagatgcaccaaactcaccacataacgggttaattacatcacaggcaacgataatttcagttcgattcaaacgcgcgtccaaaccggaaagatcaattttagcaagccgacttagcgcagccccgccaagccccaacgctttaccatcagaatcaagcaaacaggctcccaacgcctgcatcataccggcaccgccatcattagtcgcactaccgccaatgcctaaaattatctttctgacaccttgatccaaagcagccaacatcagctcaccggtaccataagtcgtagttatcaacggattacgcttttccatcggcaccaaatgtaagccagaagccgcagccatttcaataacagcggtttctccatcacctagcacgccaaaaaaactatccactggctgatttaacggaccagtgaccaacagacgtacaatctttcctccagtagctgctaccatcgattcaactgtcccttctcctccatctgccatcggcaatttaatgtattcagcttgtggatagatttcacgaaatccttgttctatcgcttcagcggcctgtaaggcgctgagactttctttaaatgaatcaggcgcaataacaattttcataggattagatgacaacaatgaaaaatgaaacaaaaaaggcgataaaccattatcgccttttttaattatgaatgcgttaacgcaaaatcactctatttatgcctcaattgccacacgcaattttttcatggcattcttttcaagctgacgtacacgctccgcagaaacaccatacttatccgccaactcttgcagggtagatttattatcatcatctaaccagcggcaacggataatatcctgactgcgctcgtctaagctttctatcgccaccgataatttatcagccgcatggttttcccaattgtcctcttcaatgccgtctgcaaaatcagaagctttatcttgaagatacagcactggcgcaaccggttgaccttcctggctatcatcatcggcagacatatcaaacgccatatcttgcgctgacatacgagattccatctcacgcacatctttactggtcacgccaagttctttggcgaccatttctacttcgtcctgattgaaccaccctaagcgctgtttagttttacgcaaattaaagaacagcttacgctgcgctttagttgttgcaactttaacaatacgccagttacgcagtacatattcatggatttcagctttaatccagtgaacggcaaaagaaaccagacgcacccctacttccgggttaaaacgacgtactgctttcatcaggccaatattcccttcctgaattaaatccgcctgaggtagcccataaccagcatagctacgagcgacatgaacaacgaagcgcagatgagacagaatcagcttcttagctgcatccagatctccctggtaatgcagcctttcagccagttccttctcttcctctgctgtcagcattggataggtattagaggcacggacatagccctctagacttccttgaggaactaacgctaaggtttgcatttctttggccattcaaatcctctcaaataaggctcaaatcgttagtatggattagattacatcagtgtatatgaaccaacgttcaacatacagcggtacagtctatcaccagaatgtgcatattcaagctacagatccgtggaaaagtaataattttagcaccgaccatccctataatgggatcgcagaacaaaaaataacagatagttttatatttatgcaattaactttatttgtactatccccgataaatattaactccatcccacaaaagtatccgctaggttcactgggaaagtacaagcgcctttttaattaattctatatagcagaaaatcgtgattttggatttaagtcaatgaataagaaacttttaccttaggaaaaaaagagatggttatcgcgttgtcaggctgatttcgctcagcctgttgagaaaattaccgttttattctggcgtaaaatgacgcaaatgctgagttgtcgccaaccaagcagcgacccaaccaatcattgcagagagcaaaactaatagcagggactcatcccatgaaagcccatgtaaattaaatgtcgtaccaaacacgctggcaacctctgttacaacatcagaaagtttccacaccaatagtgcagataaaattaacgataaaattgcccccaaagcccctagcaacacaccaccattgaggaacgggcgcaaaataaagccatccgttgcaccaataagcttcatcacgttaatcgtatcacgatgactgaaaatactgagacgcacactattaccgatgaccaaaaacagcgcaacgatcatcaaaataccgattactgtcacaatctgaccgataagaccagtcagcgccgccagacgggcaaaccagctatcatccatccgaacttcttcaatacctttaacctgagaaactctatcacgcagcgtggtcagcgtctgtgaactctgaaaatcgattttcggtgtgataatagccaccgcgggcaacggattctcttccaacatatccaacgcgccaccaaagccagaccaagcgcggaattctgtcattgcttcctgacgtgagagatagttgacattgtccacaccatcaagcgctttcaactcacttattaatttctgcgcactgctatcatccagtgatttatcgagatataccgtcagttgaggggtgggataccatttttccgcagcctggctgacattcttccacacaatgtaacaaacacttggtaatgtcagggagatagcaatcaccatcacggtcaacaaagttgccaacggctgacgtgacatatctgtcaacgtattcatccaagcatagcgccactgctcacgccatcctccttgtaaaactttacttctcgatcgtgttactttccccgctgccttacgcacatttttaaccattatactctcccgccatacggccctggctcagagtcaggatacgatatttccgtctttcaatcagtgccatatcatgggtcgccatcagcactgtcacccctacccgattaaattcttcaaacagtcgtaaaataccttctgacaactcaccatccagattaccggtaggttcatccgccaataaaacagtcggcttattcacaaccgcacgagcaataccaactcgttgttgttctccccctgaaagctgaattgggaaatttttcgctttgtccagcagaccaaccttatccagagccgcggaagtccgacgacggatatcttcagaacttgcacctgaaataatcagcggcattgccacattatcgtatacggtccgatccagcagcagatgatgatcttggaaaatcataccaatctgacgacgtagaaaaggtacctcacggctttttaaccgactgatatcatgaccggcaaaccagatatgtccggcgctaggccgctcaatgccacagatgagtttcagcaaggtacttttacctgcccctgagtgacccattagaaatgccatttccgcagggcgcaaatgaaaatccaccccttgcagggcttgccgtccccccagataagctttactgacctgttcaaagcgaatcataggtaattaatcctctcgggcaaaaagtgcctctataaagtcgtctgccttaaatggccgtagatcttcaattccttcaccaaccccaatataacgaataggaatttcaaactgatcagcaatggcgaaaattaccccacctttggcagtaccatccaattttgtcaatgagatgcctgtcaacccaacggcttcatggaacagtttagcctgacttatcgcattctgaccggtactcgcatccaatatcagcataatttcatgtggagcattttcgtccagttttttcatcactcggacaatcttcttcaattcttccatcagatgagatttattttgcaaacgacccgcggtatctgcaatcaggacatcgacacttttggctttagctgactgaatagcatcgaaaatcacggaagcaggatctgcgccagtatgttgcgccactaccggaatatggttacgttccccccacacctgtagctgttcaacggcggctgcacggaaagtatccccggctgccagcatgacagatttaccttgtgcctgaaattgacgagccaatttaccaattgtcgtggtttttcccacaccatttacaccaaccatcagaatgacatacggcgtttttccttcaatgtccagaggcttattcactttagtcagaataccagacatctcttctttcagtttggcatataacgcttctgcatcttttagctctttacgactggcatgttctgtcaaactgctaatgattttacgggtagtatcgacaccaacatcagcaatcaataactgctcttccaattcatcaaacaggtcatcatcgatctttttaccactgaatagactaagaaaaccggaccctaaattctgacgagttttaaccaaactgcgtttcaagcgggagaaaaagccctctttagtcggacgctcttgctcttttgatataactggctgttcggtttgtacttgttctgcctgctccgctgccaatcttgcggcttcctctgcaacacgttgctgttctgcctgctctgccgccaaccttgcggcttcctctgcaacacgttgctgttctgcctgctctgccgccaaccttgcagcttcctcagcaacacgctgttgttctgcctgctctgccgccaatcttgcagcttcctcagcaacacgctgctgttctgcctgctccactgctaattgctcttctttttgctgttcttcctgacggccacgcccgaaccaggagaaaaagcctctttttttctcttttgccattagccactacactcctcaaggttaaatcatggcgttacaacagggaataataacgaaatttagaagcattctaacattttcgtaatagctcaacacatatcaatcataaatttcatggtaaattagtgcctgtaagtcttaacaactattacgcaaattatggcaaagaaaccacaacggcaatcgatgggacaaatccgcattattggcggaaaatggcgaggtcgaaaattacctgtaccggatagtccaggattacgtccaacgacagatcgcgtcagagagacgctatttaactggctagccccgattatccaagaagcacactgcctggattgctatgcaggaagcggagcgcttggattagaggcactttcccgttatgcagcacaggttaccctgattgaatatgaacataatatagctaaacaactttccgctaatttggatctgctcaatgcccaaaatgccgaagtcattaacgacagtgcattaacctatttatctcaaccaggaacatcctacgaggtcgttttccttgatcctccttttcgtaaaggaatgcttagcgaaaccataaaattgttggaagaacaaaattggctggcagatgaaagctggatttatgttgaggctgaatccgaatcaacggcgattgatgtccctgttaactggcaacttcatcgtgaaaaagtcgccggacaagtcgcataccggctctatatccgttacttacctgcataacgattactttggagtacacactaatgcttattcaattgggcaaactgttaatgatctgcgtttggggatttctgatctttaacctgatccatccatttccaaaaccattgaagtattttatggatatcgccatgattttcatggtggtcatgcatgcatttcaaatgctgcttctaaaagccagtcagcccaaagaccaaaaactctctagcctgatacaaaccaagatcttcttttttggtgtctttgaactactgtcaatgcagaaaaaacaacggaaagagaaaagtcatcacccaaaatagtgggcatgggcagcgcacataagcacccgaaaaatacatacaattatgtgaggaatgattcatttcattcctcgtattcaaaagctgtcacgtttatctgagcatggcttcgtactcctttctttgttgaacagatcaataaccggatcaacatttcttaattcactgcctatttccgcacagatacttaaaccaatctctattatttaagtctatattttgatagtaaaagagtagaccccttatccatcacttatttaaggaacaaagatgagctggccatttattgcagtatttctttctggttggttgtatgttgatgcagcttaccgtggcccaaactggcaaagatggctattcaggccagtcactctgctattgttgttattgtgggcatggcaagcgcctgagctgcatatttcaggttatctaatctgttttgggttatttactgctttaatatcagatgctctgcgcatgctccccagtaagtattcactattctctctaagcacattattcctctgttatctgctctacacgataagctttatcatgcagatgaatttcagtttcttcttcccgctgccattaattttactggttcttggctccattattctgctggttatttggaataaactggaagaaaggcgctggctggtcgttgcctcagttgtcatgctcctgataatggtgtggatggcaggtgaacaatacttctcccttaatacagcgtatggtttctccctattagctggcactgtcttgttgttactgtcacatagtgtctggttgattaaccattaccgtttccagttcaaatcttctaaggcgattgttgcaacctgttattttatcggccattttttgattattcgttctatttatctttaataaaaagactaagttgaaaatggatatcagcactcaatcgtacaatttaacaactttattttttctttttattgactctggagtaggctccaaagtgtagagtttaatcattatctttgagttaactctattcagggggagtccatgtactcaaattcaaacaaaaatagtgctcatcaacataaccaccagcatggaagctgctgcgcgacgacgacttgttcagatcaggctaaacaagttagtgaacatttacatcatcatgaacatgaacatggtaaggcttgctcacataagcatcacccttcccatgatacacaagagacacaagcacctgagcttttggcaaaccaacgtttcagttgggtggttaatggtatggattgtccaagttgtgcccgcaaaattgaaaccgcggtcagcaaaattgcagaagtgaaacaagccaaggttctattcgcaacagaaaaactagttgtggatgcagatacagatatacgttcagcggttattcaagccgttaatcaggctggatttactctacgcaattccgattcaagtcagaaagcagaaaaaagcagccgctggaaagaatttgcaccaatcatcactctttcactgatgatgctgataagttggggaatctctcacatcaatccctcatttggccgtattgcctttatcatcaccaccgtgattggattggtacctattgttaccaaagcctggcagctcatacgatcaggcacgccattcgccattgaaacattaatgagtgttgctgccataggtgcactgtttattgatgccaccgctgaagcagcaatggtactactgctgtttatgcttggtgaaatgctggaatcttatgctgccggccgtgctcgtcgaggggtgagtgcattaatggcattggtgccggaagaggcactactggtaaaaaacggtgagaaaaaaattgttccagtttcagaccttcgccctggcgatattatcgaaattgctccaggcggacgtttacccactgatgccgaattactcaattcattcgccagctttgatgaaagtgcgctgacaggcgaatctattccggttgaacgaatgcagggagaaaaagttccggcaggttgtttatccgtggatcgtgcaatccaaatgaaagtgctgtccgaacagggcaacaatgccattgaccgtattctgcaactgattgaagaagccgaagaacgccgtgcgccgattgaacgcttcattgaccgctttagccgaatttacacgccactgattatgctgttctctgcgttggttatcatcattccaccgactgtattcagccaaccttgggaaacatggatctaccgtggtcttactttgctactgatcggttgcccttgtgctttggtgatttccacacccgccgccattacctctgcccttgcaacagcaacccgccgaggtgcattgattaaaggtggtgcggcgctggaacaattgggactcatcaccactatcgcttttgataaaaccggtacgctgaccgccggtaaaccacaagtcacagatatacaaccagcagaaaatatcagcgaatctcagttattagctttggcttccgcagtagaaagcggctcccaccacccactggctaaagccattttgcaatgcgcagaaagtaaaaacgttaatattaccgaagccgaacaccgtaaagcgctggcaggggttggtgttgaaggtcagttaaacgataaacgtattcttgtcagcgcgcccggaaaactgccagcaaacacgttatctgatcgttggaaacaaaaaattgttcagttagaagattgcggtaaaaccgttgttgccgtgatgcatgatgaacaatttgccggccttatcgcgatgcaagatacgttacgtcaagatgccattgatgctatccgtttactgaaagatcaaggtattaaatcagtgatgttgacgggggataacccacgtgcagcaactgcaattgctggtcagttaggaatagatttccgcgccgggttaatgccggaagataaagtcaaagcggtcattgcattgaataaagatcacagcacaatgatggttggtgacggcatcaacgacgcacccgcaatgaaagcttccagtatcggtgtcgcaatgggaagcggtaccgatgtcgctctggaaaccgcagatgcagcattgactcacaaccgtctgaccggtttgtcggaaatcatcaccctttcccgcgcaacgcacaataatatccgccaaaacattgctattgcattggggctaaaagggatcttccttgttaccagcctattgggtatcacaggcttgtggatggcagtactggcagattctggcgcaaccgctcttgtgacggcaaacgcggtaaggttattgaggattaaactgaaataatgaaaatcgtctagctatttaaggatatgagtcttattcgcggctcatatcctgtgccatagtaagatgaattcagtggtgaaagcccattaacgttcgaagacatggtaaaaagcaaaaacgttcatttctcaacttagctgttatattcagagttgactctcttttttccgaaccagatagcgataaggcatttgttctgtttcttgagcaaccagttgatgctccataaaacggcagaaactgggaatatcacgcgtagttgccggatcgtcagcaagaattaataacatctgccctgcttccatatgacgcacagttttccgtaccatcattaccggttcaggacagcgaagcccttgtgtatcaagggttttgtctggatgagtaaacacatcgggcataacttatctctacttcagtcagtctattagaccgaattatattataaaaaagctagcaaaaattaactttacatacaggcattttgaattcgtgcacaaccgacgtatcatgtgaggcaccgtcagttaaaacggtagatcttttattgggttccctcaccccattttccaaaaaggtacaagaatgtttttatcaactacaattacacaacagcgcgctaccgctttaatttggctttcgctatttcacattctgattattatttccagtaattatctggtgcaactacccgtctctattttcggttttcataccacgtggggagcctttacttttccatttattttccttgcaacagatttaacggttcgtatctacggcgcaccactggcaagacggatcattactaccgttatgatccccgcattactgacttcttatattatttctgccctatttttccaaggcgagtggcaagagtttaccgcgctgcttgaattcaatctctttgttgcccgtattgcctgtgccagctttatggcttatttccttgggcagatactggatgtatacgtcttcaatcgtctacgccggagacgcaattggtgggtcgctcccgcagcagcgatgtttttcggcaacttacttgatagcctagcctttttctctatcgctttctaccgtagcaccgatgctttcatggcggctaattggatcgagattgggttagtcgattactgctttaagctattaatctgcttactctttttcctacccgcttacggcattttattgaacctaattttaaagtacttctttgcctatcaaactaacaatagccacattcaagttcgctgatttttatatgtccagcaactaccggtctcttaatcagattgcctgattaagagattggcaaggcaattagccttccacctggctcaaatcattcgatattacatcagtgatattactacaattttctattttaatttcgctttttcggttaattttactcttatcaattagcaaaattgattgtaatgatcgttttataataatttacccgaattctggataagaaattgacatgaagcctgttccaggagcaatgttttggtgcacgccgaaacagctccggggaggaacaggctatgaacaagttagttgaaattttctgcgatgtcgatgatttttgccgcttcttcattcctcaatgggaattattttgtttcgaaaaagggtaccgccagcgtcatcggcaaggccatatgcaccccagtgaaatcatgactattttgatcctttttcatatggcgcattaccgtgattttaaacatttttatctggaacatatttggaaatatcaccacaaagatttccccaccctgctcagttatacccgttttgtcagtgttgccccttccgttttggtcccactatgtagttatctgactcaattaaaaggaaaaccgaccaagattgcttttattgattccacgagtttgtgcgtctgtcataacatccgtatcccgcgtcataaggtttttaagggaatagcccagcgcggaaaaacatcaatgggctggttttacggcttcaaattacacttggttgttaaccatcagggcgaaattctcgcgctaaaagtgactcccggtaatgtgaatgatcgagagcctgtacgcgaattatcaaaatcgttaacgggttatctttacggtgataaaggttatctcagtcaggaactggccgatgatttagccaaaatcggtgtgactttcatcacgaagaaacgccgtaatatgaaagcacaagcgctgtctgagtggaataacttaatgttaaaaaagagatttatcatcgaaacgattaacgggcaattaaagaccatttctcaaattgagcactcgcgccaccgaagtataaaaggctttctgttgtgtgttttaggtggattgattgcttacagccttaaattgaaaaagccatcactgaaaattttctactcagagaaagatattttaatgacggcttaagcagaattcgggttaatttctttaaattgtgcattatcaatattcgaatcccataaatcgccatttgcatcaatgccgtcacaggaaaaaataaatagatcgatctctaaattttttaattgtgtaataagcgatgaattaatataacaagcatatttacgatgtaaaactccccctgaactgattaattgaatatttttcttctttgataattgatggcaaatacgaatgctattggtaaaaatagtaatattaatatcaggaagttgctttgccagataccaacatgttgaacttgcatcaagtgcgattatcattccttctcttatccaagtcacggcttgctgagcgataagcgatttactcgaaaaatggctcttaacccgcatgttaaaagagtcaccattaccctgcgtttccctgtttaaacttttcgctcttccatgcaaacgaagaaggcgaccatgctgttgaagaaatcacagatctcggcgtattgtttctttactcacttgtaaaactacggcaagttcagcagttgttaagattcatggtggtgaagaagatccatgattttttgatgacgttcatttctcataaaggaatcccttttatattgggacagaataggattattctaaccaatatcagaattaaaaaatcacgccttttttagcaatatatttctatagttaaccgttttctctgtgacgacgatagcaaaaacgttactatttcagccagcatgtttaaaagagacagagaggagaaatgaatgaagaaatcgttttcagcataggattacctactgctgtataaaatcttgaactaatgaatcataagcttcttggtgttcacctggtgtataaggttcatagtgataagaaaactgttcacgggctttttcagacgactcatagcaaccgacgccaaaccaagcaaagaaagaagcgcctaataccgtcgtctctgcttcattaagtacttttatgggtaggtttaaaatatctgcttttatttggttccaaagataatttcggctacctccttcccactaacaccaattcttgagcatgaaatccgcttattttttctaaaagggataggttttgttttaattgataccccaacgcttctaatgcagcacgataaaaatgacgtcgttcagtattcaacgttattccacatcatcctgcctcggaggttaacaaacgacaattcattcttaagttattagcgccgggaggaacggataaagcttcatggatcattttaagataagcctccgaagggggaataccttgccagaaaaactgtctgatccactcaagcactccagaagccagattccccaagcctaatggagaagaagggcttgttccaatacagagatccgggcatagatcaaaaaaacacacatttcccaccataaaatggatataacaactttatttatccacagccaaccattaatttttataggtggtattagtctgctaagtaacttaagtacttttttcatccgaagacagtttactgggctgtcacattttgctccctgtttgttaagaaaatttatacaacaaacagatacaaatattgagtttccacaaaaggaatatttttatgctgaaaattattcaatccccatccaaatatattcaaggacctgatgccctgctccatattggtcaatataccaaaaccatcgccgatcacgttttggttatcatcggtaattccgcgatgaaattggtgggagatacggttcatagcagcctggaacaatacgaaattactcgtcattttgaagtgtttggcggtgaatgtagtcggaatgagattaaacgcctgtctgacattcttaaaaaacatgaatgccaagccgttattggtatcggtggcggcaaagtacaagatacggcaaaagcggtcgcttacgaatccagattacctgttctgattgcccccactatcgcttccactaatgccccaaccagtgctctctctgttatttacagcgatgatggcaaatatgaagactatctgtttctcccaacaaacccagatattgtcctaatcgataccagcattatcgctaaagccccaacccgttttctgattgccggaattggcgacgcgctggcaacttacttcgaagcccgcatttgtggagccggctataaacctcgaatgacagagggtgggatatcccgtaccgcagtcgccctcgctcatctctgttacgaaactttgttagaagagggctataaagcaaaactggctgttgaaaccgacgtcagtacacctgcggtggaaaatgtcatcgaagctattacttacttaagcggcctaggctttgaaaatacgggtgtagccgccgctcattccgtacacaatggctttaccgtattagaagaatgccaccacatgtaccacggcgaaaaagtcgccttcgggatattagttcaactaatactggaaaatagcccaaatgaagaattagatactttacttgatttctgtgtacagatgggactaccggttactctggatcaacttggcgtgaaggatggtgaaaaactgaaagaaaaagtgatggcagtggcaacagcaagttgtgccgaggacgaaaccattcacaacatgccttttgaagtgacaccggaaaaagtgtacgccgctattatggctgctgaccggatgggacgcgactggttgtattaaatttaacaagagcgggcaaattgcccgctcaatttgttgacaaaacactgattttttatttaatcatttgttttaatgaagcctcgtttatcaaacggagcctgccgccatatttaagaaccccacttcccctaatttttcttcctgaaaagatcttgcttaagtactagcatccaaaaatataaattcactattctgattttttcaatttaataacatcactccaattattaataagaaatgtgcattcatgacacccaatttgacttcctttattaaaatactcttttgccttattaaaatcttgatttacaccaatcccatttaaataatttgttccaatagtgcgatagccctcaaaatatccacttttcccagccaattcgaaaagtgctctcgcatctgagtatttattttcatcctctaaaataaatcccaaattaaccatagatcttaacttatatttatcatttcttgatatagataacttatatttttcactggcttcttgacgataaccttctgtttgttgtattacagcaagcatccagtttgcatctacattaccactatttgctttctttactaatgcatgatattcatcttcatttttaggcattggaatagagaattctgataaaaaatcatctgaatgattgaagacaatcgatggggtatcttgtatgttcatgtctgaactctgaacaataaaagaaaaaaagaacattgagtagagaaaatatttcttattttttacaaaaaaatgactcataatataatctcgctaaaagtattatttatccctattatgtcaatatttgaatttagtgactccatctgtatgtttttatccacagcaaaaaacacatccactatcttagtcgtatccccattattccagagtactgagctttcaaacccatgaatattaccatttatatccttgaatccattttctttataggtaagatttatagcagagattcctgattcacttaatttatacaactctccatcatcagtgataccatctttattggcatcaatccataactctaatgaattccatagactatcattttgatcaaaaataccatcaaaattatcgtcaagatctgctaatgcagcaaacccatttactgatttgactccattttttaatatagaattattcccgaacaactcatttccgttatttatttttccatctccatttttatcccataccagaaatgcattattggcttctatccatcctgaactttcaacaataccatcattatcatgatcaaaatatatagaaccattttccgctatggtaataataccatcgccagttaaatcaataataagtggtgtctctgtactcttctgatcttcaacaatttcttcaaaattatctaatacggcatttggactcattccccgtaactcctgaatgaaatctataccatttttatcattatcataatgtgaaactcgaagaattgagtttacaaaatctatacagttattagtaaggaggttataattcggcttaaaatcatagaaatttccattttttaaatcagaaatgtaatttctcatattattaaccacactttctgaatatattggatatgtaacactggaaatttttgatttatcgtatgcgattgaatctctaaaagttatgttctcaactcctcctacttgcttattatcacccaagccccatccgattgattcaccctgaaattcaacccatacatgtccaaaagtagatttgctaacgtctcctgccgcattagtatatttagtacctgaagatgctatttttactgttattgtttctacatgcattcctttaaaattttcgttaaaaactttatcaactaacccatagtctttacttggcatagttatttccttattgaaaacttccatgattatctttgataaataaaataaaatttactgcaaatagaaataattatcaacatcactacggaaattttataaatttatataaaaaaatcaaattaataattttctaatattttatctttattattatatttttcgataataaattaaaactgttagcattttccttccgttactattttggctccgactattgccttgagtatagccacagcgatcacaatgaatttttctgtaattattgatacggcaaaggtcatgaaaatgaaaaaggataatcttagctaatccaatgagtatccaccgaaaaaaataatttctgttaatactgcttgctgtgaagtgaaaatcaatcaaccacgttgttaagcaaccgagaaaacgcactgttcaaaatcagtgcgttaggaaataaatttatcgagtctattcaggccaaaaattttcatccattatttgctcaaatgtccaaggacaagtttcaggaaatacactacgcctaatattagtttccctctctgctgcaataatggcatcaccataagcatcagaggaaatttcgctaagttctgactttaagctgggattttttttaagacgacgggctatttttcttctctgctcttcaatcgtaagcttccagctccgaccttgccgttcagattggaattgccattttaggaggtgaagaaacagtacctcaagacgagattccagctcgtttctttggctatttcccatactttctatttcctccgaaaggttttccctatccaactggctcaaatcaccggaacgaagcaaactggcttgctcctgagtccaaccataaaaatcactgttataacgggtcgtcatggttcctccactgggtatatcagctatacaactgtataaattatgagtctggcagattattagcacaccgtcaaaacagtatgtttatcgttaaaatcgattagcagcccattcgccataaattgagaagagcctttcatctggacggatacatatagaataacaaatagaagatgtatgaaaactgtggtttttgtttgataaagaacagaaacgaaccaaaaacgctcaccaataattaagtaaagatcgttattgtgacaattgtcacaatttcattggtaaagcacatttcaaaaagttaacaaatcactcagaattatcgccagggcaaaacaactttaacaactgagtgttgtttcacagataggttgagtgatttcgactatcataattttcgttatggaaaataaccacttacaaaacctttcattttcccatccggtggcattagtcaaccggcaagctgtttataacaccaaaaatgccatcggaggcaaaatatgttaagtattttcaagccggcacctcataggtcccggctgtcaacagaacaggtagatccagtctatcgtcgcttacgttggcaaatttttatggggatcttctttggttatgcagcttactatctggtaagaaaaaactttgcacttgcaatgccttatctggttgagcaaggtttttccaaaggtgagctcggtttcgcactatcagggatctctatcgcatacggcttctccaaattcatcatgggctccgtatccgaccgttctaacccacgagtcttcttacctgcgggtctgatcctcgcggctcttgttatgctgtttatgggtttcgtaccctgggcaacgtccagtatcactatcatgtttgttctgctgttcttatgtggttggttccaggggatgggttggcctccttgtggtcgtaccatggtgcactggtggtcacagaaagaacgcggcggtatcgtttctatctggaactgctcacataatgtgggtggtggtttaccaccattgctatttctgttgggcatggcgtggttcaatgactggaaagccgcactttacatgccggctttcgccgccattctcgttgcattgattgtctttgccctgatacgtgacacaccgcaatcctgtggcttgccaccaatcgaagagtataaaaatgactatccttctgattatacagagaaagatgaaaatgagttaaccgctaaacagattttcatgcaatacgtgttaccgaacaaactgctgtggatggttgctatggctaacgtattcatttatctgttacgttacggtattcttgactggtcaccaacctatctgcgtgaagccaagcatttcgcactagataaatcttcatgggcttatttcctgtacgaatatgccggtatcccaggcacgctactatgtggttggatgtcagacaaaatatttaaaggtaaccgtggtgcaaccggtgtgttctttatgacgctggttactatcgcaactatcgtattctggttgaacccaccaggtaaccctactgtagatatggcttgtatgttgattattggcttccttatctacggcccagtgatgctgactggtttacatgcccttgagctagctccaaagaaagccgcgggtacagccgccggctttaccggcttatttggttacttaggtggctctgttgctgcaagtgctatcatcggctacaccgttgactttttcggttgggacagcggctttatggtaatgattggtggtagtatcttgtccgttattctattgctaatcgttatgattaccgaaaaaaaacataaacaggaaatagcccaccaatatggctaacctctgtcattaaactgtgatatatcactgataatattaattaagccgcagcattatatacgttgcggctttttttaatctctaagctaagagattatgtcagtaagtgttattaacacaaccaaactcacagtttaatgagatagagtttatatcatcgctaaaacggagaaacacacatgcaaactccaattaagacaatgataattggtatcattttaacttcatcgatgtcaggcatcgcgcaagcagcagataagattgttatcgcccatcggggcgcaagtggatacttacctgaacacactctgccggctaaagcgatggcttatgccgaaggtgctgattatctggaacaagatctggtcatgactaaagatgatgaactgatagtcttacatgaccattaccttgatcgtgtaactgacgttgccaataaattccctaaccgtgctcgccaagatggacgctactatgccatcgactttactttgtccgaaatcaagtcattaaaattcacagaaggtttcgatattaaaaacgaccgacaaatacaaaatttctccaatcgtttcccaatatggaaatctgatttccgaatccatacttttcaggaagagattgaatttgtgcaaggattaaataaatctaccggcaaaaacatcggtatttatcctgaaatcaaagcaccgtggttccaccagaaggaaggaaaagatatttctactaaggtactagccgtgctaaaagcgtatggttacaccaagaaaagcgacaaaatttatctgcaatgttttgataccaacgaacttaaacgcatcaaaaacgagctggaacctaagttaggcatggatctgaaactggttcaacttattgcctacaccgactggaatgaaacttatgaaaaacaatcagacggcaaatggacaaattacagctatgactggatgttcaaacccggtgctatgaaagaagtggcacaatacgctgatggtatcggccctgattaccatatgcttgtggagaagtattccacaccaaccaatattaagttaactaatctggtaaaagaggctcacaccaacaatctggaagtccatccatacacgattcgagttgatcaactgcctaaatacgccaccagcggcgatcaacttttcgatatcatatataaccaagcgggcgtagacggtgtattcaccgattttcctgacttgggtgtgaaattcctgcaaaaacagcatcaacagaaataagatgcaaacagggcgcctcaatcagcgccctgttcctgttgcttaataattacgccttagttatcgaaaaggccataacatcactgagtttttcagcccctaaagccaacatcaccaaacgatcgacaccaagcgccacaccggcacattcaggcattccttgtttcagggcaccaatcaggttttcatcaatcggtcgaacaggtaaacccaacgctgcacgtttacggttatcccgttcaaaacgctggcactgctcatgactatcagtcagctcacggaagccatttgccaattcgacgcctttaaaatagacttcaaaacgctctgcaactcgatgatcttctttgctgatttccgccaaagaagcctgagaagccggaaaatggtagataaaagttggtttttcagtaccaatgtgcggttcaacaccaacagcaaataaaagttgtaataaagtatcccgatcctcttctatatcagcaatattactcagatccaacttggcggcgatttcacgcagcttttctttctctgctgatagcggatcaatatccaaataacgcaagaaagcttgttgataagagagtgattctgcactttcacagtcgaggatttgctgaagtaaatcatcaacttcattcatcaaacgatacatatcatagtgaggccgataccattccagcatggtaaattcaggattatgataacgacccgcctcttcattacggaaacagcggccaagttgataaatagggccacttcctgctgccagcaagcgtttcatgtgatattccggacttgtcatcagataaagagtcataccatctgcggcacctgggccaacaaactccgtctgaaaagaaaacaattggatatcagtcactgtaaactgacccatcgcaggtgtttcaacttccaataccccacgatctgcgaaaaagcgccgtatttctgctaaaatagtcgctcgtttcaacaagttggcgatagctgcacttggctgccagtttgctgtttcgctcatgtaaatgactccaaaataaaaccaaacgtgcagtctacctgcatcacacatatcagacaaattattaccgtctgatcatcccggaacaacttagcttgtcttatacccgttatctttcaagttgcctctttgttggttgcactcactcaccccagtcacatcgttatttatgctcccggggattcactcccttgctgaatatatacgactactgttaaacaataaaatatattctctttttattatgggcgatatagacaattatcactcataattattaaacaacctgaatcaattatcatatttaaattaaaagtaaaatattataagtaaactgaaaaataatttcagatgataattataatataaccagtaacactaaaaatacattattaataaaattattatgaaatataattaacattttatctggtgcattaagtaactaatcctattttaatagtaaaaaaatagtggtcaggtaaaactgaccaccataataagatgtcatcaaagatcacaattgtccaattacaattttataactttaaactggcaatatatatccaagtcatatttatccggtttaatatagttaaaaatacccccgatattgattcgactcagatattttccattatctgcacacaaagctatcacattatcatcgatatattctaaagtaaaaatagaataaacatcaatatctgattttgtcgctactatataatcgctaccagccagagatatccgacttaaatagaggccattgcttgcacgaagtgctatcttattagagctaagttgtgttgcagaatattttgtgtaaatatcaataatagatttattaacttcaataaaatcaaaacctcctcctcgaacaattcgacttaaatagaacccattatctgcctgtaatgcaataggactacttgataatcccataatattctcctatttaaatatacccgttatccttcaagttgcctctttgttggctgcgctcactcaccccggtcacatcgttatctatgctcccggggattcgctcccttgccatcgcgatgcatcttgaaatccattgggtatatatataattcattttggtcaactatgttattaatagatcatcaatttaaacaccacattttactattcctgtaaatataaagcattttcaatgaatatatacaaccgatataattattaaatatcaaaatatattttggcacctgttttgaataatatatacccaagaaacttcaagatgcagtttttagcacctgaaaatggtcgttaattctagacatcagcgagtccgctatatccggtagcgttgtggtgaaaaatttgaagacgttgtctcgaaattcatgtttatccgcaaaataacggttatttcgaacctgttcattcatgaccttccataatcgctctattgggtttaaatttgggctatagggaggaaggtaatgtaactcaatattgctaacataagcccactccttaacaagatgagctttgttgtaacccgccccatccacaataagatgaattttttgatgatagtcaggataagactttcttatttcattgaaaaaacagcaaatgttgtagtcattgatggtttgatattcctggaacaccgtacgaccaatggcattcaggttgagcgcgcccaatatattcaggcgagtccggcttcctgttgtttttactgtttttttctcgccttttcgcatccagccataaccgagtttggtgccttgagtcgggtgaacagcatcaagaaaaaggatgggttcgtctttcgctgtgactttaagattctcataatattcaataaattgtcgctgtttttctgcgtcgaatttatgagggacgccacaaggttttttataagaaaaaccctgacggtgtagccatttattcatgccgggaatgctaaaggtaatattccagagctgagcaacataggccacgatttcatgggtgtgatggaaaagatgttgagataagtgattgattaaaaaatcagtttgttcttgagaaagcaaactatcagaccccccattatcagatttaagtttaccttgattaaggtaatcgctgatatgacggttaacggtcatttcatgaagacgcagggcctgagcgatcatcactgaactccagccttcagaggccagcaggaccgctttgatgcgatcacactccctcttatcacggcaggtgtgatggagatgttcaagttcggctttttgttcatcggtaatgaatattttcatagcgaggataatgatctccatttcggataaaatcaagcatcttcaatgattacgggtataattatttaatgtttaattataatattcattaagcatgaataactcccacatttaaactataaaaccacaaactataaataaaataaaaaattatttaaaatcattaacttcaacattataaatagccttaaattccattattacctaattatcttgaaataagtaacaggtttttatctgatatattaaatagctgatattattagtgtgaaaataagaaaaaataatagtggccagttttacttgtccaccataaaaaactcaagtaaaaatcattatttatgcaattaatgtggtcactttaaaacggcaatacgcgtctaaattaattttatcatgattattttattttcaattataatattcataaaacaaacagaagtcatttctatatttaatttaaaaaacaatcatagaaaataaaaaaataatttaaaattattaactacaacattatcaaattaaaataaaaattttaaatctcgctgcatttaaataatttctaatatcgataaaaaaataccattcaagccaaattcatattgtatggccttgatagtcagctctacaagtgatcctctcaatttcccccctaggtaatagctctgtcggtcaatgataaattaaagtcactaattcctgtcttagatcaagttttagtgatcaaatccgacaaaataccctttcatatcaaatttacctcacttagaacccgctatacttaattcaatgtaaacagtaataaacagcttcccttgaccgttaaatcaccagattttacctacagaattttgcatatgaaaaataacaacaacatttaggaaagttacgacaattttgcttactaattaatttcactcaaataatggagaagcacagtgcaaatctttaatgccgatctcgcgattatcggagccggaggcgcaggcctacgagccgcaattgccgccgctgaggctaatcctcagatgaagattgctctgatctcaaaagtttacccaatgcgtagccacactgtggcagcggaaggtggatcagcagcagtcacccaagctcacgactcctatgacttccatttcaacgataccgtatccggtggtgactggttatgcgagcaagatgttgttgaatatttcgtcgaacattgcccgacagaaatgatccaactagaacagtggggctgtccgtggagccgtaaggaagatggttccgtcaacgtgcgtcgttttggtggtatgaagatagagcgcacttggttcgctgcggataaaactggcttccacatgttacacacgctattccaaacctcccttaagtatcctcaaattcaacgctttgatgagcattttgtcctcgatattctggtagatgaaggacaagcgcgcggcctagttgcgctgaatatgatggaaggcaccaaaattcagatcagggctaatgccgttattatggcaactggtggcgcaggccgtgtataccgttacaataccaacggcggtatcgtgaccggtgatggtatgggcatggcattccgtcacggcgtaccactgcgtgatatggagtttgttcagtatcatccaaccggactgccgggttccggtatcctaatgacagaaggttgtcgtggtgaaggcggaattttggtcaacaaagatggctaccgctatttacaagattatggcctcggccccgagacaccattaggcaaacctgaaaacaaatatatggaactgggtccccgtgacaaagtttctcaggctttttggcatgaatggcgtgccggtcgtactatttcaactccacgtggcaatgtggtttatctcgatctacgccatttgggggagaagaaattacttgaacgcctacccttcatctgtgaactggcaaaggcatatgttggtgttgatcccgttaaagagcccattccggtccggcctactgcacattacactatgggtggtatcgaaactgaccagaaatgtgaaactcgcattaaagggctgttcgctgttggtgaatgttcttccattggcctgcatggtgcaaaccgccttggttccaattctctggctgaattggtggtctttggccgtctggcgggtgaagaagcagtaaaacatgttcaacaaaccaaacccattaatgaccgcacattggatgctcaggcatgtgatgtagtcgcacgtttgaacaacttgctgaaacaaaaagggacggaaagttggtcgaagatccgtgatgaaatgggtatctcgatggaagaaggctgcggtatctaccgcacccctgaactcatgctaaaaacgatcgataagattgctgaactaaaagatcgcttcaaacgggtgaaaatcaccgataacagcaatgtgttcaacactgatctactgtacaccattgagcttggctttagcctggatgtagctgaatgtatgattcactctgcgataaaccgtaaagagtcccgtggcgctcatcaacgtctggatgaaggttgtaccgaacgtgatgatgaaaaatgcctaaaacatacgctcgctttctatgaccctgaaagtgttcctcacctagaatacagtgatgtgaaaatcaccaaatccatccccgcaaaacgtgtatatggcggtgaagccgcagcacaagagaaaaagtataaggagcaggagaatggttgatatgaacaccctgagaatggaggtcatgcgctataacccggaaagtgaccataaaccccattttataacctatgagattccttatgatgagcagacttctctacttgatgccctaggttacattaaagacaatctcgctcccgatctctcttaccgctggtcttgccgtatggctatctgtggttcttgcggcatgatggttaaccgtgtgccgaaactggcctgtaaaaccttcctgcgtgattatcctcaaggaatgaaagttgaagcgctggctaactttccgattgaacgtgacctggtcgttgatatgacccacttcattgaaagcctggaagcgatcaaaccatacatcattgggaatgaccgtagaccttctgacggcccaaatattcaaactccagcacagatggcaaaatatcatcaattttccggctgtatcaactgtggcttatgttatgccgcttgccctcagtttggtctgaaccctgaatttatcggcccggcggcgatcacgctggctcaccgttacaacctcgacaaccgagaccacggtaagaagaagcgtatgccccaacttaatagccagaatggggtatggagctgtacattcgttggttactgttctgaggtctgtccgaaacatgtcgatccagccgcggctatccaacaaggcaagatcgaaagcgcgaaagacttcatgatcgccatgctaaaaccacaataaggggagaaagaaagtaatgacgactaaacgcaaaccttatatccgcagcatggctcccaactggtggcagaaactgggcttttaccgcttctatatcctgcgtgaaagtaccgcagtgacgactatgtggttcagtatcttactgatatacggtctattcgctctaaaaggtggtacccaaagctggcatgaatttgtcacgttcctgcaaaatcccgtcatcctgctggttaatatcatcactctgctaggtgctctgctgcatactaaaacctggtttgagctagcgccgaaagcagctaacatcgtgataaaaggcgaaaagatgggttctgggccagtaatcaaactgctatgggccgtcactattatcgtcaccatgattatcttaggtatagccttactttaacctcaaggaggatctaatgaatcaaatacctaaacgttccgatgagccgattttttggggattatttggtgccggtggtatgtggggcgcaattgtggctccagccattattttactcgtcgccatccttttgccattggaagtcgcgccggaagcgttaagctacgcacgaattctggctttctgtcagagccttattggtcgtgcgttcctattgctgatgattattctaccactatggtgcggtttacaccgtatccaccacggtatgcatgacctgaaaattcatatccctgcgagtaaatggattttctacggcttggcagcgattctgagtgttgtcgctatcatcggcgtttttactctgtagtcgaacaacaacgagctgaacactatttctgcaatgcagcggcatctggagaagaggcatgaaacgactacaaaaagtcggtatttcttgataaagaatatcctatattaacccgaattctggataagaaattgacgagaagcctgttccaggagcaaagttttggtgtgcaccaaaaacagctccgaggggggaacaggctatggacaacttagttgaaattttctgtgatgtcgatgatttttgccgttttttcatccctcaatgggaacaattttgtctcgatagcgggcatcgtttacgccgccgacaaggtcatatgtatcccagtgaaatcatgaccattttgatcctttttcatatgtcgcattaccgtgattttaaacatttttatctagaacatatttggaaatatcaccataaggattttccaaccttgcttagctatcctcgttttgtcagtgtggctccttccgttttggtgccattatgcagctatctgactcaattaaaagggaaacccacaggcattgcttttattgattccacccgtttgagtgtctgccataacattcgcatccctcgacataaggtctttgcggggatagcaaagcgcggaaaaaattcaatgggctggttttacggtttcaaattacacctggttgtcaatcatcagggtgaaattctcgcgcttaaagtgactccgggtaatgtggatgatcgggaacctgttcgtgaattatcaaaagaattaacgggttctctttacggtgacaaaggttacctcagccaggaattggcggacgatttagctaaaaccgatgtcactttcatcacgaaaaaacggcgtaacatgaaagcgagtatgcaagctgagtgggataagataatgttaaaaaagcgttttatcattgaaacgattaatgggcaattaaaaactctttctcaaatagagcattcccgccaccgaagtataaaaggctttctgttgtgcgttttaggtggattgattgcttactgccttaaattgaagaagccatcactgaaagttttctactcagaagacgatttttcaatgacggattaagcagaattcgggttatattaccctatggatttcaaggtgcatcgcgacggcaagggagcgaatccccgggagcatagataacgatgtgaccggggtgagtgagtgcagccaacaaagaggcaacttgaaagatgacaggtatagaagctgcactgccaaaatgtgaaacctttggagtgcagttcaatattaactggacaatttcagaccgataataccggcgataatcagagcaaaacttaaaatcctggcaaagcttgcagattcaccaaacactataatgccaaaaatagcggtacccactgcacctattccagtccagaccgcataagctgtacctattggtaaacctttcattgcataagcaagcaatcccatactgagcgccacagcactggctgtaataaggctcggtatcaaccgggtgaaaccatgagtatatttcaggccaaccgcccagacgacttcgaataaaccagcaataacaagaacaaaccaggacatatcaacgccccataatagtgttgtggagtcgtccccagaaaacggcagtatatccaggtcgtcccggataaccattagaaacagtgataaattatagtcgtgtaaaatggcagtatcaataacacaatatcgtgagctcaaaagacatgactagccatgccctctgtataagaaaaaccacagcctgcttccagaactgcggcttttatcaaatatcgtcggtaattattttacgcgagaaacgtattcaccagaacgggtatctactttaatcacttcaccaatttgaacaaacagaggtactttaactacagcaccagtgttcaaggttgctggtttaccacccgtacctgcggtatcaccttttagacctggatcagtatcagtaatttctaattcaacaaagtttggtggagtcacagaaataggctgaccattccacagcgtcaggatacactcagcttgttctactaaccatttcgcattatcgccaactgctttttcatcagcagctaactgctcgaaggtttcgttattcataaagtgccaaaactcaccatcgttatacaggtaagtcaggttcatatccatcacgtcagcggattctacagagtcagtagatttgaacgtcttttccagcaatttaccggaaatcagcttacgaatacggacacgggcaaacgcctgacctttacccggcttcacgaattcactttcaagaatagcgcacggctcgccatctaacatgattttaagacctgaacggaattcattggtactataagtagccatggagatcctcttttaaacaaaatggcttagccaaaaaatggcgcacattataaccccaaagatcatcatcagagaagactggttgaaacaacttacagatgttattaccgatcctgatgaattattacaattattatctttagataaacacccgaccttgaccaaggggagcggcgcacgtcgcctgtttccactacgggtacccagagcttttgttacgcgtatgcaagtaagcgatcctaatgatccgctgctacttcaggtcataacgacaccagaagaattcacgcttacgccgggtttttctaccgatcctctggatgaacagcgcagtgctgtccccggcctattacataaataccgtaatcgcgcactgttgctggttaaaggaggatgcgcgattaactgccgttattgcttccgacgtcatttcccatacgaagataacaaaggtaataaacgcaattggcaacaagcgttagattatattcagcaacatcctgaacttgatgagattatcttctccggtggcgatcctttaatggcaaaagatcatgaacttgactggctgatcagcaatctggaaaagatttctcatattaaacgactgcgtattcacactcgtctgcctgtagttattcctgcccggatcacaacaacgctttgcgatcgactggcacaatcgagattacaggtgatcatggtgacacatatcaatcatgctaatgagatcgaccaatccttacggaacagtatgatattgctgaaacaagcaggtattacgttactcaatcaaagtgtgctgttacgcggtatcaataatcattctgatactctggctgacctgagcaatgctctgtttgatgcaggtattctaccttactacattcacgtgctggataaagtacaaggagccgctcattttatggtcaatgatgaagaagccaaggggcttatccgggaattgctgacaaaaatttcaggttatttagtaccacgtctcgcaagggaaatcggcggagaaccgagtaagacacctcttgatctgggattaaggcaaaactaacaaaaaattcatgcccggatacttttcagccgggcataccattcaaattctgaatgtcattactgacatttatagacttgaccgatcatcttactgtccagtggcgcaaagctcgataacagactttcactcggactggtgactccataaatcacatttccccccatgactgcggctttattgcgtaaatcattggctgccccacgcattgagctgctttcattacttacaccagtcatccaattgctttgagtaccggttacttcacctaataactggcactcgctgcctggcttagtatcaacaaatcgaacctgtgaaccaccagaagttaattggttagtcgttgtacaccctgccaatagtaacaatactgaagcactgagcaaaactttaattcgcatgtttttcctcacccattgttggaaattcgacaattaatcatcaatataccttgttgtacaccaatatcgcaaaaaataatttataaagtcatccttcaataaagtgtttaggtcaaaaatattttatgccaaggtgaatgcagtaagaaaatagagaaaaataatcgaataaataacatgaataagtttgataaatgctttatcttcaaaaaaacatcactcattaatcaatacataaattatctatcaaaaaagccttttatccatgatattgactaacagatagaacactaaaaatattattatacccgtcatctttcaagttgcctctttgttggctgcactctctcaccccggtcacatagttctctatgctcccggggattcactcccttaccgtcgcgatccatcttgaaatccatagggtatatttcctgttggcatatttatgtttatttttccatctgataaattcaattcccatgttgcgaatgatattaaatttaaaccatctcgctcaaaacactattagaacatctatcaacagttgtgattcgataatatctcacgacaattttttattgagcaattatttgacgttatatcccataaaaacgccacatattaatagggttaaatttcatgtggattttgttgtatgtaaataatgatacttttttaacatggattcaagaaaccgtgccccatttggatagaaatacctccattgacaccacgataatgggccatcaaacattttcgtggcatcatattttccgactatcaccatccatcaccaatgtggatacgctctgtcagatagtccagaaatacccgtacccgtgatgggagctgcctaccttggccgacaaaaactgcatatatttcttccttatcgccaggattatagttctcaagtacaggtagcaacaaaccgctccgaatatcagcatccacatggaaacgagctaatcgtgctaagccaagtcctgctattgcagctttacgcatggtttctccatcaccaagtagcaagttccctgaaggcaattgttgcccccactcttccgaatcgatgaaaggccaagctttcatatgacgggtaaaaccaaaaccaagtcgattgtagcgccctagatcgctaggcatagagggtatccccatcctttcaaggtatgaaggagatcctaccacaaccattcgacttgcccccaacttgcgtaccatgaaacatgaatcgtccagaggaccggtacgaatcgccacatcactacgatcatcaagtaaatccactatcaagtcacataatgagatgtcgagtgtgatctctggataacgttgcaggaaatccggtagtaaaggcatcaagcaatgttttccaaacgcaacatgacaattcacacgtatccgtccacgtagcgcggttccctgatttgcttcttgttctgcggctatgatgtcctccaaaattctgacactacgttcatagaaaacagaaccttcagccgttaactgaagtttacgtgtcgttctattcagcagccgtacaccaagtcgcatctcaagtcgattaataagcttactgactgctgacggcgtcatatcgagcttacgagcagcagcagagagaccttccgactcaattacttgaacgaatacagccatttcggtggatcgattaaatttgtgcatagatatttgaattattttccaaagtcctatggataaatgaattttagtctaataagctcattttttctaagtttaaggaaatatttttttctttaagaatttcccctatgccaaatcatctttaattacttaacaccttgaatcgctttttaagctaatgaagagggcaatcactttgtaaaaccgcagtttcacatggtgcaggttcaagtgcagcattgcacaaactttaatcacgagtatagcagcactacagaaggaaataggagaagagaacgttatagcaagagcagcctcttgtatcgttcattgaaacatcagcaaaaataaagttgacgggaaagtacttcagctatcctagtggacttattacttggtaaacacgatgccgtttcatcacaatattgggagcaacatcactgggagcaacaccacttcaacgtacgtttttcataaatattacggaaatacaggaggctttcacccctatctgaaatcagacccggagaccgatatccaagcttgaacctcagcccggatatcgaatttttttaaatgctattttagcggggtgggaatattcaccatgatattaatcggtgaccacgatggacgtaacccgctcggctagcgacctatgcggctattacatcataccgcccataccgcccatgccacccataccgcctgctgcacctaaatcagctttatcatctttaggcaggtcagtgatcatacattcagtggtgatcatcagaccagcgatagatgctgcaaattgcagtgcagaacgggtcactttggttggatccaaaatacccattgcgatcatatcgccatactgttcagtcgttgcgttataaccgtagttgccttcacctgctttcacgctgtttgcgataacagatggctcttcacctgagttgtcaacgatctgacgtagaggagcttccatcgcgcgcattgcaacacggatacctacgttttgatcttcgttatcgcctttcagaccaacaatagccgctgcaacgcgaaccagtgcaacaccaccaccagctaccacgccttcttctactgctgcgcgagttgcatgcagagcatcgtcaacgcgagcgcgtttttctttcatttcaacttctgttgcagcaccaactttgataacagcaacaccaccagccagtttagctacgcgctcttgcagtttttcacggtcgtaatcagaagtggactctttgatctgctgattgatctgagaaacacggcctttaattgcatcttcttcaccaacgccatcaatgatggttgtggtatctttgttgataacgatacgttttgcctgacccagatcttccaacgttgctttttccaactctaggccgatctcttcagaaataacattaccgttagtcaagacagcaatgtcatgcagcattgctttacggcgatcaccgaagccaggcgctttgaccgcagcaactttgacgatgccacgcatggtattaacaaccagagttgccagtgcttcaccttcaacatcttccgcaacaatcagcaaaggcttgcttgccttagctacaccttccagaactggcaacagttcacggatgttggagatttttttatctaccagaagaatatatgggttttctaattcaacagaaccgttttctggtttgttgatgaaataaggagagaggtaaccacggtcaaactgcataccttcaacgacatccagctcgtcttccaggccagtaccttcttcaacggtgattacaccttctttaccgactttatccatcgcttctgcgatcaatttacccacagtttcgtcggaattcgcggagatagtacctacctgagcaatagagatggaatctgagcaaggtacggacagttttttcagttctgccactgctgcaaccacggctttgtcaataccgcgtttcagatccattggattcataccagcggctacggctttcagaccttcagtaacaatagactgagccaatacagttgctgttgttgtgccgtcgcccgcagcatcattcgctttagaggcaacttctttcaccatctgagcacccatgttttcgaacttgtcttccagttcaatttcacgagcaacggaaacgccgtctttagtgattgcaggagcaccgaaagatttatccagcacaacgttacggcctttagggcccaaggttacttttactgcatcagcaagaatatttacaccacgtagcatcttaacgcgagcatcgctaccaaattttacgtctttagctgccattgtttctttcctttaaattcgttcagttaagaagatctaagcgcaacaattacgcttcaacaattgccagaatgtcgctttcagacatgatcaacacttcttcgttgtcgatcttctctgatttaacaccgtaaccatcgttaaaaataacgatatctccaactttcacacacagtgcttttacatcaccgctttcaaggatgcggccattgcccacagccaaaacttcgccacgagtggatttacccgcagcagtgccagtcagcacaataccgccagcagattttgattcaacttctttacgcttgacgattacacgatcatgcaatggacgaatattcattgatagctctcctataagaaagtccatatcaggtaagaggattgataccagtacgctttcattaaaccagtatcataataaattaaatgggggcctatttatgatacttcaagggcaggcaaaaaaatattttacttttttcttgcccacagaaaaaaaccgatgattaaaccaaacattcagaaaatggccgcttatcaatgaggcttatgctcgtcgtcatcgggtttatggtctttcaacgttcgggaagggtcatcctgcttacgctcgtattccccctcaaaagtattactatcccgtctaaacccaccgctattatgaggacgatagaaattgatatgtggcatcagtttcatcactaatgttttttgaaccggtggcaataacaacagcaatccaagaaaatccgtaaaaaaaccggggaggagtaacaggaaacccgccagtaaaagagagacgctctttatcatttccgcagccggactctccccattaatcagcttctgctggatctggataaaattctttatgccctgactgcgtaccagagagataccgatacaagaagtaaacaacaccagtaacagagttaacagtacacctagttcagaggcaacacgcacaaataaggctgactcgatatagacaagcaaaaatatcaggataaatggcaaccaacgcacttggtgctccttcaattgatttggatgaacaggttgtatcctgaataaatcatatcaacaaaatccaagggacaaccaaattaatattttttcagtttattaaagatataattggggtcacagttatcgttttcaatccactgaaaatctttctaattagacacaaaattgtgataaatatcacatatatcaaatcagactaaacaaataccactataaagtgatccagattcaaggcatttattgctaaccagcatatgatcacgccggcaatccggtgataaaaagttcatatcacaactattgcagttggcaacataatgatttaatgaacgcataattagacagtaaaaacgtcatctaataagaaggttctcatgtcaaacaacattcgtatcgaagaagacctgttaggtaaacgagaagtccctgctgaagcctattatggtattcacaccttacgtgcgattgaaaacttccatatcagtaacaacaccattaatgatgtacccgaattcatccgtggcatggtgatggtaaaaaaagccgcagccttagctaacaaagagctacaaactattcctaaaaaaattgctgacatcatcatcaaagcatgtgacgaagtgctctataccggcagatgcatggatcagtttccggtcgatgtgtttcaaggcggtgccggtacttcactcaacatgaataccaatgaggttctggcaaacattggtctggaactgttaggccataaaaaaggcgaatatgagtacctgaatcccaatgaccatctgaataaaagccagtcaactaacgacgcctacccaactggcttccgcatcgcggtttataactccatcctgaaactgatcgagtctattgagctgttaattgtgggtttcgataaaaaatccagagaatttaatgacattctaaaaatgggtcgtacccaattacaggatgctgttcccatgacactggggcaggaattcaacgcattctctatcctgttgaaagaagaagttaaaaacctcaaccgaacctctgaattactgctggaaattaaccttggcgctactgctatcggtacccgcttgaatacagcaccaggttatcagaaattggcggttgaaaaactggcggaagtttcaggtttaccttgcgtaccagccgaagacctgattgaagccacttctgactgtggggcttacgttatggtccacggtgctctgaagcgcctggctgtcaaactgtctaaaatttgtaatgacctgcgtttgctttcttctggccctcgtgctggcctgaatgaaatcaacctaccagaattacaggcaggctcttctattatgccggcaaaagtgaacccggttattccagaagttgtgaatcaggtttgcttcaaagttattggtaacgatatttgtgttactatggcgtccgaagcaggccagttacagctcaatgtaatggaacctgctatcggtcaggccatgtttgaatctatctccctgctaagcaacgcttgccgcaacctggtagaaaaatgcgttaatggcatcacggctaacaaagaagtttgcgaaaatttcgtattcaactcgatcggtatcgtgacatatctgaacccattcatcggtcaccataatggtgacattgttggtaaaatttgtgctgaaaccggtaaaagtgttcgtgaagtcgttctggaacgaggcttactgaccgaaactcaattggatgacatcttctctgtagagaacctaaaatgcccatcttacaaggcaaaacgttttgacgattaagttgttgaatataataaaaaatagctcttagcaacaaggcacgcaactccaactggatagcgtgcctttttacttccctacatgcacaaagtattaacctaaaattttcaaatttttaattatttcaaggagtcactattatgttagccgtagaattgattatcgttctgctggccatcttcctgggtgcaagattagggggaattggcattggatttgccggtggtcttggcgttctggtgctggctgtaattggcgttaaaccagggcatatcccatttgatgttatttccatcattatggcagttatcgccgctatctctgcaatgcaggttgccggtggtctggattatctggttcagcaaactgaaaaactgctgcgtaaaaacccaaaatacatcacgatactcgcacctatcgttacctatttcctgacactgtttgcaggtacaggtaacatctccctgtcagcactgcctgttattaccgaagttgcgaaagagcaaggcattaagccatgccgtccactttccactgcggttgtagcggcccaaattggcatcaccgcctcaccaatttccgcggcggtcgtttatatgtcttctctgatggaaggccacggcgttagctatatccatctgttaatggtgctattaccatccactttcgccgctatcgttctgatgtctttcatcatctcctgggcgtttaattccaagttgtctgatgaccccatttacttaaagcgcttggaagacaacttggtaactctgcgtggcagcaaacaaattgagattaaaccaagggctaaagcttccgttctgttattcctgtccggtgttatcagtgttgttatttacgctatcgtcaatagcccaagcatcggtctggttgaagaacctctgatgaacaccactcacgccattctgatcattatgttgagtgtcgcaactatcacaacgatgttctgttcagttgatactgacgccattctgaactccagtacctttaaagcgggtatgagcgcatgtatctgtattctaggtgttgcatggctaggagatacttttgttcaggcaaacatggattggattaaaggcaccgctggagacttaatccactctcaaccttggttgctagcgatcattttcttcttctgttccgccctgctctattctcaggcagccaccgcaaaagcgttgatgccgatggctttggctcttaacgtcacaccattgaccgccattgcctctttctcagcggtttctgggttgtttattctgcctacctatccaaccttggttgccgcagttcagatggatgacaccggcacgacccgtatcggccgttttgtatttaatcatccattctttatccctggcaccattggggttgctctagctgttgccttcggtttcctattcggcagtatgatcctctaattctggctgccaataaccacttaatccaggggcgtataccgcccctgactcccctctcccaaacgatatattttctctgaaaaccttcgataactgttttaatcttaaccagaacactttctggtctggccgccttcggttatagtgctgagtctgtttcattcgattagcgatcattatctttatgattaaacgtactctgatgctatttttgctgctttgcagcccccttcttaccccggcggcagcaaacgcactgtttgaacagccggggcaaaacccatatttgccagtagatcaggcattcatgtttgattttcagcaaaaaggcgacaaattgacgttagactggcagatcaaaccgggttattacctttatcacaaacaacttcatattgagccgcaacaggccacactgggtaaaatcacgttgccacaaggtacagctcatcgagatgagttctttggtgaaactgaagtttatttccaacaactcatcgtcaatgttcctgttacaaaggcgaacaacaattctaatatcgttgtcacttatcaaggctgtgccgccgcaggatattgctatccacctgaaacccgccttgtcccattgagtgcagttattccatcaaaaacaactgacgccatatctgctgaacctgttcacaaaacgccagaaagtgcatcgaatgatcaacaacatttgcctttctcaccactctgggcaattttgattggcatcggtatcgcctttacaccttgtgtactaccgatgtatccattgatttccagcattattcttggcagccaacgccctaaaagcctaaaacagatattttggttagcgctaagctatgttcaaggcatggcagtcacctatacactacttggattgattgtagcagcggcgggtctacaatttcaggccgcactgcaacatccgtatgtactgatcggcttatcagtattgtttatactgctggcactgtcgatgttcggcctctattctctgcaactgccttccgctgttcagacgcgcttagtcaactggagtaaccagcaaaaaaacggttcacttttcggcgtattcgctatgggggcgttagcgggattaatttgctcaccttgtactaccgcccctttaagtgcgattctgctttacattgctcaaagtggtaataccgtggcaggtggcctaaccctctatctttacgctttaggaatgggattaccgctcattgctgtcaccctatttggccacaaactcctgccacgcagtgggccttggatgcagtatgttaaagaagcttttggcttcattattcttgcactacccgttttcctgctggaaagggttatcggtgatgcatggggaatacgattatggagcctgctggcagtcagttttctaggatggggatttgttctgacgattagaagccaaaacggttgggtacgagtcatacaactgatattgttaattctgatgctgatagctactcgcccattgcaggattggttttggggtacaacggtcacacaacagtcgcaacacagcctaaatttccgccagataaataactggcaggaattagaacagataatgacacaaaacagccataaaaccgttatgcttgatttctatgctgactggtgtaccgcttgcaaagaatttgaaaaatatactttcagcgatccacaagttcagtcacaactgggtgataccttactgttacaggccaatgtcacgaacaacagcccgcagcagaagcagcttttagaaaaacttagcgttcggggattgccgactattttgttttttgattctcaggggaaagagatccccgattcacgggtaaatggctttatggatgccacccgctttaatgaacatttgcaacatctgccaaaatgactcagaaggagaacaccatgcaacgagaacaagttcttagtcatgccttaaacttactggagcaacatggcttatccatcacaactgaggtactttttggctcgcttaacatggatatcgaatatctcaagcaattctggcccgatcgggaagctctactttatgactgtctacgttatcacggccaacagattgaagtctggcagcgacagatattactggatgaaaatctgacaccagaacagaagctactagctcgttacacagcccttgatgaaaaagtaaaagagaaacgctacccaggctgcctatttatcgcagcctgtagcgcattccctgaacctgaccaccctatccatcaattagctgaattacaaaaacagagttcttctcgttacactactgagctattacatcaactggatattgaagattgcgaactcgttgctaaacagatggagctgattctggaaggctgcctgagtaagctactactcaaacgggatattggtgatatcactacggcaaaactgctagcagaagatgttttagctattgccttatgtcgcaaaaatggtgcgttaagttaacaaaaatcagcctaagatgaacaaccacacaaattccgagcaaaaagaaggcagtcaatccgcttttatcattttttatcagaaaggcattgacgacttaggctgaatacggtttaatgcgccccgttgcccggatagctcagtcggtagagcagaggattgaaaatcctcgtgtcggtggttcgattccgcctccgggcaccattcaaagtgcgttggttgagagataaaaacgctcaacggacgttcgataatgaaacctaaaaatgcatcgcgtggcattattcaatcatgcaatattttgatgttaattaaaggggttctagattcaggatatctgagaaatcagatgttctattttcgttagaacgaaatatttacaagttctattgcaactgtcaacccatccaaactaaaatcaatcaatcaatcaatcaatcaatcaatcaattaacacaatattgtttattggttgctcggctttcttattattaatcagaatagggttagttataagagattgcctcagttcaaaaaaattcctcatcttgtaacaaggaatttatgtagaaaagacaggttcagccagcagcgagaatattctgttttatcctattaacattcttctctctgtagctcaacatcaattcacactccagcaaatacgcaatcttactattccaagtaacacgtttgtaacacctttcagcccgacctgatgcaacacatatccacgcaatgccaatacctgccggaggatcacttaagcaggccgattgttcacacccgaaaacatcaggaatgtattcaccaccttgcaataacttgaccgtaagcctttggtggatttgatcatgatctgcttctactacaagaggaatgattcgaccagagtccggagacaggaagggctttgcgcccctcctgtagtttctccggctaactcaagacagcggtggcaccagcgccgccggcgcggactgacggttttgcggcaggtgctcgcgggcaccgccgatatcagggaacgaagccatagccccgctcagcttcgctaggctcggccctcccgtgtccgggactgcggcaacggaatgaatcacatgaggctcgatgacgggctgtctactggcccaagacagttctaccagctccccattaatgtaactcttctggataaagttcttgaccagatggtccactcccatcaccgacgaagaaccttccagttcgatttgcaaatgctggtgcgtcaccgcctggctaccgaacaccttgcgcaccaccaaggtcgtgccattggccgagtcagtcagcatcaagttatcctcatggcgactaacgaggattttttccgcatcaaccatcggcatgatcaagcggtccagagcctggcccgggtcatcgttgtcaatgataaccgtgcggtaatgcgaccacatctcttggctgaggcggtaggtatcgttatcagcaccgccatgcaacaccacactgtcgacaccggtgatcagcggtggggtcaagtcgtcccggcgaccacccgtacccccgccccgaatcaacagcgacgaaccaatacgctcgacactagtgtaatgattcagcttctgcacactatcatccttgacccggtacagtgcctggtccgttgggctgtacacatacgcgcccttcttcccggcagcaattccgatgaaacgcagattgtctttagcctggatgctaccgtaggagaacacttgaccactgccgacatcgaaccaaccttgtgtgtcatcgccttgcaaggtcagcacgcctttggttcgccacttatcagcaacctcagcaagtgcctgtggcagacgagcgaagttgtcctgctgccagcctttatcgacggcgactagctgcaatttgccgtcattggtttgcaataggatctcacctttgacggtggtcagtcgtagcccgacatcgacttgctccaccgccttgaggtgcagtccagacgccagctcaccggcggcgggaagctgtgacgagacttcaagcacctcgtcggtaccaaacgcggcagccagcgcatcggcagtcataggcggctgacgatacaacttgccgctggcgggttcgaacagccgcgcaccggagccatccacttcaaaacccaagaactgcaaacgtttgtcttgcagaggagccgaggccactattacctgacccttgtggtaccacactggcagcaggctcttgccgtcggtacccttgattccgaacaccgccaaagtagctctgccgtcggcgacgctagccaggtcctgccaccagtgggtacgtcccttgagccaatgctcattaaccgcttcgtagttaagctgccccagtgcatcgagccgagccacacgcccatcctcggtgatggcaagcaggctaccgttcaggttgaccaagttggctaacgctggagtactgatgcgcaatgcagtgggatggctagcgtcgagaacagcctgcccgggaccttcctgtcggaacagaaccttttgctctttactgtagaagaaaaacacctctttaccgccgggctgcggcatgctccccgctaacaccaagtcggccgggatcggccaggcactgcgggtttgttcgttctctttaaagtgcggggtctgatctgccggtggtgccagattcggcttgattagagtcccatcgccggtacgtatccagtaacggtgcgccacgccagccgcatccacgccgaacaccgtgaccagcgccgcactggtcggctggagcagccgtgtgcccaacgtatacatcggcgtctcacgctgtatacttttgctctcgtagccctggagtatagccttaagcacatcactatgctggctggtacgtgctaaaagctggatcagcgcatcatcacccaccgcactgaccaactccattcgatcactgaggatccgatagcacagttcagcttccttctctaattcagcctccttctcttttagtcgataacggcgtgccaggtagaccgcatctccctcctgccatagccgactgatctggcccgcattttgattaaaccaaggctcaaattgcgcgtcgacctgtccggtggcgatgtctacccgccacgctgccgcattgtcggcgtcgtagaaataggcatggtcacccatcaccgcacccagttgggcatgtctggtctgctcgtgggtggtgttggtgaacaacatccgctccttgcctacatcatagaacgctcgaccaacatctcgtccgttgtggctgtagttctccaccactacgtactgcccgtgcaactgatgcgctttggccagatcactcaggtgctgctcgatttgctggccgggcacctgccacttgcccgcatcttcgcttaccacctgagttgtcaggccggcaaagtcaacttctcgtacctcgcccttgccgttgaccaccaatacctgcccgttctgggtcgggtcaagttcgactaccaccccgccaaccaccagttggttcttcgacacgctgatgctgtcactggcgagttgactgctatcaatgatccagcgcgacaatgcactggcgctatcgctcgtgagcttaacttgggtgccttcgttaaggccaatcaggtactcgccacccgctcccttgatctcgtagcgtaaaaagctgtgcagctctttgggtagctcgggcaccaccagctgccggttgcgctgatcgagcaccacctcgattggggtgtcgacgtactcatgatgaatcctgcggattgtctcctcacccggaaagatatagaagtcgtagtcgaatcgtttgtcttcctcaagcctgcggatcacgtcgaagccagcatcatggcgtgtggtagcaccgggaagtaacatgtattcgtagctgatgtaggacttaggtgtacccggcaggatcacgacattgctgtcactgtgttcaagaggccgggagatatccttgtaaccaataccgctacgcacttcaatcgcctgaccacggtcatggaccattcgcggaaagtcaccgacccagaagaagtaattgatttcccccgaaccggtagaacccgaatgggtgcggtagatgtactggctgtcgaagctgatctggtgcttgcgcaagtcaaggctcttgatcaccgccccggcaagaggcaccagcaccttgttcttgttgtcataacgatagccgttgcctttgtacgccttgtcgaccgtatcaaagtaacggcctaccgccttggcatcctcagcgaccgcaccaaaggcttgagccagtgccgtaaagcccaccgcgagcccaccaaggattacgctggccccaccgagtaccgccccggccgttgaagcaccgaccaacccagcccccaccccggctgcgccagtgacgaagctcgccgagtcgaacgctaactgggtaccgaacaccgccttctgcacatcgttctcagcgtgggccagttcataagcatccaaaccgaccatagctcctccaaacaacacaccggcaccttcattgacagtgtggcccagattcgaagcaaagtcctttaacgaggtttcagcggccaccacttcaccgcgcagcgccgtacgcaccaacgcggtaaccttagctatatcctgtacgccaccgtgagccatctggaccaagttgaggtagctatggaccttgagcgcggtggccagatcaggcgaaatcactccgcttgccgcatcgtggcggttcttgtcggcaaaccactggatcagcgtctgaaccgcaaacccagcgttcaacccatccaccggagcagcctcgccaactccaccgcggagccgcatccggccatgctctagggtaaagtgctcgttcagtacagccatgtgctcatcaatgaagcgccggaattcgacaaaggtgctatcgctggtgatcaaccaacgggtctgctcgggttggtcacggttaatgaactggacccggtagcgaccttccccctggtcttccgtcgtagcgataatcggtagccagcggctgtccagttggtgctcttgcgccagccgggcactggcgacttcgaaccgtgcaccccattgctcggcatcaaaggtcttcagtgcagggctcagtcgcaagtcttccatgacccactcttgtacactcaccacctgttcgacctgccgccgttgcccgataacactagccaattcctcgaaccgggtcaggtcggccacgttcaggccattgcctacaggtacctctgccatcttgcgggtatcgatctcaatcaagttgaaggccggcactgacttgctgccgaacgagccatagtgcgcggccagcccgcgcactaccaagtgctgctccatagctctggacagactcttggtgttgtcgaaagcaaagatcccaacattcgggtcatagaagtagtagcgacggccttcggccgtgacagtgctccctaccatcatcgagtgattctgggtattgagtgcaaacatcgaagtgccggttgttgcggccagtcgcgacaccacctcggacaaattgaactggcccagctccgtggaagcctgaacggcttcgacattgtagtgcagactgatcaggctgttcttgagcagcgtggagctgcccgcctgcgggtcggcggaagcgaagaacagcttttgtactaagctgttgatgccggcctccccaccacccgccaatgccacagccatggtcctgaccaaagggtagcaacggccaccggttcggtcaccgaccagcgacagataaaagtcctgtggtactaagcggttgaagacactgccggcatcatggaagtcctcactgaacattgcggtctgtcgcagtaccttgtcaatgtactcggcttggctgatttcggcgatgcgagcgctcaaggcttcccgttgctcgtgggtgagttttccctcaagaaaccgtcgcttcatctccaagaccgacattttgtcatccaccccggggatcttgatctcacggaagttacgcaaaccatcattgaacccggtaccctgtgccccgcgctgatagacctcggaggccgcgtaacgttctcccacgctgctggtacgctcctcgccttgaatggccgtatcatcaatctgtaccaccgcaacgctgccatctttggccttgatctgctgccagagccaggtcttttcgacagaactggcttcacgcaatattggatcatactgcgccctgtagtagtcctgtgtaagattgagttgcttgatctgctggtcgatcaaggccgtatcacttgaggtacgtcgtgcttgctggagctggtagagtttatctgccaccgggtccatgttggctttgaccttggcctgaaccgcttcacgcaaccgggtccatgcggcaatcgccggatgctcaggagaaaactccccctcggtgtagacgccgtcggtaactccttcgaccgacaccccaaactgcgtcgccaccgtcttcagttgttggtgaacctgctcgcggtaagtggcgaattcggcttggttacgctccaccacctgactgccggcgatttggattgagagcggctccacatcaccgcgcagtttcggccaaaccatctgtccatctcgttgatattcctgtcgctggaacaccagttgccactcaccattgacgtactgcatgtacgctgcggcaaaacccccagcggtatcggatatctggtaatctttgtagtcgaccgccatcaccacgttgtcatacagcagcgagctgttgaaccggccatcgtggtagacccggtaggtattgtcatcgaggctggtcaccactagcgagccgcccgatagtgtcccggtgaacagaaagctccctgcggccacatgcttaggaatgtccacataagcgggtaccgcattggcctggttcaggccattgtagccgaggaagtacgccgacacgctacttgaagatatgctattagcattttgtttagtgtactcgatctcgtataagcctgacctgaccttcaccaactgggcactcccctttgccgggaggtgccccgacctgaccagcacctcagcactgatggtgtgggttttggcgaacagtgcaggatcagtggcaaactgatggatgtcagcactgccttgtcggggctcaaatccatcacctacagacaccagcccagccttgagttcgagatccttcaccgcctgccccagcagcgccggttttggacccatgtaggtaaaacgcggtggatggaattcgtcagccgctggcaagccctgattaatgatcggtaagacccgcgccatcactccgtcatacagttcaccccataactctctcttgctgccttcggcgcggtacttgtcgaacatctgcaacatgtccttgccgatactgtccgcaccttctggttcgtaacgcgcagcgacatagagggtttcgaagaacgagtgatagccgttacggatcatgaaggccgcattggccatctggaattgccaatattgcttgacgctcaacgcgccaccgaataattccggtaaggcattactgacggtctgggtggtcccggaaattccccccacgaacggggtgtccaggtcattcatgtagcgtgtagcgtcattcttcgggtccggacggaactggttgtagctgcggtatttatcgtccttgatcaggtacgaatcctcgtgatacgtctgctcctcagagctggtattgaggatcagatacggatcgggctgattcagccggttattaatcatgaccttgccgtcacccagcgcagcgtgaggattgaccgggaccgcggccttggaaaagctatcggctactggacgcaaagcatggaacaagacctgtttgcgtaagctcctgccctcattgctcaacagcaccgcctcaaccgccggacgcagttgcgcatcggcgctctcaagtccctgggaaccagtcagtaacagagtgagcagtttgtcgtccagcgatcgatcaaccgcagcctgatcgaaaacctgtactttcggattgcttggatgctgtgccgcattggcgctggcaacccgctggatttccacttcgatggcccgaatgcgccattgttcgtacaacggtgccaatagccccctagcctggacaatgtcactttgcacatagccattttgcaagaccttaaccacagccgggttcttcaccagtctcgtcgccagcccgaacagcagcgggtcattatcgctgcttcgccagaccgaagcggcgaacgcctgttcccacagtgctttgtttaggttattacccttgatatcgcgcatgttgttacggaagtactccggtgccaacacccctgcgggggtgatgtggttacgttcgagcaaacgcaccagctgctgctcgaacgccttgcgatcttcgctgcctttgaacagacgactggccttcgtaccaccgtcacgcagttgttccagcttctcgaaaaatgcggcgttgtattgatacagtgtgtcggtctgcgccttgctcaagtggctgctgctgaccttgttgtcgtcaacgttcatcaccccaaagggcgtcgcggataggtaaccgttgccctggggcatttccaacaagtactgacgactggcaaaaccgactgaacgttccagctcatggatattaacgaaaagcccgtcacggtccggatggtaaccgttctgtcgaaacccctccaggccgatagtctggaagctagcgatatcagcattctggttgatcaggtcactcaaggcgcttgccaatggtacctcacgggtgatggtggtattcgaaacctggccggatatctgaatcccgacctggttcggcaccttacggtcaacgctggtcagcagcattttgcgaccgttacccagcaactgcgccttgaagccttcacgcaaggtgctttccgaaactaggtagttggcgaagtacttctcgacgaattcggttttgaccagcaccgagcgaattggcgcataggtcggcgagcgaaaggatggtggctcactcttgagccggtattgttgttgccaggctagggagcgggctgcggtaccgaaggagaagttgaataccttgtccgccgacacaactaatctgccgttctctaggaagaaatctttgaagcggccatcggtgctggcattaactagtgcgacgttcatgcggatgtagccaggacgctcctccatcatcagcaacgaaatatttaccggcagatcatcggaggccggaggcaccgtggtcagcccgccgagagctgcggcctcttccgtagaggatgcttttagtaaggcgttgtagcgagcattgacctccttgtaggcctgtaattcggaaaacagcatcacgtattttgggccgaacaacgtggaggcagccacctgcatagtcagttgctgttccagacgtttgatcttgatatccagcttaacctgcttgcctgccgcgttctctctcagagtcgtcgtattcaaggtcttagagccgccgggattgagcatggtcaaagctttacgccaagtgccgtcaaaatgcgttatggtcatctgctgtcggctgtataacaggatgtcgcggtccagttgctgcttgtaagcgttgatcgcaggtgtgccgggcacatcgttcatctgctgccgtctttgctgcaatgtctgcaactggtcgccgacagaaacggggctgtcctgcatctgaaaatgctgagcagccagcacactcagcgtactctgctgcatttcctgtaaccgctcgtctacctgcctgatgtagtcggcacgctcatcaggcctcatattaaaccattcggtctgacgacttgctgcctcaatctgtccatcgatcagggtattgagcaggttcgtgaagtctttggatatagaaaccattgcaatgctcctttgcctgtttttaagcgaaacccttcgcgctgcgaaaagctgtttgtcgtttgtcgtttgtcgatacagatttgacattcttcccgacctaaagaccataactttaggtacgaacgtattcagttaccgcagggattcccgcacatacggtcgagtcgaaggcagatgtcattttgcattactttatttaagtgatagttacatatcattgttatttatattcgtgaatattagatagtcaacatttatttgctctgtagttgtagtcataattatcccctttatttttcgtttatattgtggatcacatgagtgatgacattgaaatataattaattttttgtatatttaaattaaaattatcaacaatatgaattagttacatatgaaaatattttttaattatattgttgcgttttttataagacgttgaataaataataatgaattttaggaaggttatttattagtgaattgttgtatctgatttttgcgttagagcgcgatatttaaaagttctactgcaactgtcaagcaacccaaattaatataatgttttacgattgatcgattagatacctgtgtttaagtaacatacctccttatttatcaaaaaccgtcagaggtaccatttgcataacctcaaaaaaattccctatctgcaattaaggaatttatatagaaagagcaaattcaggcaacaaggacaatcaatattgtctgattaatattctcctctttccagctcaacatcgatatacagaatcaactcacgcttcaatattaagacccaaaaactaaggagatacacatgctaaaaatcctgcgcctatgtttcttcgtgacaaaaacaaaagcgccaacgatcacctttgatgaaaaggtgaatagatacaatggccggccaccatcgccttactcaaatggaagagatagcgactaagcaaccgagcagccactgcggctgccccgtgggcaccttgcgaagcatcaccaatctcgacaaactccataccaacaatacggaactcgcttaacagccgctcaaaacaagccaacagaggatagtaattcaggccacccagtacaggggttgctgtctgcggtacttccgtaccaaacagcacatcgacgtcaaaactaatgaaccaaggtaaagaacgatccatattcctgaataggcgctcgtagcccacggtctctgcttcaaaagccgagagcatatggaacttaggatccacttctaactggaggttttcagtaggttgacaaaaataatcccgaataccaatctgccaaattgatgcaacatggggcatacgacgaacccagtgcatgacattagcatggctaagctgcaaatcgcagggagtccccatagcatacaaatcaggatgagcatcaaactgcaacacccccagacgtggataacgctcgcttaaagcacttatgctgtagaaagcttgggcatgatctccccctaggattattggacatgcatcccactccacaatattacggcacacataggtaagccgttcaccaacatcggtagcactatccatactagggcggtatacgatatcaccgagatcgaacagacacagacgttctggctccaaccgagtaccgaaatcaaggtccagtaaaacaccctttcccgctgtacccagaggatgtctcaagcactgtaccaactgggaacgcacgtgttgaccaccacctgcaaccgatatctctcctccagttgtcgtcaagataggagcatgtaataacacggcatcatcggcctggagttcatcaaaatcaaagacgctaattgactgtcccgccggttccgaaacaggtatacaaagtccgccttccaaggcggtactcgcatcttccggaaacagaaaatggtacttcaccatagcctcaaacacagaaatccccagacgctggactataattgttccgaccagaacagcctctgactttatttgttccaataatgatcttattttactagacacacgcagtcgcttagtgcctaggggaatactgatctctatacgcccaggttcaacaggatcgtagcgcaggccagggtgaacacggtatctaaggtttacgcgatccttcatgaggtcatccctccttccaaccaaggacgtaattgatgaaactctaaggctcgtgcacaactggttactgtgcgagcaatctctggcgatacaaagttcctagtcaagctaatcgtcggcccttcattcaccacctcatgccaccaagttgcaggaatgtataacaaatcacctttgttgacctccaggtagcaccactctccttggttgcaacgggtttcgagcacttgtaaggcttgagctctctgttgctcatactcatggtcccagcaaactggcgcatgtaaggctaaccgtttcttgccctcaatcacggccagccaagcatgagtttccaatacatcgtaatggagagctgtgcccgaacaatcagcaccgatgaatatccatagaagaggcttgaacaacttctccggaatgccttgtaacagatcaccaatagcaggtataggctcattaaagtcctgcaacatatctgggttatgctcaaagaatcgccacccggaagcatacaagttagccaatcgcccttcaccgcttttcaaagcctgaatatattcacacacaggaacttcaacctcgaactcgccatttgcattactcagtgctagcttctgttcctgcatccctgcaaagaattcccaactccagcgccggtgagcagaccagtccaaagtgactccttttagcaaaataggtgacatcaatatcatttcactcattcttaggatccattgatattagttccggcacagattggtcttcacgatgcagtaaacgctgaaaaaggccattgcgtgcctccaattcactcggtgttcctatatcaacaatctgcccttgttccatgaccacaatcagatcaaagcgactcaatgtcgcaacacggtgggttacaactatcaccgtacgttctggcattttatcgagcaaataattgaggatacgagtttcggaaattgtatctaccgaggatgttgcttcatcaaaaataagtaatggagatttcttaagcaaagcgcgcgcaacactcagacgctgccgttcaccggtggaaattgatgctccacgctctccgaccaaagtatccagcccctgaggcaacccttccaccaacatcatagcttgcgccattgtcagcgcatgagagacttcttcagcgctactgacagcagaaccataggttacgttttcccgtacagaacggttgaacatcaaagcagattgcaaagcttcactcgacactcgatgcaaactgctcatcgaaaacttggctaaaggcaatccatgcagttccactgtaccggaatccggtaccatatcaccacgcagcacagctaacagagtagacttccctgatcccgaaggtcccacaatgcctactttggtacccggttcgatacgcaggctaacatcacgaagtacagatgttgcaccataactgctacacacgttggataacacaatttgtccgggtaccggtaatattggtgaagactcgtttgattcaatgtccaccggaattgaggataattctcgtaaactggaccgcagcacccccaaagagtcaaaaatatcaacaaaataaaatgcaacggactcaaagtgccaggatagcgaaatgataagggaacaggtcgtgattagctggggcagtgtcagttgaccttgcccatattgcagaccaatatagagcaagatagctattccaaataaccatttgtaggtactttcaatcagcaacacaaatacccagtagctacgtacctgccgacaggcgtaaagatcttgtcgcaatgcctgactgaaactgtgtcgctccgagcgataagcaacaaagctcctgatcaaaggtacgttagtcactatctccgccagatctgagatcactttggcatgagcatcgctggcgtcctcaacaatattcataccggtataggctaaataactagaaagtaataatgccgttatcatccatatcccagcggccattgccataggtgctgatacgctggccaacaccaatgtagtgagaagcgccacagagagtaacttgaccactgtctgcgccaccaaacccacaacgtcttctaggctattagaagctaactcaacacgttcgacaagattgccgacagagttctccgccagattcatcggcttagcatgcattagccgggtagaaagatggtctgtcacaccaatacgcaggttttggcttgaatacaaaagggccaggctgtgaacagcttgcaacagtggcgcagacacccaaagtgagataataatggcaagcatcatcaacacttgttcctgctgaccttgcaaggctagcgcagtcaacccacccagcacataagattggccaacattacatacagtacccagcacggtagcgacaatcatgataatggtacttaccggggcacaagccaagattgctgcacgaatgtactgatatatactgttacctgactgttcaagcggaatcgcctttggcttggcaatatctaaagaggccaagcgagcaatgctatgccgccaggccgattgaaaaatggattgcattagggtcctcataagggctcaattaataggccacccaaacgaactatcattctgacgagttcagccacagccgcgggactgatctttccagcaacactgcgctccagtacctcatagggtactcgctcaccagaattcaacagttcacacaaggttgcgaagagctcattaggacgcccccagatcactctacgcctaatcaatagtgcctgccggctgccgagattcatacacagcaaagggcaacatggatgaatacgcaaagtgctgagacgcaactctgcttcattcactggagcaaccactaccgtactcaactcgggtggcgttatgatgaagccattgctacgtactgccaaacgcctgagctgaaccagttcctgcaaagagataggttgttcagccactgccgcaaacgacttatcatccggtgcaaataaacgcaaaccttccgcggcaaaatctatttacaagctcatgcagtaattctcataaatttttcaaccttcactctctgtatctcatacatcatgccgggcttataacgcttgatctggaccagttgttcatagtattcagcaaatcctgccagtgcttcatctcactgacgcagctcctctgcttgttgacgagcaacaaaatgttgatgcagtagatacgcgcacgttaagggcattgttcacgattgccgaaaattcatcgatctctattgacaaaggctcgtatcgcaaacatcccaaggtacagtcgaacagtgcttccaggcgtaccataaattcaattgcatcacgtggagggatctccagccgcccgcgcccgattaattcttctacactatcacctgtcgtatcgcaggcgactttgataattaattgccgaatgtaattcactgatattgacatgatttctcccaaaatctttctgcatgataggctggctgatattgacatcaggttgaaaagtcatactcaagcctccgtgcctatggcacgaataatagcaatagggtcaacttcatccagtttaaaacgacctttctcctctgctgcggtgtgaatcagagcacgttgaatataggtttcaatttcctcagttatgccataaggcaccaacccaagctgtttgacgcattgctggcattggctgtcagagagtaaattagcatgataagcgagtaggtattccttgcagcgcttaaatttactttgccagcctgcaacttcatctgcaatcgtggcggcagagcttgcattcacagcgatttcaggtacatggtgtaataccaaatcgcgcaaagctgcattttctggctctgcaattagctgttgcaatgtggcagtcaagtcacgacgatgcaacagacttacacctattcgctcagcggcaacaggtgatagcggcacttgtaccatcctcaacagtgtctgttccggccacatcgctgaaagcagcaatcccaattgccctgctgtggtgtgaaggacatgccattgattttggtcagcttctgttttctccaattcttcagccatacaacgaaaagctttccaggcaccttcaaaaccggcaatgcaagctccaattacctcatcacgtacaaactggttcaggcagagtgctgctagagttgtggcaaagggcaatgaatagactgtgatacgttgaatagaaaaatcaaccgctgctcggtaagcggcataagcacgaaacaggtcacgccaaggagaatgaccaaccatttcatatacatgtgaaacttcatcgttaggaacatacgagaagtcgtaagctgtatcgaacagcactcgtaaccagagcaccaattgatggagatcctcagcttgccaacgggcaccatcagtacgctgcatgcgcaagaaaagcgtccaagttcctaactgacagactcgattcggtgatactcgccatatgggtttccattcgacaatacgcaatgccaacgcttcgaatacatgtaaacggccaatgtcctcttccggagcgttcggtagttcggcaaattcaacgatcaattccttctcattaaagaggaagctggccttatgtactacaaaggggagtgaaatctctagaatgttccgtgttaacctcagcaggcaagagcgtgcatcaccaaaaccatctgcgatatttatcagtttgcgtaggggagcaggcagttcagaaccggagtgagctcgaaagtgagccaacatccactgatgtaaaagattatgtagttgatgagcattttccataggcagttgatcaggcatcatattgccagcaatgggtattaaaacttgccagcgcaagaagtcgtcgcccaaacattccaccatgtcttcttttaactcaagcaaaaaattgtctggcatgggttgataacgaacatgctctatccaccttaggaaagaacgcaatgccgccgcctccgtggcagaaagagtcgacagttgggcaaatgcaatccaaccacttagcaaatccaagtaacgctgatgtgtactgggatcacgccgatcgaccacatcgattaataccgctttaagcacttgatcataagtatccaccaagtcaatgcgacaaaggccctgcaatgtcggtaagtttgctttatgtagagtctccattaggctagcggtggcttgcagtaaatcagcaacttcgctggctccagctaatgcagcggcagccttaaaacatctcaaaggagttaaaaacgccagataggcagcacatgcttttggggcacacaccaaactagcgagtgcagtcggtgctagttggccgtgatgtattatctctaatagagaggccggagaaagcgtagattctgctacattgaccagagtatatacaatatttaaccgttcagtatcctcgtaaatggacagaatttctgtatctgcaagtacatggagtatacattctaacaacaagcgtgcatcgctatacggtgcagttatcgcagcatcgaccaatgacgttaattggatagacggcaatttttcaatccatgcttcagttttaattaactgcataattaagcacagatcattgaatcgggtgagcctgcctgcaagcgttgggatagctttgcataagcgcggtaacacagattgcggattgcttttagcggtaagagcacagagataatctgccgttgcatcagttgtcggccaatcagaggggaaaaactcaatagctctctctcctgcctgtgcgaggagccaacctgttaaactggggcttcggatagcattaccattttgtagccaagtgtctgttgggaaaaccgtgcgtcgtttaagtgtggtgtaggtcttttccgttaacacaggtaagccaatcaacgcattttgcagaatatcggtaacacgttgagatgtaagctccgttattcgcaaggattcactgtcgtcaaacacacgttgtactgagataggcaaattaaccgattcggcagtttccgttttcaattcgataagtggcttttgtgcactaaagtaggccaattcccccatactatcaatgactacccaaggaacagcgggtatatccgttagttgggtaagaaaaaccggcaaattttgttgtcggaacatgataccagcatgttcactgcccaccccagattcaacgaagacagcggtaagagccgtttgcacagacaggggaaaacgcaggtaacgagaccaagcatcgttcaatgtcgatgcagaaaggaagctacctaaagagggaaaagaagggggtaatagcgctgccaccggtactgctcgcatacaatgcgccagctcggtgcgtacttcggcggttaaccgttgaacacgacgttcaagcgtgtaaccaggagcaggacgcacctgtactaaccaaagtttatctacgttcacttgacgtaattgtgtgccataccacaagggagcggctaatgttggccaatgataggcgaccgagtttacccttgaaccgggcgattgcgccgccgcaaagccaaaaccaaacgccagttctccccgaacaccattagaaccggctaaggtcagtccggtggccgataccaatccatgatctgtttccaatacccactcagtatccaacgcaatttcagaaaagtgctgatgtaactgcctgataattttgtacaaactatgacatacatcagctgtcagatagggtgcctgtaaaagttccacttgaggtggagtgccttgaatcaaccgctgaacaaaacaagtgactggctgtggctgataatcaggattgattaaccgttgttgtgcgatagcttgaggttcaaaaccactgaaagtaacctcagcaacagtgtcggcaaaatctgctgtacgatggcaaatgacactcgcatagccacccgcattgacgaaaatatcaccatcttccagacctgcactacgaacaatccagagaggtggaccacatacttcctctacttgttttacccaatcgtgatgctctgtaatatatttgctgtagatggtgcgtaacagctcagcatcagcatgtggagaaaccgcggtgatggcaaacgctttatcggcaggaaatgccaacaaagggggaataagagccgaaaaatcgacgtgccgggcgagctgttgtaatcgttcaaattttgcagtcatacgttttattttcttaccttatagagccagaatcccaaatgagttttcacgttgacaagggcgagtcgcgattttcttcccatcgcttgatttatgccaacactaacaacatcgctaattaagcccctaataacacaaatattaccagctcgatagtcaatatatgggaaaaaacaactgttaatttttccttgtcatagtatcgatgtcgtttatataaaaaactggtcacacgtgcttgtgtgtaatcttagtttctacctccggttttacttcaattataggttgttcaaacgttcttaaagaattgcctataccctatggattccaagatgaatcgcgacggcaagggagcgaatccccgggagcatagataacgatgtgaccaaggtgagagagtgtagccaacaaagaggcaacttgaaagataacgggtatatacccgtaatcattgaagatgcttgattttatccgaaatggagatcattatcctcgctatgaaaatattcattaccgatgaacaaaaagccgaacttgaacatctccatcacacctgccgtgataagagggagtgtgatcgcatcaaagcggtcctgctggcctctgaaggctggagttcagtgatgatcgctcaggccctgcgtcttcatgaaatgaccgttaaccgtcatatcagcgattaccttaatcaaggtaaacttaaatctgataatggggggtctgatagtttgctttctcaagaacaaactgattttttaatcaatcacttatctcaacatcttttccatcacacccatgaaatcgtggcctatgttgctcagctctggaatattacctttagcattcccggcatgaataaatggctacaccgtcagggtttttcttataaaaaaccttgtggcgtccctcataaattcgacgcagaaaaacagcgacaatttattgaatattatgagaatcttaaagtcacagcgaaagacgaacccatcctttttcttgatgctgttcacccgactcaaggcaccaaactcggttatggctggatgcgaaaaggcgagaaaaaaacagtaaaaacaacaggaagccggactcgcctgaatatattgggcgcgctcaacctgaatgccattggtcgtacggtgttccaggaatatcaaaccatcaatgactacaacatttgctgttttttcaatgaaataagaaagtcttatcctgactatcatcaaaaaattcatcttattgtggatggggcgggttacaacaaagctcatcttgttaaggagtgggcttatgttagcaatattgagttacattaccttcctccctatagcccaaatttaaacccaatagagcgattatggaaggtcatgaatgaacaggttcgaaataaccgttattttgcggataaacatgaatttcgagacaacgtcttcaaatttttcaccacaacgctaccggatatagcggactcgctgatgtctagaattaacgaccattttcaggtgctaaaaactgcatcttgaagtttcttgggtatagaattattaaaatttgacgattgagtattgaattcattaaacacaggttccaccttgtattttttcgaatcgtctctattttaaatagagtggcaagactattcttgccaccgactaaactacaattaactaatcatgggaatataataatgctcttcatcatcccaagttcacttaataatcccactattcccatatatattagtcacctttacattcaaactatcgttgacagatttctatcctaaagcctcacctcttacctgaggtaaaataaattcgtagctaactagtttgaataattgatgaatagtcaatagatcccaatacactaacaacaactttccataccgggcgtaccattaacacccgtagaatattccttataccttgctggtggatttgttaattttccttttactgcaatttgttgcgtgttgatagtacctttatttgtaatataaagaggaataactttttttagatcgaaaatagaataatgaatgttgaagagattgagccatcgctgtttgatgctgtcactttcacggtttcgactcaccaatagaggccactgaaggggctgtataaagtcctgaagtactgatactacccagatctacagggctgattgaccatttaacattcttagctggggtcacagtaaattgttgggttttattggcagacagaagtatctctgcgggttcaactttcagacctgtcaaggtagggctaatatcgccgaataagaccaaatctccaggaacagcaatctgatcaaattccaaaacttccgagttcggaaacagaatatgctgaatataaaatgtattgatatcaggtaattcgaaaaaaccagtcttattaattttatctgtgagctgatttgccatcttctctgttccattactttcaataagacttaatctactatgttctgacttaatacatttaacggttatcttgccaaccgttgaaaatgaaataatattattttccttcagagaaacttcagccttgcatttcccatcacagctaaaagtgtaatcatttaaataatcttgatgtatccaccctgccgggccgtaataatcccaagatgctgagaatcgatgattataagtatggttctcagggaattgtaaaacaacatgcttactttcattatcttcaacatcagcagctatagtaaatttattaaatggcaggtgagcaacctgcacctctcctttctcatcacagctcttatatctagtcgttgagtctaaaaaagttacagaaccatctataatttcatttgtcggtgtatatcctccagtaaactgcaaagttacaggactattctgccctgaattgatggttgtaaaagcagcatcatcaatatattttttaaaatgttcagcaaatatattaccgaatagggttgcgttcccaataatgagagctgccgattttccttctggaataatgtaaggatagttatctcctggcaggttacccccacctgcattataattagtggcaataaaaagcagtacagctccatcaccatagtttttagaatctcgtaatgttccgctaggggctggttgtgtgcgaacaataaattttttaggataaagtctatttttaccattattaggctttaatacacctagaatatattcattaggattagactgaatatattgcctaaaatactgcacaatctctgctggagcatcatttaatccttctatatccagtaaagtacctttctcaaatttgatgacaaccttaccactattctcagagaccccattaccgatattctcaacaaccccattaccatattccagatttacattaagcttgatagcataattattcgctggactgatcttttcccatttaataacttgaccattagagtttgtatagacaatcgaaccagaaataaatttcatagttgctgtggcctgactggccgtaattttggaatcctcaaatgaaatgagtggcacacctaaaacgacatcctggagttttattccatacttctcattttcaaaacttataggaggatattgcacccccgcagctctcttttctatatattgctgaagcaataattgattaactttatttcgatcataagcaacaacggcatcccaacccaacgcaacactgcacattcttaaagagttaattatatcatttgcgttactcattacatcctccatctatttaaataacaaatatagttaatagtggccagtcaatttaaatagagactacccatgccactaattatcaataaattaacaatcccagatacagaaaatctaagtcattactccatacaacattattttatgaataaatcattcatagaaaattaatagcccacctgaaaaacacccaacaatataaatattaggcgataaaaataaaccctctttagtttaatcccccggatgatttactcaacacttccgacaaattcaattaacgattaaatattaacattaacactaccttaatatactataaaaatagaaaacccattccaataacctaactattaactactatatcactatcaataaatcttaaccataatctaatagttcacatctttaaatataataaattaatgtattatcaaaaacagtcagcgacagcggattatatactccgccgaagaagttcgagggtggttaccattttgtcagtattattgccagtttgccgtcaggagaagaaacgcgagccattgtctgcctggctagtcaaaatacgatagctgagtttaaagtgacgccttcatacgctttaaatattactccacagaaaaaagtcacctttacaacaaaaagtgaagattttgaaggtaatttatgggagatttatccgaagaaagggagcataacggatgtaagctacaaagaagaaggtgatttctcagtttatacccgtctttgctatgctcccggggattcactcccttgccgccgtgatgcatctttaaatcaatagggtatatacagcaacgtatcagagccccatagaacaaaaccagcggatgcaatgtcttgtccaggtcatgcaaaagaataaaccgaaacgttctggatatgctgtagttgatttaattccttaattgttttaaagaaattttacaaggtaagctcagcttaccttgtaatctaaatagaagagtgcctcatcaagttattctcttcatcctttaattaaatgccgtatgccaacggaagagggcgatcttggataacggttttcatgacgagtgtagatattaggcgctgaacaccgggcatactagacaaccgttcgtcatagagcttctgaaaagctggcagatcatgcgtaacgacgtgcatgagatagtcaggatcaccgaaaagcctttgcgccaagataatctgcggtatttccgtaacagcgtcttcaaatgacctgattgccaacctgtccccttcacgcaaggttacgaacacaatcgcggaaaagttaaaaccaaggctgctgggatcaagatgggcacgatagcctctgataatccccgcttgttccagtgatcgtacccggcgatgacatggtgaaaggctgagacctacccgttcagcaaggtcggtcacggaaagacgaccgtccgcctgtagctcagcaagaatcttgcgatcaatcttatccatttggaaggatctctcttttatctgcatcaaaacaatcaaagttggaaacacattttaacgatagaaggatattctttccactgacgtaaacagcccggatgtacttatatttttcatcaaaatggtaatccggtagtgagaataataaggtggaaaaaatatgtgtatatcctcatgttgcaggaatctttcagactggaagacgctaaaatttgtgactagagaagctgtaaccctgcaatctgattggggggtaaaactatggagttaagtctgtttgctgcattctggattgtatccgttctgtttatcatcactccaggtgcagattgggcttacaccatctctgcgggtatgcacggtcgcgcagtacttcccgcggtcatgggattactgtgcgggcacctcattgcgacaattgttgtggcagctggtgtaggagcgattgttgctggtacgccaatagctctgacagtgttaacagtagccggagcgggttacctgctgtggcttggcatcaacatgatccgtcatccttccgtacctacagcaagcaatgagcgggaggtaggttccaggtcccaatgggcgataaagggactctgggtcagtagcctgaacccaaaagtcttcctgctatttctggcactgttgccgcagttcaccaatccaacagccgcttggccgatcccggtacaaattatggcactgggtctgcttcacattttaagttgtggcgtaatttatctgatagtcggatacggttcccgagcaatcctaaaaacccgcgcacaggccgcgcacattgtcagccgggtatccggctctgtgatgattatcatcgcagtactcttattggcagagcagttcatctgagaatgtaacaaatgtctgatatcacaatcacacaattgaagagtatgaaacagtgcagcgaaaaaatcgccacattcgttccgttggacttcaacccctaagatgaccggttgtagtacctcagtccttcaccttctcacttgcacctgccaagcagcgaagcattttggaaaacaccgatgatgtagaacttgtgtcagcggagaagcccttgtagtgctctgcaccactaataaaaactcagtccgattggtaaaattttgttgcacaattcggactgagtttccttctggtaattcactatttggagtgaattaattaggtttgaaccccgtataaagttatcggaatccagttcccgggttgaccagttgcgacagattatttagagctcctgttctgtcaaaggcacccggctggcgtaatgcatctatgagcaagttaagcatctcatccgtcacatgttccataacgaaaagatgtgcatactcaatcccattttttgtctcagtagagagagagaactcttcaacaatgtcgttgttaggacaaaggaacaggatactgagagagagtggcgagcgatggacgtaaagatcacgaccaagttccgcactcaatgcctgtagtttctgataagcgctctcactcatctggagttgatgtacgattttttcaatctggtctttatgggagtatttagtcaggtagtgccaaagaatcaaggccgaaaaaccatttcgcgagcccgctaatgtggaatcctgagcgcctatataatctacagttaggaaattcaggagatattttttgttttgttaactaaacaaccacctactaaagtaggtgggttagtgattaacggactgaaagtccggatacgcgtcggctaaacgacgcgtcaattatccatcctgaaattatcattcggattgggttcaaaatgatgttctaaatagcttttgatcatttcctccgttaactgccccaccgttgcacaaaaatagcctcgcccccaaaaatgttggccccagtaccgctttttcaaatgcgaaaattcttcaaacagcttactggccgttctccccttcagccttctcatgatttcacttggcgctaatgttgggggactgctgacgagtatatgcacgtgatcttgactcacaactccctttaatattctgatttcaaaggagccgcatgtctgacggattaattctcgcactcgacttgccacttctcctgtcagcactttgtatctgtatttcgttacccacacaaaatggtattcaatctgaaataccgtgtggctgccatatctgtaatccatgttgcacctccggtacaacacagtatcgcagctaaagctgaccggctaaagccggtggttttaacctttcatttggaagaataaatgccggtaggccacggagcacccatttctttgtgtccgctggtcacgatagaatgaactgggtttctgaaatcaaatgaaggaagatgtccctcaccaatatctattccctgctctctcgctttctctaaaaacggaccatacgcagcccccaaagcaccgtcaatgtggaaccaatagccattacgaaggcttttaataactttgccattttccaaggtaatttcaagagtccgctctttgaggccgtgccgctcaagtatcggtagtagcagatcaatcgcgccacttacatcatcaagcgcacctttaaaagaggttccatagttgaagtttaccactatagggaaaccacgtgatgcaaaaaaatccaccaatacactaagcttagctatatcaacagatcccgttgggagggacggaacctttgtcggccattttccatcactcgtcttgatgggacattgccctggataaagagactcccctagtttggagaaagtggagagcgccaaaatatcttttgctttatcaattgagtaatgtgtatcttcggaataaaaaagtacgggtgtaagcgagttctcgttaccacctacgaactccccttgttcaagggagctgttcgcattcgaatcaacccagagaacttttgcagctagataatcacgcgcattgcgcagtgcatataaattcccctcagtgcttcccattgacaacacatagccccagtatgcctcgcccggagtggtgctatctctgccaggagcgttccaaagtttagcaaaataatccagtacggcacgctcaacaaactttgagttaagtctgaaattgcccgccataaacgggtcgccaacattatttaactgaacatctaagtacttgctaaattccgatgaatagtggagttcttggttggcttgatagccaagaaatttttctcgcgttttctttacatacgaatctaactctgccagggcctgccctcgttcagcatctgttaatccgtgttcagatagttcaaacagagattcgttaattgccacataagtttcattattcatatttggctccaatgtaatgatctattaaggcaaacggtatgttaagcatgggttatatcttgagagcgcctccttaattgttggcttgttgctgaggcgtaattaataaaaataatttatataaacatccctgtgtttcaatctcttttttcctgacatattgtaaacatcaagcatgatcaacggctgacatagtgataacacccattttgagttagattatatataaataaaatcaattaattcattactaaacgaatggataaaaagcaacaaatgcaatggagtcaatatggtgttcattatttattcttccaaatgaaaggttaaaaccaccggctttagccggtcagctttagctgcgatactgtgttgtaccggaggtgcaacatggattacagatatggcagccacacggtatttcagattgaataccattttgtgtgggtaacgaaatacagatacaaagtgctgacaggagaagtggcaagtcgagtgcgagaattaatccgtcagacatgcggctcctttgaaatcagaatattaaagggagttgtgagtcaagatcacgtgcatatactcgtcagcagtcccccaacattagcgccaagtgaaatcatgagaaggctgaaggggagaacggccagtaagctgtttgaagaattttcgcatttgaaaaagcggtactggggccaacatttttgggggcgaggctatttttgtgcaacggtggggcagttaacggaggaaatgatcaaaagctatttagaacatcattttgaacccaatccgaatgataatttcaggatggataattgacgcgtcgtttagccgacgcgtatccggactttcagtccgttaatcactaacccacctactttagtaggtggttgtttagtgcaacgcgaacagccatattaaacggtgagctagaaacacaatttgggcgctggtacccaagagtaaaattaggggaagaaacagagaaccattgtggaatgaaaacacgagaaaaatcgtcgatatcaaagaaaaattcgactaatacaactaatttgtccatgcctgttccttatttagatctttttttcttggtcgaaagttctgatcttggaacaggcgcttaattcaatttttttatcaagaattcagatatttacaagctcatgcaataattcccataaattttttcagcctttttgatcatacttagcagcaaacccttgggaacggaccaactgattcattacttttagatctaccaatagatcgtcaatatcgttatctaacagacgctggtgcatttcgctaaatactacgctcatttcctttatcccttgataagtcagggatttcacctcttcgaattgggcgctatcagcactttgctcctctaacgaaacacaacgctccaatgctttgacaatcattggcaaataacggttgagaaataacttaccgggagtgacatccctggcatcagcctgcatacagtcaatgatcgcctgcgttttctcctcaatcaggttaaccaattcctgcatctcatacgccataccagacttataacgtttgatctgagccaattgttcatagtattcagcaaactctgcctgtgtctcatcttgccgacgctgctcctctgcctgttgacgagcaacaagctgttgttgctgttgcagcgctttctgccgtcgaaaattattccaaggctcaatcaacaccgttaccagcacgacgacaaaaaatacgacaccaaaccaaacaggaatcgcatgggcatcaattctaaacaacgcgacaatagtactcgctgtcatcagtaataatgggaacctgcttacctctagtttacgttgtctgataatcgtgatgagcaaagccgccagcccgccaaacaatagtgcggcagcccacagctccgccagcgggctcaacaccaccaccaaccaaccggccaaagtcgcgggcctatgtggacgtgacggatagagagccaataatccgatatagactgataacaccactatgctggaaatatgaccatcacccgcaggcaagaccaaaaaagaccaaggagtatacagaacaacacaagccagtataaaagcgaggacaaagattttgatatgaaacagtacacgtgatagagaccgcttgatgctaccgaacagagatattactccctgttcctgctgttgtgccgcatcacggtcagacgatgattgaggtgtaggcatagggtattttactcctcttactattatccattactgtcaggaaagcacctgataaggtcgctaatattgtgcattagccgccgcagttaaacgctgacgtaaattaccttccattgaggagagctctttctcaatttcagtccgcttaatgcgcgcttctgacgcaatgcgcattgtatcctcaatcgtattgactaaacggctctgcacatcgcgcaaggtttcaatgtcaacgatagagcgttccacttcagtagccgttgcaatgctgctctgttgcaggatttcagcatttttgcgtaataattcgttggtcgtatcggccacctctttttgcaatttagccgctcgactctgagctttcagtgacagattgagtaccatctgacttttccagattggtaatgtagaaaggatgctactttggatcttttccgccagttgctggttattattttgtacaatccggatctgtggggcagtctgtatagcaatggtctttgacagttccaaatcgtgaagacggcgttcaaaacgattaatattctccagcagatctttaacactctgcgcatccatcatatcttgagacgtctcagcctttctctgcaatgagggcaactccaccgttttaatctgccgcaacttctgtttgcccgcttcaacatagagcgatatttctttataaaaacctagattgcgatcgtagagttgatctaacaccgtgatatcacgcagcaaattaagcattgcactatccaaatgagtggcaatggtatcgacctgttgtgttagcgtcttttgatcaatcatagtgcgttcaactttcttaaaaatcccgccgatcaacggtaattttctcagaaagcgactacttttctcttctggggacagcgcatcatgctcacgaataaacatgaccaaatccgagagtttttggcctacctcatcagcttctttggtttttacattctccaataacgtatcagcaaaacgggcaatccctcccataggctgagcaccatagccgatcaccgccgcaggttgcgaaatatcgatcttttctattagcgtgttgatgtgctcctgatcaatcagaacagttgactcgttgatagccatatcacgaccaaatgatgggataggtgtaactttagtactcataacataaccctgttagctgaatcgataaaattaattgcgtggaaaataaggaattatcatatagcgtctacgatgtgtttaaaacaaattctactttctaacctgcctgtaaatattaaacattagcgaaaaatacctgcataaacccgcgttgtaagctaattaggtaaccttaattgtaccgaatacgtaacgctccctaaccaggcaggagttattcaacaacgatatttttgtcaaactcatctaatgaacagatttcagcgaatttccttcattaacgtagaagaaaaacttaaattatttaattcacattattatcggtattattgtaataattactcctaagcgagttttggattatagtaaataaaaatatgtcaataaaaccagcgcatatacctatagatttcaagatgcatcgcgacggcaagggaacgaatccccgggagcatagataactatgtgaccggggtgagtgagtgcagccaacaaagaggcaacttgaatgatctccatttcggataaaatcaagcatcttcaatgactacgggtatataccctatggatttcaagatgcatcgcggcggcaagggagtgaatccccgggagcataggtaactatgtgaccggggtgagcgagagcagccaacaaagaggcaacttgaaagatgacgggtatagattatattgaaggtgattattcaatataacagggttagaatcatgaaaaatttgtttgttattatgttacttctctccgtaataaccgggtgctccggtaaaaataacccaaacagacaaacacaagcagaagagggattgaaatttgcattttcatccggcggcaattttatcttaactcacgcttgtaccgataaaatcgattatttagggccagacgaaggggggaatgaccagatagaaatagcgataaaaaacgataaacaatgctttgctcactttgatgctttaatcgtaatgttccggtgaactcaccttgcgtggtcagataaccacaaaatgggatgttaacggaagggattctcaggccagggcaacagctcattcaaccgattgttcggccagacaggcagccggctgaggacatcacgtaaccagacccagggctcatgtccgttggctttggccgtttccagcaggctcattatcatggccgcccgttgccccgcggccagtgaacccgcaaaaagccagttctttcggccgagcgccacaccccggaccgcattctccgcccggttgttgtctatcggcacccccccgtcatccagataacacaccagcgccgaccagcgcttcagcgtgtaatctatcgctttgcgtaaccccgagttgggggccgtttgggtctgcatcgtttgcaaccaggaccggaactcattcagccacggccgggcataacgctgccgccactgacgccgtttatccggcggccggtgtttgatttttcgctccagcttgtacaggtcacgaatgccatccagcgcctgtttcgccaccggactttggctcgctttgtattggtcaaagaatttgcggcgggcgtgagcccagcaacccgcttcggtgatatccgcccgggcatgcagtgcgttgtaaccggcatagtcatccgtcaccaacgtgccgcccgaccagtctttcagcaggctctgggcataacggccgctgcggccgggatgcagctcatagtataccactgccggcgaggtatcggggccggtgacagacgtccacaggtaagctcgctgggtatggccttttcccggggccagtatcggcaacggggtctcatcggcatgcagcaccggggacgtcagcagcgtctgcttcagggcatcggctaacggttgcaacgccaccgccacctgccccacccagtccgacagggtgctgcgggccagggtgacaccgctgcgggcatagatttgctgctgacggtagagcggcaggtggtcacgatatttagcgaccaccacctgagccagcaaccccggctctggaaggcccttttcaataagatgggcgggctgggctttagcatgcacacactgacagcgcgcgcagctgtactgcgggctgatatagcgccggacgataaacgtggccggacggtattccagtcgctcactgatttcatcacgcaaaaagcgcagggcatgaccgcaatccgggcagctctccgtctccggcgccagccggatatcttcacggggtaaagtcgccggcaaaggctgacgtttaggctgggccggggtcgcgttttccttgatatgcaggcgtgacagccgggtttccagcaccgcgatatcggtatcggcatcttcctcaaactgactgcgtttgggaccggcaggcagggtttcgctgtgcgcgccaaaacgccagcgttgcgcctgtttcagggcctcttccagctggcgaatataatcaccttgttgctgaagcagcgccagtgcccgcaggcggaactggccggggtcatccagcgcgattaagtcattgagcgtcatgccgacagtgtaccggataattccccgtcgttatccggtaaaagtgtgaccggggtagcggaattagtttcgccagccggacaggtcatctccctcgacctgttgccagtgaatgccgcggatgagccagtcaaactgggcgggcgtcatcacccagctgcgctcgccctgcttcggccagacaaaatgggcccggtgcagacggcgggtacacagccagacgccgtgtcggtcccagcgcaacaccttgagacgggagcgggccttgttgcagaaaataaaagcggcttcgtcctgccagcgcaaattcagcccctccaggtgctgggtcagggcatcaatgccccggcgcatgtcgacgggctctcgcaccagaaagagctgttgcggtttcagcatcgggtcagtacccgcatcacgtcaggcaacagcgtcaatggacaggcgatggcatagccgtctggggtatgcagggtgacggtgcgcgcgtcgtcaggctggagtgaaaccggtaagagggcgggcagtgtctggctgagaggttgggggatgttgttactgtcggcaatccagtcgcggaaagcggaaaaactcagctgatgctgttcgcaatactgttttcgggtcaggtcactgtggcgccattgggtcacatggtgttgtttttgttccggggtatatcggctacggctcatggtgtcagtctccaggtgaagataaggaagcggtagcgtgcatgggccggagaggaagaacaaggtgagatgaccggacgtttacctttaatcaataaaaacatcggcacccaaatgacaatatcatttaaaggtactcatcttgtcacagcgactattcaaacttctttaaatccttcattcagaatgggggtaaaagataaagagcaagccatgagtattatgagcgcactaaaaaattaaattgtttttgatattaaagcagccgcatcccgcctcgaaatctccgcccaatattggacggagatttccggcaatgtttattacaaagaaataacccgtcgtgcggcacctatcgcactggttccataatctatcgcattggcgatcccggttgtggtcagaaccctgcctctgatctgattaccaatcatgccagcaagatgatctataccactaccagcagcacttagccctctggaaacccaactgtctcttcccatcactctgtgcagaccagttccaatgccaccggcaagcccgccgagaacactaaatatcggctcaaagacaggtctggctatactgaaatgcactaattgtctggctaaaccggcggcatatgggctgacagcccggcctaataacctccccaagaatccgccacctattactctgttgatcgccatttccgcccccaaacccgcggcataacccaccgcgtaattcgctaaatgtccggcagggttactggcgacatctaaaccaaaaccaatccaggagccataataggtgccaataccggcatgaatcccggctctggtactcccctgtgtaccggtgatcatcccaccagccgctccccccgcggcggcggctacttcatgtgtaagggtggaggaagtccccaacatggtatcaatggtgcctaccgcactcccggccccaatagcgccaccaatcccccggtcagcattatttatccatgatcccaccgcgcccgttaccgccccggcggctgatgcaacacctacaccttgtgctcgcgcaccataagccgcggctgaactcgccccagcagcagcgcccgccgctgactgtactaacgtcgatttcccctgtacgagtcgagcgagtaatgccccacctttttccagcaagctaccgacgttataccccatcaacgcaccaatccctgcacctacggccgcaacccccagaatgacagggagagccgcgccagccgtaccagcaatggcagccgcaagaccgccaatcgcaagcccgccagcaatggctctgccaattttttgtccccgtctcattgacgcagacattccctcatcaggtttacgaaacaaaaatgaagcaaaccaaaatgtattccgatttcggttcggagacggcgctaatccgtcatggtcagtcaatgtgatggggttattcctcaccatccggtacacattcaacccatccacggttcccgccggatcagcactcaaccagcggcccacccaaggctgataataacggtagccgtaataatacaatccggtggcatcccgctctttaccggaataacgaataaatttgtagctggcttctgtctgatttttcgctgcccataccgcggtgccgccatacggataatactcttcctgactaagaatctgcccttcgctatccaattcaatctggctggagccgagcagattatcgtaactgtagcgcacctgattgttgtcgatatctgccggcttaccactttcccagtgcaatacccttacctgtgcgcgccccgcctcacctaccgtaatcacctgcaaattttgagttgttttatctgccactccagttatgcgcagctctaatcccggcagataagtcacccgttgtacttgagtactgttgcccgtctgctgttcactcacttttagcagccgcacgccatcactgctataacgataccattcactgtcactgctattttcgcggctcaccggtgttactcgctgcaattcaccccgcatattccaatccagattctgccccggtattaacgtcttctgatgaccgccggcatcaaatagcccatccacttgggttggatctgtcgttaatgtactcaataccgtccggttactgcggcttgaaacggtcatctccgtggtgtaactattttgagtcgcgggtgaactgtgtcggatttgaaccaaattaccgccacggtcataactataagtacgctggtaattggtataggtgctgttgtcggcaggaacaggcatagcaggtgagggaagttggttgctttgctggccgatattagccatttcacgccctgtcgcactcataagctgatacagcgaatcataaacatagcggttctcaggctccactttctgattgcgccaaaagcgggtggcttcagcatcattatggatactgatgacattccccaccggatcatactcatagcggagatcctgtaatactctcgcctctgattgactctcttcggctcgccgggtagtgatacccatcaaacgttgagtttccggttcataactgtactcggtaatcacgccgttaccatgctcttcacgcagcttatgacctgcggctgaccagctcagagacttaacaatcacctgttcacgctggcctttcaccgtcaaccaactcccttttaactgaccggcaatgtcataagccagacgctgaatattgcctttcgcatcggtttgggtcagtaaagccccgatggcattggttgtactttgtgttgtatagacctcacttgccagcatccgctgccagacagtttcgtcgtcaccgctccagttagcctcctgcccttctgccagccattggtgagattgggataaaatagcacccgccagtgactgactcatcaaccgggtaacgcccgccgtgtcgtagtggcgtatacacagaccagagaggttatattctttctctgctgtggtgttctccgcccagataaagcgctctgtcacttgagaagtttcctgatcaaaaacttgttcactcacagataacaaacgaccgggcaaggtattaccttcatagcgacgagtctgacgaacacctgtcgcattcatcgtcattaccggacgaccttcaatatcatttaatgcaacagtacgaccagcatcgacactctctgtccgcaaggcatgaccggccagatcatactgccagacaaaattaggttttactgagttatcagcctgctttgcatcatacaagcgtgggtcaatactgtggttcaggtatccacgggcatcatactggtgacgggtgacgcgggtgtcaatatccccgccaatcacaacacggtgaaaaccgatatcacgaatggacaggccacgattatctaacacgctgactgttggggtttgagtataaagagcagtatcaggcgtactcatatcatattccttttattttgttttaaagcttcccttccaatgaaatggagaaagatcgcaagattgattttagatatgacagatcctttcccactctggcgaccagagtgggaagtcttagttaaaagttaatttaaaagagtgtcttcttgacttggtttgcgaagctggcaccgccgtcgcaggcggtataatgcacctgcaccagtacatcatccatattcgccaacagtgcggcctgcatctcatccgccttcaatgttttatcgtcaatatgctcatccaccgaacgcgggaaggtaagcgtccatttggagaccgcacccgtgccctcaaacgatagatagcgctcatcttccaaacgcagctcaaagctaccggcatcattaatgccagaagagagcgccacctgctggctggcccgcagattggtgacaatatgcgtcgcatccccctctttacctgtcggatcattgagacgtttaacaccattgatatctgctgtgagcagcgtactactgctggtctgggtgagcgttgccttcacgttttgatacggcccgatcaacgtcggcagtgtcactgacacggttttaatctggcgcaaataatgccccggatagtcgttgtcaaacagcttttcgcttaatggaaagtcaactttgccctcagtttttaacttaccaaagccatcatcacccaataggcttttgagcgacacagtacggatcacattaagacggcgctcatgacgaactaaatatgccgcttccatttggagcaaattgagttgcagagtttctcccacttgcaaaccacggtaatggtcattccaagtaccggtctgaataaacgtggtggcgtaatcacccaattcatactgccagcaagcttgggcggacaaacacagagagaccacagcgtcgtacgcttgatagtacaacgcggataattgaccactcagccactgatataaagtcgcttgggtgaaacgagtcgttaggtaagtcagcatggttcgaatttgcacctgctgtgccttcgcctgttgcagggaagtctgagccgctttttcgcgcaccgccagcgcatccaactgtttctgtaatgcgtcgacctcagactgtgcctgctggtattggatttgccactcttcacggcgacggcggtaattctccgtggttgccaaacgctcggccaccacgctggtggcttgtccggcagccattaacccaatggcaatcgcttccgttaccccttcatagcgtgagccaccatcagccaaaccaaagatattcgggatcactttcagtgcgccactggcagtctgtacaccggtggaggaagatatcagggattgtgctgacgtttgggtgtccatcaccagttgttccgcactggagatgttattttgatacagcgtgtaataatggtcatgacgctgttgcgccgtcgcctgactagccaacagcgccagacgatccgccgccaatccatccaacgcctgttgttgcaatgtgatggcatagctggacatatccaacagttgctgttgcgccagctcttcttgaccggcccgttcgctacgttccaacaagctaagcaggttctgaccaaaactggtcagcgtacccacagcgctgtaagctcgcggcaacatagcgctgaaacggtatggcggtaccgtcaatatggcaccactgacgccattcgccaacgtgccggactgagcgcgctgagccaacaatgctaccggatcagccggcgcagcatacaacggcagagaaagcggcttgccatcaacggtcaggttatgacgcaggttgtataaccgtgcatccaacgtatcccagtgggacaacatcagaacattgagcggttcgttaaagtagccattatctgccagtttcaagtggctaatgttattgcccggtaatgcgggtaagacagtattactgttagccaattggtgctcaaagtcacgcaaagccgttttttgcccggcggccaaggtatccagggtttgcggtgtccaggtgctgctcaacgatacatccggccgaggccctagcaactcagcggccaaattgtaatagacacgggcctgagtcaaaccatcacgagtcaattggcgataccacatatctccctgagcaatcaagttgctgacataagcgataaacactgctttctggtatatcaccggatgagcataagcctgagtatccggatcgataggatctcccaagtgacgtgatagatcgctgtgtacttcaaccaacggacgtacattccagtaagccggagcattgtgtggcttgtttttcatcgccggatcaaagatgtaatgcaaactcttttgtgccggcgaaaattgctgttcgttggcaaagcgtgtagcaactaaaaacggcaagtgaaagaataactcccagaaatagagaccgtttgaaccatcaaagtccatcggctcacttttgccgtcagtgaccagatcggcctccagagaaggatctgcctgcaaggtgtaatccagcaaactatccaatcccagattagccttctcaatcaaagtacgcacaaaggtggtgttaagacgagttttcgcaggtaatgatgaggtccagaagtctaaatattgcaccagaccacgcttgctatcgtaacgggaaatcaatcgaggaatggcatccggagctttgctatcttgcaactcaacatacacgttaaaccacttgctgacccaggaataggccccttttctccctgatggtcggtcataatgatcccaaacaacgttcaaacaaacctgtaggtagtttttatccggatcagtagagaaatccgcttcggacaaagtataagtcgtaggataggttgcaccactggcaagttggaaagtttgctcactgtagtgtttaaatagattgcgcccatccgccgtctcagcattgatttcctgatagaatttgcggttatcggcgatcttactgaagtttttgatagtggttaatgttggccaatctggagacgtaaatacagattcaagcttattaagactaatagcaaaatttattttatcagaccaatctagcaacattgtaccgtctgggataggtaaataataactggcaggtgtctccccctcccaagcgatataactgccctgcacagtaatagtatggtgagcatcaagcaagggggaaatagcccatccctcattaactcgctgttccaacgcccacgttccattaggaacagatccaccaccatatccagccggatagtagttgatcgctgcattatgaaaggtgtaataattgccatcatggtaatccagataaaaaccttcattccctgaccacgtgaaaccataaccagacttagaatcatatacaatatcgttatatccaaatatatgacgattaacaaaatccccattagtcgtggtttggatatggagtgtcaggccatcttggtcgatatatacataggccccggtagtacccagtttcaaatcatcaactttacctacccaaccggtattttcgggatcttcggttggcttgcctgaaataaccttagtaatcacatactttttatcgtataccgcgaattgcaagcagttctgatcatttgtttcatcacgataggtactgaacaaaaaatccttactcaatggcctgagaatatggtgattgaaggctgagtcacaatacaagtaaccatacacagcaggacggttttgatgtggagtccccgtaaaattacgcacaaatacccccaacatcaaacggccatacgggttactgtccgtttcctccgtcgggtcaatactaaaatcagtggtagccagtaaattaaccttccgcagtgtagtcttcgattcatcaatcagcaggctggatcgctgtgtttctgaactttcatctgcttgctgcgtcatcagcgtggtggtattcggtgccgtccaggtatcatcataacgtttatagccaaattttatgctgtaggcatgggtttttccgatatttttaccgtcagcatccttctgtactgccgggtcacgttcaacccaagcgacatacagccggtcattataaaatactgggcgaactgtatgctccagcaccgtatcaccagacaacggcaaggtaatttcctgccaatcattccagcaatttggcgtcaccggattccctgctggatcttgacgatttttactcaaatccatctgacgccagtaataccgatatggtttggtggtggtacgaccaataaaatagtaaatggcctgatcaaatttatcctgattaatataaccgctgagcacatacagattactcaccgcctcaaactcattgaggtatcccagaacagcatcctgcacccggtccggatcgagccggttctggtttaacgtggtctccagctccgagaaataatggcttttttcctgccgggtgatgggggaaatgtagttttcagcgtaatttcgaacctcagcccccgcagcccagatagcatattggctatcattgtcacgccattcgttagcggtagaaagctccatcgcctgacgccccggttcggaaccattgaccagacgagtcatatattgctgtatgctggcaatcgcttgagcaactcggctggtctcaacttcatcagccacttccgggtcaatcaacaagtattcgtacaagtcttccaccgtcactggctgaccatcgacacctttcagtgtcgaggccacaaaattcatatagccagtcaccaacgcatcacgctgggattcattcagttgcttttccattgtcgataacataattatctgccttacttaaatggcggtttagaaatagcctcattgggccatacggaaaaatcaaatccactcaggtagtgagcttctgccatgctcagtgactacccttaacatgagatacgccagccaccatcgcctgaccggtgctttgccaaagggtataatcactatcacggctcaggacatagccttgctgttgctgtgtaacgccaaggccagtctggctctgtgcctgttgcagacgcagcagcgtatccagttgcggagtggttttggcaatcccgcccaatacttcccaagcggcttgcaactcgtttgtctcccaacccagtagcgttgccaacgtttgtgcagcatccgcctgactcaacggcgtagcagcattagccacgcgcaggtaggccaacacatcatcttccgtaccaccaccggctttacccacttggagcagtagatcgctgtaacggcttaaggtatagagcatccacaaactgatatcggtcactacttctgcggaagcgccaaaataggctggatagtccagcaaagtttgtaccattgcaggacttagcgtgaattgttgggtcaacaaggagcggcgtaccacttcacgcaataggctcagatagccagcgggaatatcagccgcgattttaacagtatccttcaatgcccaagtcgcactcagccactgataggttgtttgcccactccagcgcaacaacaacgcaggcagtgactgactcacgttcagagtttgcgccaacagactgacagccacgccttgctgagtttgctgcgcttgatacaacgtattcgtcagagtagtgattgccagcttcttatcttcatcagataagctttgtgttttgaccaccattgttataacactttctatacctgcatcggtcaccagaccaacctgatcgataagcgggctattacctgccgagagcagagcaaaccagtcaatagcgtgaccgttggtatcaactaatggtgcaccactacgggataataatgttgcactcacaaatgtactgcccaagttctgccacacctgacggataaaattcaattgatcgtcagtgccttgagcggtgaaggtagaaccgctactcaacagtaaaagtaaggtttcaatgggtaaatcgcgctgttgttgccattgagcgatcacacttagcgcttgcagcaaactcaaaatatccgccgccagcggagaatctttttgcggtaccatgatgatgggttttcctgccaattgctgccagacgatgcctgtacctgcatctaatcgatcaaccaaagcacagaaagactctgggtttgtccccaatgtgcgcgccaaattagccaaacggtagaaagctgacaccacaaacagattacagttgagtgtgctttgtgtgatattcccctgttgacgggcaatattatccgccaataacaggaactgacgatgattaaggcccagtgccgtgctgatatgcttaacacgcgccccatctcccccggtggtcaatgtatagacaaaatcctgattatctatcacaaacggtgtatcaaaggtgccaacagagttaaacacctgatctaagaatggtgttgcgggtgtaatggcaaacggggttaccacgcgcagccaaccagcaaattgtttagcggtaacaccgtacttcgcctgataatgtttgaacacccccaacatacgcaacgtattgtcgttcatcgacaacgcggtatttcccgtttccgcatccatagcagaagtcaccaacaggtcaatatcctcatagggcagattcagccatttttgcagacgtactgtgcggttaatacggtccaacttgtcatcggtcagattgttaaccgtcagagcaaaatgcgcctccgctccactgcgactcagagtaatcgcctgcggcttaccggcatgaataaagcgggcaccgtaagcaaatggcgtcgctgtcgtgtcaccagaactgacattatcagacttaaccaccgtagaaccgccaaccgttgaacacaacatcagctctacctgaggtacagtcaaacttgttctatcagtcagtacggtcatgtcgctgaaactgttcgccgtcagcaaactgtcaccataatttagctgatagaaattctgaccgacggtttccaccatgattttctgctgctctggcgaaagctgactcgccatgatttgcaggcgagtcaaagcaccggcagtcgcatcactcagttttccttttgctgttgcccagaagttttgcggcagatccaacgtctgtggcaaagtgatatcttgtaacgtggtacctaataccgactgagccgtctgaatctgctggtgaccataatgatatggcaaattattcgggtaacgggtggtggagagtttggcgtttaccgcttccaaatcagtcaaactcagtttcttctgaatggctttggacagaatttcattgaccaattgtaattgcggtatcacctcattgatcgctttatcattaatcaacaaagccccgatatcgggtcggcgctccaccagcgtattcataatggcactagcaccactcttttcctgatcaagggccaattgataaatatgagtcagataagctaccggagcatcattcgcttctggtgacccactaggtgctttatctttccagccagtgtttgcatcaagaaactgattggcgtaatcgggacctgacacagagaatggacttcttaagctaaactgaaccgcttcactaagagaattacggcgaaaatggtgtaacacctgatgagcatagcccaccgccaggtcatacattttttcagcactgcgtcccagatcagcacgatgctcacgaataaagcgctcacgcggcatacgtaccacatcaaacactgaggtataaccaagatcggtcaacttaccgggcaggttgtggatctcttcggtgcgggaaatcaggggactggcgagttgattcatacggactcctgaattgaggtttattatgagaaacaggttttttcgtgcaaaaaacaaccaccatcgttatgtgtaagaaaggcaccagaacaaacacacgcctttagaacatcagttagcacgaccttccaaagacgccatacacagtgatgatgtgtgatgaaaaatataataaatcacaaaacttgcttacattaaaaaacaaaatacagacaataaaataactttacctttatataattacttataataaacatttacttatattgatgattaatttacaaaaaaaccaatacaatgaatattcttggtgtatgttcattgttttttttaagaaaaatagtttattgaaaagtaatgagaagtgaataagtcaaattccgcatatccgaatagttaaagttctaaataagaatctctttattgattaccaacggatttctgaggtaggtaaaaaagtcactagtctgactcgttcctgcaaatcgtaatcaacctgcatgctagttggaatacggaaatccaataaggtatataattcagtccagccaatttctttagttaaccttttccttggtggaagtgatttttcaggtttaccaaaatgctgatgaattaatttccgggacatcagcggtatcaaaggggaaggcaatttattaggaaatataaaattaggtcgtttgtgattaatgaaagttaacgttatctctgtaagtactttattttctcgcaaaaatgataagaaaatcccttctttagccatatcaagagatatatcagagtctccgggataacctgatggcttagttttataaggaattaatccttcatcgaagatttcctgataagttttgcctaaactattaattaaagcttcaatgttgatagccattatttatatcacctctgttcttgatttagccaattcacctacgactttatttttcaaattacccgcaaatgaattggcttttaaaaataacctcccatctattgttgattaccaaagtacttctgatgtggataagaatgcaactgacttcacttgttccaacagatcgtaatcaacctgcatactggttggtatccgaaaatccagtagcgtatacagttccgtccaaccaacatctttcttgagaaattttctcggcggaagagccttttctggcttaccaaactgctcatgaacccataccctagtcatcaaaggcttcaagggagaaggcaattcattagggaattggtataaaggtcttttctgatcaagcagaaaaagctctacagcaaataaaatcttaccatctcttttaaaagctaaatgcataccctctttagccatattcagagcaataaatgaagctccagggtatcctgttggtttggttttataagggattagcccttcatcaaaaatttcctgataagactttcctagactatttattagtgcatctacgttgactgtcattattcatactcatgatctattatttgggataaattgtttttcaaccaacatatcggttgtctgtcctaaactatttatgattgcaagaacatcaatcattatttaccgactgttcaaataacagtgcatccacacgaagatcagtttgataaaggaagcgaatttctgtatttgggtactgatcatttagtttacgagtataggcatcaaatccgcctactaagccaattaccggaattctctccggtccactactgtaatcgggttctcccataaatgctctgacaatagctttattcattttgtgaaggaatggagcaggcatatcaccactatatgtaccagtatcatcaacagtgttgattaatgtgaattgaacagaaatcaacactgttgatataatatcgaaaactaaagtaagacccgtctctggttcaacactaaatctagaataaccttcgaaagcaaactcaaacttttcctctggaataagtttattttcaactaacatatctgcggtcttccccaaactattaataatttcaataacatctatcattatttacatgacctctattcttggttaaaccaactcatctgagatttaacttttcaagctgttgattaatgaattagctctcaaaagaaccttccctttctgctaactatcaacgcacttcacttgtaggtagaaatgtaactcgactgactcgatctagaacatcgtgcgatacttgcatactaatttccgacttaccctgatagtaataaagatatgtccaaccaaatctatatgtcaatgcttcaaatggaggtgctgatttaattggtttacctaaattcttatctacccattggcggttcatttccttaattaagggatatggcatgttgttcggaaaaacaaaactgggacgctcaggtataagtaaagttaaagtcatctctatgaatgtcttagtttctcgatcaaatgataagaaagtcccttctttagccatatcaagagatatatcagagtctccgggataaccagatggcttggttttataaggaattagcccttcatcaaaaatttcctgataggttttccccaagctattaattaacgcttcaacgttgatcaccattattcatataacctctattctcgattcagccaattcatctaagatttaatttccaaactgttcgataatgaattggcttttaaaaataaccgcccacctattgttgattaccaacgcacttctgaggtaggtaaaaacattacagaatcaacacgctcaaacaggtcataatcaacctgcatactggttggtatccgaaaatccagtagcgtatacagttccgtccaaccaacatccttctttagaaattttcgcggcggaagagccttttctggctcaccaaactgctcgtgaacccatttcctgatcatcaaaggctccaaaggagaaggtaattcattagggaattggtatgaaggtctcttctgatcaagcagaaaaagctctacagcaaataaaatcttaccatctcttttaaacgctaaatgaataccctctttagccatacttaaagtaatatctggagctccagggtatcctgttggtttggttttataaggaattaatccttcatcaaaaatttcctgataggttttccccaagctattaattaacgcttcaacgttgatagtcattatttatatcacctctattcttgattcagctaattcattggagatttgacttttcaaaccattcacaaatgaattggcttttaaaaataatcgcccatctattgttgattaccaacgtacttctgaggtaagtaaaaacgttaccgattttactcgttccatcatgtcataagaaatcttcatacttgtaggaatgtggaaatcaagcaatgtgtataactctttccatccaaactgacgtttcataaccatttggggttgctgtgatttcttaggttcaccaaactgctcatggacccactgtcgagacatcagaggcaccaaaggagagggaagcttattaggaaactgatatagaggtttcttttcatcaagcaaagtcaacgtaatctcttttaaacgcttaccatcccgataaaaagctagaaacaccccttcttttaccatatccaaaaatatcacctcatcaccagaagaacctgttggcttggttttataaggaattagcccttcatcgaagatttcctgataggtttcccccaagctattaattaacgcttcaacgttgatagtcattattcatataacctctattcttgattcagccaattcatctacgactttatttttcaaactacccgcaaatgaactggcctttaaaaataatctcccatctattgttgattaccaacgaacttctgaggtaggtaaaaacgttaccgattttactcgttccatcatgtcataagaaatctgcatactgatttcgtctgtgaaacgatataaatctttccaaccaaattggtttcttaaaatttgccttggtggtattgacttaatcggatcacctaaattttctttaacccataccctatccatagagtgcttcaatggtgatggcaattcatttgggaatataaatgaagctttatcgtccctaagcaaccttaaagtaatttcgtttaatattttactactccgttcaaacgataaaaaaatcccctctttcaccatatcaatgccaatactaagtaccccaaggggaccgcttggtttacttttataaggaattagcccgtcatcaaaaatttcctgataagattttcctaagctatttatgagtgcatctatgttgactgtcatttgtataacccctgttcttggttaagcctgtgtattttggctctggcgttttcaagttgtgcttttgttgccccgtaatttctcaattctggctctatcgtactgaaatcacgctccacagctgctcttaagtctttagaatcctgttctatttgcgtctgagaattccggccgccataagttgcactgaacttctggtgaacctttgccgggataatgattgctgcaacatttttttcaataagacttaactcatccatctccaaatcgggatataacatttttaatttcgctcgaacagccgctgccgaaggcatatgatccgcgtgtgttccattcctcagccgcccagcaaagtttctatataaatccacttcaaacaatttcaccggcggtttactcagatacacatacaccggcggcatattcggaatggggaataccagaatataatcgcggaaatccttctcttccggcattggcaacgattcaatatcgctgcccactttatccgggatcggcaacacggttatttgcgacggaataaacggctgttcttcattcccggtatgggctggagccttgaattcctgttcattcggcgtccataaaatcgtcggccgggtttctcccggttcccagaactcgtaattaccggtggtccgattgagcgtcatcatgcaaaccggcactttatccaagccgctttccgggctgacgtgatatccctgaaccgtcatcctgccgcttttttcatctctgatccagcgaaaacgtacacgagttggtgcttttccatactgttccgctatctgtctcaggcgatacggatctaagtaatcctcttccccctgattcaacgacggtgaataaaacagccccatcaacccaaccgttaccggattcggtgccgccagccaacgtccagcactgatagcaccgccaccaatgtaacgcatcaccagcgtttccccttccgctaccgcgctgcgggtagtggcggccacagcggtagccgccgcttcggcattatcttttccactacgaaaccaccgcttataccacggtaattttttatcccgcggcttacccggttccggcgggtgtttcttgtcctgcgggggtggttcaggcttttgcgccgtggctggcgcaggagatgacggcacctgatatatcgccattctgccaaagttatttgccgattcaggctcagttccagcgtcagtacaccctttaccccgctggcaggacttcgtaaacaccggtatcggcggcggaggtacctgcgttgcaggcgggcttcccacatcctttaccggagaagagaaatgctgttgcgccatattcgtgggagcggcaacccggtcagcagtcttatcttgcttctcataactgtccatctccgaattgataaaccgagcccgacagggacaagtactgacactatccaacgtgccagccaacttgcgccccatgtcaaacacatcggatacaccaccaacaatcacgtaagtaccgggatgtttgccacaggtaaccttatccccttcacgagcggttgctcgcccattaaatgtcatggtgtggtcaccagtaataatctgaccaccacaggttgttttatcaccaacgagcaggaaataccctattgccatttattcacttctccaatgagttacaacatgaagagtgaatctaactgaaatcatcatcatgcttttgccatttatggattaataaatgttcaatagtgcaatgaatttcacttaaaaatatataggaatattctgaaagttagagaaataatgtcgattgatgcttgtaattcatcatattttgcaacacttttattactattaattatcaaaagtgagaattcaagcagcagtgacgaattggcagaagtacaccgcagattttttcaaattatggtcagacggttaaccgctatccgtccaaagtgctgaccaaaagaccaacactttgtcaaaaatctgcaaaactattcaagctttgatgggctttaccagattacctctgataatcgcaggtgggctatgctcctgcacaagcaaacatgctttgttggtgcaaacgacgagcaaactgacaatctaaggtcaactctttcctactatgtcctcgaaccagtaaagcttcccaatggtgatgatgaccgggcacaaaccctgtacaggcaaatcccgcctgctgcaaaatttccattgcctgaagcgtcccttcccctaccggcagtctcacatatatcagtttgtgtgccggtaactctgccacctcttttacccgctcggttgtctgcttttctatccacacttccaaccgacgtccatgattggttatacggatatctgcatcaaccaactcctccggttgcagaggctcttgaccaaacacttgagtcaccgatgtcaaccacagttgccaaccggaaggccaatgtacctctggaaacggccagctttgtaaaggtaaacaacccagtactatgctttccgggcgtgcctgatcaaacggtgatgttacatagtccggcagcaatcccgtggtgtgaaaccccagattttgggccagacgctgactatggttatgcgacgacacttgcttaattgtgaggatacttaaccccattttcttagcctgatcacacaagtatcgtccaagcgcggtagcaataccctgcccacgtgcctgtggatgtactgcgatcaacgccagttcagcgcttaatgagcagtgttcatcccgccacagtgcggcatgccccaacacgtgtccatcctgtaccgcaacagcggaataccactgttttgccgcgttataacggccaagcatggtaggtaaatagacttccgggtagacataatcttcgccgtaaacaacccgaaataacgcactaataccggtagaatcctcttcccggaataatcgaactaatggtattcctagattcatgctcatgctgccttctcttcagcaccataaccacgatgatcaaccacccgcattaatttaccggagcgtggatgagtgaccatattttccaaagcgcagtaagtgacttccacatgcaaaaatccctgatcacataactttgccatcgcgggttgtgccgccaacaatgtctgatgcactgatgttgtcgatgacgccagtgatgaatcgcccgctaacaagagttctatcttatccatgccaccctgacggctcagcaataactgccaagccagtatgccctcttgctgttgcagtaaacgcgcaatatggtcaggaaaaatggacagcgagaaaactcgcactcggtgagcgctgcccgctcgcccctgcaaagcgaatttgcgactcggctgccctgactcttcacaccaacaggccatgtcaccggtaggatagcggataactggcatcaagcgtcgctgcagattggtcacaaccaacaggccattttggccgggcaccgtaatcggctgaccattggattcgtcaataatttcaacaatggtatccgtatcaaaaacccgatgttcgccgtaacagcaatcgggagacgccgccccaatgaggcccgcatcaacgctggcacaaccaactgaaccaatacgcgcattaggaaatacctgactcaagagtgtcaattgctctggaaacaggctttcaccgccgtacaacagacgatcaatgccgggaatagactggccccactgctgcaaggtactggcaaaacgtaatagctgcgccgtcacgccggccaaaacattaatcctcaagctgacaatcgcatcggccagtgcccgatcatcaactgaccaagtaaacggatactccactaccggcactggtgaataggacaacgcaccgtgaataaacaataaactggtatacaaatcaccagccacaaacagattagcaacgcgatcaccgggctgtaattgctgtgcaagcccttgaccaaatgcgcgcacgaaagcacgccattcgctacaactgaataccgacaatcgaccatcactggtagagccaccggttttaaaaacatgaccaccgttaaccggaccggttaataccggccagttttccagcgattgcgattgctgccaatagtcatcaggattgatcaatggtagatcagttagcgcccaaccggatcgaggcagatcacgataaagatccttaaaaaaaggtgcatgattgcgggcgtattcaaccagatcgtgtaatgatagtgtcatgatttacccaaaaagtagtattattggtctcagaatcggctatccagcaccagcggcgttttgccactttgcgggtgacgatggaactgtccaacaggtgtcgggataacttccaattgaagcaatccaccactgacaacctggttcagcatcctatgttgcaacagatgcatacgtacctgctcagcatccccgtcggctaatatatggatataatcacaaccactggagctgttccctaccaaccactgcaccggaaacggcaacccggcggataattcggttgggttcagaaaaatagaacctacccgcgtcaacaccccatgacggcctcccagtttaaaccgcggcgttggtaacccgcagtcgcagagatctggcagccaataacctaagtcgcctatatcataacgctggaccacctgcccttcccgcgccagaggggtaaacaccagtcgaccgctttcccctgtcggaacaggctgatcactatcaagagccaagatttccaaccattgaatatcagataacagatggaactccccctcttggcaacaagcacaagcatgacctaacggaccggcatccacggaaccgtaaatcgccgagcgaattatctgtacaccaaaactggacagaaaccgacaccgctcttcaccaatatgctcaccgccagtaaaaattttgcgtatcccaccataggcgcgcaacgcagcctcttcacattcaaacagtcggtggatagtgcttgacattcctgccagcgtattgattccctgagtgacaataaagtgcctgatttggctaaaatcatcgtctatcgggccgcccatcgggtaatgcggcacggataatttatccagcacagtgaagaaactcgtcaaaccgccatacaagttactgccataaaacaaattcattacccggtcttgggatggctccagaccagcagcgaacaaaccatctgccgcggcctgcatttgactgtgataatctcgatggctgaaacccgccaactttggctcgccgctactgccaccgctacgaaaaaacacctgtgcttttgccgtcacaccgccgttctgaaactttgctttatccatcactggaatccctgccagttccggcggattggctgaccctttatctaatgcgacatgtcccggcagttgctcaggttttaagctgacggagacgcgtcgcgccagccgagtcaatgcgtaaacaccatcatgtggctcaccctcatagccatcatgcataactccggcctgacatatccggctaacaccggcggccaacaactgacgactcaacatcggcagctctttttctttcactatcagagcgcaactttgcaaataggggcgccacggcaacaaaatctcaaccaattgtgcacgtggtgccggacggacttgcaaagtacggtacaacggtgatggagcaagctcttgacgctgtatccaggcgactcgccagccattgccctcttctaccgaaccgcggagttcagcaaaagtgtgatccaacttcaaaaatgccatctgactgctgatttccgccgcttcctgtatgtctgtctgtaaggcaggccatattgtcgcgcgtcgtgccaatgcggcggccacagcactaacgacttcccgtaaaacgttctcgtcagcgctatcgaccaacaaacactgtggactggaacacgcttgttggtcaaaacggcaaacatcatcagccaatgcatcgtaatcagcatcactggcagccatcgggtcaaaataagcaaaactgatacgatgtccccaatctatccaacggcaaccgggccgcaattggctacggatagcggtcagggcgctattactgccccaggcggatacggcatcagcacacgccagtaattctgataattgatcagacggcaaaggcaacacagagatataaggtgccaacgtgccgctcaggtcatgacgtaggaattcagccagtatctgcgcattaaggccgtgatcactgctactaggacgtaaccagttgacattacccactagcaagctctctaacaccgccataaatggcagtaaaggcgcgttggccggcgtaatatgcaccaccaatcccaatggttgccaagtttcaaaacggggctgtgtatagtcaaagcgacgcagagaaaagggctgttctcccaattcgtgccgcaactttgcctctaaagaatcgcgatggcagaagtgacgtaacgcagtgagggcggcggtatccagcgcaagcttaacagcaacattatcgagatcatcaacgaagcgctcagcacacgccaatacctgttgtacacttgggggacaagccagcgtctcagccaaattacctttcagttccgccaatacgctagcgggctccaagtcagagataaccttaccattcactaaatacatttcaggactcctttatcaactcagaagcggcaatcgcacaactgcggcttttactggtaccggcacgacccagtaactcaaaccaatcggtagctaactcacaaccacattcagcagcgggatgcagcaccgccaaatcgctcaccacaatactgtgtgccgggctggaagtgatataaggtgataccagatgcagaaaacctggcttaccatagggttgaaccgccatgttagcggtatcgcgaacataggttcgggcatagaccggcacatgaaaatggtgatttcggcattcaacataaggcaccggatgctccaccgaaccgtaaccatcccggcaccgctcgtcaggaatacccagttgttcccctaaacgctgatacagtaaggattttggaatagctttatccgcgtgcgttttccaaccgccacctaaaaagaccagtgattcaggatgcaactgcaccggcggcaaccccatgtcctgcatccgttccagcgtgaaccacaaaaatgcaggaaagcccaagatccgcaccggcagcccttgtgccgcaaattcttgtaaggatcggatcacaccaaaaggatcaaactcattgctttttccattgtggcgcagtgcataacaggcttggtttaccggtgcatatttgcacagatattgatcggtatacgcggttcccaacgtcaccataccggcaggctcatagcttagcagcaagtaattacaaggctgctgcggcgtattccaaccgtaatactcgaaaatccgttcaaccatattttgagctgcacgcatactacgtgcatcgtaacgcatacggctcttttggccggttgtcccagaagaggtcagttccaatgcattcctacccgtggtactgagcaacaactggcgtttgaaataattagcgaaaataggcggcaaacgcgaccaatcgtccagtttctccagtctttccacttccagaccgttagccttcaaccactgagaataaccgggagtattttcacagtggtacagcgtcaactcacgcatggcagcatcaaataattggtcgcaaacgctatcgacccgataaggatgatcaagcgcgcaaagggcgtcaacataagcaagagaggtcaaaagtcgtctccagaaattaaagaaaaaagggcatttactcccttaaaataataggtacgttatttcaacctccggcaaatcaattccgccgaagaaaaaataatgacatgttgaatacaacgccttaaccaaataaaaacaggtcaccgttctggtaaaactaacatttaaatttgttaattccttgtaagaaaaataataaaaacataacaattatgaattaataaacactaatgtaataaaaaattttatatttaataaccttatcaacgaatttggacatcattatttatgcgtaaataacaggtgaaaaaagtctataatcactcatcaaatatgaatttatagtcaatatttaacatttgaaaaacaaataggatgctgagatctccatgatatttacgcaattaatatttagtataataatcaacaacgttatttctttattctcgtcaatttcccaacaggtaaagtctctaaacttgaagtaaaaccatcaaaaagttaaaaataaaaaacacatttctatacccatgatagaaatttgcttttatataattaatttacctatcttactaatcattcatgttaatatttctttatcaaccattataactcccggaaagaataaaatatttcaataacaaccaaaataagaattgccaataagcaatattatatataatgatatttcaataaaaaaccaaaagtttttattttgcaaatatctaaaatacacaaaatataacacttaattttagccgcaacctccatttataacactataaatataacatttatatttataattgccgatatccatgcattgctttacaatttaaccaataattacaataaaatattatttattttgtcaagataacaaaataaaattaactaatatctgactcataatgtatttcaatattaacccgatgaaataatcacattatttataccctatggatttcaagatggatcgcgagggcaagggagcgaatccccgggagcatagataacaatgtgaccggaatgaatgagtgcagccaacaaagaagtaacttgaaagataacgggtatattccaagcaaaggtttaaatcagtgatactgattaaaatatctgccagacaaactcatccgagtttcgaatatggacgaatatcaaaaattatttagccaataaaataactcatatttacaacagataactatatttatagttaatattcccaaaacacaactaaatgttaaataaagataaattgcttttcattttgttaaattcacctattaacagaaaaaacagccataagcgatagcaaaaaatcccaacgctgttttctacgatacttgtgtacgtctacctatacttgctactgttgctcggttacagcagcgccgttgagcagcatacttctgaatgagattatacccaatggatttcaagatggatcgcgacggcaagggagtgaatccccgggagcatagataacgatgtgaccggggtgagcgagtgcagccaacaaagaggcaacttgaaggataacgggtatattcctgcttatcccctgaaatcttgcataccgctagtatctcaatagaaaggttatcctcattatatggagaaatggaacttaacattcattcgctgctgtgcagataaaaaattatttaacaccacaatgagttaacaccacaaagagggaaattatgaacaactttgaccccaaaatttaccaacacactcccactatcactgttcacgataaccgtgggctggatgtccgtgaaatccattatcaccgagctaccgcagaaaaaaatagtgatatccgtatcacccgtcatcagtatgatgttctcggacacctgcaccaaagtattgacccacgcctgtatgacgcctggcagaaagatagctcggtaaaacccaattttctctggcagtatgatttaacgggcagcgtcctacgtacagagagtgccgatgcgggtaatactgtcactcttcatgatattgaaaaccgtctggtcctgactgtaacggcaacgggtgtcaagcagacccggcaatatgaagataattctctgcctggtcgtctgctatccgtaaccgaacaagagccagacgaaagggcatcccatatcaccgaacgtctcatctgggctggaaacacgccggcagaaaaagagcaaaatcttgctggtcagtatgtacatcactacgatacagcaggagcgacccaactgaatcacctttccctaaccggagcggctttatcacaatcccgtcagctactggttgatggccaagaagcggattggttcggcgatgataaaaagatctgggataagaaattaagtaacgatgtatacaccaccgaaaacaagacggatgctaccggcactctgttgacacaaaccgatgccaaaggaaacatccagcatctggcctataatgtagccggacaattgaaaggaagctggctaacggtaaaaggccaaaaagagcagattatcattaaatccctaacctattcagccgcaggacaaaaactacgcgaagagcacggtaacggtatcatcaccgaatatacttacgagccggaaacccagcgactaatgggcatcacaacccgtcgttcaactgatagcaaggctttacaagacttacgttatgaatatgatccggttggcaacataatcagtctccgtaacgatgcagaagcgacccgcttctggcgcaatcagaaaatggtgccagagaatatctatacctacgattccctgtatcagcttataagcgcaacagggcgcgaaatggcgaatatcggccagcagaatcagaatctcccctctacagcactcccttccgataacaacacttataccaattacacccgcacttatgcctatgaccgtggtggcaacctgacccaaatccggcatagctcacccgcgagccaaaacaactacaccacagacataaccgtctcgaaccgcagcaaccgcgcggtactgagtaccttgaccactgacccgaccaaagtggatgcattgtttcaggcaggtggtcatcaggagacattactaccgggacaaaacctaaactggaatgcacgaggtgaactacaacagatgacaccggtaaaacgggataacctcactgaccgtgacagcgacatagagtggtatcgctatggcaacgacggaatgcggctgttaaaagtcagtgaacagcaaatgcagaatatcctccagcaacgacgagtcgtttacctgtcaggattagaactacgtacaacacaaaacggtgatatcacgaaggaagagttgcagattattaccgtgggtgaagcgggtcgtgcgcaagtgcgagttctacattgggaaagcggcaaaccggaaaacatcaacaataatcaggtacgttacagttatggcaatctcattggctccagccagcttgagctagatagtgatgggcaaattatcagtcaagaagagtactatccatttggcggtacagcgctctgggccgcaagaaaccagacagaagccagttacaaaacgatccggtattctggtaaagagcgggatgccaccggactgtattattacggctatcggtattatcagccgtgggtgggaagatggctaagtgctgatccagcaggaacgatagatgggctaaatttatatcggatggtcaggaataatcccatttcctatcacgataataacggattacatccaaatagtaataacaatggactagaacgaaatcatccactttactatctggatttagctggagtttattataatgtcaacgataaagaagcaattttatctacacttaaaagaagttttgcggcaacttcttggggaaacaaagtcagtgataaaacacaaacaatactttccgcctcagcagaatatggaaatttaaaacacaaaaaacaaatggaatataataacaaaaagttaaatgagacatctcctgatggtaaattcaaatatgcgaaaacaaaattacaagatcaagcggcacatgccgggatcgcatttaacctgcacccgatatccgataacgagaaagaaggatggacatttaattataaagatgaatttgttaacttaaaagataaagaaaaatccttaggaaaaggaaaattattccctggtgtcgaactcctgccggataatccagagcactataaagttcagaatgttagcgaatttatttctgggattgaatccgcctacaaaaataatggagtagagttacatccatttacatcatcattaattaaaaaacacattcttaaaaatgaagaggttttaccaatgatggcgggaatcgcgggtctacatgctgaagttcaggcaatgaattttagatttataaaaggtgatttggatagtaaggtagaaatcggctcaagaagtaaacggagttatgaaatagacatgcttgattcatatatttttactgagcgtcttacaactaaagaaaaagggaaagaattcactgcatgttttaattgtacaggtatattgcaatggccaacgagggttatgacaggaacgatgaggagacaataattatcctgatgaatctctaatctgaaaggaataactgagatttatgactaaagtaagagtttgaagcgtcatctcaaaaaaccatatatattctatggatttcaagatggatcgcgacggcaaggaagcgaatccccgggagcatagcaaacgatgtgaccggggtgagcgagtgcagccaacaaagaggcaacttgaaagataacggatataacgcagtgttgccgtcctattcttgggaatatctgacggaaaactaagtgaaaaatagtgagaaagaaaaaagaggtgaaattcttattttctataaaatcttttatttcttcgatattttcaatgtaaactttgaacaaccgatggctaacgagccaacagtgacttcatgaatttcaacatcatcaagttgataacaagagagtattttagttatcaactggcaggtaaaatgtatggcgatattcataccaatacactttttcactcctacaccaaatgaaagtgggcagccttcacgatcaagctgaaattggtaaggatggtcaaaaaccgtggcatcgaaattggctaatccggtataaaacaggactcgatcgcccttattgaaacagctatttttatatatcaatctctctttaaatactctatttaccgcaagaactgggctagataaacgataagtttcagtaacaatacttttaatattattttccgtcaccgtgattacatggcttttaatataaagaaatgtggcaatgatcaattgcatcgtcgtttcatgagcggcaataaatgttaccgatagatcagccacaaatttttcaatatggatcacatcctctgccccaccgttgatggttatttgccgtaaaacttgctgatatatagcaataaaagattccgcaatcgatacaaaatgcgctctcccactcatgctaccatcaaagaacataccgacattcagggcatgagcagaaaagaacgccgaagctttcaaccccactaaagaagcagccaataagttattcactccccttagatgttttgcagtcaaaagatcacactgttttaaaggagataaaagatcattagcgatgacttcaaaattcatctcattaaattttccacgtataaaacttactgcatcagtattatatttatcatcattaaaaatgagagaattattaagataaagaatgaatctggcaactctactctgatctgacgcagaaaatatttccagcggaatgctcaacttctttttagtcacataatccgagttcagaaaataagagcagatatcatatgaatagcaatgccatattgcttgctttgcatcgtaaaaaaatccctttctctcaggatcacctaatcttacactatccattttcttcttatattcatttattaaaacattcatcacagatgcgcctatgtaaatttcatctctttgagttataaattctcacgctatttgacaataaatatatttattgccatctataccctatggatttcaagatgcttcgcgacggcaagggcgcgaatccccgggagcatagagaactatgtgaccggggtgagtgagtgcagccaacaaagaggcaacttgaaagatgacgggtataaaaaccataagatatttcaccggctattatttttagtctgttaatccatttataatcaagagaccttttttaccattaatggctgacctcacactgatataaactcacctcttattcttatatataccctatggatttcgagatgcatcgcgacggcaagggagcgaatccccgggagcgtagataacgatgtgaccggggtgagtgagtgcagccaacaaagaggcaacttgaaagataacgggtataaaaaataaaaccgttctaacctatattcaggccacataattaaaaacataacctctcaaataactctgccacatgccctctatttgtatttccattacgtttaacaactcaaaataatcaccatacaaaattatcacattgctttttatttttagttcaatatggttacttgtgcgcgttttttaacataaatcgtgataaatatcacaaaatttttcctccccctaaagacgaaaaattaattaaatcattaaaatcaacatattataaaaattcatctcataatggcctatttttcctgcctgagataccaacccaataaaatagctattcaaaccattttccgattcacaattaaccttcatttaatattcatgtaaaacattcatgatgatatactttatattctgtatttttacactaatataaaaacatattatatataatttctgactattactcatcataaatgaaattaacccatagacaacaaaccatccagaatagtaataaaatactgtgactaatagatcaataaaaatcacccattttacccattaaccaggagttaaagatgagagaatctgaggaaaaagaaaaaggggaaatgcttgaaattaataatcattattttttcgtcattaatcttaccaatgaaaacttaatcggtgatgtgatttggagcagctctggaaatacgagcactctcaatgttgatgggttaaatccagcaaccgcttcacttatccaagaattctatccagaaagttggaaaaatgattattggcaatggacggcaaaagggaggagatatcaattaaattgttatgacaatgatatctatgtcgctgttgtaattagcgattttggcattagtgtattacccactggcaccagcccggatgcatggaaatggtagcttttcttccacttcattatttatgtaagaaacatgcatcatgtagaaaatattaatagcactcttacataaagacaagctcgcaagtcgacaaaacaaagatcgtgatggcatcacgatctttgtttaatcgaattaaaatcttaccctgaaaaaattcttgaactttattatccacaatctcaaacccaccctatgttgttcattaccccagattaccaaattaagtgatttatacccgttatctttcaagttgcctctttgttggctgcactcactcaccccggtcacatagttatctatgctcccggggattcgttcccttgccgtcgcaatccatcttgaaatccatagggtatatactaccattcacaatcggtactctagggctttttcctaataattattcttgtccactcgatcctttaagggatctcgtccctaatttttagcaaataaaaccgaatcttagcaaacctaataaaatcactaaacttttcgaaccctcagtataaataaaagtagaaagttcagataaccatcagaatttactctatatttgcaactctatacttaatagaaagaacaattaaacatgaataggataaatactcacataaattactcatccgtaatcatttatttaggataaattattatcagacaatccctctttctcactccatttttttagtaataatattctatcttggatatatttttcagacaatacttccagtttctctattttccctacttgtaacttaagaaaattatgactgaattcacaccaagaaactaaaaagaattcattattgaaaaagatcgacagtgggcaggtcgtcttcacaatatgtgtattatttaaatcaataaaagttatcactatttttgatttatggtatatcgcccttctgatatcagataacattaagttattatttgtaactttgctgtaaccttctgtttttacaaacattggcgaataatatagctgatcacgctgttcttcaggcaacactgcggcaatcttagatataaagctatgagcagatttagccaaaacaacatcattttgttcaataacccatttattgcccaaaactaaggcatcaatttcatccatcgtaaacattaaaggaggtaacatgaagcccggccgtaatatatagcccaaacctggctcaccctctatatttgccccctgactgtttagtaaagcaatatctcgataaagtgtgcgcaagcttacatttaaatcactagcgagtaatttaccactgacagggtaccttctctgtctcaagtattgcaataatacgataagtctttcggttcttgacatttccgaactcctcattttaataaaaattaaataggataaggttttactgaataaataatattgcgttactagctagttacccaatatatccgtcatctttcaagttgcctctttgttggctgcactctctcaccccgcccacatcgttatctatgctcccggggattcgctcccttgccgtcgcaatccatcttgaaatccatagggtataactatctattcttaattatctattatggaacaatatcgagatttctctataaaaccatcaactcgaaatcctatacttaatatagacctcaattgtcaggattgacgaaaatgctattgccgtcttacataattaccaaactctgtcaagagtaaatgttcaatgcattacgccgaaacaaggttaaagtaaatatcgaacatcaaacatagcgcaaatatttaaaattttaatatactgctaattaatacaaaaaataaaacttacactcaacaagataacttatcataagtaaatttactatgtattaatgatataagaaaacacaaatattaaagtcaattttcatactgccagttaatacctcagcagaaaaattatggctttattattctgacatatcgcttcgtaatgcctgggaagatgttttgattttattactaatgtaaaatagcagtggaactaaaaggcatacccaaataggtttaaccttaacttctgttgaaaaaataaatttctttagacaagatgaataatccctagcttatctttaatttatttttaatatcgaataacaatatctcaattggttaataactttatgatctatacccgttatcattcaagttgcctctttgttggctgcactctctcaccccggtcacatagttctctatgctcccggggattctctcccttaccatcgcgatgtatattgaaatccattgggtataaaatcaattaaccttttttatagccatttagccaaaattgttcactaacccaatctgaaacttgtatcatatattcgtttattttatttaagcaaacatgagcctctgattcataacataataactggtgattatcaccccatagttgatctaattttttcactttatcgatctgaaatatatcatctaattcaccatgaacagtaaaaaccttggttttacaaggtaaagagatgtccaatttaatttcgtcaaaaatagactgcatatgactattatcttgcataaatgcaaactggaaatcttctttaagccttcttggcaacttatcaaactctgctatttcaggcccaccggataaattgacgatacaacaaaatttatcgccaattctttgcgcaacgcgtagagcaaaataaccaccaaaactaattcctaagaaacaaagaagattactattaattcgggcatcatcttctaataatttaactatagagctaacatataattccatatcaatagctattggtgatttcccaagatttattccctgccctggtccatcaaatatagctaccgccatatttttccctaagaaaaactcggccaaagataatatttcaatttcagtcattgaatccaatccattggataaaataacacaaggcaaaggatgattctcttcttctttataccctttagggaatataaggaagaacggcatatgaaatttatcgacgacaatatattggtggtcaaccagcaaatcactatattttatactagataaaaaacatgaacgaatatactctctgagctgtatctttctactcctatcactaaaatacataaattctgcccaatgataacaggcagcggcactcctcaaagcacgaacatgactaacttcactcttagccgagttagcgatattaatatagctatcacccacttttgaccaattaatcatccattcataccaaaactcttcagaggataagtctaagtttcccgctggaaaatgactcaatgccgcaacaacatctccccaatgaacttggggagcatattgagaatttaagaagaatattcttggcataaaataaccacaagtagcaagaagttctggcgaaattctattgggtttatttttattattcatcttattttcctttaagttactaaatacgagtgtctaaccactctttgcaagcaaaaaccatttttttactattttctgaaatagcattttttactatctctcgttgtttttctttatcttccgtaccaaatttaactgcacataattcataatttaactcaacatcatggctagaaacaatgtacgaaccactccctttactcaatatctgccatgaaccactatgagactttaatactaaaggcggctctggttgaaaatattcaatcaataaattatccacatcacagaatcgtatactacggaaagtctcatttccatttggtgttgatacttccatattaaattcttgatgtttatcatcattataaatgacttttactgaatcacaatgcggtaatatcttgctccagtcatcgatatttaaaaagatcttataaacatcatcaacctgatgaggaatataatatcccgctgagaaagttaataaatttgattttttatgactttctacctgactctttatactatccatctccattcgagtattatcattgataaatgagataataaaggaattagcctggtcatgattatcaataccatcaacgataccactgacatcttctaataaaccccagttcctttgtaccgttagaatacagcgttgatcattaataggaataatttgccatctgccattcattgtttttaataatggcatcggtgtaggcataacataatcaacccggtaaatagtatcaaaataatatcgctgcgtttgccaacttactgctttattattttgttttgctttgatttcaactaattcttcattacctgatctctttaaaacttctgcaccatcacagaatgaaaaaatacctgtccaacaagagacatctttaactaaagtataaacctgctgtgccggcacctcacatacgactgaatgagtaatcgttcctgttaatactttttccgatccctccgttgattcgacgatattttttatattattgagctctttaactgaattggtatcaatagctttactaataaattggtgcgcctgctctattgtttcaacaccatcaattaacccggctacttcagactcaagatcatataaatgctccaacaacagtacacattgctgagaattgattttaattacgcgccatgacgtttccatttctttaactaatgtcattgggggattcagttttgattttatactgaatgtttctggataaaatttacgatttgattcccactgcattaatataccgttaattaaggctttaatttctattttttcaccttctttatccctaaagagagtttttacttcctggcaaggttcaaacattcctggccatttatcagaattaataataatttcatatacatcttctatctgagcattacaaataattgaatgtgattctacataattcattattgattcctcaatgtaaatagttttttaggatcgattgacttaattaactctgctttcaatatcttatcattatggctttttggaaagtattcatcagtaacatagaaccaatccggccatttttctctactgagtttacgacttaaaaatgatgaaataatatcttcaatttcaggtaatgatttcttcgatatctcgccactcatgcaggcaaccggttgatcaatagcaacaccattttcatggaaagaaaaaccaacaaccgtagccacattcacattgggtattcgggataaaatagattcaacttcttcaggataaattctatgtccgttagcactcataaaagtattttgcttacgtccttttaagactaaataaccctcttcatctatataaccgagatcaccagtggcaaaccactcatcaggaggtgttatttctccagaaaggacatcataatatccttccataatactttcaccccttattataatttctccaatattatcagatgagcctataataggtttaaccgctaccgccaatgtattatcaattttgccaacacaataaattgaattgagatatcttttatcacgatgatcttgctcatctacccaacaaaaaggaccataagtttcacttaacccatatccctgcatccattcacagccaattaattgacgccctttctccagtacgctaggcggcatcgctgcggcaccataagcaacaacttgtaagtcagagagatcgatattatgttctgcggttgatttaacgaataacttcatcgactctgggcgtaacataatatgagtgattttattacgagaaagataatcaggccatctctctacatttctgtcttccggtataaaaagtgttgattgatgtaataatgaaccgaaagaaaaaatcactcccgttgtattattcaacaaacctgacataaatattttagcatcttgagtgaattttaatttctctgtcaccgaataaattcgtcgacaaactaatgattctgaaatactaatggctttcggtttacctgtactaccactggtgaacaggacaataaagttagcaatagattgcggagaataagttattattgggatttccgcgatatcatcactgacccggatcttatgatctgaaatatcaatcacattaatgttgttttcttttaatcttccaacaaaatgtttatctttcttaaggtaaaccacaaaatcgtattgcacttcattggtaaaattaatccattcatcgattgtcgctgatgataaattatagggcattaataaatgcaaccccatagcactagccgcagctaaaaagaaaatacctaattcatcatgttcaaatatgacaatgactttactacctttttgaacacctcgactaagtaaatcatcaattaaatgggaaacagaagatattacctcttttcttgtatagtgataatccttagtgataatacaatcatgatgtaagttatcacgccctgaatgtaacaacatagagattagtttcatttctgtttccctttaattagcagttaatttttatcgtttaaacttgatgagacgaaatcaaggactgctcttcctgtttcccaatgactgaattgacttttcgtcacggaaataccgaactctttctcaatctcttttgccaagtcagctaattccgtagaatccatatcataggcatcagcaaggtttgcatccatattgaaatcatcaatattaatgttaagaaaaagagacaaaatcgtttttatttttacttctggatgattattcatatatttttcctcgcgtacttacatattttagagattaaatagctgaaaaactcaacgcacacacatgaccttgattactaaagcgctgaatgattatttggttagtatttgaaaactcattgatttttttagattgttgttcctcatccccatgactttctgacaagaatgatgacgccaggactgaatcaatcacgccactgactgaaaattgattatccaaatagggcctcagatttataaatgatgtttttatctctttatttgagaaagccttactcgttatttctttttcatcatcatatattccatccataataaatacagcattttcattatggttgaacagttcagcggtatattctaaggtgttatttctagtatttttatccggtgcaaaataatcaacaaagccggttaattcacacaatatcgaagcaccacgttctaaagcatgttgtctctcttccagcaccagaaatgccgcgccttcggaaaagtctcctggctgtttttcgccaaaaacctcagagtgtttctggcttgacgttttctccagtaaatttttaactaatgggctggaaagatgttctgacgcaccacataacatcacttccgcaacaccattagaaattgcttccgccgcatagcctattgcttgcatccctgccacatcggaggtggaaaacgttttagattgcgcactaaaaccataaagcagtgacaattgcccttgaagtgccgcagggaaccatgccgtggcaacataaggccccattccctttatgccttcaatatggagcgctttaacttcatcctcaatatgttgccatccaccaaaacagtttccgacatatatgccaacgcgattaggatcaagcttatcgacatccaatctactcgcttttaatgccatttcaacggcaacgataccataaaccgaaaattcatcaattttacgtcttaagcggttattgatatatttcgcgccatcgaaatcactcaatgtccttattatagaacttgcggtggtattgtttttcgattcttgtcccaataacttctgaatgacttttgattttatggcagtgacatcattgccatcaggatgtattgcaccaacaccggtaacgacaactcttttacgcattgtctactgccctcataacaataacactgtgaataccagaaaaaccacttgataattttaacgcggtcttaattggatatgagcaaccttgattaggaatataatctaaatcgcaatcaggatccggcgtttgataattaattgttgggtgaacatactgcttttctatttcaagacataatgctacagactcgatcgcattagcggcggctaaagcatgacctgtcattgactttaatgagttaattggaataccaaatgcactttcacccaaaacaaatttaatcgcatttgattcgttaatatcattttgcgctgtagaactgccatgagcactaatataatttaccgttgatggcgatatctgggcatccttcaatgccatatcaatgcatcgtgccattgccatgccatccgcgggcaagtcagtcatatgataagcattattgacggatgcgtaccctgctaattcagcatagatatgtgctccacgctgcttagcgtgttcataagactctaaaattaatattccacacccttctgcaatcacaaatccatcccgctcaagggaaaaaggacaagttgctgcttgctgattttccaactctcttgatgatagcgcccctaaagcttcaaaagagccgatagagagtggacaaagtggcgcttcacttgcaccagccagcataatatccgctctgccataacggatatgctccatcgcaatgcctaatgcatcaagccctgccgcacatccggttgatatgttactgacggacatagatgcaccatattttttcgcaacagaggttgcggcagagctgaaatcaaagctgtcgtaatcttctgatttaattaaatcagggtgaatattctctttgccccctttggtgattctgagtaaacactcttccattcccgcagcatcggcaatcgctgtcgctatcgcaacaccaaaacgtcgaccatcaatgtctgagggtcttaaatttgcatcttgcatcgccatctcagcggcatctagcgcaaactggagatatttacgctcacttttcagaacaaactctttgttattgccatcactaccgtaaacttgtcctattgctccgcttttaaagccaaatctttctcttccccactcatatttactcactcccgatttcccgttatgaatattgttccaaaattcattaacgccaacacctgtcggtgcaacaacacctagccctgtcaccacaactctacgtggttgagattcatttctgttatttattatcacaataattatctcgatagaaatagaataaacatttactcaggcaaattttattaatataaaacttacccattttcatttaagaaaatcgttatctgcaagtagtgatattaaactactttatctataaaattatatttgtcatatatatttgatttttatctcctaaccaaatttcttgaaaataagcaccaaaccataattccactttaatatccatttggttatttcactgatttttcatctatttaaactgcaagaataatatgaatgtttcaggttaaaccaaactaagttaactcccttcgatctacatatggatagagtaactaagcgttttcttaatgactcaatttactcttaaaaatcatccagaaaggagatgacaaatttattattatagaactgatatattcactcacagtacaatatagccaaacaacatagcaaagataatatatctttttctagcttatacccgttatccttcaagttgcctctttgttagctgcactcgctcaccccggtcacatcgttatctatgctcccggggattcactcccttgccgtcgcgatccatcttgaaatccattgggtatatgaaatctcttttctgctcatattctccccgtctgaccctataatgacatattattataatattgcgaccactcgactccatgaagcatctgctttctctaattttattggaaaacagcacactttaaatccataaggtttaggaatactggttaaattacaaagccgttctatctgtaaataagggtgatcccgcccgataaaatgagatggccataagcaatctttattccccgtttttttataatcgttaatcatctctatgaatggccgatcaaagctaaatgcatctgtcccaataatctttaccccttgctctactaaccattgaacagcactgctttcaatcgctttatagtgagtaaaataggatttttcccccaggagtttatccgctccagtattgatcaggacaatatcattttcttttattttataattaattttctttaattggttttctaccgcctgtttatcaattgattgattatcatgactaaaatcaagtaatacaccgtggctataaaaccaatccaaaggaatatcagtaattgttgctggctgatcttgccctttatgccacccatagtgatagggagcatcaatatgcgttccagtatgcgtggtcaatcgataatacatcagtgataatcccataccatcaggaaaatcattgtgatcaatgatccactttttgcgtttaaacagttttacaaaggctcttttccaccatgaattggtatggaaatataaataactttcacctaatttattagcgccctctttatgatcaacgactcctctagttactttctcaggttcccaaaaatcacaatctataggaacacttaagtcaataatattactcatctttgttccttataatctcgaaatagtttatttccttgatatttggtgtagaaattaccttcttttgagataatgcacaaacaaattgctgatgatgaatcaataatgtgctcgcctctaattctttcatatctttaacagaatcagagttattagccaataatttctcatgtaaagtcgaagcaaataatttaatatatgcttcaagtctaacccaacagtataatgacattaagtgataatagtttttaaatccgggactcactcctgatagttgttttaacattataccttttatatattccaactccttatccttaataaaacgttcaataatttcagaaaattttatcttagaaggagtgacttcaatatcaacacctatttctcttgagctaaacccgatggcgcaatagtttcctgatgcactcagagaaaaataatatttgaagtcttgctccgtggatatataaggtttaccgttatcattcgttatgatttcataatcagataaatattgatttaaaacataacgtaacgcagcccgtctaaatataaatttttttcttctatccgctaaacaaatttggttatggcgaacgatatcagaccggtgaattaactgttcaatagaagataaatcaatatcgtcgatttttataatccaaagatcagaaaaatcagatgataaagaaatatcgtccatgattagtaattacctaatccaccacacacattaagtgcttgagcggttacagccccggcaagaggagatgcaagataagcaaccatttctgccacttcattaggttcaacatatcttccaataggaacacgctcttctactcttcttttcgcttctgctatatcagtgccccaaattttggcgtaatgttctctgacacgctccgccatctcactctcaacaaaccctggacaaactgcgttaaccgtaacacctgaaccattacgtgctaattcaagccccaaggatttagtcaggccaacaacaccatgcttagaagcagaataaggcgtaccatgaataacaccttgtttcccgccggtggaggcaatattgataattctgccgccagatgacattaattttcttttcaaaacttcatatataacaaaataagtgccatttaaattaacgtttatgacattttgccaagttcgtgggcttatttcagcagtaataccgccaccagaaatgccagcgcaattcacaagcaccgccagcttattatcttcaagctctagttggtcaaacgcttttttaacattttcatgattagaaacatcacaaactattttctttgcaaattgactaccatatttattgcgtaacttgtcaattgcgctatcaagacgctcaggagtacgcgataataatattggttcaaagccatcatcagataatctttctgtaattgcgaaaccaatatctcctgtcgcgccggtaataaaggcatatttcatctgaactattcctatcgttatttatacccgtcatctttcaagttgcctctttgttggccgcactcggtcacatcgttatctatgctaccggggattcactcccttgccgtcatgatacatcttgaaatctatagggtatatattattgctattcacggaaaaacacgattacccctaacaagcattattcataaattagtgacagtttttgtcagcatttacgaaaaatattaaccttttcacgtaaagaacaataatatatcggtgttacatttacaataacttataataccaaaacactttatcatgtcactatacaaattcatactttctgactaatcagaaaataaaataaagggtcagcaataatttctgcattaaaaaatactaaaaaaaacaatatgttatgaattaatcattgggttattttttcatggagtaacaattgatagatgagacaaaatacaatataggaaaacctgaaagcttctattacctatttcttaaacaggctgatacgcccaattaaccctattgttggcatagagtgatgacgagacatattccaaacacgtactcttaccttcagtaggtcagaccgtttaaaaccggcgatctaccaacattaatcaccggctggcttatgtgacaatttaatgtatgcctgatttccctacagaatataacttttggttatattaaatataaccaagaaatatattccaacagcgttattaaaaggaattaaatataaatatcataatttctcaatattctttataataatagtttagatattaattttataacaaataattcgcttgttaatacaagccttgcctatacccgtcatctttcaagttgcctctttgttggctgcactcactcaccccggtcacatcgttctctatgctcccggggattcgctcctttgctgtcgcgatgcatcttgaaatccataaggtatataatgtttacgcgatttttattattttatctaccgcgacggtcaccataccttcctgataactaaattcgaaattccaaccgagccgatttagcatattgaataatttatcaatcgtgtggttttccagcttcccattaatgatctcgctaattcttgcctgagtcgttcccaaaagctccgccgcttttacctgacttaaaccgcgctcctgaatcatcttgcggatgatcaccattaattgagcgcgaatatgtttatcatttgcttcgttaggattattgctggatgaagcataagggtttttcgtcactgtgaattccatcatctctaccttaaaatcagtaccaaaaccgataagaaaacgatatcaaacaggaataatatatcaaatttgatatatacgcaagttattctacgtttttttacgatactcttcgagctgtttataacgtccagcagccgttttgtaatcctttctagccactccctctgtcttcttcttgaatgtatgcaatacataaatcgcttcttcaaacttagtgacataaatcatgcggtatgagtcagtacttttaattgtcaactgcatagcatagcgaccaatcgtttctctcatggatttcttttgagctggaggatactccatttttcgctctttaagtaaatcgccatcagataaaacctcataaaaatcaaaattatcgaaagaatgaggatagtcacactgtaaggctacgagttcaaagttaattcgatcacgtactgcatcagggtaattatctatttcttcctgaactttagcattccaataaattatatctttcataacaaccactcattaattaacatatagtcattcaccaagtttattaaaaaacatcgaatccacttctaatgaaaaaaataattccagatttaaaaataaaacaaatcactacatcttacttatagatcttaaaaatacatttctctctataaattcataaaaaacatcttaatccatttatttaaaacaataagtcattcaattgaattaaacgttcaaattaattacccaattcaaaaaatcccccaccgaactgaattgtatttaataatagcatccaacttccatcacggacaacaactgatataaaaacctattcactggtcagtaattatctgtcaagttagaaagattgaaatgatctctatgcgttaaacaagtaaaaaactatcatttgataaaactctttattctaataagttatttaccaaatatttattaatttatgagatttttattatttgatttacaacaactaccaccaagtttatccgatttaaaccgtactcttgaatcattttataggtcaccatctctcctttggaatatcctcccccaacataaaacgggaaggatattttcgatgacgcaatgaatcccacgaatgcagtcaggcttatctgggttatacagcacaatactcgcatgacaaaactgatgcatagtctgacggcgaaatgcctcgcgggtattcggcgcatattctttgttatagaactctcgcacccagttcatgatgggtgtgatgcccaaaagcgggttttccgcggcggactcaaaatcaaaaccgccggtcacccatcgatcaaggaaagcacacgataatgtccccacccctgcgcccgcatctaacaggcggcaggtacgcagagtactaggtggaaaaagggatgtcataaaacgggctacgttagcaggggtcatgaattgaccgaactcagccttgcgtttcttagtaatccggggagcaatcttgcggcgcacacggtctgcggtgtcgagttgttggagcattatcgtatctggatagtgaatttcgttcagtgtaaatgatacgccactgagcaacaacgaaatctgattttacctcatgtcctctgcactgactgttttaaacctataaaaatagataaaacactccctccccttcatgatcagcatgtcaacccgattttgttaatttcttactttccacaaaactactctcctactttcagcaacaaataatagcgattcagcaattgattaaaacgggtgttaatttgcatcagtaatgccagcgatacggtaccactctttttttgttccgccagttgacgcagcaactcctctaatggcggagtattcgccaacggctgccgaatgccaaacaccatagacttcaattcagaaccggtgagataacgaccgcgtttttcatccaatgcatcaagtcgttctgtcagatgttgcaggcgtaattgagctagatggtaattttccaatgactgcatcggcagtgccgccgcctcacgctggtgtaaccattgattttgcatatcctgtactgcttggctggccggccacaatgtacgtagctgttgtaataactgagaaccataactcaaaggccaaaaggctggcaaagtggttaaatttgtcagttgcgcacgactcgcatccaacgttttatcctgtaactggctcagtagcgtcgcattgtccgattggtgtaattcggcaagttgagccggaagcagtgtctgcggtaatggataggtcgttgccaacaaagcctcagctaatggagacggttgtcgcatcttgtccaccagccaaccgcctgtcaccaccaacgcacaaaatacaatccccgccacaaaacctcgccaaactttccagcgcgaagtcgtcaaaacctgagcaactttgacttgcggttgcaccgacgagattgtctcctgcaccacatagatcagttgcggcggagggggttcttcaggcagcaaaatagcattgcccccaacagactgcgccgaagcgagagataccggtaccgcgcccttttcctgctccagacactctaatcgccgggcgctgttgtgaagctgtacacgtaggctgtcaagtttactcacatgtttcagctccagacgttgaagcacctcgcacagttgctcaagcaccttttccacccggtaaatgagcggcaagtcaatataagagaagacgcaagtacgcaatacctgctgtaagcgtgcaaccagccaagcgaaaatttcaatccgtgcatgcgtcggctgaggccagaactgcgcccattgatggctcactaatccatcaatcaatgcgaatccttcatcaataccggctaatccggtgcgctgagctcgggctaacgtgtaccaagcggcactttgtagctctacgccatttaatcgaaacaacgacagacaaagttgttcaactctggcccaattaacatcaggtcgagccggatggttcaatttaccgatttcttctttcagtgcactgaattccggcagtgcacgtggatcatccccggtatgtatcgtgttgccggatgatattgtagtcataacagttatccttatcaggctatttcagagttagcctgatgaaacagagggttactctatatggccttgttgacgtaaatggcggattaataccttcccttccgggataaattccgtactaaaccgcactaatcctatgtcttttagctcagcgttaatgtcataccgcagatgccccggttcaatttgcggtagtagcgtgatatagactcgtttcaaacgcggttcataggtcaacaacgtgtgttcgattgtggcaatcagactctgtgacgacgcgggcagcccttgcaaaatgacgttgaaatcgggcagaccataatccggtaaatgagccagcgaacccgctcgactgctcaggatacgttgcatattatccatcacggataaaatcacttgatttcgttcatcgatctgattgagatccagcccaccgttaaagttaaacatcaacatttcgtaaagcgaaggtcttagctgtttcattgatcactccttcaccgcattcagtgtcagtgtgccactacccaactcgatcgtgcgcggtttatctgcatccaactcatcacgtcggatcactaaccgccaactattattggtggcatccggtgtatgaaacagccccacaaccccaacaaaccgtgccgctttctccatcggcatatccagcgacacactccccttcggtgccactctgatatcccgctgtgtcagccgatccgccttcagcgcttcactatcacctttcaacaggtccgcataactggcacgcttaaatgctttattgtctttaagctgataaacacgcactaccgtgctcaacggggtttgcgcgtcggtggtgttaagcgcactgcgggcactgaaatccaaacgcagcgttttcacctgcttatggaaaatggattgcgtcacggctaccgtgccgtcagttacggtctgcgtcagaccacatccgactaatccctgcaacatcagacaaacgatgccgcccatcatgacggatttaacattgatagctgccattctcggcctccctatattgataactcggtaagagcccttgatagtgccccagattaattttcaccatgcctgaaaccgtttgtgagcccggtttcaatcccaatatgcctgttcgacctaaccgaacgcgttgtttccctagttgcgccgatggcaatacccatttgggtaaagtgagctgtaatcgcacgctgcaacgccaacccagataaacgcgtagcaacaccaacaggtcggtatgcagttccccctgtggtaaccacccttgagcttcatcagtatcttcggtatagagatccagcaccatttggctgttaacatccgtcccgactttgcccagtactggacgttgagaaagctgaaccggatggtgacgagttaagcgagccggttgggtcaaccgtactcgtctgcaatcatggggaaccacctgtacttgcgtgagaggggccaatagcttaaccagcgccatcaccccttcggctatccgggttggcagccgcatgatactgagcagcgccagaaagcgagaagccggcgtagcaatatgttgctggctaccggcgatccccaaaccaatcagcccaagcaggcattgcgaggtttgatcttgaccactcggttcataagtcgcgggataggaatatttacgccagatacggtaatactgggtcatcattcgatggttaaaaatatccagaaagtctgctacgccttcatagccttcactcagctgaacgatatcattcagataagccgtcggcagcggtgaatccacaccatacaagccgagaaacgtcgtgcgtactgtcggtggctgttcaggctgttgctcatcccactccacatttttcagttcaccggcaggaaaacccataccgggatcaggccggaaacggatcggatcatcaccgggcgacatcgtactgcccaacggcgggcacccatcccgcatactctccagcaactgacagaagcgataaaagttaaaatcgtaaatattcggtgccagttgctgcattaaccgggaatacgctgattgtgattttcttgccatcgcaaacatctcccagaaggttgaaggatcagtgtcaattggttaaacagatgaatatcggtatacagcgagaagaagcggttaagcagctcaccgaacaggaaaatatcgccttcgccggcaaagccattgctgttcagcgtaatctcaatatcaacgccccggagtaggaagcccttttcaaaacgttcgatcaaagcgtgtttcaccccaacaatggcatccagacagcggcagttcatctcatcatttgtccagttataaagccctaacgtgccgcgcagcacctccgggttatccatcatgctaagaaaattagaaccgagatggcttaatatccgccagtggaaacggtcgttcgctgggggataacagggcaacgtcggcgaacagagattgcttacgcgcagcgtgcccgcggcggagtgtagtgtctgttcaagttgggtattacgtaatgcctgacgaggtaactggccgttggttccggtgatacgcagtgaaagggtttcatcatcaagctctgggtcagtttcaaacgattctccaccgaggatcagccaggtatcgtgcaaacccgaaggacctcgacagacgcgcgtatgaaaataacgctccggtgcggaactacgcatgatgccgccccgatgacgaaagctgctaaacggtacaaaacgctgagcatcacctcggcgggaagaggagacttcatccaccgaatagatttcggtatgaccatcctgaatgcgcatcgggcgcagtagatactcattttgcagccgcgaaatgtgcatcggatcagcttcaacacggaataaattgattaccggcacgcaatgcaatcggatattttccgctgaaaacttcaattcatagggccacaattcactgagtacgatatccaactcaaaccaaggcgtaccggtaggaatctctaacgaatccaagccattgagcgccacaaacataaatttttcacggaaagtaaaatattccagtaacaactgataaccactgaacgcgctctcctgtttcggccacagaacatcatcattgtcgaaccccatcggggaaaaacagccattcttaaggcgagagcgctcttcctgactggataagcgcgcgtaaatctgttgagtctgtcgggtcaacgccagatgtaaggcagaactcaccggacggcccgctttgagatacagaggcagacgtgccaaatccactttatcccactcggtcaactgaccgcagtcaaaacgcaaacggatcactgaacggccgtcggcttcattttgcaacgtcgcagaggtgatatgcagcggtgtaatctgtatatcacgggtagtccggtaatagcagcgggtctggcttggtcctacgggctgagatatcacttcaaaccctttggcgatcacttcactttttggcaaggtctgataatcaggtgccaattcaacaatggagagtgaaggaatagtgcgtagataatgcggccacagcaaactcaccaacccttccgtcagttccggcaaatcatcatcaagtttctgacgcatccgccctatcaggaaagcgaagccttcaagcaatcgctccacataaggatcaagatcccgatcgtcactcagattcagcatagctgcccggtccgggtgcgcctgcgcaaactctttgccagcttcacgcagatattgcatttccgcttcgtaatagcggagaattaaatcatccatagcatcactcttaatggttaaaataaaacaagttgagaaggcatacagttgcgcctccacctgattaagcagagtcaattaaccgcaaagcaccgaagctctgaccggatcaatcgccaccaatccagccagcagcgtctccatccgttgcgccatcctcgctttatcatgttcactgcgttgagctttcatgcgcagtaacttaagcagacatgctttcacctcaaacatcagttccggctcccattcgccaagattgaattgctcatcggcatcaagctcagtcaacaaatgcaacgccatttcatttttgccgtattgctcagcgacccgcgccatcagcaagcgctgtaaccagcggtgacgggctccattaataccgggcaattgccccaaccaacgcaacgccgcatcaatgccttcgctgtccgccagttgcagcgcctccgcttccagcgccaaaacgtcatcatcatgtcgaggttgcgccggcaaatgctcaaactgccaatctgactgattgtcatgcacctgttgggctatccaactggttgtcacctcatcagcaaagggcgtcccatcgttataggccatactctccagccccggcagccgctcaagcagtattctcagatcgtgtttcatgatgtccgcccaaccttcgtaagggcagcccaatcggcttaatgcctgacagaggtaccattgcaaatccagccaaaaatgattcaccccttcggcaaacatgcgctcggcctgttccaataactcatgccagttctgttgccggtagagccgctttaactgagcgcgagattcagtgcggggaggcaccagacgggtacgctcatcagcatcctgtggtggtagttgatggacggtatcccaacggatactacgtatcagccgggcggaagagagccagccctgaggttgatcacgcagataacgcaccagttcacgcgcctgatccagcagatcacgcccagattgcacctgacgccataccggtgacttacccgatgctgatgccttgctctgtcccgccgatggcagtaccggagcggcagtttgtggcactaccgcactcacgccaccggactgagctaatcggttctccagtgttcttgccagcccgaccaagcttggacgagattcttcatcccaagaggaaaatgactgttccagtaacaccaacgcggccagaatgtggtcaaaatcggtccgatttacctctggatagcgtgataaactgtcccgcatttttgcacctgtcagccactccagcgccgctttccggctgctagcccgactgggtaacagggcttcaccaaaccgatccgccaatccggctaatagcgccaacccttctgccagaccatgttccccctcacaatgcagacgggcccacacatagtaggtcgccacgcggacatctttgcatttggtggtcaacaacttctccgccagttgacaaatcagggaagtatcaacaccactgattttattaacctcctcccgcatacactgaaaatcgtcttcatagaccggatcattacctgtaggcgcatcggtactaatgggtaacaaccagttttcccaccgcgccgcgttctgccgtgcttccgcaaggacatcacgttcaacaaaacaactctcaattagctgttgcagcatctttatattctcctttgacgctgaatatctctgtcagccactggaattctgctcattaataaagagacagaaatagcttcaccatcgctattgagctgattgctcaagcgaatgacaccttgaaacattatgatccctatattattaagaataaatttttcacatttagaacgtgataatattatgcttcggattattcaatgctgcctgtgaaagccgcttgatgacttgtatcagatcgcctctttcaacaaatttctttgaaaatacaatgttgatttttttatttaaattaacagcaagcagcacactctcttcacgctcctccactctattaatacagcaataaggcaagaaaatagttttactcaacgcggttggcgttaataaaaagcctccttctgtctcggcaaagaaataacgaccttctgttttccgatatgagagacaatgcatagccgtcatcatcatacaaatattactcgtacccttaaatgacataaccagcgttatgcaaccaaaaatacacatccttttccaatacctatcccggacaaaataaaccgcggaatttggaaccgtatcatcatcctgatattcagcgaagggagataatgcaactcgttgaattgacaataaacacccgatgaaataaaccgcgccaaatggaaaaagacaagatgcaataaacgaactgattttcgcatactttggcgcgttgagaataacaaacagattaaccacctccagcaaaataaaaatcaacatcaaagcattgaatattggtaatttagcaacaaaatattgctcttgataagaaagagcaaaataaccagcactagctacctttatagcagccagtgagacaaagtaggttaatacattaatagccaaacctacccaaaccattttatagatcttattcacaaaaaaaccttaatttacacaaaattacatatcaatcgcataaaaatagataaaactttacattggataattcgttactgaattttccgaagacaagcaatctcttaatatctcgataactctttatagataatcttaagaactccccatatacgctctctttaatttccctcttctgctttgttacttgaattagtaatagtagtaataacttataaaacaatctttatcgggtaaaactctttcactctctttacctgattgcccgtcaggggaattaaccttgatctccttcaacctcttttttgtgaatttctcaagattaatttccgtaggattagggaaacccaataccgtgaaaatctcctcagccaacctaaatgtcggtttaggttttctcatacaggaaaaatagattaacggtgaaaggacaattgccatcaaacccaaaaatgaagagatacatttcatataatcaataatatcttctctaactttcccatcaaaaattccccctatcatgaaaacaaagaaaagcactaaagaaccataccaagtgccacgtatctgatatttggcatttgaatgaataccctgcttacaacgcggcgtcatagaaacaatccttaatccgggatgggcaatggcataaaccacataatgcccttctttttctgttaccgctaattcaacataatcacccgctttggctacagtaaaccctaaccagccgtagaatgggataccattgattttcccccgcacaaaatcacagacatcacgcttccgaacgttagttgacgcattagaccccgaagtatttcccgccaacgacattaatagcctgccatacaactccagttcttcctgacgagcaaaggcaaccggatcatattcacgatcagtaaaataaccaatcacacacagggtttcgaactcttccaatacgccgctcactttgattaatggcttacccggcggtaattccggtggcggcggcttttttgctaatatcgcatccagttcggagattttggcttgaagctcctctatcgctttttctacctcctctctatcttcaggacgacgttgaattctttcttgcttcacctcgatccatgtatcaagactacttctctggctttttatttcatcaaaatcaatagcctctttataagagcgataagtactcatatgccgtccttaattgcttcaacaaaacttttactttgtttttcatacagttgattcctatttttaattacttgaatcagtaatagtaataatggcttgcgaaacatccactatctggcaaaactctttcactctctttaccgacttcctcatctaatgaattggcctttatttctttcagtctctttcttgtgaattggcgaatattgagattcgtaggatcagggaaacctaataccgtaaaaatctcctcggccaatttaactgtaggtctgggcttttttaggcggcgataatatgtgctgggggcaaatatcgctatcagcaaagcaaaaaatggcagcatatcttccagaaacgccaaagcatctgtccaaacagaaacagtaaaaataagcaggaatcccccaaaaatacagaaagtaccgaatatctgctctttggcatctgcatgaatgccctgatcacaacctgtctttcctacacaaatattttaacccgcccccgcgttattgaacttttccctcatagattgatctcaataaaaaacacgacttgaggtaatctttatgttttcaaccagcgccgaacaatgggcaaatgacacgtttcaacatgcggaattaggtgataaacgccgtaccaaccgcctggtgaaagtggcctgttcgttggctaaccatataggacaatcgctcgtgcaatctcttgactctcctgccgatgttgaagcggcctaccgactgacccgaaattccgccattgcgcctcaggccatcgccgaagccggatttaccgccaccgtcgctcacgctcaacgttatcattgcctgttagcgctggaagacacgacaaccctgtcattttcccatgcgtcggtcgccgatgaactcggctataccacctcaaaggaaaaatcccggggcatgcaggcacactcggtgttgttatttgcgcctgaagaacaacaggtcgtggggttgatagagcaacagcgctggtgtcgagatgtcagtgattatggcaaaagccgacaacgcgatacacgcccttatgaagggaaagagagttataagtgggaacgggcctcacaagccgtcgacagccggttaggggagcagatggccaacgtgatttctgtctgtgaccgtgaagccgatatcatcgaatatctgcgttataaaacgagccaaaaacaacgtttcgtcatccgttcgatgcaaaaccggcgtatagaggaaagtcaggataaactttatgactttattagccggttacagagtgctggagaacgattagttcaggtcagacagaaaggcgggcgtcaggcgcgtgtcgcgcattgtgatatcagttatgccgaagtgacgttgaaaatccccgaaggaaaaagcggtgaggcggtgcggatattttatgtcggttgctacgaaaaaggtccggaggatgggctttgctggcatcttctgacctccgaacccgtcaacagtcaggaagacgcccataaaatattcagttattacgagcgccgctggctgatagaagaatttcacaaagcgtggaaaacgggcggcacgcaggtagaagcgctgcgtatgcaaagcaaagataatctggagcgcatgatagtgctgctggcctttattgcggtacgaatacaccagctgcgttttatgggtctgaacaaagaagaggcagagaaagagagctgtgagacagtattaagccccctggcgtggaaattactgtggtcaaaacaagaaaaacgccgtgtgccgaaaaaagccccgagtttgcattgggccttcatcaatctgggaaaactggccggctggtacgattccaaacgcacgggtcgagtcggatgggaacgactttgggaaggctggtttcggctgcaaaccctgatagacggctatttgctggctaaatcagttgatttggagatctgatcaagagacaggatcacaacgcggcgtcatagaaaccacccttaattcaggatgcgcaatcgcataaaccacataattcccttcctgctcaattgccgctaattcaacataatcacctacctttgcggaagtaaacccaaaccaaccgtggaagggaacgccattgattttcccccgcacaaaatcacaaacatcaccccaccgaacattggtttgcgaattagatccagacgtatttcctgctaacgacattaacaacccgccatacaattcccgttcttcctgacgggcaaaggcaaccggatcatattcacgctcggtaaaataacctttaacacacagagtttcgaactcctccaatacaccgctcactttgattaatggtttacccggcggtaattctggcggtggtggttcttttgctaatatggcatccagttcggggattttttcttttgttttctcaatctctttttctgactcttctttactttctgggtggcttattatccaatcaagattaacctcaatccatgtatcaaggctgctcctctgccttttgatttcatcaaaatcaatagcctctttaaaagaacgacaggtactcatatgccgcccttaattgcattagcaaaactgttacgttgttcttcgcacagcttatttcgttgcgattcggggtcaatccattgcgtggattgcaaatttttcactggctccaaaccaaaaacacaaccccggcaccatttttgtaaatcattatcagaaaaataggttactaacgcttcaaccacaaaaattaacagcatcgcctcccaagtgcacaaccaagcaagagtttcccacgctaaaagctttgctaccccctcaacgaataaatttttagaataaagtaatgctctatcaattaaaacttctaataaaccatttaatgcttttactacttgcataaaatcataagcacttttaagaccgtaaaggccaataaactgccagcgccctctgccacgccattcagaagaaaggtcaccgatatctactcccagatttaatgcagaagaagccacaccagcattcgtcccaataaacttaatggtgttggcagcaatcacattttccattccgtgtttaactattggctccacaatctccatcgctgtactcagcgtacttaaaaacgctgaggtcacctgcgcttgactcttagcatcccctttactctcttgtagctgattggaaaattccaaaacattggaagccaaaactaaccatttaatccgggatttctttaataccggctctccttcagcactgtcagcaaattttttaaaatcagactgatatttattactttttttcaaccgcgcctcagaacccggcttcttaagctgctccaacacctgctgtcgaaacgcattaccgtccttaagttgtgataccgacagttcaaccatctgatcaagcggcacacctgaaatcaccgataacagcgttttactcagcatttcattcatgctattcagcactttccctaagcgagtaaaattcaagaaccgatcccctagcgtgaccagtcgccggtcgcaatgcagcatggcacgagcaaaagtactgttggattttggcggcttttccagcgcttcattcgctttatcgtaggcttcaatcagtttcccactcagatctgacaccgctttcataaaatccgagggagccgccggttgatggttatccttattcagcttcatcttctgtaaaaacccgtccatctctttcatcacttccgggttattcagcaataacgagcgccagacaatattttccggcgacaacgcggaatattcgtcaattaaagcatctaaataggcacaaccggtttcggtcacattaagcgaagcgatggcataatccactgcctcacgataattgagattgtcctccagtcgggtggaatgaaaatcctgacaacaggtgataaacccactctgtttcagccaactcaccctcaactgagccagttgttccagcgctttcgccacgtcggtgcaaagatcggcataacattggttaaatgcctgtcgtttagccagattcagctccgcagtatatttcttccaatcacgggcaacagctttcttacccgctgccgccatgtcacgagtaacatactctttgagcttagccttatcctgatcggaaaaaaccccatactccttctgcttagtgacttcgagcgctttatcaacctgcccttgcacatccgcggctttcaatttatgcagttgattttccaccccattcaatgaactgtcggtcataaattcgatcgacaactcatccaaaaaggttttatgcaccccggcaatatcatcaccccagcccgctaattcatgcgctatccctatcggatcatgcaacgcgattaacaccggcgataccggcgtgccatctgcggccaagccccgcttttgcatcgccctgaccgtaatgtccgcacatcccgctcgcttgctactccacggatacaaggtgctcttcggtctcaacgcaccgtgataaacttcgtagtagggtgcctcttctaatgtccggctgatacgcgacactttccggttgcaaggcagaacatatttgccggaatcattgtcacccagaccgtaatcgatgacgatattcaggttctctatcgtcgcctgagcaatccccaccccttccggcaccccgcgccactgccacggtttcacgcactgcatccgcctttcccgtgcttcgcggttgttgtgataatactcgatggtctcctggctccacattgagggagagaaagccagccaggtctcctgacgcaaggcaatatcccttagcgtaataaattccatattagcgctctgatgggtcggcgcatgacaatctgcggttttcttggggaagataccaaaaggggcattcagatttctccacagtgcgccatcctcgctgacgctccaggtatcccagctctcccgttcacctaatccggcattaacgtaatagacatataaaaatccctgccgtaaggcacgcagcgcataatgatagcccggcgcagaaggttctggcgtttccacccacgccggcaaggtttccgaaacattatccggcaccacggtataacgcaccggcagcaacgccggtccagtggactcacacatccaacataatgatcgattcatcacaacatctcctgttcttccgagggaagacaggcaccgcaatcataccgatgcctgttagattcaaagtggctggtataaccgccagcccgtcaacccattacgcctgactgcgctcattccacgcatcagagtgaatgatgttgccgtctttgtacgtccaagtgattttttcgtaacgaagttcgacacgttccagatggttgtgcttctctttagtcggatctttgatgtcatgcatcaacggtgccactttcaccaccttcacgttgttcagatgagtgatgaaatagaccttctcctgaccagcatcatcaatttggtaccatttgaattccgccgatttcagggtctgacccgttgtcaccgctttatacagatacgggctagacgcatcgacctctttagtaaacaccagcggcgcatgcacacgggtgccggtcagcttgccggtattgttatccgtcgggatatgtagcgcatgttccagcgccaccacctcaatactgccttcccggttgtgtacatccaccgaacctttaatgtcggcaccgccgtcatctttcaaccataaatacgcagggattgccatacccatgactcctctattattgaatgggtaatatcaccaatatcggtgacgtgattaaaaccccaaccgaatacattctcggttttcatccctggtaaatccggggaacagtcaatcgatgccggtatttcctgactcagcagttaaccgggagaagaataatcatatagcctgacacatgcgttcgaattaatcgattcattaactgcatacacggttactgaataattcaatcctccctgcgggtgcatattaaaatcaagtatttttttgtcaaacagcacaaaatgtttaatgtcaacggcaaagttcatcatatttaaaccaaacataaacagaataccatttgtttatataaaaagatcgcattgatttaaataatatgatagcaactcatcatactgatatttacatttctcacaaccataacaataaaatatacttttactttattttcaatatgttaccaaatatacaaatacgtcaaggcattattatgccatccacaccatgattaatattcattatcatcaatatgttacagacacgtaaaaaagaatgattctcagttatattatgcgaatgagaacagattgcattatttaaaataatatcatcgataatagcctcaccctgattcagggcagctattattctgcctcagaataaagcattacagaaaaataggaatatcatgatgatatacttataaaatatcaaaaatgaatgaacagcagaattcagttacctattctggcgatattcttcttcgtcgtcattgttatttatccccgattcaacaaggttatttcccgtattctcctcaaaaatcgttttcggcagggtaaaaccccgcagtttcaataacaccagcggccctttcccgacttcggtccgtaatatccaggtcagcgctaacccctccggcgtggcaaagttcagccggtaacggctttcatccaccatctgcacttgtgccgcctccagccagcgaatgaatccccacgcccccggatagtcgccatacagccgcgcaccgctattcaccccggtccaggtcagcgccaccccgggattatccccgtcccccggccagcgtaaacgctgccagcgctccatctggttaaagtaacgcaactgctgactatctatcgtcaggtccgtttccgccacatcacccaccggtttcgcccgcaattcaaaccgtatcccctcgctgccgttagcaaacagcacatccgcgacctgactcagttgatttatcgcggttaaaaaggccgggttaacatgcagtccctgactgttcaccttatccaccacccaatacttgccctctttatgcagcacgccgcctaactgattgtgcagaaactgctctatccgcccgctgtcggcccgaataaactgccccagcatcggcagagagacctcattttgcgccgccacgaatggataacggccgtcaaagtcggtctgccagtccgccactaccgccgactgccattgcgcattcagactggccgccgccggctgtaacaccgtctgccacgcctcggttaacggttgcacaaacaccgcctgaccaaacccgttccattccgctcccagactcgccgctatcaggctgccataggtccgcgtgtccgtcagttccacgcttttcccctgaaatacactctgtgccagcgcttccatcaccgccggggggtcatcggtattcgccagttgttgcagcgccagacgcacccgtgtcacccgcgtcaggaaggtttgcagactcagtgacgggtccgccgtcagcccgttttcctctgtgcttttgcccatcagcgccaataacgggccaaacgcgttatccagtggccccggtggaaggcgggtcgggtcaatcactgacggtttattgttctggaacaggttttgtgccgatttcaccagcgaatccgccaacgccgtgcccggttgcccggcttctccctgataagccagcgtatccatcagggcaatcaacggggactggcgtacatccgccatcagggttaactggtcgatggtgtcggacaggttatgggttttatgccagcgcaggctattaaggaagttcagccatgccccggcaaagtcggtaaaataacgcgctgtcagccgggctttcagctccgccggtgaagccgccttcgatattggctgacgaccgtcactgagtacccagtcaatttcttcctgtcgggacgccaccacctgcgctatcgctttttgcacctgaccttcccacgcctgacgggtaaacatccccggcaccacctgacggctgctaaacaagcgactcgcctccgtagccccggtcatctgcgccagggttaaatcccggtaactgtgggccacctgttgcagcattttctggtacagcatcgtttccccatgacgctgcccgagctgattgagcaatatctgacgcacttcactgaccagttcgttatccacgctgattttccactccgggtggcgcggtaaattctcagcataaaaagtcagtaatgcctcgccgctgttttgccacagaccgtccgtcaccccggcacggtgcggccagtccgccatcaatacccggctcatcaccgccgcatccgctttctccggccgcgccatcatcagatacactttcaactggttatacgccggtgtgatacgctgatgacgctgtgcactgcccgccggcaggttcaccagttcggtcaggcgctgatggagcaaccgggcagcggcatcacgtatcagttcggcattgttgcgctgatacaccggccacatcgctttcaacaaggcttcattctgattgaacccaaaacggctgtaccagggcgtgccacgcgctgactgagactgcaaccggtcaatctcccgttgcagcccatgctgactcagcaaacgggccgatacatctccctgacggtcaccggccgcgctgaggcgttcacggctgaccgctatctgatgacggttaaccccaaacgaggtcacactgccaattccccacaacgctgccagcgctatcacaccccactgcgcacttttctcccacggaaaacccaccgcctgtccccggctatcacgcacctgttccagcaccccattccagctggcatccaccagccagccatgctccaccatgcctgacggcaccggcagcggtaaactgaacgtcacgcccgacagccttatcggcggccgctctaacaacggcgtcaactgcccgaccagacgtgttacccccttatcccgcaaagactgcgccagtcgcaacagaaaatcgtgacggttttccgctatcgcctgttccatgccccggttcgccagcgtgggtatcaggctgtgcaggctctgcgccagactctcaggcgtacactcttctgacagaaaacagcccacggtctgggttggccggtcgcgctggtcccagttgctgtgacgcacattccacacatacaccggggcctgccagccaagctgttgtccctgtttctccagcatgcgcaacgcggtctctatctgcgttcgctggccgagttgctcttcggtcatcacccacaccacgccatccagcggacgacggcgacgcaattggcgcaacgcctgtaactgcgctttatccggctgtacctgcaaaccgccgccccacagcaacaggtggtgctcgccttcttgccagtgctgggcggttaacccgggggcaatggcttctacttgttcccgttgtcccatcaccaacaaaatacatacccgccgacgccaaagggggccataacgccgacgaagctgatattgcaaccgttgaaaataaaatggcgcttctgaaagtacagcttgctctacaggcggtttaaccgctacttcctgtacaggcagacgctgtttgtaatcacgaaaaagattcaacagccatatcacccccaccatgctgataatccagacaattattttaatagcctgagtagataacccgaatcgatcgccccagaaagataacaatccgcccaacaccagtgcgatcaaactggtgaccagacccaccccaagattgcgggtaataaaagctttaaacatggaagtcccctgatgaagtgacattgtttagcggggagacagtccccagttgtaacgtggcatggtgcgctagcagaaaaagctgtggtgcctgctggtactcggccattttcatggcgagtgttaatgcaaaccaatccgcatatggccctgatttcccaagccaatgggggacgaactgctgatcctgtgttgccgacgcgctctgctgtgccgatgatggcaaggctttcaatctctgatttaacccaattaacagcctatctttctccggtgagtcatcatcgttgtaccacagagtcccggcagtgatggcaggacgttgataacgcagaaactgggccatactctgctcagcctccgcggctaccgtcaccattggccgatgcagacagcattttgccgacaattgagaagaggacggtgccagtagccaaaccaccgcgccctcactggttgccgccggcgttttattgccttcccaacaccatgtgatgaccaacagcaatcctttggtttccgtggtcaaccagtcgcttatttgatgggtataatcggctttgagttttaccgggccttgtagctgagacaaaggcagccccagttttttccaaacctgacaaaattgctcccatacgaccgcttcgggactgtctaatgaaaaatagacattcactttatgattaaccccatgtgctgccaaactactgcgcaccgctcccagtaaattttcaaacaaattgagataattggaaaaagggggcaatgccagtgcgctatcgccattgaccaataccgccttatccgccggtgatggcacttccggtggaaaaaacgcgccataatccacaacccgtatcgcctgcgaagcccacgcttgccagcgagcctcctgccaggcgttctcttgtatcagcacttccgcctgctccaattcgacgccgtaacgaaacagtcgccaaccggcaatcaccccgaacagtgcggttattccggctaaagcgaccaacgcataaagcaagctggcgggatctttaaccagataccagaaactgccgacagcaaccacgacagcgaaacaagccagactgaacagacgccaccaaagcgaccagactggcggttctggccggtgtacggaataagactccggaatatcccaagccattattatgattcccctattccggctttcgtcgtactggaaatgacataacaaccgcattggcaaagcgctttatcaaatgcgaccggtttaccatcagaaatacattgagaattagctttaacaatacgattaataccatgccctttcagcggacaactgactaaatcatttaataatgcgactcttttaccttcaatttcgatagaagaggaggcggaaatcacttcaccgccgctactgagcttatcgcccaggcgaataacaccttcaaacatcatgaaccctatatcattaacaataaattttcacattttcagcgccataatattgtcgccctgattattcaacgccgtttgtaaaagcgtttttatgacttttttgcgatcatcgctatcaataaatttctttgagcatacgatgtcgattttcttatttaaatcgaccgttatcagcacactattttcacgttcctcaactcttttaacgcattcataaggcagaaaaatagttttactcaacggggtcagcgttaacaaaaagcccccaggtttctctgcaaagaaataacgatcttttgtcttacgataagagagataacgttcagcagccatcatgatgcaaataccactcgctcccctaatcagcaataaaatagcgccaaaactccaaatccacgcgctgtcccgatacctttcccggataaaatagaccgcggaatttaatggaaagaaacaggatgtaataaaagagctgattttcgcatatcttggcattttgagaataaccaacagattagccacttccagaaaaataaagatcagcataaatattaatatcttatcgagaaaactccgctctcgataagagagcccaagataattgaaatcaaatcctgttataacaaccaacaaaagcaaacatgtcgagagattaataacaaaacctatccaaaccattttatagatctgtgtcacgaaaactccttgatttacacaaaattacaaacaaaacaaactgcataaaaatagacaaaacttcaccttggataattcatgactgaattttccaaagaccggtaatcttttaatatctctacgactcagcatagataattctgaagactatctcataaatttttatctccactcgattacttaaatcagtaatagtaataattgcttataaaacagtatttatccggcaagacttcttcactgtttccaggtgatggattagcccctatttccttaagccttttcttggttagtttctcaagactaatatcttgcggactaggaaagcccaatactgagaaaatatcctgagccaatttaattgactgccacggttttttgatgctcacaacgtatgaatagacagaaaataccgctgtaaaaaacataagccataaggtaaaaatatctgctccatcccaaaaattgctgccatctggaaaaagaatagttcccaaacaaatagcagcgataagaaaaaatatgcagcaagtataaaagacttcatcccatgcttttgatcgtatccctttattacaccaaggaataatagaaatagttctcagttcaggctttgtcagcgcataaacagcataatgctcttcctgttccatcacaactaactcgacataatcacctctttttactgtggtcaaccctaaccaaccatgaaaagggatgccattgattttcccttgcacaaaatgataatcgctagacaaccttattttagtctgtgaattcaccgcagaccaagaggtattccccatcatcgcaagcaatagagcgccaaactgttcattctcctccttacgagcaaattcctcaggagcatattcgcgttcagtaaaatagcctttaacacagagcgtctcgaattcctccaatacaccactcactttgattaatggtttacgcgggggcaattctggtaatggtggctcttttgctaatattgcatccaactcagggattttttcttttgtttttgcaatctccttttctgcttcttctctgtcttctggatggcttactatccagtcaaggtttacttcaatccatgtatcaagactgcttctttgactttttatttcttcaaagtcaatagcacctcttaacatctgacaagtattcatgagatatccttaattgcatcagcaaaacttttactttgttcttcataaaaccgatatcctctgctcaattacttgaatcagtaataatagtaatagctggagtaacagctcttatccggcaaaactctttcactctctttaccagatttccctgccggagaattagccttcatttccttcaactttttcatcgtaaattgataaagattaatttccgtaggattagggaaatccaataccgtgaaaatctcctcagccaacctaaatgtcggtttaggttttctcatacaggaaaaatagattaacggtgaaaaaacaattgccatcaaaccacaaaataaagaggtatattttatatacaaaataatattttctctggtttgctcactaaaaattccccctaccatgaaagcaaagaaaagcactaaagaaccataccaagtgccacgtatctgatatttagcatttgagtgaataccctgtttacaacgcggggtcatcgatatcacccttaattcgggatgggcaatggcataaaccacatagtgtccctcctgctcggttactgctaattcaacgtaatcacccgcttttgctatagtaaaacctaaccaaccgtgaaatggcactccattaattttaccccggacaaaatcacaaacatcccttaccctcactttggtttgcaaactaactgccgccgctgaagtatttcctgccactgccatcaataaccctccaaacaactctcgttcttcctgacgggcaaaagcggccggatcatattcacgatcagtaaaataacccataacacagagtgtttcgagttcttctaatacaccactcactttgattaacggcttacccggcggcaattccggtggcggtggttcttttgctaatatcgcatccagttcggggattttagcttgaagttcctcaatcgctttttcttcctcctttctatcctcaggatagcgcggaattattatttctcgcttaacctttaccgatatatcaatatcttttctctgacgttttatttcatcaaagtcaatagcttctttataaggacgataagtactcataagccgtccttaattgcttcaaaaaaacttttacgttgttcctcacacaacttatctttctgtgattcagggtaaatccattgcgtggattgcaaatttttcgctggctccaaaccaaaaacacaacttctgcaccatttttgtaagtcattatcagaaaaatatatcactaatacttcaaccacaaaaataacgagcatcactcgccaattacatagcaaaacaaaatattcccacaccaaaagccttgatactcctctaactagtaaactttcagttgaaattaatgccctattaattaagatttctaataaaccatttaatgctgctgtgagttgcgcaaaatcataagccactttaagaccgtaaagaccaataaactgccagcgtcgtccattccacaattcagatcccaactcactgatatctactccaaaatttaatgcagcagaaaccgtccctgcattcgtcccaataaacttaatcgtgttggcagcagctatattttctatgccgtgcttaaccatcggctccacaatctccattgccgtactcaatgtacttaaaaacgcggcggtcacctgggcctggcccttgacaccccctttactctcttttaactgattggcatattccaacccattaaaaaatagtgccaataacttaatccgggatttttttaaaactggttcaccttcggcactttgggcgaattctttaaacctatcgttataaccatttttcgtttcaagacgagcttttgctcctgattccttaagttgcttcaacacctgacgccggaatagatcaccctcttgaagctgcgataccgatagtttcaccgccctgccaaaagacacacctgaaatcaccgagaatagacttttactcaacatttcattggtgctatttagcactttccctaagcgggtaaaattaaagaaccggtcacccagcgtgaccagccgccggtcactgtgtaacatcgcccgggcaaaggtactgtcggatttgggcggcttttccagtgcttcattcgctttatcgtaggcttcaaccagttttccactcagtgtcgttaccgtcttcataaacactgaaatgtccgccggtttttcattccccttattcaactgcatcttctgtaaaaacccgtccatctctttcatcacttccgggttattcagcaataacgagcgccagacaatattttctggtgacagcgcagaatattcgtcaattaaagcatctaaataggcacaaccggtttcggtcacgttaagcgaagcgatggcataatccacggcctcacgataattgagattgtcctccagtcgggtggtatgaaaatcctgacaacaggtgataaacccactctgtttcagccaactcaccctcaactgggccagttgctccagttccttcgccacgtcggtgcaaagatcggcataacattgattaaatgcctgtcgtttagccagattcagctctgcggtatattttttccaatcgtgggcaaaggttttcttatccgattcgatggcgtgacgaattgaatcctctctgcgtttttcccactcctgaattgacaaacccgtagaggccgccaaaatggcatccttttctttatccggctttttgaaatgtgtggtgtgcatttgacgcaactgattctccgccccattcagtgaactgtcggtcataaactcaatcgacaattcatccaaaaaggttttatgcgccccggcgatatcatcaccccagcccgctaattcatgcgctattcctatcggatcatgcaacgcgattaacaccggcgataccggcgtgccatcttttgccagcccccgcttttgcatcgctctgaccgtaatgtccgcacatcccgctcgcttgctactccacggatataaggtgctcttcggtctcaacgcaccgtgataaacttcgtagtagggcgcttcttctaatgtccggctgatacgcgacactttccggttacaaggcagaacatatttgccggaatcattgtcacccagaccgtaatcgatgacggtattcaggttttctaccgtcgcctgagcaatccccaccccttccggtaccccgcgccattgccacggtttcacgcactgcatccgcttttcccgcgctgcgcggttgttgtgataatactcgatggtctcccagctccacgccgaaggtgtaaaagccagccaggtctcctggcgcaaggcaatatcccttagcgcaataaattccatattggcattcaaatgattcggcgcacggcaatctgaggttttctgaggagagacaccaaaaggcgcactaaactgttgccacagcgcaccatcttcgctaacgctccaggcatcccaactctccggctcatctaatccggcattagtataatagacatacaaaaacccctgccgtaaggcacgcagcgcataatgatagcccggagccgccgattctagcgtttctgcccacgtcggcaaggtttccgaaacattatcaggcaccacggtatagcgcactggcagcagtgccggcccgatggactcacatgtccaacataatgattcattcatcacaatatctcctggttctttgagggaataatggcaggattggcataacagcagtcacgagccaatgctgaccatgcttctactgtcagtctgacggtgcgctcggcataaccttcatcgctatcaccgccttcattggataacaacgactgtattcgggggtgtagatctatctccgggtggtaaagcagaccatgcaatgcacaggattccagatcttgtgccatatcaaaggcgtagcgtgctgtcacccgacgcagcaaggccagcataatatgcagggattcccgttctgttcgacgtaactgctcgcgatgtgcctgacgatatcggcgcagtgcccgattcatcggccctgaccaggccatttcttctacctgttccgctgtcaatgacagtgaaaagatgtacagttcctgagcagactcggcattgtcccggtgcagtaactgaccgtcgccgtcaatcagataccagtctgtcaatggccccaacaaacgcgagcgttgccagctatccagtaccggccaaaaggcattattgaccgccggatcataaaagcgcagcatgacctgcggttgaaatgagacggactgcaccgccatcatcccgatatggtgtgcaatcgtggagaccgggctggcactgaacagccagccacacaccattcgcccacgcccggctatcaactccgccggatcagcttcctgcaacgcctgcgtgacgctcagcgccagcagttcagcatcctcagaacgattgatatccaatggcaccagccagggcgaatagcgggattcgaaatgatgatgctttatctgcgtcggtatggccgccggctgatgattcaggattgccgccggtaatcgctcttcctgtcggtttttgagaaaaaccgccgggtcaaccagtaaaaaaccgtggccgtcatgctgagtcaatgccatacgcaagtcagccaacaaaccggtttgccgtctggtttcagcctcgggagaaaaatcgtaatctactgtcagtggaatagttgtttctatcattgtctacacctcattttttcgttacaccatcttgattacccatcatccgctctgccgttgacgcacaacgctcaggtaacgtcaggtctgaactctgactcaccgggccgtttttctgcaaaatgtcacactggaagcgggcatttttagggccggcaaaggaaatatgcccgtctttcagcgagatataagccccgccacactccagacgcagttccgttttcgccgagacggtcacgcgatcctgctgacttgccagtgtcagcgcctgttgagccagcacctctatcgcgtcagtctgtgcctgaatctctaccttgccggaagccgccagcagctttaggcccaaagttcgggtgaacaaactcaggccattccccaccgccagccggaatttcttcatgatgctcatatccgcatcacaaccgacggtggttatcaggttctccccggcggagaactgcaaattgcccggggtcacctgagcaatacctgagggcgcagaaagtaagagtgctcgctgttgcaacgctttaagggtttcattcataaaagcggcctgcgtttcaatatcagccagttccgctttcgccgcctcagcggcatgacgcaaccccgctgcggtctgaaacgccgcatccagttcagccagcgcccgctgcatatctaattgctcgcccgaggctttaatctgctgatcggcgctgataaacagccctttcccggcccggatcgtcccccagtcgtcggtacgtaactcaaacccttcgccgcgcttattgggatggggccgctgtccatccaccagatggccgagattgagctggcttttcccgccatattcggtgctcagtttgatgtgctctttgccgcgctcgtcatccatgcgcagtttgttgttggccggtgtgcgcagcacgttgcgtttgtagttgtagagagtcacatgatcttcatgccgggaatcatgcaacgcataggcgatgtagggccgatccggatccccctgctcaaacgcgatcgccacttcggttccctgaatcagcggccagtgaaaaccgtgagttttaccggcatacgggcgggctaaacgtacccacaggctttctccccccaacggccattcatccaggtcaaaatcaaatttgacgcggtaacgacccgtggtgtcgatatggctgtaggtgccgttcgaccagttgctggtcacccgcgccggaactgtgccggcaatcaccggccgttcccgcagcgccggtcggtaactcaacacttcgctgtacggaacaccgctaaaactgaccagatagttgctgtcacgccgggcgctgctgtgcatggcgacaatcaacacccccgcttttcctacccctgccggtcgctctccgtcgagctccagcactaagccggggaccagcatcggggaggaacttttgccgctgatccggtgctgctggtacaggttgcgctcgtgatgtaaacgggcataaaatcctgcggtttccggtaccggttggatctgttctcccttttcaagaaagttatcaccatagcggtatacttcaccgaccacggtgctatcccgatctcgtgccacctgatattgcaggtcattgcctgcttcccggtagttgtagtcccgcaccttcacaccttgcgtcactacctgatgttccacgtgcaaatcccacaccgaatcacgatcgttgtgattcatgcccgccgggtcacgtaacggtaaacgcacgtcgtactgatagttgcgctggttatccccgaaccgcaccacttcaatccccagacgactgtccatctcgaagcaataccagatccccacggccgccagaatgcgctggataaagtccagatcgctctcctgccactgcaccaccagttcccgcttcgggtaatcccgcaccagcgtgaacagaaaatcctgcccgcgaaattcgtgtcgttcacgcaggatcttttccacaatctccggcactgactggtgctggtaaatcccacagcgccgggtgtggcgcagtaacgccagatagggctccagacagacctgatagcgcgtttcatccgccgaggtggtaagccggttaaaacgggtgatgacgccgtgtactttacgcacctgctccgggttttccggtgcctgcaagataaatgtggcggatttgttcaacatcaccgccgggtcgatatcccgggtcgggctggtgaaatcaatggtatagcaataaggggcgcacaggcgctcttcgccggtgaagctgaatacgtccagttcagcatggcagcgccggacttcaagccggtagcgggcatggcccggcagcacagcttgactcgccttaagctgacgggcgcgcagcatttttctatccatcatgggttttcctcgctatccaatgaagcgaccggttcagcatcggtaaaagcaagggtgataccctcttcttcgtcgaagcccaacgtcacgccagcaggtttattgtgatgggccagacgttccagcagtgcctgtgataacaccggtaaaatttgctggttaagcaggctgtcgatattgcgtgctccactgtccggcaacagacaagcattcactaagatgtcgcacaggctgctttccaccgtgcaagtcaggccataatggctatgaagacgccgagtcacttgttccagtttgatttcaacaatgcgtctgagtgcaccagcctgtaacgggcggtaaatcacggtctgaaagcgagccaacagagctggctggaagtgatcacgaagcatcggatgtaacagctcatgcaatacggcgttcggggcatcaggttgttgtgccaataacgccatcagttgatcactgcccagattagaggtcattaagattacggtatgacgaaaatcgatctcgcgcccttcgccgtcgcgcataaagccgcgatcaaatacctgatagaacaggttaatgacgtcacgatgggctttttccacttcatccaacagcaccacactatacgggcgtttacgtaccgcttccgttaagatccccccctgaccatatccgacataaccgggcggtgaacctttaagctgagataccgtatgcggttcctgatattccgataggttgatagtgatcagcgaacgcgctccaccaaacaggttatccgccaatgccagcgcggtttcggttttccctacgccactcggcccaaccaacaggaatacgcccaatggcccctgttccggcgtcaatcctgttttagcagcacgtaaacgttgggcgatttcccgtagcgccgcctcctgaccaacaacccgttcccctaaatgctgttctaaatgcagcaaaccggtctgttcgtctttcaacaagctactcagtggaacaccggtccaatcagcaatcaccgttgctacagaacgcacatcaacatccgacgagagtaacggctgcccttgctgtcgtgtcgccagttgctgttgcaaccgggctatatcaccctgccgactgatatcctgccgggcatcgagcaactgttgcgtgagctgtttttcctgttgatactgtttatcccgctgttgttgttgccgatacagttcatgacgttgcatttcaatttgtgtcaaacggtctgagtgatggcattgccccagtgcaatatcttccagtatcgcctgttgctctatctcaagtgcggtcaattgggactggagttgcgtcaacgcctccggtaccgtatccaggctcatcctgactcgcgcactggcggtatccaacaggtctaccgctttatctggaagctgtcggccagtcaggtaacgacgagataaagtgacagcggctttcaccgcatcttcctgaatatgtacaccgtgataacgggcgtaacgcgctttcagtccacgcagcatcaggcaagctgtctcatcatccggttcatcgactttgatcgtctggaagcgtcgctccagtgccgcatcccgctcaaaatactgtttgtattccgaccaagtagtagcggcaatcgtgcgtaattctccccgtgccagcgcaggttttagcaagttagccgcatcagcgccccctgcctgattaccggtgccaatcagtgtgtgcgcttcatcaataaatagcagaatgggggcaggtgactgttgcaccgcttcaatgacgtttttcaatcgctgctcaaattcgccttttacccccgcgcctgcctgcaacaagccgagatccagcatccgcacgctgacggtttttaggctgtcaggaacattgccctcaataatacgcagtgccaatccttccaccagcgcggttttccctacccccggttcccccaccagaattgggttgtttttacgccgacgcgataggatgtcgatcatctggcggatttcgcggtcacgaccaaataccggatcaatgccaccctcagcggctctggctgtgatatccagcgtgaatttgtccaatacgttctgcaaagccgatgataatggttggggattaagcgcatatttatctgggtcgctacccgcaatttcagcgattgatccatccgccgtcagacacgccgctatctgtatctccgggcgctcatccgattgttgatccagcaacgggcgcaaacattgtagttgcgtcacactcaagttgagtaacggccagctatgatgaatacgcaaccaagccggttggccgcgcaacacctgcaaaagatgcaccgaacggatagattcgttaccctcttccagagaagcaatacaccaagcaacctgtaacaaactacacagatcgcttgataaccgcgggcgttggttgatgctatgtggtaaacggttaattgtagtcagcaacgactgccataacgcatccatatcccacgcataacgtcgagcaatcaccgtaatatcgccttcaccaccctcaagcagcttgagcaaccagtgttccaccgtgatttcagcatgtgcccgtgtctggcaaaatgcagcagcagcttccaatgcccgtgcgcaataagaatttaagcggcacaatagtgcggtacatacggtatccatattaaagtcccagttgtcattgagaggttaggcggcattcaacaaatgcccccattctcaggtaaaaatttatctgtctggcgaggttttcccagccagttctatgtttaaccaacacttcatccgctgaattaaaagagttgtttaaaagagttgccatacccgcgtatggcagtctgttagcgtgttaggtctgattgcgctcatgccaaacatcagagtgcatggtgttgacgtcctcatcagccctagtgattttctggtcgttggcaggcgatcacgctcggcggcatcagactgatttcaaccctacgattaacagcacgccccactgcggttgtattggtggcaatcggctgcgttgctccttcaccttttacgacaaagcaagtcggcgatacatcactggtttgtaatatccaatctcgtactgcttttgcccgcgctagtgatagctcgcggttttttacggcatcaccggttgaatcagtatgacccgttatcaccaccatccactccggtttagctttaatctcgatcaatgcgttcaccaacactttggctgcttctggcttaagacgtgactgtccaacgtcaaacagtgacatgctgctcaggttcaatgtctgtggcaacggcttgccactcttcagtacaggaggcgaagataccggtaacaccgcatggttgatcacagtcatcagtggcgtataaaggcgatcacctaaatagagccctaaccctaaacgcaccggttcgccatcacgttgatatttttccagcaacgtcgcatcacgcttaagttgatggtaagcctgaacttttgcaccactatctttcacgccaacgacctgataatgctgtaaatcactgcgtatctggcggaacagacgcaagttgttccaggcacaggaggccaacgccagacaggtaaatccgctcagtaggccgatgccccagatgaccgctcgtcggtgcggtgtatgaccaacatgatgtggcaacaggcgtaacatggcatcgggaaatggcgatacgttcaccgcctcagcaatgctgtggctaatgcggggtaaagtggtacgatcgaccagccattttgtccataagctgtctgcctgtggcgtttgtggcaaaaacgtcagtgccattgctatcgggtaacaaggccgactgaccagctcctgggatcggcattcgttcaagatattttctaccatccagcgttgccatgccgccgccacaatcgtttgttgtaaacgtgcgacgcgttgctgtgcatctccttcggtcaaccagatattcatcccaacagcggcgtgtttttctccccataccgtcattgtcgcgctatctgcctgtagctcgaaccacgggctgatatcgccatcaagatagctggcgatcaataccggtgtatgacaagcggtcagttgagcaacacgatcaacctgatagcgaaattccctgatctttgccgccatcaccgcgtgatcccattgctgttcaggaaagagtgttaataacacgctgatctgcctacaccaatcaggtctggcggcaataatcgcttctaccagcgtactcatctcactttgtttcggcacacagataaaacagccctgtggcgtgaagcgtacaagttctcccgcaaacagggttgccacgctatctccgcaggttagcaccacaggctggtgccacgaagcagcgggcaatgccgccagcaaacggtaaacactggcctgatgggatatttcaagtgtggtacgcctcacccaccaccaagccatcaccgctaccatcgagatcacagccaaccacaatgcaactgacacattccctaacgggaagaaaaacagacacaacagcgccgccagaacacccgctaaaagccacaacgctcgttttaatacgcaactcaatgtgtcctccttagccttacctaacagacaaatattgctgaaggtagagacgcagaccgcaccacaccaaagttattccggctaccgccaagcatccccaaaaccacggagagcgtgcacgccaatattggccctgatgacggtctgcattgacgcgtatcatctgatggggctgcaccgccattaccccggcacgatcagtcaggacatccagtaatgactggcgttcctgagaaatcttttccaagtcaccgccctgaaagcccaatgccaatacgcgctggaaacccgctaataccagcagagagggttgtggttgatccagcacgtgacgtatacgttcaaacagccgttctcctgcatggttgctattgcaaaatcgtgtctgcaacggcgttttcgaccaagtttcatagccatgatcccgctcagggcgtctgagtacggtttcatccagcaatgcacacaaggcatagatgatgtgagccatgttctcttcgctgatgccacttgcacttaattgctgccgtgccgcatctatcaattcaacccctttttgatataacgcctcaccgtacatcgatttatcaccgctttttagcgcaatcactagcatcccaatgtcgagcatcaggtcatcaattgaaatctctttgttcatagatcctcctcaaggaaacccgcgactttagtcacgggttatttacgaacgtaacaccgcaaacagttctaactgaacgcccgacaaggtaccgggcacatagaaggcgcaacttcccgcctccaacatggctttagcgactggattatttagatcaaaagcaaaatattggttttccaaccgcaacgggatcgccgccggtacatggctaagcggatgtaaaggaatgccgctcagtgacaagttaatcagccgctcaacatcatcaggtgccccgactttgcacagttgcggaaactgggtttgtagcaggtgcgctggcatcgacgatcgcactgagagatagaaatcggcctcttcgcacaatcgtctatcatgaagtgatgctctccactgattttcacgcaccacttccagttcaatcgaaatgactcttgatggcagactcgcctcaagtaatgtactaataagccggatcagtggcgggaaaacgtcacttaactggtcgtgttgataatcagggatcgcatcgagatcgctctccagagagaacgttagtaacgcccccgctaacttcaccagttcacggtagataatttccgggtgcagtgcaggggcagcgttaaaattattcaacaccggttcataactgttaagcgcattcaacaaccagaacagcgatacatccgcaacagcaaagtctgccatgcgttgatgactttcacggcgcattcccatcaggcgggtacgcttagcacgtagctgagtcagcaacagatcaagctgctctagcagtggcggatgggcagcaaaagagagcaatggcggaacaaaacggtcatccagcatccaaccgctttgtccgtcacgcaccagacgcgccaatggacatgtcagataagcctcattctgatcatgttgaaagcgtagggaaatggcatggcgttcaaccgcaatggattcacgtccattgccatatctatcctgaatttcgacccattcctgctgataacgtagcggcggttgtcccggccccacactttcactactctgacggcaattgccaccattggcgtgctccagcggtagcgccagtaatacctcaacagcacgcatatccgccgacgccacctgctgtaaatcgcagaccgcaggcagattgtcagcatgatcagtatcaatcagcgtcccatccggtaaacgggctttgaggtgctgaactttcaggcggtttaagcgcagtgcctcctgatcaaaccgaatatcaagcactccccaggggtgaatcagccccagatgcgcaatacagttgttggtcaatgcctcccaacgcgcttgttgctgaaattgttgaggggctaaaaaggcgtcttcaatccagagaggacgtagaattttcatcataactcccaataaataattacgatttcgctttcggcatctgagaaaccagagataaattgacgtcaatcccttccacctgaaaatgcggcaccgcatacagtttgattcggaagaatcccggattgtcatcaatatcctcaactaccacatatgcttcacgcagcggatgagatgcctgcatgtcgtcagtcggatcattcatctccgttaccagtgtgttgagccagttattcagttcaatttcaagcagacgccgatctttagtggtgccaatgttctcccgctggatcagctttaagtaatgagcaatgcgcgataacaggaagatgtagggcagacgcgcattgatgcgactgttggccgtggcttcaccggtgtcatacactgcgggcttctgcgtggagtgagccgaaaagaagcaggcataatcgcgatttttatagtaagagagcggaataaaacccaaattggcaaattcaaattcacgggtttccgggatcagcacttctgatgggatcttagcccgataaccggtactcagatcgtagaggtggatcggcaaatcagtgatagcaccaccggcttgcggaccacggatctgcacacaccagccatttttgacaaaactcctgaccatattggcggcaaaagcaaaagcggcattggtccacaaatatttactgctatccggccctcttgcttcttcgacataattaaacgttcgcaccggcacactcttcgggccatatggcagacgtcccaacactcttggcaaggtgaggccaatataacgggcatcttcactgtcgcggaaagatctccactgggtgtattcggcgcgttcaaaatagtgacccatatctttcatcaccaccacttcatccatgctctttttgccaaaaaaagttggagcgacagcagtaataaatggcatgtgcgccgctgccgcaactttggctacgttgcgcaataaggcaatatcctgcgatccggcactaaattcatagtcggcaatcactgcgccaatcggttcgctacccggtatgtcatattcctgaatgtaagcgtgacgatagaaaccgctctgaacaatttccggtgcatcgtcaaaatcttgccgcaaatcatccttggccacatccaacacttcaattttgacgttctgaccgagatctgtccgatcaaccaaaaattttaaacctcgccaggcagattctatttgctgaaatcccggctgatgtatcaccacatccagttggcggccgattttgcgatccaatttgccgatctcaaaatccagcaatgctttatccaactgttccactttttgcgcggaggctttcagcagatcgagaagaacgctaaccgccgcggtcacccgttcatcttccgtcaccccagccaatccatcactgtcatgaaaacatgcaatatcacttaatcgttctaccggacgtaaattaattttctcaaacaaagacgagtaaaccccaccggtatgatggttagccgtcgccacagaagatgtagcctgctcttgtatagtcattcaaatacctttactacttaaatctcgtgaaaataatgtgacaattacccttcttgcggcgtcagtgctgccaattcagctcgcagttcatcgctcaacatttcatcctgaggaatacgctccagttcctgacgaaagtcaggacgaaagccagatagttattaatccgataattagacaaacagcaaatatgagggaatgaataatggcatctcaattgacgaatggcttaataacacaaccgatgcaaaaaaatagcctcaaactatactcacgctaacgaaagaattaccgtagaaaacatccaacaaagaaaaattaatcttatatagataataagaggtacaacttcaacataagttaaacaagacataattaaataaaaataaataaaattcaggaaattcttaatgatatttcgtaactaattataattattgccatttttaattcttaatttgttacaaattgtaacaatctgtaataaacagtaaaaatattcaataaatatcggataattgttattattatttcacgactttattttatcttctttgctcaaatgatattgattattaattacattattaattatatctccatcaacccgcgtattcacctatacgcagtacaactcacttcattaagtggatttgttctttataacaataaacggtaagcgaaatagtttaataagataggtattaaagagataaacgatttctacgcgtatcagcatttcaataatttcattatcagctcaaataaaaacttgcctaatagtcaaccatataaactatccacaaagaaatcaaaaatactgaacaacacgcggagaaatgctttcatttcaacgaatgtctattggtacagcacattatccgatatattcaatatctcataacgctatatcatttccagatcaatattattatcattaaaattcaacgtcagtatcttatttcctccacctcgattattaccagggatctctaatgcattatcgtaagtgaattccctatttatagaatacttaaccgcattttcattcggtggattccaataatcctgaaatatccaaatattaaattcaaattcagatttaaatcccctttcggtatagatatgaatggctttattaggttcatatttatcacctatccagggagcccataaatcgccatgccattcagacattttatccacagagaatctttttctggcaacatatccatgttcaacgacaactttacacggcactttattataaatagatttaatatttgttactcccgcgataatattaatagctggtttattccgagtgttacttaattttctttccattttattcacctatatcaattagtaagtcaaataataattatgataggatttataataacttcatcctttcgcacactgccatccagcattgacctaaattatccttgcaacattaatttcctcctgtgacattacacttaaaataacattcaatccttattaatcacgcctattttcttatatcaatgattagccttaaattaaaatatagcgcaaaatctatattttatcattaaggctagctcacatatctacatttattttcccttaattattacgctaaacattactcattaaatttttcgtccctcttttcatcacctgagctaatttcattacatatataggtaatatcagggcgctaaccatagtcagtatgaaaataggccgcacgttctcagcaataatctccttaccgtctaagaaaatggacgagaagaagaacaccacgccagcacccaaattggaaaatgccatctggagggcaccaaaacctgcccgattttcaggcgtcgaggcataggaagcgagcacgtttgccgccatcacctgtacataagtcgcgaacataaaaagtgagaagaaaacgtatccatttatttttcccgttaatcccagaaaaatattaacaataaataacgtcgccgcggcgatggtaattctctgaggcgggtatctatcgcaaagtttcccggttaaataagttcccaaccaagacgcgataccaccgtaaaagaataccagtgaaacctgattttccgggatataaaatacattcattaatagcggagcaagtatcggaataagcatgaaggggctaaagttactgacgccacttgccattccagctaatgctatttttttggttagcacaatttttttctggctattttttactttctctgttcctgggataaagaagaggatcagaggcaaacttactatgcataaaataacgataaatagaaaagagacttgccagttaaaactctctgccaaatataaacataacggtatacctaaaatacttacaaatgaaaaagatgaaaacgcaattcccaatacccttcctcgcatactttccggggagttattcagtaagatcccaatacctacccccaacgtcacaccaccaaacagaccggcaatgatacgtagcagaataagttggtatggttctgaggcgaaaatcgttaagaacgtaatcaggccgagaaacagggtgtttaaaatgagaacctttcttttattaaaacgatcaataaagaaaaaggatgtcaggccagaaaataccgaggagaaaacataagcacccgcaataacccccgccatcgtaaccggcatgtgaaaatctttcgacatataaacaaaaagcggagttaccatcatgtactctaacgcattaataaattgaactaatgcgacaaccatcgcaataacaactatattattagttccaactacctgattatttccaattaacttcgacattataaatctcaattcctgttggcttaaatttcatcgacgtgataagcaatttacatcacatgccgagcaaaaaaaagcaccgtgtatcatccagtaaatgaacaacgtaatcaggcttgagatgaagctgatgatggtaaagtagaataatcaagcaacaacaatttcagcagactcattcattgttagaagtaagtaacaaaggcactacctttaccgaataatcattagagctgatactcaatcagcaggcgtttatcgcgacggctatcccgattaagaaccacaaaagtgcagcccctatttatcacaatggttcaatttaaaaggttattgagcggtaatagatgagttcataacagttacaagggacatatcaacgattagaaacagataacaaactttctggagaaattatggcgaatatacttaaatatggcgataccgtaaaaatattaaatagtttcagaaactgggatggtgggtatcttagtgtatatggaacgagtggtatttcagatggcaaacatacggtgataaccaccactgaggcaggaacattctggcgaattgaatcaggaacaggtaaacctatcggcagtgaagttattaacaacgataccattttactccacaatctttatcaatgtgatggcggctatttagcacattatgcattatcaagtcaacaggttccagaaggcgaaatatacccgatacacacatcagataaaaatatccgtccagaaacattagagtggattatttattctgacatgccatcgattgatggaaaaatcaaagaagatgaaagtattacgctatataaccgatggggaacccgaggctttcttgatactaatggttgggttggagtccctaacacagtatgccatgtatacactgctgctaataaccttcgtaaaccctataccggcctgtggaaaatgacacaagttaaagatccttgtctcccggttaccaaaccctccaattgcgctggagaatgcggcactagtgatggcggtaaatattgtttccaattacctcaaagtattcgatttggcctgatagcttatactaatacagctatccatcaacaaacagtaaaagtctatattgatgatcttctggtagatacattcactggcaaaggaatcgatactaaagcttatacatccggtacaggcaaagtctgtattgagattatcggggatggcaaaccttgtaaactccgttactcctataatacccttgacggaaaaccgggaacagtcactattggtgccgaaaatgacgccaacaataattacaatgacagcgttgtggtattgaattggccactggtgaattagtttaaaataccctattaatttcaccacaaaaaatcattaataaattaaagcggtattatgccgctttttatatgcaagcattatcaatctaatatattttcaatctgttattattaaaacatagaaacaaatcaaaaataaatataaaatagtgtcttataccttcactgcataatataaaccttatctcttagtatatatttatatttttgcagaaaaacaacatcattaaatcaataaataatttgttaatatataacattgccacgccccatcttttatattaattttcacagtataaatttttctgtttcgccaaatagttttaatattattattgatatgtttcatctgtaaacagggaatttaacaaatgagaaatcaatgacaaacttaaaaaccatgaaaggtatatatcaatgaactcacatgtttatttatttcttaacgcagataacgctagatataatgaaatatcaaaaaaatcagatattgcctatcctcaacctatcagtaacgattggcctgatctccctatcgagtttcaaaggcatattgatgatgtgattaatttaaatggttatttatatttttttaaaggttcgcaatacgttaaattcgatatcgcaaaagctaaggtgattgatggaccgaaatttattgcagatggatggcccggactgaaaggaaccgaatttgaaaatggaatagatgcagccacagaatttacaacaaatattgtttgtttcttcaaaggtagtgattgtatcgattatgccgtaaactcacacacaattaagcgaaaatctatctccgacagatgggaaataacaaagaaacacacagaatttagtaaaaacctagatgctgttacatggagaataaactctgcgattgctctcttcaaagacaatcattatatcgcatttaatcctcaatcgaatactattgtaattggacctgcacctgttactaattataccaatggggccttcaaaacagctcaagcagcagtattgattgacaccgatttattaggcagtgaccgaggaaataacggaggctgtagcggaacatgtggcaccaatgacacgggtaaacactgttttcaattacctcaaagtattcgatttggcctgatagcttatactaatacaactacccataaacaaacagtaaacgtctatattgacgatcttctggtagatacattcaccggcaaaggaaccgatactaaagcttatacatcaggggcaggcaacgtctgtatcgagattataggagatggcaaaccttgtaaactccgttactcctataatacccttgacggaaaaccgggaacagtgactattggtgccgaaaatgatgctaacaataattacaacgacagtgtggtggtattaaactggcccctaacatgaaaatgattagcagggctcagtcagcaatcagtaaaaattaaaatcccttgaacaacttcacatttttaaaataattcagagaatatcctcttctctggattattttatcgaattaaccgaaaaatctccccatgaatgactaggatctaaactttaaaaagatattcaatcaatataccctatggatttcaagatgcatcgcgacggcaagggagtgaatcctcgggagcatcgataactatgtgaccggggtgagcgagcgcaggcagaaatgcttgagcaaacttttggtggtatttgtttcgtctataacgacttaaacacggtgcccaatattcatattaaagggtgaaaatattctcagactaattatttaattgtggtggtagggaatattgacacgttaaacgtttgtaatgagcaacgtaagactaaaacaatttcatattgatatgctactgtcaatgacgacaagaatcacattgctttagctagatgagtttcaactcatcaaaaaatgaccttgtaggagagatacagtgaataaccattatgatgttttgattattggcgcgggtattgcaggcattggtacagcatgtcatttaacaaggaaatgtcctgataagaagtttattatcttagaacgtcgccaaacgataggtggtacttgggatttatttcgctatcccggcattcgctcagattcagatatgatgagctatggctatacattccgcccctggacagacaccagtgtttttgcagatgggccttcaattcaaagttatatccatgcaacggcaaaagagtatgacattgataagaaaatagagtttgggctaaaaattactcatactgactggtcaaatgcgactcgccagtggaccgttaccgcgattgacgaaataagtggggaaacccggcaatttacttgttgttttctcatcgctgcaacaggttattataactatgatgaacctcatttacctaaattccccggcattgaagatttcaaaggcccggtaattcaccctcaactctggcctgaagggttggattacaaaggaaagcaagttgttgtcattggtagtggtgcaacagcagtgactttattgcctgcaatggcaaatgatactaaacatatcacgatgttacagcgctcccccagttatatcttttcaatgcctgaaagggataagatagcagagttttgcaaaggcattattccacagcgctggatttacacattgagcagaaagcgcaatctttttctgtttcgcttaatttataaaataagtcgacatttacctacattattgaaatcgtttttactggcattggctcgcaggcgtgtcggcccagattttgacatgaagcacttgacgccaaaatatatgccgtgggatgaacggctctgtcttattcccagcaataacctattcaaggtactaaaagaaggtaaagcctctatcgttactgaccatattgaacgtataactgaaaacaatattttattaaaatccggcaaagaattacccgcagatattattattaccgccactgggctgaaattacattttattggtggaattgaactctctattgatggacaaaagcaacaaagtcatgatcgcatgctttataagggaacgttgatacagaatatccctaattttgcctgtctgtttggttatatcaataacgcctggacgttgaaagttgatctatctgcggattatatctgccgtttgttgaatgaaatggaacgtcgcgatgctaccgttgtaacaccacatgctcagccgggtgagatgcaggaggacgaacatatttttggcgctttgcgatctggttatgtgaaacgtgcacaggacttgcttcctcgtcagggatatagtccaaattggcagattccacatgattacaaaaaagataaacaagttttgggacagcctgtagatgatgccgcgttgaaatggacataatcgcccgaaattaataattatctgaaatggggataatctacttatccccaataccataaaactaatggctcgttattacccatctcttcgataaccaagaaaaaaccagcccagatatcgcgccaaaaatatggccttccgttgaaatattcgtttgccacggtaacaagccaaacacaatcccaccataatatacaaacacgagaatcgcaaagaagaaatcttttactcttctcaggaaaaaagcgttagccagcagcaatccccataaaccaaaaatccatccgctggcaccaatatgaatagccgaacgtccaaataaccaaactaatgttccgcccacaaagataataaacaagctggctatcacataataacgaatggagtgggccatcaataacgcactcaatactaataacgcggggagattgctgaacaaatgcccccagctaccatgtaagaatggagataatggaataccaattaacccttgagcgtatcggggaatgatgccgaaatgacttagtgcgccaccggttaaagtatcaaataattggattatgatcagtattgctgctaatcctattagcatatgaaagcgttgttttagccctgttttcaccgtgttgttgccttatgatttattggaaatcaaaatgaactttgtctcaataaaggtgttatggtcaaagttgacactacgacaaccactatatcccgaaagtttggaatttaacagttttgatgtaaaaactaaattctattttgacacaaccaattcggtttggtgataaaaaacaatcataaataacttatatggacacccactctttttattctctgctattcatgtagggggatgaatttaaaaacgttttcactttctcaagcaactgccacatatactgacagccatgatttcgtgtcaccgtttcatgcaaggattgccacagacgctcaattttattcagccggggagaataaacaggtaaaaacaataggttaaatttaggatgacgggccaacctcactgacctatcggcttttatggatacagtaattatccaaaatcaatgtgagagtttcagcatgaaaataatgtttttagtttttcctagtatcactatagtttctgttgcccttttaaatacccgtcagcgctgccctttgccacacgatacccatttatacccgttatctttcaagttgcctctttgttggctgcactcgctccctataaataagaacaaaaatgccgatcttgaatatcggcattttgctgtaaaagagaagatgaatttaatgctttaacatttcaattttatcccgactcagtccggtactggtgacaataatgtccaaactcacgccatgccgtaataaggcacgagccgtttccagtttaccttcctctcggccttcttctcgacctagctcaataccttgcttgatacctcgctcaagccctttttgttcaagctgttctgcaatagtcatcagcatcgtttcatgctccggagattgttacttcagtttgaccggtttcagcttcgccgggaaaacgtaaaagtcccttgtatagccatcatcctgaataagaacaaaaatgccgatcttaaatatcggcattttactgtgaaagagaagattaatttaatgctttaacatttcaattttatcccggctcagtccggtactggtgacaataatgtccaaactcacgccatgccgtaataaggcacgagccgtttccagtttaccttcctctcggccttcttctcgacctagctcaataccttgcttgatacctcgctcaagccctttttgttcaagctgttctgcaatagtcatcagcatcgtttcatgctccggagattgttacttcagtctgaccggtttcagcttcgccgggcaaacgtaaaagtcccttgtatagccatcatcctgaataagaacaaaaatgccgatcttaaatatcggcattttactgtgaaagagaagattaatttaatgctttaacatttcaattttatcccggctcagtccggtactggtgacaataatgtccaaactcacgccatgccgtaataaggcacgagccgtttccagtttaccttcctctcgaccttcctctcgaccttcctctcgaccttcctctcgaccttcttctcgaccttcttctcgaccttcttctcgaccttcttctcggccttcttctcgacctagctcaataccttgcttgatacctcgctcaagccctttttgttcaagctgttctgcaatagtcatcagcatcgtttcatgctccggagattgttcaatcagttgatggacaaagtgtgagagatccagcgtatgtccattcagtaaaatatagcgtaacaccacattgagctgctcggttgtattataccctgcattcaagagttccaccaattggaggagccattcctgcatatcccggcagcgaatatgtttttgcaccagttccatcagggctacccctttatgtgtcaggatctcttcatcgctgagcacactgacgtccaccaacggaaacgcctgacggtataagcgagccgcctgttcggggagcgtgaaacaatccagccaccggtttgagtaaggatacggccgaatctcaccatgataaaacagcagaggtgccaccaacgggagttcagtatggccttttttcaggtgagcctccatggctaacatggcataatgcatcagccgccaggccatcaacgggtcaggagtggactgatgctcaatcagacaatagatatagccttgtccccgagccgtttcaaccgagtacagcacatcactgtgcagttgacgtaaatgccagtccacaaaactgccgggttccagtttcaatgtggctaagtcacacaacgactggatttcttcgggcagataaagggatagaaactctctggccgtttcaggctgcgttaaaaaatatttgaataatccgtcatggtgaggccgtttttctttctttgccacaatctgtttctctgtcttattagttagtcattaccatttatagtatttctaccaagctacaaaaaacatcttcccatatttcctcaggcaaatctttaccgaatgcattaatagaagagcctaaagaatcaaataccagaaaagaaaaaaagagaaaacattatatttacaacaattactttatgaaagccattcatttcaatcagtttttaacctgcattcgcataatgataattcctttatcaaaatatcgattatttatatttccgttaatcttggatgttcagatcgcaaaaattggactgagttccatccagataatctattaggtataaatgttatttatatcaaagtatcaatttattagagttgtatccttcgtgtcaataaaaattaagtttttatttttctatcgttattaaatcaagcggtataatgtgatttctccacagttcaagatagaaatatagtaaattaaatgaaagtaattttagtgatatattcattgtcagaagcaagaaacaaatcctctgcctttcttcaacaaccattaatattcataattaatccaaatcaagcgttaatcatttttttaggattacaaaaaagttgagcatttcgctgattttaataacctattctgaaataacccataaaattatgaaacagaataattaagccagggtaatttcagtgtcatactcattgttaaaaataaaccacaaacattaaggataaattatggcagatatacttaaatatggcgatacagtaagaatattaaatggttacaataactggcaaggaggatatctcagtacacatggaagtaacgacatcccaggagcaaaacataacgtattaactgtagctccttccttttctgatctaggggtaatatggcgaatacaatcaggaacgggaaaagctatcggcagcgaaataattaatgatgatattattttgcttcataatctggctttctgcgatggtggttatttgggatattatgatggcccaaatcaaccggtaccaagtggagaaatacatccgatagtcacatctgatataaatacatattctccaaaaacattagagtggattatttattgcgagacaccttattctataaagggaaatatcatagaaggagcaattatcagcctacataatcgatggggaaataaaggtttccttaatagttatggtaatgccaacaaaccaaacacgttatatggtgtatctctttctggtaatagcgctcgtaaagtacataaggtagaccagtggaagatggaaaaaatcaatgacccttgtccgcctaccaaaccctcaaattgtggtggagaatgtggtactagcgacactggtaaacactgtttccaattgcctcaaagtattcgatttggcctgacagcttacaataatacgaacattcagcaaacggtaaaagtctatattgacgaccttctggtagacacattaaccggcaaaggaacaaataatccgatggcgaccaaaacctacacatcaggtacaggaaaagtttgtattgaaattgaaggagatggcaaacctagcaaactgcgttatttcgataacaccctcgatggaaaaccgggaacagccattatcggcgctgaaaatggcaccaataataattacaatgattgcgtagtaatattaaattggccgctggtgtgaattaaaaatactttgaaaaatttcaccacaaacgaaaataatatttaccaatcaattaaagcggtattatgccgcttttttatgccacatttagcaacgctaataaaattatcatcaaaatcatttttcgatattacaataattaggggctaataaggaagccccttggtatatatcatacaagatggttaaataacgtttcgtaattatgctacacatagccccatccaaccaattgttatacatagaattatgagtggtataagatgtagcgctattttgaaatcttatttaaataatcagactcagtattccatattaaaaatcttgaaaaaatatcgctcgatcaaacggtgttcggtaaagagaattttgttgatctattgtagtagcctgagaagacataccagaaataatccctatttgaccagccgcaagatttcccgtcatcagcgtgttcatattatattggcaaagctctaccttccatttatctgccacaacattataccactcgacgattaatgtaccattatttgccgcaagcaatccaattcgccagcgggaccaagtattttttggccattcataactcagtggaacaccatgagcatcacctagcgtcggttgtcctttataaataccatccgtttgtttaccaacaaaattgactgcctgaatcaaattagcctgaagattccaaaccatgatataaggcgtcgccgtgtcaatcgaagtccctaacgaaatatttgatggcatccattgaggcttaccttgatatcccccagtcaaatgaatcgccatatagccgtaaccaatattttgatatgtaccgcttgcgctcgttttcttggatagcacacttactgaaatgtcaggatatggattacaaaacaggtcaagttcacaataacaatgtctggcatcaaccggtgtgtctgttgcaatcccgagacagtgactgccaatattgccaaatttagacaaagtttgtgccttgaaagctttccttcccccaacactgatgatatcccaagcgctagtcccgtaacctgagtccttaaacaacacaccagctctctgtgttgtcgcatctacccacatcgaccttcaggatataaatttggttcccataccgttattggaaccgcagtggaattagatgaactttcaattgagatttgacgttcatgttgttctaatttcataactaaaatatctcctataaaaaataaaatcacacttcaatcttatttttatacctaaaatcaagattaattttaattctaaaatgaataaaaaccctcatgcttatcaaaaaaacattaaattcaccaatgaattgttaatatatgaatttacttataatccattaatggcattaatttacccatatgcaaaataatttttcaaaacagtagatcacttggagataattaaatccaatttcaattatctatcagttaaatataaacattgagttaaaatcagaaaaaaataatataaattatctatctattagttgagccagatctttatttataaaaaataatgatgtttgtttaattttaaaaaaagtaaataatagagtcttatgataaggtgatttgtataaattaagaattaggataagtattttagagggaactaaataagaaaaaacgaaaataactaacctaggagtattaatcatgtcaattgtttttgcatcaatagatccacgtagcaatccgctacaaacatcaagtcaaaattatgttgatatacccggtttgaaacttgatgtttcaaagtattcgaactcaccatgcttaacagcattaatcacgttaaatataccaacgccctatgcttcaggtaacaattttcctggagggaactttgctattgtaactgatcaaggcgaacaattggcttacggtggatttacttacagcagtaagatcccagaaaattctggacgtatgccattcacactggttgcccgttattctcttgcatctaatgtttctactataaaagctcaatggagtaatatacgtggtagtacggtacatatcgattcatatgcatctatctctgcggttattcagtgcaatcagttagtttagtttcaatgattaagtgctgtgtcatacacagtgtatagaattaatttggagttaggccgctaccgacattttctattcataaatggaaacattagtggtggcttaacctcagaaagataatttttatcaactcataaaacagcgatcaattttatttcatactctcgcctttcaatgtaatatatatttaaatgtatcataatataatataatataatataatataatataatataatataatataaacttatattaaaaacgactatcttcccagtaagccattaattattcacatactgattatttaaatttttcaaaacagtagataactttgaagtaacttattccaatttttccgatctgtttaattgcaaaaaaccaaacttttatcattaaaaccaatacattttgaaagataacggatatatggggctaataagaaagccccttggtatatatcctacaagatagtcaaataaccagattcaatattccatattaaaaatcttgaaaaaatatcgctcgatcaaacggtgttcggtaaagagaattttgttgatctattgtagtagcctgagaagacataccagaaataatccctatttgaccagccgcaagatttcccgtcatcagcgtgttcatattatattggcaaagctctaccttccatttatctgccacactattataccactcaataattaatgttccgttatttgccgccagcaatccaatacgccaacgtgaccaagaattttttggccattcataactcagtgcaacaccagaattagcactgcctagcgtcggttgccctttataaataccatctgtttgtttaccaacaaaattgactgactgaatcaaattagcctgaagattccaaaccatgacataaggcgtcgccgtgtcaatcgaagtccctaacgaaatgtttgatggcatccattgaggcttaccttgatatcccccagtcaaatgaatcgccatatagccgtaaccaatattttgatatgtaccgcttgcgctcgttttcttggatagcacacttactgaaatgtcaggatatggattacaaaacaggtcaagttcacaataacaatgtctggcatcaaccggtgtgtctgttgcaatcccgagacagtgaccaaatttagacaaagtttgtgccttgaaagctttccttcccccaacactgatgatatcccaagcgctagtcccgtaacctgagtccttaaacaacacaccagctctctgtgttgtcgcatctacccatcgaccttcaggatataaatttggttcccataccgttattggaaccgcagtagaattagacgaactttcaattgagatttgacgttcatgttgttctaatttcataactaaaatatctcctataaaaaatacaattacacattaatcttgtattttatacctcaaataagttcatctttaattcttaaataaagtaatccacataaaatccaacaatattaaatccattaatgagttgttaatatatagtcttgcttataacctatcatcaggattaatttaaataatataaatttccctattcaccagacagatgatcaatatgatagagttaaattagcgtatcttaatattattctcaccctatttcagtggtaaaaaaattcaaacgaaatattaaatcccaatcaccaaaaaggatatatataaatgaatacatcaagttatctttttcttggctcagaaaatattagacacaatcagaagtcgtatgaatctgatatcggttatccccagcctataaataacgattggcctgatcttcctattgaatttcaaaggcatattgatgatgtgattaatttaaatggttttttgtatttttttaaaggctcacaatatcttaaatttgatatcgcaaaagcaaaagtgattgatggaccaaaacctattatagcaggatggccgggattagccggaacggaatttgaaaacgggatagatgtagccatagaatggccctatgtagcaaaaatgggtatgacagatgtcgtctgtttctttaaaggtagtgattgtattgattatacggtgagttcacatactgttagcaagaaaactatcgcagacagatgggggataacagaacaatactcagaatttagtgaaaatctggatacagctattttatggataaatattggtagcccttttcttttccttttcaaagacaattcgaacatcaggattaatctgaaatcgaataccatcgatggtcaagcacccattggtgctaattggcggggtgtgaccttcaaaagagttcaagctgcggtgccaattgatatggatttattaggcagcgagatgggcaatgacagtaataccaatacctatttcttccttaattcagaaaatattaaatataatgatccattaaataacatcgataccggttatcctcaacctatccgtaataattggcctaatctgcctattgagtttcaaaggcatattgatgatgtgattaatttaaatggttctttgtatttctttaaaggctcgcaatatcttaaatttgatattgcaaaagcacaagtgattgacggaccaaaacccattatagagggatggccgggattagccggaacggaatttgaaaacgggatagacgccgccacagagtggatagatgtaaaagaagatatcgtttgtttctttaaaggcaaggaatgtattaattacactgtgagttcacacaccattgataagaaaaatatcgcagaaagatggagaattaccggagaatacgcaaaatttagtgcaaatttagatgccgctattctatggcggaactccggttattttatttatctttttaaaggtaatgagtatctccgcttacatctcatgttgaatagtatgtatggtgaacccgagcttattcaaactaaatggaaaggcgtcactttcaataaaattcaagcagcagtgtccgttgatcccaatgtattggggagtaatatcaatataaaatgcggtggaacatgtgggattaataataccggtaaacactgctttcaattacctcaaagtattcgatttggcctgactgcctacgtaaatagtgatgttcatcaacaatcaatcaatgtctatatcgatgaccgattggtcgataccttaaccggtaaaggaataagtcacataacagatgttaggacctacacatcaggtaccggcaaagtctgcatcgagatgataggagagggtaaacccggcaaactccgttatgcctataacactctcgaagcaaaacccggcacagccattatcggcgctaacaatggttccaatgacaattatgatgatagtgtggtagtgttgaattggccattatcatgagacaaaaatatatcgcagtgatatctgaaaatagaaaatcgagtaaacacatcaaaatgacattcaaattaaccattattaaggatgtaaaaaatgaattcaaacacctatttatttcttaactcagaaaacattagatataacgactcagaagataaagcagacacgagttatccccaaactatcagcaatgattggcctagtctccctatcgagtttcaaaaagatattgacgatgtgattaatttaaacggctcattatatttttttaaaggctctcaataccttaaattcgatatagccaaagccttggtgattgatgggccaaaacccattattgagggatggccgggattgaaaggtaccggatttgaaaatggtatcgacgcagccacagaatgggtggatacaaaacaagatgttgtctgtttcttcaaaggcagagattgcatcgattacaccgtcagttcacattcgattaataagaaaaccatttcagaccggtggggcactatcgggaaatatgcaggatttagtgaagacctcaatgccgttattttatggaaaaataccgccggcgctactatttactttttcaaggatagttattacatccaatacaatacaaaatctcatgctatcgatggtgaaccctcctttattcaagcttactggaacggagttactttcaaaaaagttcaagccgccgtatcggttgatattgattcgttaggtagtgagtatagaaactgtggcggaatatgtggcagcacaaataccggtaaacactgtttccagttacctcacaatataaagcttagcctgtcagcctatggtaatactgcccaccagcaaacgataaaagtgtatattgacgatcagttagtcgatacattaatcagccaaggtgccaatagtgtgttgggctttaaaaattactcatcgagtaccggcaaagtctgcattgaaatgataggcgacggcaagccctgcaaactccgttacgcctataacacccttgacgaaaaaccgggaacagccattatcggtgccagcaatggaggcaataataattacaatgacagcatagtcgtgttaatttggtcacagtcctgaataaaaaagccaaaatacactacgctggcaacatcagtagagatgacatttatcaataaattaaagcggtattatgccgcttttttctgtatatcacggcagatatatcggtaaaatgataccgtttttgctgatatgaacagggttaaaaacaaaaaaaacatggcttaccttttcaagtaacatgataataagccaaactcactcatcctccaaataatcccctatctgataaaaattaactttttgatcttttcttttcctatctcccattgctatgaatattcaacagtgcaggaattcaaccctattttaggcccacaagggatcagataaaaggcaagataacctgttgatggcaataaccgaatcctgaaatgacaccagaagttatgcactaatagcataatcggaggggaagtcatttcagggtaagtatcagttgtttgaaaggcaataacatattttccgaggaaatgatggatatggataatgtacttaaatatggcgataccgtgacaatattaaacagctacaagaattggagcggggggtatctcagtgtatttggcaacggtaataaacccggaacaaaatatggcgtggtaactgtagacgcttctttagctatttatggcggtgcctggcgaattgagtcagcaacaggaaaatctgtcggcagtgaaataatcaataatgatattattttactgcacaacctgtattactgtgatggcggttatttacgatattatgatgtggtggagcaaaatgaacaattaaccgaaatacatcaagtctacacctcagatatccgcaaaaaagcggcattagaatgggttatttattgtgaaaccacaccaccaaatgcaaacatcagagaaggcgatagtatctccctctataatcgatggggaaataaaggttttcttgatacccataatcatgccggcgatacaggctcgttatatcaagtcttcatgtccaataatgcggcccgtaaaagccacaccggtttgtggaaaatggcaaaggtgaatgatccttgccctccccctgatgtgttgaccaatatcatgccattgtggcgtaagatgcggtaataacgactcactttatcgctcaagacagatactcgcccaatgcgacataagtatctccataattttcgtcaaaaatggaatggtattgatattcagtatgctttcaacttttctatcgccgggctcaatgcccggcggaggaatgaagaatatgattctattgcgctgtaacaggcgattattaatctgaataccgcgttcgataacttctttaatccgaatttaatccgaagttgcgggcaaagtttccaacgtttaaacgtcaacatggaaaacagtcaaatcatcattgtgttggcgtgaaggtactggataatgcgattaaacaaacgcgactggcagtgtccgatatgccaaattgagcctgatcgtgcttgtcatactccagcggcggcctttgaagtgggaagcttctcgcgataggatgaggagcagtcaccaagattaaacttattaccaacaaataagtgacccactgtcgccaagaaatagcgaccacaacgacgcccaaggtgataatcccgactcagcgctggcaaacggctgcctaatgcactggcagttaatggtgcaggcggataaatttcaaaaatctgcacatcatcaggtggattttcaataaatttctgggtgtggtggtagcttttcgcatgttgttgtagcatccgtaccatcttttgcagaccactatctcccaaccaacgttccattcgttgcatccaatcaggcgtgtaatagagctgtgaagggaccgtacggatcaccacgatggtatctgcaccacgccgatacgcctcttctactggaatcgcatcactgatgccaccatcataataaacaacatcattgatcgtcacaccattgcgataaaacccaggaatggcacttgatgccttaatcacttccagccaattattctcatcaggctggaaataggtaggttcaaaattatctgaacgacatgcgcacatgtaaaactcacatccagcctcaaatttgcgtaaagctgtcgggatatccaatggcagttcctgtgaagcggcctgcacaaaccaatctaaatcaactaaatgaccaccacgtacaaaacgcaaagggttaaagaaggctggattagttgtatagcgactgatcgctcgccgggcatatccacgctgtccacaaatataagctgaaaggttctgagcgcctgccgaagtgccaagcagcagatcaaatgggttgaattcaacacgcataaattcatccagcacacccgcagtaaaaatgccgcgttgccctccaccttcacaaaccagtgcaacctttccagatttaatagacgacttatatttataggataatagatcaatattccccaacgttatcggtatacgtttccccacacagcccccaagaaaataaatgacggatagagagcataacttggaaagttattatccgtcattatattatggtgctacgtagccaatattttgataaaagtacccctggtgagggcgcatatctggttagtgctattcagtttagtacaacgtaaaattatctgaatggaaaacaaccactcataacaaaatatattatttttttatggtcagaccgttttgaatcgacttgacccctttcactttagagataatctctataatttctctggattgtttctcgcttttcacaaaaccagaaatatagacaactctcctctctgtttttactgagatatcactactgttgatcccttttgctgccaacaactcacttttaatcttcgctgtggtcgcactatcacccatataaccatcgatgtttttcattgaatcatcgattttctgaccagcactgtcgagtgcttgtgtcgctttatttttaaaagactcctccgccagtacactattgctaacgatagcagtacccaaggcaatagccaccaacaaatgggccaatttaacattcttcatcctataccttccttaattgccggttagatttctgaatctataaagccattcaaaccgtttttacgcagtgtgcttttacacaggtgtttttacacaatgcatctttacacaatgtatctttacacaatgtatctaagtagaatcgtaatctaagcagaatcacaatctacattagaattaaaaacaggttatcactcccaatagctgagaggctaaatcgggaaataagcacatcaatacagcaaagaccgaggaaatagtaacaggaaaataaagcaaagtgctataaaataagatggatcttacccgactaaattataaattattcttgtgttacatatatttttgtaaagaaaaaggctaacttgttgttagccttaaaaatattaatgttcccgtgttttacggaaattgatgtcaggataacgttcacgggtcaaatttaggttaaccatcgttggggcaatataggtcagattatcaccaccatcgagcgccagattttgctcactcttacgcttaaactcttccagcttcttagcatcatgacactcaacccaacgcgctgttgagacatttactggttcatataaagcttcaacgttgtattcgctttttaaacgggcaacaaccacatcaaactggagaataccaacggctcccacaatcaaatcgttatttgccagtggacgaaatacctgtacagcaccttcctcagataattgaaccaatcctttcagcagctgtttctgtttcagaggatcacgcaagcgaatacgacggaataattccggcgcaaagttaggaatgccggtaaatttcagatcttccccttgagtaaaggtatcaccaatctgaattgtcccgtggttatgcaaaccgataatatctcccggataggcatgatccacatgagaacgatcacccgccataaatgtcagcgcatcagcaatcaccacatctttcttaattcttacctgatgcagcttcatgcctttttcatattgacctgacaccacacgcaagaaagccacacggtcacggtgtttaggatccatattggcctgaatcttaaagataaacccggtaaatttatcttcctgagcggagacttcgcgaacatctgtctgacgcggcatcggcgcaggtgcccatttaaccaaaccatccaacatgtgatttacgccgaagttacccagtgcagtaccgaaaaataccggtgttagttcaccttgcaaaaatgcctgatgatcaaactcatgagaagccccctgcaccagttccagctcctgacgcaattgttcagccagatcttcaccaatcgcagcatccagttcaggattattcagccccttaattgcgcggacttcctgaatcgtgtgcccctttccggtctgatacaggtaagtttcatcaagatagaggtgataaacccctttaaaagacttaccgcacccaatcggccaagtgatcgggcaacaagcgatattcaactcattttccacttcatccatcagttccatcggatcacggatatcgcggtcaagcttgttcatgaatgttagaatcggggtatcgcgcagacgggtcacttccatcaatttacgtgtccgctcctcaacccctttagcggcatcaatgaccatcaaacaacagtcaaccgccgtcaatgtacgataagtatcttcggagaaatcttcatgccccggcgtatccaacaggttaaccaggcaatcttgataaggaaactgcatcacagaagtggtaatggaaataccacgctgtttctccatttccatccagtcagatttcgcgtgctggtttgaaccacggcctttcaccgtaccggctttctgaatcgcctgcccaaacagcaatactttttcagtaatcgtcgttttccctgcatcagggtgagaaatgatagcaaaagttcgccgtttagcgacttcctgctgaaaaggggaatttgacatcaataacaatcttctgctttatatacgggcttgtattcaacatcagacgcttccccgcaaggagaacagttgccaaacccgtgggtgaatgaaaaattggcgctcattttcgctgaaattggtgctataaacaatcaatcaattttatagcgcttattaggcaaacagcggcaacgccatgatgatggcatcttctttacctgtcgcagtaggatagtaatgcttacgaacagagacttggttaaaccctgcttgttcatacaatctaatagcagaatgattcgattgtctgacttcaagccataaggtattcacccctttgcccggtaaaattgacattaaatacgctaataatgctttaccataacccttaccttggtagtcaggatcaatagcaatattaaatagggttgcttcatctaatatcacttgggttatggcaaaaccaataagttgttcattaatcgctattttataattcaaataccgctccccctgattaccgaaaaatgttttttcactccacgggaacgcatgactggctttctcaaccagaaaagcggacgggagatcagcgggagttaatagagaaatgttgttcatgttgagaaatctgttgccaaagagaacgttttgcctgtccatcacaatataaatcatttaatgccgggcttctcaaagaaattcccggccatgatagtgtaatatccacccctaacaaccaatatgggcacttaacctgttccggtaacatcgcaacattatttgttgtaatgcagtaaacagaggatttatccaaccccatagcggtgaaaatatctattaataatgaattagttaaatcaatgtggtcattggtaataatcagcagacgagtggtgtcaggtaagtgaacagctaattcaccttgcaaaaccgtagggttacgtaaggtccattgggtaatccccaattgagctaataacctgtcgcgccgggttaccatatctatattacctgctgtaaaaaataatcggtaacatgttatcagaggccacgatctgcgccaatattgggttgagatttatcactatctgatacttgagcacagaaccattgaaggagcttatagacaaatgtctgcgttaacccccgccagtgaagttattttacgtcaccgtgagcaatttagctctcaccacctgctcttcgccggtgatattcaggatacactggcaacccaaattgatgctgccagtgtgcgagtgcacactaaccaatatcatcactggcaatcactgatccgcacgctgggtgagagtgcctggtttggcctggtagccgaaaaagcatttactcaaggttgtgacaccctgatctactactggcctaaaagtaagcaggaagctcgctttcaattacgcagcctgttctctgttttgccaaaaggtatcaatatttttattgtcggtgaaaaccgtagcggagtacgtagtgtagacaaactgatggacggcatggcaacgtttcgaaaaatcgatagtgcccgtcgttgcagcctgttctacggccagttagaacatgaggtgcagttcgaacaggataactggtggaacagttatcaggtggaaaacgtcatagtgaatacgttaccgggtgtatttagccaggatgaattggatgttggtagccgtttattgctttctacctttgacaagcctctctccggcaatttactggatatcgcctgtggtgcgggtgtactggcagcggtattgggtaagaaaaaccctgagttagcactgacgctcagtgatgttaatgcagcagcgattgcctccagtaaagcaaccttaaaagccaataaactggaaggccatgttgttgtcagtaacgtttattccaatatcgaagataaattcgactggattatctctaatcctccttttcatgaaggattaaaaaccagtttactggcaaccgatgatctgatccgccaagctcccaaccacctcaaacccggaggaaaattgcggattgttgccaatgctttcctgccttatcccgacttactggataaaacttttggtactcatgaagtcattgctcagacggggaaattcaaggtttatcaggcaacaaaaaaattctaattgactcagcctgtccttgattcaaggacaggccatctttgataacaaacaaagaggcaacttgaaagataacgggtataaataaataatgattgacgtcggctacaaaacctctaaaatgcgcctccgtattatcaatgtattatcaatcaacagattgataatgtctgaatttgcgagggtggcggaattggtagacgcgctagcttcaggtgttagtgtccttactgacgtgggggttcaagtcccccccttcgcaccaaatcagacaaccgctgattgaattcggccagtttagattaagcaataaaaagtaaaatgacagtacctgcgagggtggcggaattggtagacgcgctagcttcaggtgttagtgtccttacggacgtgagggttcaagtccctcctttcgcaccaatctgtctgtttttcttatcgaacttctctccatttattctgctataaaacgtcaaaaacaacccagtcgatatgctccagccaataaagcacataacacagcaaaccctgatggtattaatagaaaatggcgtgacttctggtttagcagcataaatagcgtcagcaacatcgctaatactaccccaattttaaactgctcaattccgggattgatgatgacgaatagcatgccagccaagctagataaacctattccccacaagctggtgataccctgccagaaaagcgatctctctctgtctttaaccctgatcataacttgcacccagacaaatgataatgattaccaatatcatatacaaaaaagcgtgaagtacaagtcagttgaaatagctaatctggcagatcaaatcaatatcttgtgacacccgttcaaactattacgattcaacatactacagagttgaaaaaccgtggttcgaaaatatcacaaagcactaactcaagcactcaatattgggatgacaattacacagaattaagaagaaggccgcttaatgcaactaatctccctttctcttaaatccaactttggatattccaaacgactgtgggtaagaccagctcttatcatcatctgtaaataacccaatgcaactgctgtaggatcaattacttgaatcggcattcctacagccttcatctctttggataagtactttgccatccccatcatgccggtacaacctaatactatggctgttacctgctcttctttaatcagctaacatgtgattcatcattaattctcctattaactacattgtttcgcaaatcaattaagacaaacaatgaaaataacaaccccatagcaattattgatgatactacaattgctgaattaaacagttttccagtaaatgcccatcctgaaataaggacactgaaactgaagaaaataagtcgaaaaaaagttaataaggatgatgctgaaccaactaattcagggtgcaacgccaaagaacgagaaaacaccatactatattgaaaagcagaacctatacagataacggccatcgacagtgtaaaaagtattgcagattcgggataaatatgactaaatatcattaatgaaccacaacctatcaaacaaattataatactcaaatagatacaattagctgatccaatctttctattcaaagcacctgaataaaatccagccaccgacaaacatattcctaatatcgcttgatgcactgcaaatatgtagtaactcattcccattttatctatatataaaaagggaacaacagatacatatgcaatacatgcagatactaatagcccaggtgtaaaagaatatattaagaaacgcgtattgaatataagttggcaataatttttgatgaccttatttacactcaactttaccgtattacgatttgtttcaggaacgatgaacacagccataagagaaagaaagctcagtaaagccactaagtggtaggtaaatctccaattataatgtgcaacaataagagaacccgcaatgggagctataatgagggccattgatattgccgcgttgagaatgccaaaaacctgtactgattcctcatctttataaatatccgaacaaattataaacccgacaatccaaatagcactgcatcctgccccttggataaatctaaataaatacaattgattaagatcaaccacggttgaacaacctatgctcccaataaagaacagagtagcgccgattaaaattatttttcttcgcccatatgattctgaaagtgggccgaaaataggtgtgaatatacataaccctaagaaatttactattagagtaaattgcactgccgattcagctgcagaaaaaaaatttagcatttggggaaatgctggcaaagtgatatcaacttctataaatgatggaaccattccaatgataagtattattggtaataaccttaatattaacggtggcataaatcaattcacctctgaacattatgaatcctatctaatataaacacaaaaagctgccatcaaacaacacctatacccgttatctttcaagttgcctctttgttggctgcactcactcaccccagtcatatactcccggggattcgctcccttgccgtcgcgatgcatcttgaaatccatagggtatatatttcccttggattactgttttgctgaaaattttatctgcaatttatattgcctttttatcaacaaaaaaattaaggccagagaatatccggccttaactctttattccttaactctttattcctcaaccacttattccccaaccacccaaaaattactttaacttcatcgcatcacgtatcgtgaagaatagatctgtctggtcagtcagacctacaacattggctgcctgagggccataagcggccactcgtagctgagtacccgtatgttcctgttccttaccctcagaagtaccgtagctaactgccatcaccgaaccatctttcgtgattaatgcctgagtcagccccggagattttatatcagcttcaataatctgactggcgtgagcatgatcagcggtgacaataactaatgtatcaccgtgtttacgcgcatatttcaaaccaacttgtaccgcctcatccaatgcgacagtttcaccaatctgcccacaaggattagctttgtgatcctgcttatcaatcgaagcgctctccacttgtaagaagaaacctttctgattttctttcaacagatcaatggctttctccgtcatctgtgccaacgtcggcgcatcaggattccgtttcgagttgactttacaagtcactgggggattatcaatattaccgtgataaacggctttaggtccttcccaagcaatgtccatattgtcttcatggaacaagcccaacaacggtgttttctgatccgctctagtcacggatgccagtgacttagcatccctgaccaactgataaccctgttcctgtgcctgctgttccaacgttttatccttgccagtaccaacaaccgatttctgggcgaaaatcttggcacctccacctaatgtgatatcagcacgagccactaataattgctcggtgatcgaaccacgcccgccattttctagcgcattcgttggacatttttttatcgtctcttgcggaccataacagccacggtcagtgacatgcgcatacagtgctgctggcgtggcatcctgcaccctggccgtcgttacgttacctgttgctttaccattcgcttttgccagctcaagcagagtttgatgatctttaccaaatacatcaacacccaatgcgccattataggtttttacaccagaagcccaagcggtggcagaagcggctgaatccgtcgcatagttgggtttacggctctttttatccagagaatagtgagtgtattggccggtaaatggcaaggcatcaattcctttgaaaaatccacccgcaccttctgcatagttacgggcaatagtaatctcagaatctcccataccatcaccaataaataaaataacatttttagctttatgattatttatcgccgcttttaatgcctcagtctgattttgagtcatacggcgagcaccaccaaattccgtaatattaccttttactgcccgaccttccgccataatttgatttgcattttgatcatcagccgccgataccggtaagctgacacttgaaattaaggttgagaccatgactgcaaccaaacttttcttatacttgtttgacattaaggtttccttattaaaacgtaatcggagtaaaaattatctttatctgataaagggatactaaagaaactatgtgacaattatgtgaagaaaatagaattaacttaccatttcgttactaacgaccgtgttccatagtacaaagtttcacaccacgaaatgtaattgtgaccactagaaatttcactggattcaaccagataacctttctgtaataacgtctgtttcatgcggcgattattatataaaataccttccaattccccgcgattggtttcaaataatcctgcctgtaaatagaaacgcagtggttttttctctgctttagcaaactcacggatcaaccattcaggcgcttctccctgaggagcccaccaatatgaaccagacatactgagaacattgccaaacaattcaggatgattaaatgccacccatgaagacgccaatccaccataactggaacctgaaataatggtacgctctgccggtgctttaataccctgagcagccagccacggtattaattcactcgccataaattcagcaaaattaggattaggtggtaattcctgacctcgacgtgcactatccaggctatcaataaacaccacatacataggtgggatcttgccctgttcaatcagggaatcgaaaaatctatcaatataatactgtttacggtaaatctgcccatcaaacagcaccaacatagcaggctgtttcatcggagtaaccggttgataaatcgcaatttctcgactgttacccaaaatcttactctcaagctgatgaagtttagtcgctccctgaaaaggcgattgcttaaattgtgcgatatcacatagagttggccttagtgccagcaatgaatcatggttaaacacatcctctgatacagccggcacaacctttttattcaatggatcggcctgtgccgtaatcaaaatcgatcgacgctgttcgtcagccgtgccttcgactcgcggtaaatccggtgccaatctatattgcatcaaggtatctgacggaacgatatagctgcgaaaccaaacatcagtaccaaccaaatgtgacatcggatcatgatcaccactcggtgcccccagaataaagacattcgcttttgcgccgcgccacaggaaagtgactcgcttatttttatcatcataatcttcaattaacggcgtacccttgcgggttatttcccgccagaaagcatgggtgccttttccttgtgcgatttcagtttgaagttgtttcagacgcaaactttctggctgctgccgataatcattatccttgggaatataagatggaaatgacaatgtaagctgccacggttcccctgttttgcccttggctgccaaccgatattttcctacctgaggaacggtaaagccaattgattgacgagcatccaccgggttatcagtaaatagcgtacgaatatgttgttgattacccttctgtaccaccaatttctgcatacccaatgccaatccacgtacataatgttcaggcagaatattaaactcaatacacgcttccctctgagaattaaaattcccagttattgtttgctgatcttgctgaaattttatttggtgacactgagaagcaaaggcattaaaggaagccataagagcacatatcattatgtttactttcatttttttctcttctttaattgttgattgttggtattcaatttttttgacacggcaaatcatgcactaaatttttatttaataataagaacaattactattattaatagaataaattgtatgctaactttcactaattacacgtaaatatgtcaaaacatttcagagaaatgattctttaacaagatgcgatagtttattagcagatatataaatggctcgatacgttgatataatattagtcaaaccatcccacatattaaaaaataaaatagaaaaacgggatataatctatcccgccacttcaaatttgataaaaataaaacaagttagttgcatctgaattaaatacagaactcaactaacatcaatagaatctaaaatccctcggctcatattcttagcaaaatcccaatcatattgatcatatagacgagacagagcaacataatgcgctcctgaataaaacatttcatattgagtatgacgtgatgcaaactcagaaccgatagcatcccacactaatttcagtaatttcacacgttcaatgggtggcagtagagttgaatattgtgttttttctattaagtcacggatttctggatttgctaaatcaatataatttgacggtaacataatcacaccaccaccagaaagttttctgatgctttctatcacctttggataagttgactgtaatgcaacctgacaagcatatagttgtaatcgattgggaatatagtactcattatgtcgatcaggattgctaattaaaccacgaaacagcccttcaatattagtggcatagcaagcaagctcagctaatgattcacgaacagcaggaaactcattgacgcctgtagtttcagtaagctgatgagccaaacccgttaagaaatgcagcttaacggcataccgagccataccctgaacatccattaaaacgtcagcgccagttgccagaaattgccggcgacacatatccgtatttttataaacaaaaactctttcccacggaacaaaaacatcgtcaaaataaatgactgcatcattctcatcaaactgatgcgctaaaggggaatcaaatttattactgcctgtttcataggattttctggaaagaatttttattcctttagtattcaacggtaatgcaaaagatagagcatatttatcatcaacgccctctttgagtggattaaacacgccaacaaccacttcctctgcaaggacagccgctgttcctaacatctttgccccgcgaacaattattccttgcggtttctcctccaatacaccaagagtatgaaagacgttttttatatgttcactgggcgttttggatcgatcaccttgtggattgactaatgtaaaagccaaataaatatctttatcacgggcatatgaatagtaattttttaatgcctcagccctatccttagaatattcctcaaagacttccaggtaagtcatcattccggtcagagcagcagaaacatgatctgggcttctacctaaccaaccacaactctgcattgcccaggcatacgccgcctcacctctggcaattaatttctctcgggtagtaggaagttcccaatataaaccaacgcgcttaccaccagatgtttcgaacgtcatctgatcagcatgtgctgcctgataatcataaagtgaagctacggttctaattgcattccgaaaagcagggtgatccacgtgattagtgatcttttctccattcagaaaaatagttcttccatcacgcaagctttcaatatattcctcaccagttctagacattaacaatttcctccgaaatatatccgttatctttcaaattgcctctttgttggctgcactctctcaccccggtcacatcgttctctatgctcccggggattcgctcccttgccgtcgcgatccatcttgaaatccattgggtatagaattgattttaggtaaatcgatcttcaaaggcatgacaattccttgccctattgtcgggcattgccatttaagggccggttgccggctccggtatcataatcccacgctgtactgcgggccttaaggcaatacgatcatgccaggcacttaaatattcatgatgactaaaatcaaagtcaataattctggcaatatgggtccagccaaaattagcaatatcagcaatggagtactcatctccggcgaaaaaggggcgatcactaagccgtttattcaacgtagagaaagcctcttccgttaagcgacgatatcgttgtatagccatatgatttttttcagttacaaataattcaaaatgaacccgttgtcccaatattggcccgacgctggaagaatgaaatgttagccatgtaatcgcttcccaacggcttttaaaatcctccggcaacagttgctgagttttcgatgccagataaagcagaatcgccgacgattcaaaaagggtcgtctcagtactttcatcaacaagtacgggtatacgcccgtgagggtttaattgtaaaaactcaagctccctattttcacccttttcaattcgtacatgctttaatgtgtatggcaatcccaactcttccaaagcaattgtgatcttatagccatttggtgaactatcagtgtataagtagatcatctctatacccgttatctttcaagttggctctttgttgactgcactctcttgccgtcgcgatgcctcttgaaatccatagggtatatatctcccctcaagacaaacgcttaataatttaactgctaaaatatcactcgcatttaaaatattactaataaagagccagcattcaatttctctctatacccgtcatctttcaagttgcctctttgttggctgcactctcaccccggtcacatagttatctatgctcccggggattcgctcccttgccgccgcgatccatcttgaaatccatagggtatataccgctaactaaatgaaaataacattaattctcagaaattgaaaatgaatatcacggtgttccttgctacacgcataaattacatttattgatttattgtgttgtcagtaaagaatgcgaacataaaagtacacaagaaaactatttatcttcttgtggatcaattaatcgtgaaaaaccgcaataacatatcacaatgactcagattggttccaagctaatgaacattctcccacgcaatcgtcagacaaattagattgctcaacaagccaatcaataatattaacaatttcaggtcggaacaaggtttctggcaatgtcaccgcataataagcaaatcgggaaggccattttttttccagtgcaacgttaagccgaccggaacgcaattcctcttcaacgcaaaattcaggcaccaatgctaaaccctgaccggttaaagcggcgcgagccagtaaaaaatcatcttcgaaactggagccctgtcttgctttcgccccttcattaattccgtgtgcttttaaccataaatgccaatcagatctatctgaatcctgtaacaaagggtaattcagacaatcttcaacatggtttatcggtggtcctgatcctaaaagttccggcgtacccacgggaattaataccggtgcaattaacctggtagatattaaacctgggtaattaccaagcccatgccgtacagcaatgtctgtagaacttctttttaggtctaccaattcattggaagcttctatattaacttcaatattaggatatttctcattaaaattttttagtctgggaatcagccacgatgcggcaaatgacgaagtggtatttatagagactttatgttcgaactgcattgctttaagagacttaatagatttgtcaatattatcaaacgaaagtaataacgtctcataaacccgatccgctttagccgtaagctttatacctttaggcgttcttaaaaacagcgcaaaaccaattctatcctccaaaatacgaatctgttgactgaccgccccaggagatacacccattgcagccgccgcagctttaacactgccccgtcgaccaacttcagtaaaagctctgagagctaacagaggcaaaatagaactcatattttattctccagtgtgcactgtatgtcctctatacccttggatttcaagatgcatcgcgacggcaagggagcaaatccccgggagcataaagaacgatgtgaccggggtgagtgagtgcagccaacaaagaggcaacttgaaaaatgacgagtatatatgacaaagatactaccatgccaattacagatatcaatatataaaactgaacttcaacacccatacgggaaaatggtaaatgtaaacagaataagacatgcaaatttagaaaaactacggttggcgtttaaataatatagctttaattcacttacttttaatgctagtttctcgataattattaataactgaaataattattcaagtcagctaaatgttaaaatagcattgaggatttattatgttcaattattcaaagcataagacgtataccaatttattcaaggagaacaaaatcagcatcggcatgtttttacctctcagagcgttaaatcaagaagctgatattaaacctgaaatcgatctcattcgtgaaatcgaacaacaaaacttttccgccatttggctaagagatatcccgctgttcgatcccaattttggcgatataggtcagggcttcgatccatttgtctatgccgcctggctagccgcattaaccagcaaaatcgccatcggtttcggcagtgccatatttacgctgcgacaccccatcgatttagccaagaaagcaacgtctattgatcaattatcaaatggccggttaatactgggtgtcgccgcaggagacagaatgtcagaattccctgcctataacataccttataatgaaaaagggatgcggtttgtcgaatcaatcaatatgttcagagcgctgttggataacaacaatcgcaccattaatagcccattaggttatattgatgggaatttacgcctaatacccaaggcggtcaatgattttatccccctgatagtcactgggcgtgggcaacaagatattaaatggatcgcggaaaattcggatggatggtttacctatcctattcaaacccataataaagagggcgtcgccaaactcggtaagaatattagcgaatttagacaaaatatcccaggaaatatgttcaaaccgcacttaactaatgaatggattgatttagttgaggataaatattatcccagaacccccacgaatggcggatttatcctgaaaaccggccgcctgggactgattgaattgttggaagagtggcaagaagtcggagttaatcacgccgctcttggtattcagtacggcaaaaggccccctaaagaggttattcaagaaatcggtgaagaagtattacctgcttttatctaaaaaaataaaaaaattattactaataaaagtttaaatatttaaggaattttacatgaaccaggtggaatacgatatcataggcgtaggatttgggccatccaatatttcattagcgataacactggaggaagaattaccccataaaaaagtgcttttctttgaaaaagagccatcatgcgaatggcaggccgggctgttattaacaaattccgatatccaaaaccaccctttacgggatcttgcgacaccaagaaaccccaaaagccactattcattcatcaattacctgtttgaaaataacaggttatttgaacatttaaacttgggattatattttccatatcgttatgaataccgcgactatatcaaatgggcggccaaacatttcgataaagtcgttcgctattcaacatcgataacatccgtgaaaattattgatcattatcatggggaaaatacactcattgaagtcaaaacagatggaggagaaacctatcaatgtaaaaacctgatagtcggaacaggaagaaccccctatattcctttatctctgcgacaacttgaccataaccatttaattcatggtgcagaatttaacaacattattagtcatatttccagtgggaaagtaaaaagtatcgcggtagtcggtggcagtcaatctgctatcgaaatcatgatatttttagcagacaaatttcctcaccttgaaattcacggtgtatcaaggaaatttggctaccgactgaaagatacctcgccatttacaggtgaagtttattttcctgaatttgtagacacatttttcaacagtaaagaggagcataaagcgagattaaaaagagatttaaatctgacaaactactctgcctccgatggtgatgttctcgatgaactttatcggactatctatagagataaatattttggtcagcataaaatcaaaattcataactctgcggatattgttgaatctagcgtgaaagattccattgtttcattacaaatagtaaaaaatcatgggttagaagaaacatatcaaatagatgtcgatatggttgtctccgccacaggttttaaagatattggcagggaggaatatcaggaaatctgtccacctcttctggcagaactctatccattaatgagtaaaaatagccataacgggatcatcatcaacagggattataagatagatctgattaatgctaccgatataggcatttatctaaacggattatgtgaatcttcacacggcttaggtgatgccggctcattgagtttagtttctattagatccaaacacattattgattctatcgaaaaaaatataaaaattaaaagatctattcataataaaaataaaatcgaggcttaaaatgaataaggttaatattcacaccacaataccaggtcccttttcaaaaatcgcattagcaaaacagctagagcaagaatcaagtgctgtgtcatatcctaaaagaattcagatttcgctagaaaaaggcaatggttgttatgttcaggatatcgacggtaatgtatttattgattttttatccggtgccggctctttacctctgggacactctcaccctgaattaattgccgaagtaaatgcacaagtatcaaaactctgtttgggcttggattttcccacgcctgccaaagaactttttaccgaagcgcatttaagtatgctacctgaaagcctgcgcaacaaatacaaaatacatttttgtgggccaacaggtgcggatgccattgaagcagccattaagctggcaaaaatagctaccggagctgacgaaattattagtttcaggggtggctatcatggatgtacccatgctgctattgccgttactggcaatagaagtatgaagaaaaatattctgggaaaaatgccgggcgtccattttttcccctatggctcagaatctcaatcttcggaaagttgggtactcaattcagatcatcttgatgccggattatatcttgaatccgccttaaatgatgcaaactctgggttaggaaatattgccgcaatcattctggagcttattcaaggtgaaggtggcgtttattctgcacaaaaatcattcgtagacagtattatccgtgtttcaaagacatattctattccggttattattgacgagatccaaaccggttgcggcaggaccggaacctggtatgcttttgaacagtacgcaattgagcctgatatatttgttacctcaaaaggtaccagtggaatagggttaccctcttcccttatgttctataagaaagatttcaataattggacatcaggtattcatattggcacatttagaggaaatcagttggcattcgcctcaggtacaaaagccattgaaataataaagcgtgataatttattagagaatgtcaaacagagatcaatacaaattaaaaagcatctcgccgcgttgaaaaataattttaacatcattggtgaaattcgtggtaaaggcttgatgctaggtgttgaaattcttaacgccagcacaggtaaagcatgtgaaataacagcaaaacatattcaaaaaatagcattaaataaaggattaataacagaattaggtggcagaaacgatacggtattacgtattcttccgccactcaatgtgagtagtgataccattgaagaagccatagagattcttcgaaatacatttcgagcctatatgaatgaatttcaacttttagaggaaggtgtatgatgaatattattcgtaaaatggattgggattcaatggttcatgaatatgatctggacggttcaagacttttaccgtgggaggggctaaatacgccatttggcggtgcatggtgtattgtacgaccagaaaccaaaagtttccgccattcccacaatgaatatgaattatttattgttatccaaggtaatgccattataagaataaatgacgaagatttccctgtcaccaaaggggatttaattattattccattagactctgaacatcatgtaataaataacaatcaggaagatttccacttttacacaatatggtgggacaaggaaagtacattgaactttcttacccgattagagcaggattaataatgaataaatacattgtcaccattacgccaccaacaccaaatggcgatctgcacgttggtcatatagcaggaccatttttaagtgcagatatatttactcgcactcagcgtttaaagggtaaaaagtgttatctgatatcctattcagatgattatcaatcttatttacagcgcaaagcagaagaaataggcataagtgcaccagcactggcaaaagagaattcgaaaaaaatacaggaatcattgatcttaattgatataaaactggatcattggctagagtcatacgataaccgctattttgaagatgccgtcaagatgctctatcactcttgtttggaccaaggcattattgcaccaaaggtgagtttagaaccttattgcgaaaaatgtgaaaaatggggctatgaagcctttgccagaggtgaatgtaatcattgtggtgaaagctcagatccaagccaatgtgaatcctgcgcaatggcaccggacgcatttgaaatgaaaaatttgcgctgtattttgtgcaatgaaaacgttgtttataaacatgttgagcgcaactttctattactgccggtaattgccgaaaaattaaaagagaaaattcttagttctcctatgaggccacaattaacagcatgggtcgaggaagtttttgcgcatggtataaaagagtggggcgtgactcgccccaatgaatcagggctgaaactctattctgatgaaaatcaccgtattcatacctggtttatgggattagccggatatttagcaacactgaaagagctttctgaaaaaaacgccgatacagagagtccttatgaccttatttatgatgataatacttgcatggtcaattttttaggtatggattgttcttacagccatattcttgcatacccggctcaaatattattgaacgacgaattacactttaaacatgctttctatactaactttttcttaaaattagatggaaaagatttttcaaccagccgcaatcatgcgatttgggtgaaagatatcgtcaaaaatgcctgttctgacagtgtcaggttctatgtctctctaatatcgccagaacacgcttctgaaaattttgtcgtagaagagttctggacatggcggaatcatatctttaattatctgctgcccaaaatatctgataatttggaaaaaatgaattctgataatattaccagccctatcgtattatcagaatcagaaacaaaaattatcgaaagatggcaaacctattccagatacgataatttttcgattaaggaaattgccgctgaattaatggagatgttagatttattaaacgcaaaattaaattacaatattttagacaagaatcttgctattttatttgcaattttgtctgaaccgataatacccaaaacatcccaaaaattaaaagaatatattactcaccatgatatagaggctttctgttcattgttaaatttatcaagaccaggtgtttgattatgcaaacagataaaaccatacgcattaccattataggagggggaatagttggcgcaacagttgctgcaaacttggcattgaaaggactcaatgtctccctcattgagcaagagactattggcggtaatggcgcgactaaattctccggtgcattattccgcgtacatgatcctgatccggaaattgccaggctcacacgaagaagtgtcgagctaatgcaagagagtcaggtaggaaaaatatttaaaaaaacgctcaaacagacaggtattatttatgccgccgaactcaatcagaaaaatattgaattagtcaaaacaagtatcagggattattgcgacagtctctatcctttagagctcatatccgccgaaaaagctttcgaattaaccaatggatgttattccaagcataacaaccgaattatcctttttgagcccaatggcggatttggctatattagacatacagcctcaaacttagcacaagttgttagagatacggggaatctagtattagagaataccaaagtacatgcaataacaaccgaaaatggtaaagccatcgttcaacttgctcactcaaccattgaagcagactatattgttttagccatcggtgcatggacaaaaacactggcatataaactgcccgttaatgctaaaagtatccctctggcaaatatccgtacctcctacagtacaaatatgccaattatagataccgaaactggcacgcatatcgtgccacttgctgaatatttctatcaagccggatctaagattagaaatgtggccgagacaccagaagatatagaatataatgataatattattgaaaacgatatcagcgaaaggctcctaaaatcaaaatttaaacatgagccaagcaatattctctctatcattaaaggatatgattcatatacaccagatgaacgccctattcttgactttatcgatgaagaaaagagatgttttgttgcggctggattctgtggtataggatataaaatcgctttagcggtgtctgagattattacattaaacctattgccaactgaactttcgactgattttctcaaacagaaaaatcagattttctcctattcacgatttacttattaagataaataaaatgaatagcaagcttatttgtggcatttccgccattttagatcctgagagatcggtacatgcattaactgtcatgcgtgctattgagatatttaaagatctacataacaatagcacactggaatttatcttcagtgaagattatggctcaattgaaggaggtgctaaagcagcacactataatattgagaacaatgtcgatatggtcataggtcatttttcaagtaacgcggcaataggtgcggcggaagtctactcacatcataacattcctgttctgttacctactgcaactgaaactaccttgaccataagaaatagcaatatattcagaatttgcttcaataataaaaatattgcccatgcacttactgtattaacaaaagaagatggagatcactattatgaaataaaaaccgatggctcaaaatatagtgataatctggcagaagatattcgcagaatgttgagcagagacgatgctgcggtaaaacccaatgacaataccgatcaaattatttttattggtactatcggtaaaagtgaaaaatttcttcatcattatttctctgaaaagaaaaatggaaaaattatccttactgatgatgctgcatgcaagcaacttaatttgccagaaaatgtggaaaatggacaaattaccggtatcggatttgctccagtcgaattcattaacccactggaatcctgtatccaacactatatccaacaataccagcaattccctaacatcttctttcttgaaacctttgccgcattggagattgcccatcaattagcgattcccgataaattattgcatcgtttgaatagagagacattccagacaatcctcggccatattaagttcattaaaggggaatgctcagccgctaaattatgtttatggatgaatgagaactccattatgaagccacgctatattttacccattaattcgagagcttaacaatgaatacaaataataaaaaatttatagatgtactcagcattggctttgggcccgcaggtatcgcattagcttgtatatttgatgagaaaaaaatcgaacaccagtatcaattgcaaaataatttcttagcacttgaaaaagcagattcttgtgcctggcatcctaatttattattgccaagcaccgatattaatcatcatgtttatcgggatttagtgacccccagaaacccacaaagtccttatagttttgccatgtatttgaaagaaaaaaatcgcctgtttaaatttggcttattaggtcgtccagcaagtcgctttgaatggtcagattacatgatctgggttggacaaaaactggaaaattatgtgcaatacaaaaaaaatgtgactcatatatatccggttatcaaccgtggattactggatggctttagtgtctccggggaagattttgagtatgttaccaatacgctgatattatccagcggatcaacgccatttacgccaaaaatgtttgataacttgttaggtgatcatgtttttcatacctctgcatatttagaaaaaataaataatttccaaaataacataccccgaagatggatggttattggttctggtcaaagtgccggcgaagtgattgctgacttaatcaataaaaaagatgatattgacattctttcactgcatcgttcaatcggctttaagatcgcgcaactaggccaattccccaatctggtattcttaccagaaaatatcgaatactttaaatctttaagcccggagaacaaaaaagtatttttcgaacacgttaaaagtacaaactattcaggcattgatattgatgagagccaatcgctattttcaacgatgtatgaagatgaagtcattggcaaagaacgtcttcacatgatggtcaattcagaaataattacgattgaccactctcacgaagaataccaaattgttattaaagatacatttactggtgaagagactaaccatatttgtgacgctatcgtgttaggcacgggatattatcaaaacccgctacctgatctactggcaaaattcgatcaatttttggtaaaagattttgaaggtgggcttaccatcgacagtgactataaagtgaaattaaaaaattgtggtaccgctcatctttatgtcaatggcctttcagaacgaactcatggtattagcgatgctcaatctttttccgcagtcgcgataagagcagaaagaatatatgagtctattaaagcgaataccggaacgactgatgattacgctatttaatttttacaggaggagatcaatcaaatgatagacacaaatgacagatgggatatcagcaaggaaatcatctcttcactatttcctgagatacatcaacgtaatgatattattgaattcataaagaattcagttaacaatcacattgctgagttgccgacaatgggagttaatccttcactttccaaaactgatatttcccacgctttatcaaaatacacctttgatggcaatttttcgccaacagatgttttaaatgatgtattacatcttatggaaaaaggaattgttcatgtcaccagcccgcattattttgggctatttaatccatcatcaactttctggggtattatttctgacttcattactgcgctatataacccacaattagcggtctggagtcacgccccggcctgcgttgaaatagaggaaaaattaattaaatattttggtggcctggcagggtttaatgctgataatagcggaggcacatttactaccggtggtgcagaagcaaattgtactgcgcttatttgcgccctgacaaaacattttcccgattatgcccaacagggtttacagtcaataaatgggcaacctattttttatatctcttcagatagccatcttgcctggttaaaaatagcattacaatctggtttgggacacagtgctgtcagattaatagcggttgatcatacaggaagaatggatatttcaggtttaacccgagctattgataatgatatagcgaacggcaataaacctttcatgattgttgggaccgctggaacgacaaatgcaggtattatcgatccgctgccagagcttgccgctgtggcaaataaatatcaactgttcttccatattgatgcagcatgggcaggcgcaatcctgttaagtgatcaatattctcatcatctcaagggtattgaacaggctgattccattaccattgacgcccataaatggctttctgccccaatgggtactggcatgtttatatgtgcagataaacatattctgacaacaccttttgctgtttccaccaattatatgccggttagtgatgatattaattccgatccctacattcactccattcagtggtctcgacgttttaacggattaaaactatttatgcctctggcaattcttggccgaacgggatttagcaatatgattgattatcagatcaatcttgctgattatttaagatcacaactggcgaaaaatgattggcagatattgaatccctctgctttgcctgttatttgtatccgtgataatggagattttgatgttaataaaattttagagaaagtattagagattaatcaatgctggatctcaataaccacctttgccaatacaaaagccctgcgcctttgtatatccagttttagatccagcaaatcagatattgatcagcttgtcgatactttaaatatggcgcgaaattctgtgccaatgtaaatatctattttcgctcacatcaccaccgacaactcttgaataaagagcggtggttttttttaagtctaatttgcgatccacactatgttcactgaaataggaaaacaggttatacccgttatccttcaagttgcctctttgttggctgcgctcactcaccccggtcacatagttatctatgctcccggggattcgctcccttgccgtcgcgatgcatcttgaaatccattgggtatatactgcttttcgcccgatatctccacccgaattaggccaagatttacagtgaattttactaacaataaccaatatctgtgtaaatgcgttcaccaatcagacaatttagttcagctcattcagaacagataaagccgtctgccggaaacaatcgtaagcttctgcccaaggtattctactatgttcaaagaccattgggatcacaagttgttgataacgttgctgatagatgggattacttcccaactcttccaatccagctctcagttcattaatcgacgaaatctgaaactgaggatactggcggccatagcgctgaatatcctgttcaatagtttgttgtacaaaaccagcaagttgacggatatccactcctattgcattcacaatgcagtagttatcatgcagatgacgaaccagtgactcgtcatcctttctatcaatattacgcataaacacagcagtccgtctcagcatagctaccagcttttcagcttgagtgctgataatcgtcgtgcaggggaacgcttcaaccgcccgaccttttcctgttagttgcgtgacaaatgaacgaatatcgcgccgttctgccgcttgcagcaaatcagactccatcaactccagtttgataaatggcctgaggtagggaacctgtacaacacgttggggatagcggaccgaaatatcattgtagcgatattcatcccgtgtgatcttagggttgctatcgtcaatccccaaaaaaccagatgctgcaatagtcgctgatatcgtctgaacaatatcctttctgatatttttgcgctgagatcgggagtactgaacacccaccaaaaattcaggctgtggaaccagtttgatatccacatcttccgacatccgatcaagtgaaattccggcttttgccaacgctgttccaccagcaaataccagtttatgggtatcaaacgctaaaggctgtagcagacgaagcagttcaacaacatagtaatctttttccacaatagaaatagtaccgatacctagtacatcggcaacatctgcaaataaacctgataaatcatccatttaaccggctattccccaccgataacacccgtttaaaacggaatgtggttttaatttgggtataagcgggaatctgtgttgatttaccgtcagtataggcagcagaagctccatccaaatggtatttcacctttaaacgctctaacgcttcaagaataaccgcatcagagcctcccggagaagcaggcattattttcccagtaacgctatttttccgagccttggtgtaaacaccgtatcccactttcagcaattgaccttctttgaccaaaccgcgcagtatccttcctacctgatcgtaaccagcaatatctttaaagtcgtcacgaatgaacacataacgttttgatcgcttcaaacgcgcctgaatacgctctttaataatcatggggctctccagaaattatgatcgacaagcgtagcaaacatacgacatttttactagcaaacaaacgacatccaacactgtaaaatattagatcttttccatgagttgactaaacatcagcaacgaactgagcaacaaataacgctgctcagaagtcaaacgcaaataacgacgactggccggcaatcggctgacaatctcagaagcagcaaaatgttccacctcaagttgccattgcccttgatgaatattcaataccagatcccggaaatccagctctgctaatgtttctccaattaatggatattgattgagtaaatcaataatctgttgcccatattctgcaccatgataacagtaataagtcacggtttttcgccgaaatatcccctttatcttggctttaataacgattttttccttgagtgaagtcattccctgcaaacgaaaacaacaactgacaatataggccagaaacagcgtcttcggcttttcacaaacgtcaatctgcaatccatcaggtaacgtcacttgcaaactttccgctgataaacgctcacaacagtaaggcgataaattctgttccaaccggtttagcgttatacctgcctgatagccagtaggatagcggggtttatttaaccgccgccaaataccctcaattaagagaacgaagtggctcaagctgtacctccggcaattcacccttagtgaaagtatgtgaaagtacctgctcaacgggtacgggtttaaacggattcacccgttgtacacagagcgtccaaaacagggcatagctagcggtcagacccaacatgatggcgaatggaatgtacacatcaccgggattcattcccggaggtgtaatgtgaataatcgccaaaataattcctacactagagacaatttgaggtaatgggaaaaaaggggatttataagcacgatgtaaatcaggtctgcgaatacgcagtaatatcacagaacatgtcaccagcaaataagcgacacaccaggcacataccgctgccagcaccaaaggcataatccgactcaaatcaccttgaataataaaggcatgtaagcaggggatcattaccgcaaccaaaatcccaaatattggcgttttaaaacgtggatgtagataagcaaaaatacgcggtaacgcaccatccaatgccataccatagagaatacgtgggaccgccgccatcagggtattaatcgttgccgctcccgccaataataacccgataccaatccaatatttaccaaaatcccccatcacctggctagcaaaagcaggaatggccattggcgtttctagcaagcgaacattattttctacatccaccaacacattttctacctgatgactgattgacgccccatatagacccatacagaaagccaccccacacaggcccgtcatcattgctcgcggcaaaactttggcagaatttttaatttccggtgccattggcgtcactagttcacaaccgacaaacataaacatcgccatacctaccagactcagcactgccaagggatcgcttacattaagcccctcaccaaaccaactctccagcggcacagcaaatggcattaataatccgcaaatactgaaaataaccaaagtactccacatgcagaatgtcagcacaatttcgactttaccgaacgcttcaatacccaacgcattcagtaatccgaacgtaataacgagcccaacaccgaccatccatgaagcgttatgactttccaccatcgtattaaggctgtcaaaattcactaatgccataataccagagaggatcgtttctgccgtacccgcaaaaatatgaacaatcaaatacgccgaaagtgcgccagtaattgcccagaaccgccccatgccacaagaaatatagtcataaacagagccggaagtaggcaaaatagcggctgcctccgcaaacgtcgtcacttgggcctgcatcatgataaaactgatcaacattgccagtacgaaagtgtcaccgccaatcccaaagccactggtcacggtcaaaataaccgggctcgccatgatcaccccgatggaacttgccagtgcggtaggaaatcccaccactcccttttcaatatgcgaagtcagtcgtgttgacatattcatttatcttcccttttacttccggtcgtagaaataacgctcacagcgatttacttgtgaattttttgtacaatttattgaggataaatacactatagaaagtgaaacggaataccgactatcgtcctgaagaacgatacctaaagggggattcatagccgaaaagctgtgacgaaaaacaccagaaaaaaacaaaaatcaaaaataatcacttaaatatcaatcaataaaaaacagattacttaataagtgcattaagaaattatttcagatatataccaaaacctctattcttaacaggtgatcatcacggtgagaaatttcatttattgcaatctatatcacgttattaatatgtttattttgtgttgattttgcattttaactagcattcgattaatcttcattattgatttatccagttagatattattctatatcctatgaatttcaagatgcatcgcggcggctagggagcgaatccccgggagcatagataacgatgtgaccggggtgagagagcgcagccaacaaagaggcaacttgaaagataacgggtataaagggagaacttccttgtctactgtactaccgaatagccgtgaaaatgctttaatctacagttgcttaaataccattgcacatctggttcctatctcagccgcagcattctatctggtgaataatgaattacgccctgaaaattacattctgtacggcatctcagacgaaacccaccagaattatctggctcattttcagcatttagatccattaaaaccagctaattatcaacaaggtgatattaatatggttggcatggatcagaaaatactgacgaaacataataaatattaccatgaatttatgcagccaaataatatacaggacatcgccgaaatatttatccgtcaacacaaccaaattattgccggcgtctctttattacgagataccctatttacaccaaaagactttaaccgcctcagtgctattctgccattaattgaattagctgtcagagatttgcttcctgaaacaccaactattctgacagctaaagagcaagaaattattaatttaataagagaaggatcaagtaacaaacgtattgcacagatacttaatatttccctgtctaccgtcaaaacccacctgcgcaatatttttgccaaaacaaaagtgactaaccgtactgaactcgtttccagtgggtttattactcggtatttgtgattggtaggatttgataaattatctgcaacaataacccagttaaatggctttccaaagaatgttattacaccatctgctatgcactgagcggcaactgggtaaacaagactactccggcaacagagccagttcaatgagattaagttacggtagatcataatcaagccggaagatcgtgaggatattccggctcttaactttattcttcgatagtgaacatattaattatttcatctttagatttattatatggaggtatcccgatggctgacacccaccagttgagcatgttcattgtagtgatagcgacagagcagtacacggttgccgttatacaatacctgccagacggcggtcaggcgggggaagagagatgcgctcagtgttatttgatcaaaccggaaaatcacagagatcttccggcttttatatattaacccgaattctgcttaagccgtcattaaaatatctttctctgagtagaaaattttcagtgatggctttttcaatttaaggctgtaagcaatcaatccacctaaaacacacaacagaaagccttttatacttcggtggcgcgagtgctcaatttgagaaatggtctttaattgcccgttaatcgtttcgatgataaatctcttttttaacattaagttattccactcagacagcgcttgtgctttcatattacggcgtttcttcgtgatgaaagtcacaccgattttggctaaatcatcggccagttcctgactgagataacctttatcaccgtaaagataacccgttaacgattttgataattcgcgtacaggctctcgatcattcacattaccgggagtcacttttagcgcgagaatttcgccctgatggttaacaaccaagtgtaatttgaagccgtaaaaccagcccattgatgtttttccgcgctgggctattcccttaaaaaccttatgacgcgggatacggatgttatgacagacgcacaaactcgtggaatcaataaaagcaatcttggtcggttttccttttaattgagtcagataactacatagtgggaccaaaacggaaggggcaacactgacaaaacgggtataactgagcagggtggggaaatctttgtggtgatatttccaaatatgttccagataaaaatgtttaaaatcacggtaatgcgccatatgaaaaaggatcaaaatagtcatgatttcactggggtgcatatggccttgccgatgacgctggcggtaccctttttcgaaacaaaataattcccattgaggaatgaagaagcggcaaaaatcatcgacatcgcagaaaatttcaactaacttgttcatagcctgttcctccccggagctgtttcggcgtgcaccaaaacattgctcctggaacaggcttcatgtcaatttcttatccagaattcgggttatattatctatttatcgtagcggtaccggtaaacgactggtcaagggccttaattgctctctgtcatcccacagtcccggaaacacctcgaatttcaggtcatcacggttaataccggtatcaaaataacgacacagacgttctgctaactcttcatgtgaccacatattggttagttcatatttttcaatgagttcccgatcgtttggtaaggttaagtcttcttttaatacgggtgccagtgtggttccgatattaccctcaggaccgatatcaatcagtttaccgcccataaataaaaaagagtttttacctccaggataatgatcaccatcgaatgaagaataaggctttatccagtaattattataggattgagtattaggaataactgatttatccttaattttatctggcatcaatttataaacagcattgacaactaaaatccgaaataaagtaggcacttgatttaaatcaatatttttccagactccatctgtattacagatatcataaaactgcatttctacactattaagcatctgtccaatggtatacagattatccctcagtttaatattaaccagatggttatgcttccagacaattcgtttcaccattgatcaaaacagccgtcagcaacggctgcctcctttgccgttgcgtttagttgtttgccctagatgttcgtccgccgcagccagataatcagtccggcgggtattgtttggtcccactggattttgtttattagctgtaccctcaagaccacccagattttcaaatcgccgttgttctaatccacgagcagtatctttacctgcttgagaataaccttcatagataacttcaggtggtttaccaccaaagcgaccaaaaccgttaccatatcgatatttcaatatctcttgggctgcctgtcgcccctgcttactggcatagcccacatacggtttgccagtttcagcatcaataccctgataagtgatatgcgttgccgttttaggattgcccgcccaacctaaaggatcaatccaagtcaccggattcggcgcatactgatataagttcagtccgccttttagcccgatcggatcgggtgtgataaaccggccaatctccggcgcataataccgatacgtattaaaatgcagccccatatctaaacttcagttagcgccggcttgccgtggctatgcacctcggtaaatcatgaataaggccggaagatcataaagatcttccggtttgcggcttaatctagaaaatcatcgtatacaagataatgtatcactgcttcaattaaatcttctttaatcgcattaggattgtgttccagtttgttatcgataatatctgcaaacatggggcattctagaaatgttccatgagtttcatccatatcaaactcttcatcatcattttcagccagataataatttttatttaaaatatcttgggtagattctgtatcaaaatctttatcaatataaatccaaccaacatcaggcagttgtttataaagactaagtaactgatcgaaaccactaattgttttcatataataactccattacttgcggcatttattcccacctccccatttatctctaccacctgacccatcaggatgataaatcttgtgataggacttatggtcatatcggtcaaccagacttaatttccctggctgattctcatgatgccaagtcatattctttggtgaagtccctctaaagttccctttagaatttggctgaacatgttccaccactcccggatatttagtctgcatttcacgtctgaatgccggatcgcgctgcattctttcgtacacagattggttgccccgtttaaagtgctgaccatcagataattgatattccgatgaattcagggtgtgttcatggaagacatggtacttccctaaaccccgttgtccctcacccttgtataacccccacggatcgatccaactcattgggttaggcgcgtaagtatataagtttaatccacctgctaatccaatggggtcaggtgtgataaaccggccaatctctggggcgtaataccgatacgtattaaaatgcagccccgtctctttgtcaaaatattgccctgcataacgcaggttttgcttgaaatcatggaatgaacgatcagtatcgacaaaataggccagcgccagaccactaattttacccaaggcatcgtatttccccgaccacacgatttttcccgcctcattcgtgacttccagtggcgcgccattaatatcggtgtgataccaaaaatactcacgcacggtccctcttgattcaatacacgccagcggggtgtagctgtcatgagattcataacagtaggtttgcctcttaccggtttttaactcatgatcctgcaacaacctcaaaccatgccagacaaaatccgtttgttcataacgtgcctgtccaccaatcccggttttcaccaccttactgatacggcgtccaagcgcatcatagtgatagacaaccttcatactcagctcttccactgtcgtcagtcggttgtcgccatcgtaccggtaacgctgcccctgcatatttttacggctaatcacgttgccatgttcatcatgctcgtactgccagttgttccattgacttaatctgtctcccgggggagtaaggctccctaccggctgcctctctctctgtgattgcgggtgttcaagcagattatccgccccgtcataccagaacatttcctgataactatccgtgctatctacgcttttcaaacggccttctaaatcataggagtaattcaccctccccaagtaatgatcttcccttaggaacagctcatcctgaatgtcataatgccacgcccgccagggtttaccctgccagatttccggttttatatccgtctgaacgttagcctgcggcacactgtactggctgatacaacgactcaacggatcatagcggcgatactggaataaggccccctgtgtgcgacaggtttcccggtgcaaggcatcacgttcaaattccgttatcagttgctggttgtaacgaacagcgctgagatgaccggaaccataatagagccagtgcaacgtctctccctgcggtaaggtcagttccgtcaggttatctaattcgtcataaccaaactggaggatattttcaccattttgttcccgggttacccgccccaaagcatcgtattcaaaacacaccgtattcggcagaatatccagtttttttccaacttcattgggctggcgctctgcctgtcgcagccgccccaagctgtcccattgatattgatagttatcagtatacgtttcccgctgaataagatttccagcgccatcataacggtggtgtacccgacgctccgggtacttaaacactctatcacccatgcgtctttcggtactgagtaatccagcggcgttgtattcataataaatcagggtttcatccggccgaatttcttccgttaaccaaccttcagcatcacgggtcaggatgtaactgtcaccattggcattgtcaattttgaccaaatatccttcgggagtgtaatgataacggatttgccgctgtaaacggtcggtagtacaaaccacctgccccaatacattatattcccagtaacgggcttcgttttcgttacgctggtaactcaacagttgaccggcgctatcccaagtcattcgttcagtagaatcatcaggataggtaacctgtgttagttgtccatcatcgtgataatgatagctggtcgtttccagcaaggcattggtaaagcgactgacacggtattgcatatcataaccccactcactggcctggcccgaacagtcggttcgccgaataagctgcccctgatcgttccacataaaacggctctctccgccccgggcatcgatacgcaggtaaggacgcaaggtctgattgtgaccataacagtaacgggtagtctgtttcagtggcgtggtttcactcactaatcgaccacggtcatcatactcaaaaacactctggcagccatccggccacaaaataaacgtcacccgatcagtgtcattttgatactgccagcccgtctgatgaccattgccgtcagtaaaactcaaccgtcgtcccagagtatcccactcacaccgtcgcgtgttaccatcggcatctcgatagcctgtcggtaagccaaattcatcccataacagatggtgctccacgcccgcacggtccatacagtgaataatctgatgctcttcgttgagtgtccagaccgtcgttgtaccgtcataccattgcgcagtacgaacacggtgttcctcatcataatgcagacggtaacccgctccctcgctggtctgctgtgaaatcacccgccacagcgcttcttccgtttgctcccattggtagtcacagcgtaacccacgtgcatcctgatgccatgccagtaatcccccttcatgccagccaaactggcgcttaagatggtcatcccgatggctgacacccaccagttgagcatgttcattgtagtgatagcgacagagcagtacacggctgccgttatacaatacctgccagacggtggtcaggcgggaaacggatttgccgccaagttcaatgagaagatagtcacaatgcaggtttaatttaccactgccagtaatattcaccatctgctgcaattcgttgtaatggaatacctgttcattaccgacgttatcactaatacggctcagccggctggtactatcagctccaaattcaggataatgataaatatgttcactggcatcacgaatttcccaagtgtcttctggggtatgcatcagccagctttgtgcttccgggcagaaacagcgatagccgatgggcacatcaggaaaagggataatttcacccagtggtgaacgccataatattccctcttcaatagacgtaagcgtgctttcccaagacaggctccagctacgccctaacacactgtcatagtcataactactcaggtacgaacgctgccaatacagcggcaattctccttcaatgataaagtccagttcgtcgtcgtcattaagaaatttctgtccggctaccacttctactggattcatcaggatacccactactgacgcaccaatagccaacggactcaggcggcacagtatcctgccaattttccccgcgccagggattttactaaacaatttctttacagcactggggccgttagccgctgccccgccaaaactaataagcccagccgccaatatcgtgaggtcagacacctgatacgcccaatgcggcacttctggcgtcaccgcttcggtaggcttcgtgccgccgccgataaaaacattcggagaaccggtcatgactaccgcatcacacgtagtcttatccccgacccgtgctaatgggtaaccattaacaaaaacagaactggagccttcagccatctggcgcgtgccatccttgtcacacccaacctgactataggttgcgatagccgccggtttgccattgataaatacattagaggaaccacgggtaattgttccacagggacttcgcgacgctgcccccgatttggtacagttatctcgggccatttcccccagatggcttgccaacatcccaaccgcaacagacaggccaataagtagaatacctacccccaagcaggaggacgcaatacccgcagcaaacagcgctccacctacaataccgccaattgcagagatagctgctcctaaaatcgtcccaccaatcaatccagctaaagcgccagaatggcctattgtatcacccaaccgtgccgcttctggcatggcgatatccccttatcaaaaaaatcagtgtggtaattgaaaactcttcagacaaccatccagccattggcgctctgactcagatagggcctgatgtgccgacagagtgaaaatcagcgccttacggtcatctaatagaaacaccgcctgatattgataaacttgttgctcttttttgggacgataacgggaaaacagcgcggtgccggataacaggttgtcaccaagaaccgcaggctgttcgtcaagtaattgccaatctcgcaatcctttttttagtaactctttttgacgaaccaagtagtcggtcaggctttcaccttcatccaaactatcacgggaaatgttcaatgcaggggcattaggggctgtaatgatgttgacggtttgctcttgataaccttctggtagggtaatgctgccttcactaaaccgacaacggagatgattatccatctatttttacctccgtcatcaccatagtattattagttaaaaccaccatgattaagtattctcgtataaatgaaatatccttattggaagcaccagagtcgttaattcctattaatcaacaagctaatttacgaataaaaatctatcaatctttttaacatatcaataactataaaacaaattataccctatggatttcaagaggcatcttgaaatccatagggtatatacggacttctgtatcatcaataatctgaaagaaaacgacatagcgaccataagcgctgcttctgacccctttcccgagctcaggtctttccctataaattgcgggtgcttccgctaataacaagcattgctggtataactctttggtaaagctgagcgctcttacaggattatcttgtgcaatccaatcgccgatttcttcaaggtcgtgttctgccagaggcgaaatactcagtttcatttaccctgactaccttcggccatgttcttgtatttttgcgtaaggcggtcaaaaacatctcccgcatctcgactttcaccgctttggatgccagccattatagcgcttttgagtgattcaacttttacttgctgctctcgctcttctaacgcacgaagaccggcgcgaatgacttcgcttgtattgttataacggccgctatcaatctgattgcggataaatgcttcaaaataagggcttagtgctacacttgtcggcatagtcatgcctccactgtttttaatatctattaataactattagtataatttagaggcatcatttcggcaatattttgacaggcaagagacttaattatttcccgatattggtgatttcacctcatgttgacaaaataccaggcgaaaagctcagaatgagtcaaatgacattgctatttgcctcatttgatgagtagaataaaagccttatttgactcacaggtgaagcaaagccaatgtggatatgggaacaaccgaactggccgaaattccattggaatgccgatactattgcaccattactgcgagatgtgcacttcaaccaaggattgttattaggcaaatctgattatgaagacaccaagcaggcaacgcttgatagccttctatctagcatactctattcaagtgaaattgaaggcgaaagattgaatgcggcttcgatacgttcatcattggcaaacagactaggcattacggaagaaaaaccttatccaatcatagagaagagtgacggcattacagaggttgcccttgatgtgatagaaaatagccactccgatttaacccttgagcgtatcctcagatggcatcagttgatattccctgaaggttataccatgttcaatccgatacaaggaggtaaattacgcaaagggatgatagaagtgatatccggtcgtttagataagccaaccgttcaccttgaagcgccaccgccagaaagaatggtcgacgaaatgccccaatttatagagtggttcaaccaatcccgaacagatgccagtctcgatcccatcatcagagcagcaattgttcatttatggtttgtaacaattcaccctttagaagacggaaacgggcgcattactcgatttctaacagaccttgcacttgctcaagccgaaaaccgctcaatccgtttctatgcaatgtcggtaagtatttgtcatcatcgtaaggcgtattacgaactccttgaaaatactcaacgtggcggcttggatattactgattggttggtttggtttctgaaaatattgaatgagaccttaataaacaaactgcaagaaattaatcaggttgtgcaaaaagctaagttttggcagcgaatagaccagactcaacttaccgcagagcaaactaaggtgctaaaccgtatgctggacggccattttgagcaaggcattagcagcagccaatatcaaaaggtggcgaaggtaagtcgcgccactgcaaccagacacttggcacatttggttgagctaaattgtttagaaagcaccggggccggtggtcgtagcactcgttacgttattaatcacaaaggttgaatcaatgccagtgatgaccttaggtttgacaatggcccctttcaatcaaggggccttgcttattttgatccgaatatcaaatcaatagcgaaccatcacggatttcaattcagtatagtgctcaataaaggcgctaccgaattcacgacctatacctgaggatttggtaccaccaaatggtaatgccggatcgaggaatgtatgcatattaacccaaacagttcctgcttcgatacgtgggatcatgcgcatggctttgctgagatcattggtccacaaactcgccgctaaaccaaacggagtgctattcatcaagccaatcagctcttcctcatcgttatagctgaggaaagtcccaacaggaccaaatgtctcttccttcatcaatgaatcttcagggctgttagcacgaatcacggttggtgccacaaagaaacccggtccggccagagcatgaccaccgtaaacaatctcactgccttcttgacgcgcttgctcaaacagggacaagatcttgtcatagtgtgctttgtttgccaacggacccatttctgttgagtcatccagaggcgagccaattttcattgccgcgagtctttcagacaacaatttcagcacatcatccatatggcttgcgggaatatagaaacgttccgctgccgcacaaatctgcccttgattgagataaccggcttccagaataccatcgacaattttttcaacagacatgtccgctaaaaacgccgcaccgttcttgccacccaattccaacgtggcgcgagtcaatccctgttccattgctgatttaccaacagcaatacccgttggcaccgatccggtgaaagtcaccttggcgcataacggatgacctatcagtgcaggcccaagcaccgaaccggaaccattaatcacattaatgacaccatcaggaatacccgcttgtttggctaattcagccactctgagcatggtcaacggggtgtattcactgggtttcaacacaatggtacagccgcaagtcagtgcagccgccattttccagatggcaatcatgatggagaaattccacggaataatccctaccacaacaccaatcggctcgcgacgggtaaacgccgtgtattgttcacccttaaaagagggcaaagagacattcaaggtttcgccactgatcttacttgaccatccggcaaaataacgcaggaattgagcagaagaatcaatttccagcatacgggataactggatggttttaccggagcaaagggtttctaactgcgccaactcttcccgatgtgccagtaatagatctgccagacgattcaggcaatgaccgcgctccatcggtgaagtttgggcccataccccatgaaatgccgcctgtgccgcttgcatagcagcattaacttccgctttaccgccttgattaacagttgcaatgatttcatcagtcgcaggatttatgacagaaaatgtttcactcccctgaccactgactggctgaccattaatataatgcccatgattgtgttgcaaaaaggccatcactggctgtaataagtttatatcactcattatttacctctataaaatatacccgttatctttcaagttgcctctttgttggccgcactcactcaccccggtcacatcgttatctatgctcccggggattcgctcccttgccgtcgcgatccatcttgaaatccattgggtataagtgttttttaacctttattacaagccagataatgcttcacaaaacggtcagcggtgatttcccacagtacttccgttcctttcggcgcaaaccaggaatctcccggatgatattcaacggtttcaccgctcttcacgtcggtcaattttaccgagccttctgtcacggttgcgtgctcatcaaacggatacaccatactgaacttgccatgagtacaagcgaaaataccacatgtcaggttatccgttggttcaccaaatatcagtgccatactggcctgcggatcgccttccaacacagtcgctcccagattgcttacgctaccaatgtccaataattcaggcagggatttgttcagtaaaagtgatttaatcataatgttctcgctccaaataaaataatttatgaatttcccaatgaatactattgatatcaataaattaacggcgacctttccaataccctgacgtttgatgccaaattttgcccgctgataccatcagatgtcgcaacttatctttgccaataatattcgcatgaggaattgaactcatcaggtcataacgttcagatccttcactcatcccttcagccaacactttacaaacgatatggcttggagtgaccccaaaaccggaatatccctgcacatagaacacattattgtgctgcggcaaagagccaatctgtgggaacaagtttgcactgcaacacaacggccctccccatgccagttcaactttcacatctttcaaataagggaaaactttcagcatcaagtggcggttccaggctttcaaatcagatgggatatgctcaatgaaaggggttgcactaccgaacaagagacggttttctttcgtcacacggaagtaatcaataaccggacgaatatcactgtatgcaccgcgaatcgggctgattttctcaatcaaatcgtccggcaacacttccgtcattaattggaaggcataagtgttaaccacctttttataaatatatggctcaagaccactattaagaaaggcgttacaggcccacagcattttattagcacgaaccgatcccatcgcggtacgaaccgttactctaggaccatattcaatattcagtacctggctgttctcaaagagctttacgcccaaatctgtcgcagcctttgcctctcctaacaacaggtttagggaatgaacatgccctccccccatatgcttcaacacgcaagtataagcatcagaaccaatcacctttttcacatcagcgccggtgtaaagctcaatctcttcatcaggagaaaccgccttaaaatcttgcaaccagctacgtaacgtcttttcctgcctcttattcatgccaagatagccataaccacggcagagatccgcatcaatattatatttagcgatacgatcacgaatgatgccagcacccagattgctgatctgaaagatcgtttctaaccctcgctcaccaatatggcgtttgatcacctccagatcatgaccgatacccgccataacctgaccaccattacgacctgtactgccatagccaagatgacggctttccaagatcgcaatattagtgatacctttttccgccagttcaagggcagtattgataccggaaaatccaccgccgataatcacgacgtctacatccagatcttcttgtaatgcgggaaaacgaagatcatatttcttggtcgcagcgtaataagttaatgaatcaagatgattgttcatgtgatagcccgttatctttcaagttgcctctttgttggctgcactctctcaccccggtcacatcattcgctatgctcccggagattcgctcccttgtcgtctcgatacatcttgaaatccatagggtatagcccgattagcatccaacataatcacccgattatctgtagcgcagagtcacatcgccatgtccccttagggatatttgcaacacagttttagcatttgtgacttaggcaaaataacggacaggaggcatcataaacaggctaaaaagttctgcttgtgatctgatttgtaacttttgataaatatttttccgatggtttttcaccgtccccgtactgataaaaagtttctcggcaatctgtggtgaacctttaccttgcaatatcaactccacaatctcacattctctcggagtcaaggcataacgagtctgagtatccagacaaaccatctcagcagcaggtggttgctgagtcatatcatcatgtaatcgcgccacactgcggataatttccagtacagttttcaggtttttccaatgtggtttctggatgaaaaatggctgattttccttaccaaaaaacaggccaagctgcctctggggggagagcttcaataacacccccgtttcatcctgccaaccggtcttacgataaaaattcagataataatcagtatgataaaaccctgaagggacaagttcccgtaaggtaaatagatcagtgccagccccatctatcaaggcttgatagaatggatcttgcagataagcaccctgttgataaatctgatttattgcatcgctgtttttcttctcagttttgctcaaacaacgcggaggagaaccttgctcgaaggcatagacaatggcgttatcaaaagtaataaattgctccaaccaagtcagtaaattaggataaaattcactggttgccaccgactcaatcactgttgataatctatctacatgaatatccattcaagccctcgcaattattcacaaattaataataaatccgaagcagatatagcccgccaattccatagcgaacctatataaaaatcacactaaaactagctccacaactcaactatcgtttatgtgttaatcaaatcacaattatgaaacattttactaattatttatgagagcactcacccagatctaagattttgtcacggaatagacgttttaactggattatgctcattttttatatcactttctctagcaaggagtaaaaatgaccaccaaaaaaattattcttgattgcgatccgggacatgatgatgccattgcgatgttattggcgcatggcaaccctaatattgagctattagccgtcacgacggttgtcgggaatcagacactggataaagtcactcgcaatgcgctggcgatagcgcatattgccggtattaccggcgtgccctttgcctcaggctgtcatcggccactcgttcgcgatatcgaaacggcatcggatattcacggcgaatctggtctgggtggcgtgaagttgcctaaacactcccgaacacttgatccccgccacgcaacggatctgatcattgataccatcatgtctcacccgcccaaaacggtgactttagtccccgttggcagcttaaccaatattgctctcgccgtccgtaaagcaccgcagatcgttgagcgggtaaaagaagtggtattaatggggggtggatatcacaccggcaacagaagtgcagtggcagaattcaatatcaaaaccgatccggaagccgcacatattgttttcaatgaaaaatggccgctgaccatggtcggtcttgatctgacacatcaagctcgcgccacaccagaaatcaccaaagcaatttcacgtatcaataccaaagtgtctcggtttgtcgtagaactactggattactatggtcaacgttatcaagagagacatggtttcaactgcccgccaatacatgatccttgtgccgtcgcctatgttattgatcctacagtgatgacaacgcaaaaagtccccgtcaatattgaactgaacggtaccttaaccgtaggaatgacagtggcggatttccgttacccgccaacagaagattgccatacccaagttgctgtcaaactcgatcaacagcgattctggcaattgattattgatgcattgaaaaacatcggcgatacctgcgattaagatggaaaataaccacaggtagggaacgattattaaagccgttattttcactcttaaacggcttttaacaccgctcgaagtcgcggataacgacgagccaaacgccaacgcaatctaaatccacgggcatttttccagatcattgaccaaataccgcgctcaaacaattcatgaacgatttgttgttttatcgtagaggattctatctcattaatggtatgcaaaatccctagcccctctttcgcaatttgccaatgacatgccggcacctgcttgacttgctgtggatagcgctgattaatcttattcagcatctccaagattttcatatagtgatgtgctgttcttaccttaatacgatcatccgcaggaacatgggacaccgaagcggcgtgaatcagataatcataaaaagattcatcaatatattgcacccgatttgccgtcaacaagagttctgttgtccacggaatatcctgatgatgcaaccccggttcaaactgataatgatgttttgtcagaaaagcccgtttatagatattcagccaagttacatgcaagaatttgcgtgaactcagtgcttgttgcaaccattctggtccgctcagaaccgcggtagaagagaggcgatcggaaggaaaaatctttcgagcaggccgaccatcatcataaacataatgaccgttgcaagtagcaatatccaaatcattattctgagcaatctctaacagccggttatacatacccggataaatgacatcatcaatatcaggaaaagccacataatcacctctggctttcactaaccccgtattacgggcaacagaaaccccttgattcttctgcgcgataatttctatctttgggaattttttggcatattgctcaataatctggcgactattatccgttgaaccatcatcaaccaaaattaattcaaaattagctagcttttgccgagataaattaacaaaaaactgcggtaaaaaccgcattccattataaatagatacgacaatactgagttttagtgatatagacataaaatcaatatattcctttagcccaaaagtgttacttttttatattgacatcatctaaatagttatcaggaaaataatttccacatataaatataaaaccaataaatatttattacctttacattatacctaaaaataaaataataataatttttaccactcaaacttaccgacagacgaaactttcaccaatattacccctgaaaccaataatagttcaaccgcagttaaacaattactcactacatttcacattaactaatgtaatgatgttattgttcttgaaatccattggatatagtaaaaagcagataataatgtggggttttaccggaccctggatttttatcttccactcctagaaaaggaatctaatattatgaaaaaacaggaaaaaacaacctcccgggcaattatcgccgccagcatgctgacgctgataacgggctgtagccatatggaaaaaatccatatgccagaaaaaaataaacctgtcctttctactaagctgaacatccatcagccaacatcgattattgttcctgtcactatctccggtaaaaaatatcaattcttgctggataccggtgccagttataccttcatcgataataagctggcaaaaacgctgacacaaaccacaccagaatcaaaaataccggttacattccaccgtatgttgtccgatggactggttacaaccagtgaaaaacgcttacacaaagctgacctaacattatggcaacctctggcgattaccctcggtaatcatacagtgccgagctccgatccctggattggcattgacatgagtctctttaatcagtccattggtcaggagctggatggtattctcggcattgatacttttcgtcagctaaactgggaaataaataacctgaaccacacattgacagtatggcgacatgcaccttcaatcctaaattatcaacaatgtgaaccttacagtgatagctacggcaaatctcccgcaatccaagtttctaatgtcgtttttaatatagataccggggccgattacagctatgttgctcaggaatttattgaatatctgaaaaaagagcacaaagataaaatttctgaaggaaccagtgtcaaatacgcgtccgctagtgggcttgatagtagtaaagagtatctgattgatggcttttatttacagcaactgccggtaggtcgtctgagaattggcgaaaataaaagtggtctctacaatctcggtatgagtttcttctcacgttttgataattatctgtttatcccaaataaaatgctgctctgttttaacgctaaaaatttcacccgttatgacagtccattacttcgcacaattgcaatccgttattttaataacaaagtagagatattttacaacgatcccaaagatatcgaaaaatttggattaaagaacggtgatattgtactggaagttaatggtcaacaagcccttcctaaggatatcacctatcttcgtaatcagttgtcagaaacaccatcgggtaaattgacaataaaaattgaacgagataacacccagaaaattataactatttaataaagccatttattgagggagatatatacccgtcatctttcaagttgcttctttgttggctgcactctctcaccccggtcacatagttatctatgctcccggggattcgctcccttgccgccgcgatgcatcttgaaatccatagggtataggttcttcctcaataaacttatttttcaatttggtatttattctgtttataagcaagatacgttttaggtaaatttttttctttcaacgcctgccatatttccagtgcctgttttttccctttatctttattttccggatcagcaatgaagtcactaataaaattatttaaacgggcggaagggatctgtggaagccttccttcctgctgtttcagagaagccaagtgctcaaccaaatcgccataggtaattttgttattattagcaatttgcgccttacgccaataatttaaccaataccattggccagatttatccgctaatggcccatattggcggttcacctgttctaataagaaatttttcgtttgcttgtcactcacataatttattaccaaactttccaaggcgagtaaatcccgaccaacacgatctcttttgttaggaatagcaataggcaaatcaccagaataaccaaacaagcacgaccgaatatgtaactcaagctcattcttttttaagtgacttgttgcaattcctaaagatttagcaaactgccgaagttcagttacgtaaaaataaccattctcaaacgcttcctgactcatgcctttatacaattcactcacaatgacatttccttaatcgtacttatcagttaccaccaacccattttctcaacctttatcaaggctagcacagtaattcattccaacaaaaagataagaaaatttctaagaaataaaggggaaagcgactattttagccttttggttttgcactgaaatcaaacaaatctgtcagctcaatctgcaaaccactcgcaataatattgatgatttcaagcgtaggatttctaaccccacgctcaataccactgatatacgtccgatcaattccacatttatcggcaaaagcttcctgagacatgccagacgactgcctgaaatacctaactctttgtccaaaaaggaattttacagcatttggctttttcatctgataagtatcgaatgatgttacttatcagaccacggactatgagtcactttttatggtaagttatgttatcatatgtgacttatagtctactatgtaacgacttaccttttcatatcaaagttatccgtaacacggaggattaattaatgaaaaatcaagactggcacccagcagacatcatagctgagctgaaaaaacgtggcacatcgctagccgccgtttcaaggaaagcaggattagcatcatcgacccttgccaataccctgcaacgccgctggccaaaaggtcaacggcttattgccacggctttggatcgcgatcccgctgaaatatggccttcgaggtacacaaagtaggtggctgtaaattaaagtggagtagtttatcaatgagataagctgctccaatctactttatatcattcggtaagagtaatgattacttatagctgtttgcatttatcttttcctgctcgcaatccatttcctcatgttcattttaagtgtgtttctgaggtgtgctatgaaacatagagttaacgtaacttttgataaagaaaattatctgatcctgaattcagccggtgtaaatatttcaggttttgttaataaagccatgaccagagaagctcaacgaatcaaagctgaaagttggaaagcagataatcgcaaaggattggaagaaattgctcaatttattgaacaatatggctcatttgctgatgaaaacaggaactggtaaatgcaatttgttgtttatcaatacaaacggagcgaaagcaaatacagtatgtttgttgatgtacaacgtgacatcattgaaacaccagaaaggcgtatggctattcctttagttgaagcgcatcatttttcaagcaaggtgagtcgtcatctatttcccacgtctggctctcagttttcttcatttgtgccgctctgctgcgtctgtatgaatatttttctgtaaacagagggggtgatgcccgtatttttaacaaaggccctgcgcattacatcgctgcttctgtatccgcaagctcccgggattgccttgagcgggagcctgccttcctcaagtaacgtccgcgctttctcaatacgtgcatgctccagccatactcctgccttcatgttgagctcctgacggaacagacgtcccagatgcctgatactcaggttcatatgtgtagccatgtcctgcaagccacttatgccctgtaggtttgcctgcgcccagcgttgtaaatcctgaaaagcggctctcccggatagggataactggctcctgcggataaagtgcccctgacagaccggtcgcctgaaaaacatgacgagacttgctgccacctccatcgcgatttcgcgacccagatcctcttcaaccagcctgagcgccagatccagcccggatgtcacacctgccgccgttctcacggaaccatcagccacatagagcatgtccggttcgacaatgatttcgggaaaacgcatcgcgagcaattcggcacactcccaatgggttgtcacccgacgctgcttcaacagtccggtctgcgccaacaacagggcaccagtacagacggagccgtaacgctgactacgatgacacatttcgatgattgcagaacactcctgttctgaaagggtatggctatgcgcatccggcgcaccagccacaagaaatgtgtctgccgagtggctggttgtatcgctcaaaatcacatcagccatcagcctaacgccagaagaagaagtgatgatgtctgaaccggtcgacatcacgctcagggaatagacctgccggtgcaatatacggttcgcctcagcgaatacatctagggggcctgaaacatcgagtagctgaacgtcaggcacagccaatatggtgatgttgtgaatcattgctctacagaagtcttatttaatcttagtgtcctgaatcatcgttataagttaattcaggacgggtgtcatgtgttttatgctgaccttcacttaatcaaccggagacagcatatgaatttttcaattaacggcgtgagtattcctgatacccaaataacccgtgatgcaaccacgttcatccgcgatacggaatctgacctgctttttcatcattcaagtcgtgtttactactggggtgcgctcgccggtcagcgtcttgggcttaacgtggatcatgaactgctctatgtcggatgtatgtttcatgacatcggcctgacacatgaacactgtagctgtgacaaacgattcgaggttgacggcgcgaatgcggcgaaacatttcctgcaaggatacggtatcgctcaggccgatattgataaagtctggacggcgattgctttacataccacgccgggcattccagagtttatggtacccgaaattgcgctcgttactgctggcgttgaaatggatgtgttggggatcaattacgaagcgttcagcgacagtgagcgcactgcggttgtacagcatcacccacgtactgacggcttcaaggaagatatcattcaggctttttatgatggcatcaaggacaagtcccagacaatgtttggtggcttcaatgtggatgtcatacaggataaacagccgggacttgttcccctcaattactgtaacgtaatccgcaattcccgctggaaaggctaaatgtcctattgtggcagatgaaggataacctgctactcaaatgcaggttatccgttttgagtctacaggagcaggcacagagaagatctgcctgaaaaacaggtatacccgtcatctttcaagttgcctctttgttggctgcactcacttcccccagtcacagagttatctatgctcccggggattcgttcccttgccgtcgcgatgcatcttgaaatccataaggtatagatcactaactctttttctccgcgtcaaagtcaaacagatcttttaattcaatctgtaaaccacttgctatgacattgataacttcaagcgtggggttcctgacgccacgttcaatgccactgatataagtacgatcaagcccacatttatcggcaaaagcttcctgagacataccagatgccattctgatatatctaactctttgtccaaaaatggattttatcgtgttaggttttttcattcgataagtatcgaacgatgttacttatcaaaccacggactataagtcacgttttcctgtaactcgtgttactaatatgacttaccgcaaaaatacgatgaatgatattttaataacaaagtgatcttgtcattgggaggattaaaacgctcaattatcatggcacaaaaggcatatatagcttctcttatcattcgcttccttaatggcatagacgctaccgcctttgtttgggattacgccaaacaaatataacgttacaaaccaaaaatatgaaaaatcttcgaacacattaattaaattaatttattttatcaagaaatttgccaatctggtcgcaagtattatttattaagtacgatttttgcgcgtataagccgctaataccgtacgttctgactgctccagatagctttttaactcggaggccgcactttctggttcacctttctcaagtaacgccaaaatatgggcattctgatcaatataaggaacataaaaaagttcaggatcgttcagataaccaaaagccagccgcaattccgcagaaatatgcccatagaatgttatcagccgttcactgtcagtcagttcaacaatagctgaatgaaatgccatatttgcagttcctacaccgatccagtcctgagtatcacgacaccgtttagccatttcgattgcaccgcgcatgtgttcaaccgcaggatgcataggataagattgcgccaatgcctgacactcaataagccgccggattcgataaatatcgataatagaagcgatactcggagtggcgacgaaaacaccacggttaggttcatatcgcagtaacccttcctgagtcagtacccgaaaaacctcacgtaatgtattacgcgatatttcaagttgttcgctcaaagccgcttctgatagtcgttgaccgggtgatagctccccaataatcaatttctgccggataatatctgtaactttttcacttaacgtcttaggagaggaattattttttttcatcataattaattgaaagagcggaccaaatgtcgcaaacctggccacaagctcccggctgctaaagataagaatggcaggcatcttcacacattcacctactgccagcaagcatagagattcctccccactgactgttttctacgccagaatgattattgcctcataatggtgcattaaacgcaccaccatagaacatcactattataaaaagtgatctgcatttcatttttatcattaaaaaataattttatttgcctattctttcgcctcactctatttattgttcaacaataaaaaaacaataatttaacaataaatgcaaattatccaacgatggtacgcatattgcttagatatataccctatggatttcaagatgcatcgcggcggcaagggagcgaatccccgggagcatagataactatgtgaccggggtgagtgagtgcagccaacaaagaagcaacttgaaagataacgggtatacatttatctactatctaccacacaggaattcaacctatgacgacacagcaagcaaccgcgatttttatccaccgaggtgacacaccatgcaacagattgtgaatctatggccgttgattggcatcgcggttattgtcgtgggttttttacttaggtttaacccggtattggtagtgattgtcgcagggatcattaccgggctggccgctcatatgccgatcacagcgattctggaaaaactaggttccggcttccttaatacccgaaatttgccactaattttgctgttgccgctggcaactatcggtcttttagaacggcacggcttaaaagaacgagctcaaacctggattagcaatattaaaacagcaaccgccggacgtttgctgatcatctatctgttcattcgtgaaataaccgctgcgctagggctgaccagtttaggagggcacccgcaaatggtgcgtccattgctggcaccaatggtagaaggggctacggaaaaccgtcatcatgacctacctgacgatatacgttatcgcctgcgggccatgtcagcagcaaccgacaatgttggccttttcttcggtgaggatattttcgtcgcctttggtgcaatcatctttatgcataactttatgctagagtctggcggtatccaaacggaaccgctacatatcgctatgtggggaattcctaccgccatctgtgccttcctaatccacgctttccgcttgtctcgtcttgaccaccagatcgctaccaagctggcagcactgaatggcatggacaaaaatcgcagtaaggtggagtaatgtttcagcaacaatatctttattggctggcaggcgtgattctgttggccgtagccacaatgtcttggcgtgatcacaccaacccccgccgcctgaccaccagcttgttctgggcgctatatggcatcgtatttttagtaggcgactggacttaccgcttaatagcactatgggcagacagcgaagccgaggcccaaaagatgctacatatcggtgtcgggctaatcgtcgtattgatggcactgacggctggttttggcggtgtgcgattgggtagctaccatcaacgcacacctcagcaacggcaggaaagtgcctcccgtttgggtaatcgcctctttcttcccgcactggcaatccctatcgtcacggtgatcggcgtattactgtttaaccacatccctgagttacaacaggcgctgttcggtagcggcaaccatgccaccttggtaacgctgttttccatgacagtaggctgcttagtcggatatggcgttgcactgaaaatgacacgtgaaaatgtaactcaatcaacccaagaggcgcgccgcttactggattccatcggttgggcgtttatcctgccacagatattagcgacgctaggactattatttaccgtagcaggtgtcggtaccgcaatttctcacctgactgaacattatttagcggtggataatcgattgatcgcggtagcgacatacatactcggtatggcgttattgacgatgataatgggcaacgctttcgctgcgttcccgattgttaccgccgggatcggcattcccattctagtactgcaacatggcggtaatccagcggtcatggccgccatcggtatgttctcgggctattgcggtacattgatgaccccaatggccgcaaacttcaatatcgttccagccgctctgttggaattaccaaatcgcaatgcggtcattaaagcacaaatccccacgggaatagcgctgttgattgccaatgtttttctgctctattttttgatgtttttgtaaggatatcctatgaaaaccgttctgattaccgcttttgaaccttttgacggtgaagccatcaatccatcgtgggagtcggtcaggcaattgcaaaaccaacagctatctggagcacatattgagacacgccagctcccatgtgtattcaatacttctctcacctgcctgtacgcagctattgatgagatacaacctgaactcgtcattgccgtgggacaagcaggaggcaggccagatatcacggtggaacgcatagcgattaacatcaacgacgcacgtattcccgataatcagggcaatcaacccattgataccccaatcgtagcaacaggcccggcggcctacttttccaccctaccgatcaaagcgatcgtcagtggcctgcaaaccgcaggggttcctgcttcgatttcacagagtgccggcacatatatctgcaaccatgtcatgtatggcctgctgcaccatctggcactgacttatcccaaagtacgtggtggattagtacgtggtggatttatccatattccctacctgcctgaacaggcggtaaaacaccccggtacgccaagtatggcgctggaaacaataacaatggcactgaaaatcgctattaatcaagcattagaaaacagtggggacattgctattagcggaggaatgactcattagttcaacgtctaccggcgtaacagaaattgcctatctgtagagctgataagcatcctgaattttttactacttttttagagatcactttgattggggttacgactatgaacatgattgatttaaacagcgatcttggcgaaggctttggtcaatggaaaatgggtgacgataataccatgctgagcattgtcaccagcgccaatgtcgcgtgtggatttcatgctggtgatcccgccgggatctttcaaaccttaaaatctgcccacaaaaatcaggtagtgatcggtgctcatgtctcttatccagatctggtcggatttggtcgccgtaatatggatgtttccagtaatgagctgatcgcggatgttatttaccagattggcgcgttgaaagggttggccgtggcggcaggaaccaccgtaagttatgttaaaccgcacggtgcactgtataacaccattgcccacaatgaataccaagcccttgccgttattaccgcgattcgtgaagtggatgacaatttagtgctggttggattagctggctcaaaactattggatttagcgcaggaaaacggtttacgtaccgttgcggaagcctttgctgacagagcttacactccacaaggcacgctagtttcccgccgggaaaaagggtctgtgcttcatgacgctaatctcgttgcccgacgcatgttgcaattggtgaccgaaggaggagttgaagccattgatggtagctttacccgtattcaggcagattccatctgtgttcatggtgacagcccagacgcggtggaaatggcacgtcaggtgaaactaaccctgcaacaagctgggatcaccgtacgctcctttatttaaatacccaggggtgcctagtgcgttttttacctgttaatttagatgccattattgtcgagcttcatgatctgaatgaaacgctggcgttatttgattcacttaacgctcatcccattccaggcgtagaagaaattattccagcggccagaacactgttgattcgatttcgtcccaatgtggtttccaccgtcaaacttgccggaaatatcaacggccgcaacctgaatacactggataggacaaccgggaaactcgttgaaatcccggtgtattacactggtgaagatctggaagaagtggcagaaatcctcagtatcaccacacaggaagttattcagcggcataccgaaagcgagtacaccgttgcttttaccggattcgcccccggatttgcctatttagtcgcagagtcagatcgtttacatgttcctcgcaggacaaccccaagagcccgcattcctgcgggatcagtcggcctagccggagaattcagtggaatataccctcaagccactccgggaggttggcaaatcatcggtatcacgccagaacgcatgtgggatctctcacgttctccctcttccctgttacaacccggtttccgggtacgtttcagagatcaacgcaaaggcgcagcaatctctatcactaaagccgaaatccctgttgcccccatagaggacgttctaccttcgcaagttgataaacacgcctcgctggaaatcctaaccactggaatacaaacactttttcaggatttaggccgttcaggacaggctagtttaggtatttccgctgccggagcgctagataaaacagcgctgagaagtgccaaccggatcgccggtaatccttcggataatgcctgtctggaaattgtgcaaggaggattaagcttcatttctcatggcaatgtcattatcgcggttacaggtgctgactgcccaatcactgttcaaacaacatctggccgaaagtttcaggttgatggctatcagcctattgatctgagcgaaggcgataaagtgacattaggaacgcccaaagcgggaatgcgttcttatttggcggtgcgtggcagctttgccaagcaacctattctctccagcctctcttacgacacgctggcacacgttggccccaagccaatcgctataggcgatattttggatattcttactgtgacgcagggttgtgcggtatcaatggatgaaagcccggctttcaatatgcccaccactgacgatatcgttacactggacattattctagggccgcgcaccgactggttcaccgcagaagcgctatccctgctacaaaaccaactttggcaagttacaccacaatctaatcgagttggtattcgtctgtacggagacacaccattatcgcgtcttaaccataaagagttaccgagtgagggaacgaccaccggcgcaattcaggttcctgccagtggtcaaccggttttgtttttagccgatcaccctttgaccggtggctatccagtcattggttccgttgccaactatcatctcgatcttgcgggacaaattcctgtcaatgcccgtatccgcttcaacccaatcactgaatttcatgaaataaaagagagcgattgccgcttatgagtaccgcaatgaccatgaatattaaaaactatcccataaaaaaagttttgattgctaaccgcggtgaaatcgccgtccgtatcatccgtgcctgccgggattatggtttacaatctatcgccgtctacgctgattcggacatcaatgcacaacatgtacgattggctgatgaggcttatagtttaggcggaaaccgccccgctgatacctatctcaatattccccaattattggatattgcgaaacgttcaggtgccgacatggtacatcccggatacggatttctggctgaacgagcagaatttgcccgtgcagttattcatgcagggttgatctgggttggtcctgaaccagagacaattgatactttgggtgacaaagttaaagcacgcaaaattgcccaacaggtaggtgccccacaggtttcaggtacagaagaaccggtgaaaaacgcagaggaagctctggcgtttgccgaacaatatggcctgccaatcgcaattaaagcggcatatggcggtggtggacgtggcatgaaagtggcatggcggcttgatgaagtcaccgaactctacaattcggctgttcgtgaagcaacagcggcctttggtcgtggagaatgtttcattgaacagttcctggataaacctcgtcatatcgaagcgcaaattctggctgataaacatggcaatgtggtggtacttggtacacgtgattgttcactgcaacgacgtaaccaaaaattggtagaagaagcaccggccccatttttggctgaacatcagcgccagcgtattcatcaagcagcacaagatatttgcaccgctgctggttatattggagccggaacagtggaatttctcctcagtgcagacggcacgatctcctttctggaagtcaatactcgcttgcaggtcgaacatccggtcaccgaagaaaccacagggatcgacattgtggtagaacaatttcgaattgccgaaggtaaacctttatcattgacctcaacgcctattcctttaggccattctttcgagttccgtattaacgcagaagatgcgggtaaaggatttttgccgacacccggaaccgtgacagtattttctcccccttccggcccaggcataagattggattccggtgttgcagcaggttccaccatccctgacacttttgattcgctgatggctaagttgattgtcaccggagcaacccgccaacaagctattgcccgtgcgcagcgggcattacaggaattcagcattaaaggcgttgcctcagtattgccttttcatcgagcagtgatggagcatcctgattttatttccgatgacacatttaacgttcatactcgttggatcgaaactgactttatcaatgatataaaaatatctccgcgtcaggaaaatcattatcaagaaaaggtaacacgtacttttattgaaattaatggccgtcggcatgaactagggctaccagccgaattattaaaagggctttcattgcctgattctgggcgaaattccatcattgaaaacaaaaatagtgaaatggagaggacaataacagcaccgaatcccgtctcagcaccaatatccggcgttttacaatcctggtatgtgcaggagggtgatgaagttaaacaaggtgatgtcattgctgtcatggaagcaatgaaaatggaaacgcaactcaccgcacatcgttctggaaaaatcgttatctatgtagaagaaggcggttatcaacaggcaggaaatgtactggcaagtattaacgatgattaataatgacgataattggctaatttgacacataaattcacattacccaatacaacatcaaattgtacggataatttccgtacaattttaatgaaaagattaaaattaaaatgcaagcaatatcgtaaaaaagaggttaattaacccctttatggatagaaaaaaataactattaatggcaatgtttttaatcatttcgttaatattgacaataagataaataagtcatcacacgatttaaaacctgtttactggttagattaactattaataaaacgctttcatttttatccgaaagaaatatttattaaatattttgatatcatatatttcaattgaaaattgaggagctattaaaaccagcaataaacatgaaaatatttcaacaaaataaaaaacaaagataatatcatttactaatgattattaagcgataaataacatgataatttgtgactgtttttacctatatttaagcaattaagaaatcattaactcattataaattatcggttataaatagtgcatggatttattttctacatctgacaatataaatacatttaccaaacaaaaaaaacaaaataaaacatacagttaaaatattgtgttatatcaacaagatataaataaaatttcacaaaaataaatcaataaaaatattatgagccatatactatacatacttatattttcaagaaatatattaaagacaacctctgattttattcagaccatagaaatattatttcataaaaagataatgtttctcatttaataatccatcatatagatatgataattatgcacatatcatacacatctatttgaatagtatataaacgtactattacaacaatatcataatattaaatcatttaattgttttacatttcctttacaattatcaacacaatttaaaactataatgaattcatatatgttcttacaaacacatttttatatagattagcatcacaatttcaacattactcaacaaaataataaatcaaataattgcaattaccattaaacataatactatattaatagtgtaataaaatttttatttacaatattttcctaatggttaaaaaataagaccaagataaaaaacaaattcagaagcattgattaaaaaggaaaaatattcgttacttgaaattatacccaatggatttcaagatgcatccaaagaggcaacctgaaagataacgggtatataataacagtgacggctaagtaatcaggagaacaatgtgataacaaacgattacgagttaatgactgcgccaaacagtgtaccagtgaaaatgtggactcatggcgtaccggtagaagcggaagctcgtgaacaactgttgaatacagcaaaaatgccttttatattcagacatttagccgttatgcctgatgtacatcttggtaaaggttcaaccatcggcagtgtcatcccgactcgtggggcaattattccagccgcggtaggcgtagatatcggttgtggcatgatggcagtacgtacctcattgaatgccaaagatttaccggacaacctatatgcgatccgccatgctattgaaattgccgtaccacacggacgcacagcaaaccgtagcggtcaggataaaggcgcttggcagcaaccaccagaaaccgtcgatcaccattggagcgtgttgcaaaccgggtttaaacagctaaccgataaatatccacaattgctgaaaaccaataaccatctgcacttagggacactagggaccggtaatcacttcattgagctctgtctggatgaatccgaccgggtatgggtaatgctgcatagcggctcacgcggtgtaggaaatgccattggtaatctatttatcacccttgcccaacaggacatgaaacaacatatcgctcacctgcctgatcgtaatctggcctattttgaggaaggcagccgtcactttgctgattatatggaagcggtcggttgggcacaaaacttcgcccgccacaatcgcgaagtcatgatgcaacatacactggcagcattggcgacggtaataacaaaaccattcactgccacaatggaagcggtaaattgtcaccacaattatgtgcaacaggagcagcacttcggccaaaacgtgttagtcacacgcaaaggggcagtcgctgcacaccgaggcgtcatgggcatcattcccggctcaatgggtgcgaaaagctttatcgtacgaggtctgggaaacaaagagagtttctgctcatgcagtcacggtgcaggacgagtattaagccgcacggcagcgaaaaaacgcttcacaatagaggatcaaaagcgtgccacggcacacgtggaatgccgcaaggacagcgacgttatcgatgaaattccgatggcctacaaagacattgaggccgtaatggccgctcagtcttcactagtagaaatcgttcacaccctgcgtcaagtggtttgcgtaaaaggataatcaagatgaaagaaaaatttggtatcagtgacatcatgaagcaacacatatgccaaaaactggcgcaacttgagacagagctgcaaatacgaatactctacgcctgtgaatcaggtagccgcggttggggatttgcctcgacaagcagtgattacgatgtacgttttatttatgtacatgcgccatcatggtacttacgcgtcgatccctctcgggatgtcattgaactaccgatcagtaacgagctggatatctgtggttgggaactgcgtaaaacgttagggctgctgaaacgagccaacccgacactgatggagtgggcagactcaccagtaatctactacgaagacgtggagttcatggcggcactacgtgccctattaccagactatttctccaacaacagagcgcgatatcactatctgtcaatggcaaagaaaaactttcgtagttacctgaaaggcgagaaaattcggctgaaaaaatacctttatgtactacgcccattgctggcggtacgttggatcgaagctggtaaaggtgtccccccgatgcgcttcgacagcctactggccggaacggttacagacgcggggctgatgcaagaaatacagactctgcttgccatcaagcgtaacactgacgaaacggaatatagtccacgttttaaacgcattcataactttatctgccgcgaattggatgattcagttacccgccgcgaactcaaagacaaaaaacacctcccagataccgaattggatctacttctgatgcgcaccgtacttcaccataataataaagaagaaggagaatacctgttaaaaaatggatgaaaaatcatacaaaaatgacatttcagcaatcaagttggatgtttactcagagccagaaagcagggtcttccaccctgctccagaaataaatatatacccgtcatctttcaagttgccctttgttggctgcactcactcaccccagtcacatagttatctatgctcccggggattcgctcccttgccgtcgcgatgcacctcgaaatccatagggtatagagttattaacctaaaataatatgaggcacaaatcgtgatgtatctttcgtgatcctgccaatatcttccctaaccgatagacccgcaggcgtatcattaacgagccaactaccgataaggacatggctattaccgatctttggcaatggggtgtactgctgcacaatgtaaccctcctcaccgtaaggaccctctaccttttcaatcactttcccgtctttgtgaatactgatattcgcgccctcacggctgaatatcggcttcatgacgtaatgagttaaacgcttggctttcggatcatcagcaaaataagcctcaagcagatttggatgtcctggaaacatctcccaaagcaatggcaaaattgccttattcgaagtgaggcatttccacattggctcaaaccagttaacacccgcagtgaccaagtgttgagcatattcttcacgaaacatgaactcccacggatacaacttgaacatcgagtctatgatcttgttattactatccgtaaattgaccacactcgctgagcccgatgtcttcaatgtagacaaactcgatatgaataccggcatctttggcacagtcagccatgtaatcaaccgaacctttgtcttcttccgtacccttacagcaggcaaaatgaagcgtgttgaatggcaaaaagggtttcagttcacagaagcgattaacaagcaactcctgtagtaagttgaactgatcagcagcatgaggcaattcaccacggttaaccttatcttccaaccacagccagctaaaaaaaccatgctcataaacagaggtcggcgtatctgagttaatttccaataacttagccgggtttttaccatcataggcaaaatcaaggcgactatagaggcttggatctctgcgcttccaagatccacgaaccaatgaccacatggcttctggaatttggaatctagccatcaactcatcactgttaaccacgtgctctactgcttgaaggctcaagcggtggatttccgctgtcggatcttcaatatgttcttcaatctgcttgagagtaaactggtaataacggtcttccgtccagtacggttcattatcgattgtatggaaaccaaacccaaattcttttgctcgcactttccaatcatgacgaggtgttgttgggatctgaagcatgacattaaccctttgataatgcttatttgaatcttggaacaaaccatctcacaaatgcttaatgcggcaataatgactccatgcaagagactggcctgagaataaaatgccagcgctggttaaccaccccaactgtatttagcggaagatgttgaaccaaaaccaccagaagatttggtagtgacaattggcttgctatcataaccagaataacgggaatcgctacttttaaacttttgttccttttcacgtatcaagcgctctcgatacattctctctctatgcttacgcgctgaataatcaccgatttcatcaacgatcccagatgcgatataagcagtcgatcgggagttcagtacagggtttatacctgcaacgacatttgcatttgttccaacttgaggaacttctcgtttctccattggcaggcgaaccgtttccagcggatgcaaataacgtcggttcatctcgtactggatattgccaatatcggaataatcgccaataaccttaccatcagcgaaaaaaagcttacggtacaagtcgccatagcctgatgttgaggtaaatagtggctgatagaacacattgcgatacttttcagcaatatcgtactggttaaactgttctggcttcaccgccgccatcataaaggcggccatcttcggtcgataacctacggcccccggcattgcttcacactcaccgtactcaagctcacacatagctttctggcgaaatttctgcgaagtacgctccgcttcacgtaatgccgcttggtatgtggtttcacattgagcagcgatcgtattcttcggattattctgacaagacgccaaatccttataaacatgaattgacaactcatccgccgattgaccacaacccacgagtgaaccaacactgagcgccaatgatgtgaatgagaaaccacgccaatatttacgtttactctcaatgttaatggcggtgctgcgcattctgcgctttttattcccgttcgtcatacaatccctaaatcagtaagtcatgcaggctgcatttaaaagaccaacagaaattgacaccgacgccaacacaatcgcagcagggacctcattattctcaatgcgggatacaatctttggcatcatgaatatgcgaaccatgaagaagccagcaatttgagccaacagcgcaacaacactccacatcacgaaatcaataacacccacagagttgcttgctgcacttgcaatggcaatgctgtaaccaaccagagcgccaccaagcgatatcgccgcggcactattcttctcttgtttgataagcttccactcatcatgcggagtaattattgtgtagatgaatttgaaaacgatgaaaaaaaccagcgccagcccaaaacacaagccaaaattgcctacaccatgcataaattgagtaaaagcctgttcttcattttccaatgtgatcatttatgccaccactttaaaatcagtttggttaagttgaataccggtgctcagtaccatcaatctatccaggtgactccctacaactttttcttctcccacaacctgaagttcttctgttctgttatgagcaacctgacgcgtatacaccatcacaaactgatcagtttcggttatgtgaccttctttactgtaagttttttcggtaacagccaccggcttaatgttgtcccataacggagagaactgggtaccatcgagatcatatcgtctgcttggtgtcacgataccgttttcaatcagcgcatcccattgagcttgtgaatcgatcggtttagtttcataaaaataccacaaactcacttccttcacgccgtcatccccttcaccttcttgaagcacttgaagataaccttcgtcatcagtgtaataacgaaccaaacgcacgttatcacctagatcgactacaccaacggaacatataagctgagttgaagctgcattttcgatggttaggtcagattcaatcagtttcagcatcagtgggtctatctcaagtgccccaccgatacgcaaacctaatacttccggcacctttggaacagcaggcgcaaccgtcttacccccgaatgcgctcttaaatgcatctgcgattttggaaagcatagaaatatctcttgataggaagatcccactttaaaaagcaggatcttgatttaacaactgagtatttacttgccaaggatacgagcaagttcatcttctgcggacatagaacttgacgttatgccagcctctttaagctttttatccagatcgctagaagtcatactatcgtggagctcctgctgagcctcgaactgagccgctttctcagcctgacgtgacttgatacgctcaagggaatcaagggcggtagatgtttttgaagaagcgccaacgacagaactgtgagtcgcagcttgggctttctgcacctgctcagtggccttaaccaaatcaacctggttctcaagctgagacaccttcttcttcgcctcttgtacagtgtgtcggtgcgtcgtttcagccttctggaacgattcaaacaacccttgttctctttccagttcatcacgcagggtcgcaactttctgagcacactctaaagcaagcccattatcgcctttacccgcagcagagcgagcataaccctcgtactcggtgatactgtttttgatatccgcaacctttttctctgccatttttcgcttagcaatgatgctaaccaagctttcatccgcacggcggatttctgcttttgcttcccggatttcctgatcaagaatcgtcagagcattgccatcagcaacagcttctgccgcgttatttaccgttcccttgattgccttaaaaagctttttccacacgttcattaatatttgcctctatattgttattttaggaactcagaatacgcatcaagaagttcagtgatgttggcaaacaacgtagagacttcgataacaacgctttcttgttttgattctgatgacaatgaaccaaaagcagtatagtaagattgaccctctactttagttattccaactgaagtcagaggaatcatcttgtgcgtttctaaaataaactgatttaaagaagcgggatctaaaacattctcttccgaaaacagtaatgcttccactgtaatttgcctgccacaaatagccagatgtgctttaattccgtcttcattagtaattgcaagacattcacctatttgctctacactccagttattaccggattcattaagcgctttaatcacttgatttaattccaaactatctactccactggtttgttttatcattaaaatcagtatattaagtttaaattatcatcagattaaacatttttcaataagtattgcgttaaaatagcccagtattaaacctaagatattcataagcatggtaaatactaaaaacgcataaaaccttaaatatagcattacttaacattattaaaactttataccctttgctaagtgactttgtgctatctcaatacctcttgcacaaaacaccattagaatactcgcatgaaaaaacttatcctggtggatgattaaaaccactcttagctaacccgaattctggataagaaattgacgagaagcctgttccaggagcaaagttttggtgtgcaccaaaaacagctccgaggggggaacaggctatggacaacttagttgaaattttctgtgatgtcgatgatttttgccgttttttcatccctcaatgggaacaattttgtctcgatagcgggcatcgtttacgccgccgacaaggtcatatgtatcccagtgaaatcatgaccattttgatcctttttcatatgtcgcattaccgtgattttaaacatttttatctagaacatatttggaaatatcaccataaggattttccaaccttgcttagctatcctcgttttgtcagtgtggctccttccgttttggtgccattatgcagctatctgactcaattaaaagggaaacccacaggcattgcttttattgattccacccgtttgagtgtctgccataacattcgcatccctcgacataaggtctttgcggggatagcaaagcgcggaaaaaattcaatgggctggttttacggtttcaaattacacctggttgtcaatcatcagggtgaaattctcgcgcttaaagtgactccgggtaatgtggatgatcgggaacctgttcgtgaattatcaaaagaattaacgggttctctttacggtgacaaaggttacctcagccaggaattggcggacgatttagctaaaaccgatgtcactttcatcacgaaaaaacggcgtaacatgaaagcgagtatgcaagctgagtgggataagataatgttaaaaaagcgttttatcattgaaacgattaatgggcaattaaaaactctttctcaaatagagcattcccgccaccgaagtataaaaggctttctgttgtgcgttttaggtggattgattgcttactgccttaaattgaagaagccatcactgaaagttttctactcagaagacgatttttcaatgacggattaagcagaattcgggttagctaaggttgctttatagccttggcatatcacagtaaatagagcattgcagggtaaaataaaaacttccagtaaaatcaaccgatattgataaaagtatccattttggttatcaacccatttaaccttctatacccgtcatctttcaagttgcttctttgttggctgcactctctcaccccggtcatatagttatctatgctcccggggattcgctcccttgccgccgcgatccatcttgaaatccatagggtataatattgaagctaaaatctttttcaaattcccgtttatctccgatataaaaaaccttttctacttagcattttttacattcaacagagattagccttatgcattaactatcagatttaacctttatttaccgccataatcttttcatcaccatttcaagtatctgttttcacttcatttgaaaactaagaaagccgatttacacaataaacagaaaagtaataatgataaagattaaaagggtgataaaacgtttatatttttactattttacattgagatatcttttaacgacagacagttaggttaactgacaacaaaaacttatcggatttatccagaagcattcagtttataaaaccctcggttaaataaagtttaatatctatcaatgataaccacgatgttatttaacatccgagaattattttaccttttcttttttaatcgcgctttactcacttcccagacataccgattaagcactttttcagtcagtcccaacaatcaaaaggccaagactttacccgcaatctacggctcccttcatttttaagggagcccgttttaatcattctttaatgtggacagatttaccattaaaagtaacaacctgcccggctatcgctttgtaacgtttacgggtttctatctgattattgactttaaccaaaccttcagcaataaccgctttagcgctagcgccactttcactccacccctgaaacttcaacagatcacacaacgccacataagggtgaccttctaaataaaaaatttccattaacaaccttcaattctttccacatcgtgatattcctcgcaggcttgcaaggtattctggataagtgtagcgactgtcattgggccaacccctccaggcaccggcgagatccagcttgcccgctctgatgcagtttcaaaatcaacatcaccaatcactttgccatcttccaggcgattaattccgacatcaataacaatagcgccgggtttaatccactctccggggataaagtttggtttaccgaccgccacaatgagtaaatctgcctgctccacatggtgacgtaaatctttagtaaagcgatgagtcaccgtggtagtacagccagccaataacagctccaagctcattggacgaccaacaatatttgaagcgccgataatgacagcattcagcccataagtattaattccacaacgctcaagcaacgttgcgataccgcgtggagtacagggacgcagctttggcgcgcgttgacacaaacgaccaatattatagggatggaagccatcaacatccttatcaggctggatacgttccaaaactttgacgttatcaataccggcaggtaaagggagctgaaccaaaataccatcaatatctgaatcattattaagctgatcgataagattcaacaattctgcttcgctggtggtatctggcaggtcataggaacgggaaacaaacccgacttcctcacaggcacgacgtttgcttgcgacataaatttgagaagccgggttttcgccgactaaaacaacggcaagaccgggagcacgtcttcccgcagcaacacgttgttgaacacgcactgcgacttcacttctgattgtctgcgcaatcgttttcccatcaataatttttgctggcatgtacgaataaatccataaatcaaacattgggatactgcctattttgtcagaacatgaacgtgctgtcagttttattgataatcagaaaatagccagatgaagatttataagcagaaaagccattgactcaaggagttgtcaccgtataatctctccccgcatcagagcattactgatgcagctcatctctcaagatgcgcccttagctcagctggatagagcaacggccttctaagccgtaggtcacaggttcgaatcctgtagggcgcaaaacccataaaaccccagtaaatacgcaaagttaagctttcctttgcttatacttatacttaccggaataccatcgaattgagagaatcagaatggactgaattcgattttgataaagatatctggcaaatacccgctgaacgaataaaaatacgtcaccctcacatcgtcccgctatcaaatcaggttaaagccattcttatcaagctgcacaagcgcaggaaatacgttttccccggtcataacgatgcgggtaagccaatgagtgaaactgctattaatcaggttattaagcgtattgtctatgatgattcgcagtaacctgaacctgaatattggtactgctatcgaatggctgccaaaaccgacaagggataacctgccagaagagtaattttttcttaacgtaggtatttttcagttctccgagttaagcaaaccaaaattagtctgtcatatcaagttgctatgagcaaaatacaggacaggattgcctatcagtgttggaagcagtcccaaatgacccagatatgacgactaaacttgtcgcgattcaaaatgatgagaacgtctttactcgttataatactgggatgattatgggccgatggccattcaaaaacgtattaaaagtggagtttcacaatgacaagtacccaacaacgcgccgaactacagcgtcaaatctggcaaattgccaacgatgtgagaggttcagttgatggctgggatttcaaacagtacgtactaggtacgctgttttatcgctttataagtgaaaactttgcaaactacattgaaggcggtgatgagagcattaactatgccgagctttcagatgctgttatcactgacgatattaaagatgatgctattaaaaccaaaggctattttatttatccaagccagctgtttgctaatattgccgaaaatgctaataaaaatgataacttaaacaaagacttaaatagcattttcgtcgctattgaaagctcagccaacggctacccatctgaagccgagattaagggtctttttgccgattttgacaccaccagtaaccgtttaggtaataccgttaaagacaaaaatacgcgtttagccgcagtcttgaaaggcgtggcagggcttaaatttggtcagtttgaaagtaacaaaatagatctgtttggtgatgcttacgagtttttaatctctaactatgccgctaatgcaggtaaatcaggcggtgaattttttacaccacaacacgtttccaggctaatcgctcagctcgccatgcacgggcaaaccagcgtgaataaaatctatgatcccgccgcaggttcgggctctctgctattacaagccaaaaaacacttcgatgcccacattattgaagacggtttctttggtcaggagattaaccataccacctataatcttgcgcgtatgaatatgtttttacacaacattaactacgacaagtttaatattatgttgggcaacaccttaaccgaaccgcattttggtgatgacaaaccgttcgatgccatcgtctctaatccaccgtattcggtgaaatggattggcagtgatgatccaacactgattaacgatgaccgctttgctcccgctggcgtactagcgccgaagtccaaagccgactttgcctttgttctgcacgcattgagttacttatccagcaaaggccgcgcggcaattgtttgcttcccgggtattttttaccgtggtggagctgagcagaaaatccgcaaatatctggtagataacaactatgttgaaaccgtgatctcattagcacctaacctgttttttggcacgaccattgctgtcaacattcttgtgctgtctaaacacaaaaccgacaccactactcagtttattgatgccagccctctgtttaaaaaagaaaccaataacaacatacttaccgacaatcatatcgaacaaattatgcaggtgtttgatagcaaagatgatgttgagcattttgctaaatcagtcagttttgaagccatcgccgctaacgattacaacctgtcggtgagtagctatgtcgaagctagagacaaccgcgaagtaattgatattacaaaactcaatgctgaactaaagactaccgttaaaaaaatcgaccagcttcggatggatattgatgccattgttgctgagattgaaggaacggagaataaagcatgagcaatatgagttttatggagaaactgcttcaaggggctgaggtagtatgggaatctttggagcaagtggcgaaaataaaacatggcaaagattggaagaacttgaatgctggcgatattccagtttatggttcaggcgggataatggggtatgtcgatacttattcatataatcagccaacagttttaatcccccgtaagggctcgataacaaatattttttatattgagtcaccattttggaacgttgacacaatttactatacagaaattgatgctaagaaaatcatccctaaatttttatattattttatcaaaactatcgatctgttggcgctagacacaggtgcagggagacctagcctgacacaggctatattaaacaaaatacaaattcccatcccatctctcaatatccaaaccgaaatcgtccgcattttggacgcctttaccgagcttaccgctaagcttaccgctgagcttaccgcacgccaaaaacaatatgaatattatcgcgaccaattgttaagttttgaagaaaatgaagtggagtggaagactttgggggaaattgcaaccattggaacgggcagtcgtaatacaaatgaagctgttttagatgggcaatatcctttctttgttcgctctcaggaaccacgggcgatagatagttttgagtttgatgaaactgcaattattactgccggagatggagtaggtgtaggtaaagtttttcattatgtttcaggaaagtatgctctgcatcaaagagcatatcgtattgttgttagagacgaccgttttaattcaaaatttctattttattatattagaaataattttgctcattacttaaccaaagtatccgtccacgcttcggtgacatcacttagaaaaccaatgtttgagaaatatccaattcctatccccccacttgtcgaacaagaccgcatagtagctatattagataaattcgacactttaaccagctccatcagtgaaggtctaccacgagaaattgaattacgtcaaaagcaatatgaatattatcgcgatctgctgttgagtttccccaagccagaggtagaagcataatatgagcaaaacgctaacgggaatagcccagcagctaaaagatgccaacaagaaagtacaactgatctatgcctttaatggtacgggtaaaacccggctttcacgggaatttaaacagctaattacgcctaaaaatgataatgataaaggtggcaataatgaagaactatcattgacccgtactaattttttgtattacaacgcctttaccgaagacttgttttactgggataacgacttatctgagaataccgagcctaaactcaaaatccagccgaattcatttacagattgggtgctgaaagatcaggggcaagaccgaaatatcattgctaactttcaacactatacggatgaaaaattaactccacattttagtgaaaatggttcggaagttacattttctttcgaacgtggcaatgaagcaccaactgaaaatgttaaaatatcaaaaggcgaagaaagcaactttatctggagcgtattttacacactgattgagcaagtcatcagcgtgctgaatgttgctgaacccggtgagcgagaaacagatcagtttaatcaattgcaatacgtctttattgatgatcctgttagctcgttagatgaaaaccatttgattgagctggcagtacatcttgctaaacttattaaatctaacgagtctagcgttaaattcatcatcacgacgcataaccctcttttctataacgtgctacacaatgagctaaacagtgatgataaaagctataaaaagaaatggtttgagaaatacaggctgacaaagcatgaagatggcacatatcagctagcaatccaaccgaatgattcaccattttcatatcatctttatctgaagtcagaactcgaaaaagccattgaaaacggtcagttgagcaagtatcacttcaactttctaagaaatatattagaaaaaacctctacttttcttggctataaaaagtggggtgatttattgccaaaaaccggtgatggcagacctaacccttatgaagccaggattattaatatctctagtcattcaaaacatgcaggtgaagaggtcgctgagcttacggaagatgacaagcgtgttttgcgctatctggttaatgaaattaacactatgtaccgcttccaacaggcagaaaattagagtgaatcgaatttataggtgaagtatgtacgaatacaaaactgttgctgaatcaaataactttatcgtactggataaatacactaaggaattgcagctaaatgaaacctaccaaagcgaaggtgatttagaacgggaattaatcgacgatttagtcaaccaaggttatgaatatgtttctggcttaaacacgccccaaaacatgctggccaatgtgcgtgagcaactgcagatactgaataatgttaatttttcagaaagtgagtggcaacgatttgttgagcaatacttagataagcccagcgataacaacatagataaaactcgtaaaattcataacgattatatccacgactttgtttttgatgatggacatatcgagaacatctatctcgtggataagaaaaacattgcccgtaataaagtacaaatcattaagcaattcaagcaaacaggggcgcaagcgaatcgatacgatgtaaccattttggttaatggcctgccattggtacaagttgagcttaaaaagcgcggagttgctattcgtgaagcctttaaccaagtgcatcgttatagtaaagaaagctttaatacagaaaactcgctgtttaaatacttacagctttttgtgatttcaaacggtacagacacgcgctattttgccaatactaccaagcgtgataaaaacagttttgacttcaccatgaattgggccaaatctgataatacgctgattaaagacttaaaagattttacagccacattttttcagaaaaataccttgctgaatgtgttaattcattattctgtatttgatgttagcaatactttattagtgatgcgcccctatcaaatagcggctactgaacgtattttgtggaaaattaaaagtgcatatcaggctaaaaattggagtaatactgaaagtggtggctacatttggcataccacggggtcaggcaaaaccttaactagtttcaaagcggcgcgtttggctactgagttggattttatcgataaggtgttttttgtggtcgatcgtaaagatctggattaccagaccatgaaagaatatcaacgtttttcacctgacagtgttaatggttcggagagtaccgcagggctaaaacggaatattgaaaaagatgacaataaaattattgttactaccattcagaaatttaataacttaataaaaagtgaaagcgatttaccaatatacaataagcaagtagtgtttatttttgatgaggcacaccgcagccagtttggtgaagcacaaaaaaacctaaagaagaaatttaaaaagtattatcaatttggttttacgggcacgccaattttcccgcaaaatgctttaggagcagacaccaccagtagtgtatttggccgagaattacattcgtatgtgattaccgatgccattcgtgatgaaaaagtattgaagtttaaagttgattataacgatgtaagaccacagtttaagtccattgaaaccgaacaagacgagaaaaagttaacagcggcagaaaacaagcaagcttttttacatcctgttcgtattcgtgcaatttcccagtatattttaaataacttcaggcaaaaaacacatcgtctccaagccggtggcaaggggtttaatgccatgtttgctgtcagtagcgtggatgccgccaaagcttattatgaagcgttcaagcatttacaaaaagagactgaagaaaataaagcaaataaaaaaccgcttaatattgccactatcttctctttcgccgctaatgaagagcaagatgctattggtgagcttattgatgaaagttttgagctcaccgcaatggacagcagtgccaaagaatttttaagcgcagccattgatgattataatgcagcgttcaaaatgaattttggtgtagatagtaaaggtttccaaaactactataaagacctcgctaagcgagtgaaaaatcaagaagtagatttactgattgttgttggcatgttcttaacaggatttgatgcgccgacattgaatactttatttgtcgataaaaatctgcgttaccacggcctaatgcaagctttttcacgtactaaccgtatttatgacgccacgaagacctttggcaatatcgtcaccttccgtgatttagaacagactacggttgaggctatcactttatttggtgataaaaacaccaaaaacatagtgctggaaaaaagctataaagaatacatggaaggctttaccgatttaatcaccggcgaagcacgtcgcggatttttagaggtagtgacagagctacaaagacgctttcctaatcctgatgatattgttaaagaacaagataaaaaggactttgccaaactatttggtgaatatttacgtgcggagaatgtactgcaaaactatgatgaatttgcaggattaaaggctctacaacatgtagatattagtaatccggaggctgttgaggcatttaaggctaaatactacctgagtgatgaagatatcgccgcgatgcaagcgattgagatgccaactgagcgtactattcaagattatcgctcaacctataatgatacgcgtgattggttacgccgtgaaaagtcgtctaacgagaaagataaatctactattgactgggatgatgtcgtctttgaagtggacttgctcaaatcgcaggaaattaatctagattacattcttgagttgatttttgaaaacaataaaaagaataaaaataaggcagagttaattgatgaagttcgccgtttaattcgttccagccttggcaatcgagcaaaagaaagtctaattgttgatttcattaatcaaactaacttggacgaaattatcgacaaggccagtattattgatgaatttttcaaatttgctcaagctgaacaaaaacgtgaagcagaagagttaattagctcggagaaattaaatgaagatgcggctaagcgctatattacagcatcattaaaacgagaatatgcaagtgaaaacggcacagagctcaattccactctacctaagttaagtccacttaacccggaatacagaacgaaaaagcaggctgttttccagaaaattgctgcatttgttgagaagtttaagggagtaggtgggcaaatataggtgtgagctaatatacagaattatttacagggtccagtcgatctactattcgctattataagccacttaccaaccatctaaacaccttgacgtttagatggttaatacgctatttttccctcttccatttgtatcattatctcacctttcctcggctcacaaattgatgcgtcttaatagttttagacaccacaacagactgtaattattgtgaatttttatgaagctatttttaccatcaaacaaaagctggccccgacaaatctaatcgataacgtattaacctgttactacaaagatcccatcgcttgcaatggtgattcaggcaggaaaggcttagccttgccggtcataattaccctgtccacgaacactgtctgaatcgccaccatcaatattaattaatggaagggataacaggaataaataatgttagaaatggctggcatcaagcggatataattgctgcattacgtaagcgtggaacaaccttagcgactgtttttcgtgaagcgggactcagttcatcattagccaatacgctcagtcggccttgacctaaaggcgaatggattattgctaactatctcgaaattcatccccctggaatttggcctagtcggtattttgatatgtacggtcaacttattgagcgaaaggctagaaaagtattcaactagaagaggctcgatttaaatggatatttttttgtgggggtactaagcaccccactaatttttatttagagcttttcttttagttaagagaagcttagtcacctttatttagcaaatctaaacttacatctccatatgttaataaatcaaaagctaaaaataactttcttaagtttgattttaaatgatcatcctttccatttattttaaataatggaaaggcttcttcttggatatatttccttaattcatctttacttattgattttatgttctttattataaccaataattctttgttttttaataagttctcggctttgatatcttcaattgatctaaacccaatacttgagtattttttatccagattaacagatttaactaagttatctatttttccatgcatatttattcttgtttctatttttttcatttctttttttgatatttttatattatggaaatcacaagattttattaactttgagaaaggagttctggcatgaggaggacaatcgataagaaattcaatagctgatttatttggtatttcacttttatcaaagatataatcttctaaatattccatttcttttactctaatataaacaagttgtttatcacctaaggcaacaactaaatttttaccagaattggcatgtttctctaattcatccaaatcagaaggtgtgactaatagactacctagatttcctttctccccttcttctagtataagttgctttattaccctttgatatctaagaatatcatatggcggcaacccttcatctatattacttatttcatcatatatctttttataattatctgtttctatagatgtatacgttatttgtgatttatcatctgttctatgcgtttttataatatccatttcatcttttttgaactcaatcagaataattctttcagcagattttcttttgtcttctttcggaagttgtgaagaaaaatcagtcagtagtttttttacatttctatctgttaatgaatatccaataaaaattatcgagctttttatcatgcttgacaatatttttgcgctaatcagtatagatttatcatcatatctttcataatcataactattaattactattgaattaggtaattctatatctccgtgtattttatataactcactccatccaatagtatcatcaaaaaaaccttcattgccaatatacattttaggttcaacattttgttctgacaaaagtgtttcaataaatgaatcataatttgttgtaataatcatttttgcattttttaaaaacttcttaaatgattcaaattcatcttttttaatattttgtcttaatttatcttgcttgaatctttgacataaagaatatttaaatggtgatatatcctcgtcaaaaactctttttgatgttaatccttctaatgatattttccctgaattaaataattccttgaattttttttcaatgtaagttgctgcgtccgaatatactttatgatttaaatcagagtcattttgttcttctttatatttatcctttatttccgataagtaattataaaaaccttgaccattgttatcaattttattccagtattcttccagcaactcaggccatgttggagaattttccaagtatcttttagacattccagatccaataaatactattggataatttttaaagttaaaaatagagtcagacattttaagcccttttcataaagatcagcggaccactggtatactgcatatagtaaaacatattaaatcactttttctaatattttgatcagagcttacttaatttgtgagatatgttggcgattaaaaaataaaccaatgttataataatgatgattattaatttatgaaataaattcctgttacatagtaacaatttgttattttaaggtgcaatatattgactcagagaaagtaataccataatgatactatcagcacaaagtttgacaacctcttttatatggcagacacatatatgagtttatccaaggataaccaaaactctaataaagagtgggtaatgaactactctgaataagaaagaatcaaatgcaagatatagttcaatgattatttttatgcaatattactgtagcttacctttctcatcgatttaaataataagaaagcccccattctttatattgctgattaatttctttcactgacatgagttttatcttggggattgacaagctttcgtagatttcaatatgacgttttctgcttttgggtacggcgaaaataatgtgatgtatcatctcccattttatgcgttctttagctccgaaaagaccaccatgtcggtaactttggagtaaagtcctgttcatatatcgagacaaactcatacgatttggattgatattacagtggtatggagttattcagatgggatggaaaagggcgggagagataatgtgagagatttggagaaaagcgcatgatataaccatctaaacatcaaaatacctagacggttaatacctgcaacacaaatcgactttatctatgtcttaaacacctgagtctgatgccattcaataaatctatctgccggatagtactgacgattacgcggaagataaaggctttcgccatctctggcccagaacaattgctcaacaaccggactacgattgaccccatcagaaattttaatcttcagattctcgtctatgccgattgcacctctatcaaaagcggaatgatgaagtgtgcaaagtgccaaaccgttctccacaaggcaagggccaccaaactgtttccatttgatgtgggcggcttccagaccgaccagagagccatccagacgtaaatcatagccacaaacggcgcagcggtagtgataagcgcgtaaaaccacatcacgaaaacgtggatcacggctatttaacctcttgttaatatcaaaacctagtcgctcaaccagacttacctgaacgctttcagggaaatgttcattgaggatctgttgtgccagttcatcaacaagcgcaggctgacggcgcagtaactggaaactgtctgaatcaaaacctccggcaacctgatactcaatcagctctcgttttggcggttccttgcttccccgacgtggtgtgcaatgttctgcatttttcagttcccaaaagccatctctccgtaaacgccagaaaggcattgaaggatagtgttctttgcggctggggccaaaatcagtgagtaattgtaatagtggttgatggatttcatcaccgtatttaaacaattgcccatgaccttttttgtactcagacaacacatacaatagcagtaatggcttatgtggtgcgcgttgatcgcctttacgccagacggtgagttttgatatcgctgtttgcagtgctgcgagtgaagtcataactattagctaaactggtgaatgaactgcgatcatgctcgcaaaagtgaataagttcaatacttagttgatgctgagtattcatactgccaacaaacccggttatattaaactaggtttgtcagcagtctgggatatctaacattaaagttagatatcctttgctcttactcagaaaaatcctagagtagattatattacaaactccaagagcgaggtatcaagccatctccttcatccttccagcacgcggcttcacatgtattttttacttgcccccatattgattcatcagcatgctcaagcactattacttgaaaaaaatagttattttcttcaattgcgactgccaacatttcaaaaattctccgtgtagcgacaacatcattttgtctggttatctggagactttcatcttctgccattacatctaatatattatctccggaagcagcactagggaaataaacttgactaggctgatcaatcactaaaaagctaaacggaggaagacgagtacgatctttatgagatagaaattcatgcaaagctaaaaagacagataaatgatatcccatccaattagctccactgccgacttcccataaaaattcatttcttctatcattatctacattaaaacataatgttaactcatttttgtcaagtttaatattgcctcgacgttcaagcctaaaattatcagcatacttttctataagtgaatttatctcttggtaaacaatatattctgttctgcttttattagactgaaaaaagaatttctctatttcattgaattgatcatctaattcttttattttctcacttatatcatcagtgttatttacttttttaagtgatgataatgtttcttggatacgcccaattaaaacatatactttattcatggaattgttggtagatttatctattttttctagattaaatttttccttgcggattttttgaagtttatcttgctgaattcgtaattctttttttaatttatcaatttctttatctgctatggggttttcaaaaagaacctcggagatagagttaatccgggaaatttgtttttcaagattatcaacaactgttgataatatatttgtttttgatccacatgcgatacattcacctcctggagacaaattattcttaagccagtcaaatccaacaatatgctctttttctttctgtattgcctgtgtaaaaccttgacctctggaaaatagttgctcatagtttctgatttggatccgtaatgtatcaatatgctgttggatctcctctccttgagcaacaagtgcttttaaacgcctattggtatactcataattaggagtacccaatagatcaccgatacgcccttcagtatatatatcattaatgtaatttaatgattttactttagcatcagtatcctgattttctgtttctgataataaccccaattccacacatgccttccataggcgatcaacatcaaaagcccaacttgacaacgcttttttgtttacctcttgctgtttatatagtgaatctcgctgcttctgtatatctatacgctctttctctctaatcatatattgacgatcaataatgcctaatgcaaacggcattaccctttttagtctttctttattctggtaagagtcggctttaaaaaatagagtatatggattagccacaatatgttgtggcaagtaattaaaagcagccatatctctgtaggaagctcttccatcaaatccagttttttcgttattttcagacagagggagatcagtcagattaacaagttgattaaatttatttttaaaaacagcatctgaatgagttgaagtaagagtcaaaggaagttcttcaggataaggggaaagatggtactcattgctaaccgatcttttactgggtgttttccttgctataagatatttataccctcgaatattagctttaatcgcaaaccacataacagactctcgaataatacctacaggaatagcacacttgcttgctccaagacaataatcaattattgatataattgatgattttcctgtgccgctaatcccatgaactatatttattttatcgcttttaaaggggattacccgaagattattattgggattaacaggccaaagtattaatgcatcaatagtgaatttcataattagttacccagaagaagacgataaatggaaggtgtatctacacaagaaaaccagtttgccaatcgtgttatggtttgaaccatttctttaggaagcaacttatttattcctcccggccattttgagaagtttgttgcaaaccgcgtttcaccgtgttcaatcaatcgcattagcaaaccagaggaaacagctaaattcagcccctgaatggaggctcctgcatattctgaaacacgttgcgctaagttagatttaatcaaaagtgattcctgtactacggcaattagaggtgttgttcttttcttttttttgattgattcccgactgactttatgccatacaataggaagtacaagtaatagtttcattaaatcaggatgatcatcattcacagaacagctctcatattgttctacaaaatagacaagcagaaaacaggcgagtgaactgttattaattatattgctatctttataaatcataattatttctccttaatcttcaggaaatcattatgccagtgtataaatgtttcctttgaaggggaattggctaaatcgtggtaatttcctgtcgtaaaataaaggttctcagttcgttgaccagccagtgaagccgtataattgggatccgttgtatcagtataaattttcttcaacatattcaatttttggctatttccttctgattccagtccaagttcaatgcaatctttaatttgtaaccaacgattataaagtacatcatcacgggctcgccatgctgaaagaggaatttcacctgcctgttgtaatctgaccctttcagcataaaatgcccaatagtgctctaatgctcgattacacatcgttgtacttatatcaatatgttgaagttgtttgataaataaatgctctgcattatcttgcttaagataatttttgaaagcggtttggaaaaaaggttgctcagtaaagtttttacgtttaattagacttatttcagaattcaagagattagcaaaaggttctttagtcagctcgacaggttgtttaactttccaagcagtattacatttgtcgatcataaatccaaacaacgtctgatagatattatctccatgttcctttacttcagatggtaaatgtagtaactgaattgtagcttcctttggggaaataccagaagccgttccatgactatcaagaagttctatatttttaatcaggaatattaactcttcatcagaataagttaacacttcctctgcaatagatttaactttccccgtaatttttttcgcctgttcttttaacattgctaaagcagtattaatctgctcttcacttttcgcttcagaaagaaatactacaagattttttttatcaataattcggttcgtgactaaacaataggtaacttcgtcatatctttcacgggttactttcatagcatccagccagatatgcaaggtatgccacaaattcttgctactgtcctgataaggctgagctctggtatctaaactatgtttatcctgttcgaaagtaatgcttggtaatccactagctaatatagcctcctctaccacatcatctactgtttctatcccaaatacaacagaattatgttcacttgagaatatgcgatataaggcacgctcgaactgatacaggaaaccgataagttttgaactagcatcttgggtaatcattagcttatttcacattctgtacaaaagccattgaaaaactacttacttaacttatgtggatggacaaaaactaaacctcaccacaatcagaaagatattcaaactcagattaatacaacatgcaatacattattgttaatatgtttcctaggttggtcatagatatctcctgcagtagactttagcatccactactactggtacatataaccaacttatcaccgattttggctctgtcaggtctgatattatcttcttacagacatactcatcaacgtaggtagtaatgttataactttaatgtcaatggcagcactcgaaccagaagtaatttctgaggcatctcccatcacgtaaacttggaggagtgggaataacgtagataaccgaagtaaattctgcctttatatttcataatatacccaatggatttcaaaatgcatcgcggcggcaagggggtgaatcctcgggagcatagataactatgtgaccggagtaagtgagtacagccaacaaagaggcaacttgaaagatgacgggtatatcttcagttatgtggtaatgaccattagtgtcaatagccataaatgatttcagtattctgtgattgttctccgactctgccagcttccagtaccagtgatgagctggcacaacaatatgtgccaatatgttagcgaaaataagcatgggtcctaatactacagccgtacttacttctctcaatagaaaagacactcatagaaaagcttaattcatgcggtttctcagagttgtgagtatcaagggaaatgcaactttctggtatctacggctgtagtactagaatccaatttagttatatggatagcgacggtgaaaaatatttaagtaataaaggtaatgatattaatcttggcgcaacaaaaactactgacccaggcgatcttggtgttcctgatggagcgatgatttttatgcatgtgtctgtagtatggggaaatgataatgaagctcgtcaaacttttttatacaaaaaaggaagtcaatcgactgcgagttatgttatcagtggtacaacattaaataataatctcggcttgatcgatgttgcgtaatacatataggtcctctatttatgagggcttgttcagtgaataactcccaagaatctcattacttaaccgatactttaccagccagtagaactatgttggatattatggaactcgcaatggttggtgcaaagttaggttatttctccacaacccgccttttcctgaaaggacatctgtgaccatgacaaatcatagtttcccaattatctctagtacgctattttaaaaacatgtattaatgttaaaatttttgtaccatttctacagaggcgaaatcatattcttaacaaactattacaaagatatcttcgctgataacccgattgactttattaatctatacccaagggatttcaagttgcatcgcgacggcaagggagcgaatccccgggagcataggtaactatgtgaccggggtgagtgagtgcagccaacaaagaggcagcttgaaagatgacgggtatatattcgcaaacgcgtagcactgtctattcaaaaggagagcttatgaaatcaagagctgctgttgcattcggaccgggccgtccccttgaagtcgttgaaatcgatgtagccccgccccaagccggtgaagtgctggtcaaaatcagtcataccggtgtgtgtcatacggatgccttcaccctgtcaggggatgatccagagggcgtttttcctgtcatactcgggcatgaaggcgctggcgtagtcgttgaggttggtgaaggcgtcactagcgtcaaacccggtgaccacgttatccctctttataccgcagaatgcggagagtgcttgttctgcaaatcaggaaaaaccaatctgtgtgtggccgtacggacaactcaaggaaaaggtgtaatgccggacggcacaacccgtttttcctacaaagggcagcctatttatcattatatgggatgctccacattcagcgaatatacagtcgtagccgaagtatcactggcaaaaatcaacccggaagcaaatcatgaagaagtgtgcctgctaggctgcggtgtcactaccggcatcggtgcagtgcataataccgctaaagtacagtccggtgattccgttgccgtctttgggctcggcggcattggccttgccgttatccagggcgctcgtcaggcaaaagcaggcaagatcattgccatcgatacaaatccggcaaaatttgagctggcaaggcagttcggtgcaaccgactgcctgaacccaaatgattatgacaaacctattcagcaagtcattatcgagatgacggaatggggagtggatcataccttcgaatgtattggtaatgtcaatgtgatgcgtgctgcgctcgaaagcgcacaccgtggctgggggcaatcagtgattattggtgtggccggtgcaggacaggaaatatcaacccgaccattccaactggtcaccggtcgttcatggcgaggcaccgcctttggtggtgttaaaggccgcagtcagttgcctaaaatggtggaagaggcaatgaaaggtgaaattgagttaaaaccttttgttactcacaccttgccgctcgaacgcattaatgaagcattcgatctaatgcatgagggaaaatccattcgcacagtcatccattactaagctgttttacgggagttaaaaaccgtgctgtgacaggcggtttttaataaaacaggaaacgataaccctaggtttaccgtcaaatgagtaaacctgtaggtaggttttacagaggaaaaagaatggagaggattgaacgccacacttgttttgggggatggcaggatgtttatcagcatgaatcgaccgtgcttgactgcaccatgaattttgctgtctaccttcctcctcaggctgaacatcagaaattaccggtgctgtattggctctcaggtctaacatgtaatgagcagaatttcatcacaaaatcaggcgctcaacgctacgctgccgaacagggtattattctcgttgccccagataccagccctcgtggtgagaaagttgcagatgatgacgcctatgatttaggtcagggagccagtttttacctcaacgcaacacaaaatccttgggcgccgcactaccgtatgtatgattatgtggtgtcagagctaccaatactgattgaagcacactttccggtaacaaccgctcgggccattagtggtcattcgatgggaggccacggcgcactgatgatcgcactacgcaatccagatcgttaccacagcgtatcggccttttcaccgattgttgctccttctcaagttccttggggagaaaaagcttttcgcgcttatctgggcgaagatcgtgacacatggaaagcctatgacacaatcgagctgctggctaataacgccgagccattgcatatgttaattgacatcggtaccgatgatccgtttcttgaagagcaactacgtcctgaactgctgaaggatgtatgcgaaaacacaggacatccctacacactgaacctgcgcactggttatgatcatagctactatttcgtctccagttttatcggtgaacatatcgcatatcatgccaatgtattgaaggagatttgtattgataatcaataaattacatacgaatccattaatatttttacgataaaaggatgactaaaccaatacacgggtggtcatttagtcgatttgatacaaattcagacaaaaaaacctacgttaataaggtattaaagaaattttttactctatttactttgggtcaatcctgtagagtaggccgctgatttgaagtgagttctccagcggcatcccatcaaccccctgcaacaactttatgaagagttacttgaacaacttaaaagggcagaagatattaggaaacagacttttcatcggcgacaaaatggaacataagattctttatgaataaactgaataatcgccaacgtcagacattgggatactaaacacttaatgaattatttttaaatcaaaaaaattatcttatagtattagataaagtcattttcacttatttataaaaatatatagattttaattaagcattaagagacaaattattgtcataaactaatgaaataatcgactgagaaaaaatcaagatggaaaaatatctaataattcattaaataaatacgaaatcatttattcacagcgtcatgatgttgcaattactattataaaaaaacattataaattgaaatcattactaatcaaaacaataaagtcattttgtataaaaataaatatctcattttattgtgttataaagaaaaaataggaaccatattacatatctaatgaaagaaaattacttattctggtacttgttaaaataatttttgttttttataaaacacacataacaattatttgtcctagtggttttaatgtgttatttattccactcgttaagatttattttttatttaacacatcttagacgacttacttatttgaatagctaaatgttattagttttttctcaaaaggagactgtaatgacattgcaagaaattggcaagatgagtcttaaaaactcaggtggattcgttgctagaatccaatttagttatatggatggcgacggtgaaaagcatttaagtcagcaaggtaataatattactcttggattaacagatactgttgaccctggcgatcttggcgttcctgatggctcaacagtttttatgcatgtatttgtagtatggggaaatgataatgaagcccgtaaagcttttttatacaaaaaaggaagtcaagtacttgccagctacaatatcagtggtacgacattaagcaatgatcttggtttgattgatatctcgtaatacatacaaacccaccatatttaaattgtccccctatgtacggattgaagtccaacatttgggggacagttcatgcttgcactctctcacgttccaagcctgagtacacgtttatctggcgttgctcctaatgtttcagtcacccttctacatgtacgccatcacatcaaaggtgtgttactgtttatagttatagaaaaattcttcttcgtgatttcagttacaaaaatccctttggaaaaaaatagttctgttcatcttcaataaagtactgttattttagtatagttatatcttcttatagagctccggtattaaatcattacctattattcggttggaaatatagaggtgaaggcttgagcgacgttgtattatcgaaaaaccatattaatccctttcaatctcagctggaggaacttgattcaaaattagttcctattgagggagaggctccttcagagttaaaaggtactttctttagaattggtcccggtcgcctgcataggggagacgaatattataatcatccatttgatggggatggaatgatatttaaagtaacgttcagtgataatgggatattctatagaaacagacatgtgttaacaaaggaatacttaaaagaggaagaagctcaaaggttactgtatcgctcggttggaaccgtccccaaaaaactaaaactcaggatgagattttttattattaaaaatccggcaaatacaaatattgtatatcattctcataagcttctggcgttgtgggaaggagggatgccacatttaattaatccggtaactcttgagacaatttcaaaatatgacttttctggaaagctaaaagcacgattttctttccttcccaaacttaaccttcgtgaagtaccatttacagcacatcctaaaaaaataccaaatgatgataatttatatggatttggtgtgacatatggtattggatctaagttaacgctatacaaaatagacagtgccggcgatatgatggttatacgcaaaatttcgcttaagaaaaggtatttaattcacgatttcatagtgacaaaaaattactttttattttttttaggtgggccgcatataaatcttaagttgagcaatgtaattggcaatgaaagcatcattgcatccatgaattcacgtgaaagtgaagatggccgggttcttttagtttcaagaaaatgccatgatgtgaaattctatgatgcagttcctggatttatttttcattttgcaaatggttatgaagatgccgatgggaatgtgattttcgacgcctcattttggcggtcattcccagtatttacacagaatatatttaaaaataatagttcagaactttgtcgttttactttatgcacagcatccgggaatgttgataaagaaattttattcagggggaatactgatttcccagccataaaccctacagtctgtggtagacagcacagatatgcctggttcgtttgctgggaggattctgacagtgaagggagatcaataattaaatttgattgttttgataagagtgtattaagccacagttttgataatgatttgccggaagaacctgtttttgtagccaaaccgggtgctgttaaagaagatgatggttggcttatttttaaggtttatgtcgaaaaattgcactgtacagatatcgtagttttaaatgctgatgatctctcaatggtgtgcagattacgtttgccgcaccatattccaatgggaatgcatcactgctggataaatgaagttatgctataccctatggatttcaagatgcatcgcgacggcaaagaagcaacttgaaagatgacggatatataccctaaagatttcaagatggatcgcgacggcaagggagtgaatccccgggagcatagataacgatgtgaccggggtgagcgagtgcagccaacaaagaggcaacttgaaagatgacgggtataacgggtatataagcctgaagcctattgtaatataagcttatcattgtttttcaaatggcttagtgaaattatttacgtgattcgggaaatatttatgaacgtcagtactgcacgagctatgaattacgaagagacattactggagctacagagtgcactacaacaacacctagaactggtacttccttcaggagccccagatgataaagtctgcgcagccatgcgagaaagtacactggtgtctggaaaacgtatccgccccctcttattgctactcatagtcctggatcttggagaaaacccctggaagactgactttctacagctggcatctgcaattgaaatagtgcatgccgcctcattaattttagacgatcttccctgtatggataatgcggagtatcggcgcggacgcccggctattcatcggcagtatggtgaaagtgtagcgatcctagcggctgtagccttgctgagccgggcttttggcctcattgtagaaacaaacctttctgaatacgataaatctgctgctgtcgccatactttcccatacagtgggtttaaacggtcttgtccaagggcagtttcgcgatctgaacaatacattatgtgctggtaattatcatgccattgctaccaccaacgatttaaaaacgggtttgcttttcgacacaacatttcagttagcggcaattgctgtgaatgcacctgatataattcgccaggcattgcgtcatgtatcacaacatctggggcaagcgtttcaattactggatgacttgagcgatgacctgaataatacagggaaagatatgtatcaggataaggaaaagttaacaatggttacgctgctcggaaaatctaaagtgcataaacaattacgcaggcacatcagatacattgataaatatttggcaatagtgtatcgcagaaatttagcttcacgatattttatacgacactggtttgataaaaatattgcgatgtttaattaatttcaaccttggcccgaaaaaaatgaaaaagatcgatcacactcagcgcaagaatgagcatctggatattatattccgtcctcctcaaacggagtcccaagtaagtacggggtttgctgagtggcgatttcagcattgtgctctgccagaattggatctagacagtatagatcttaagtgttccctctttggaaaaattttgcaggcaccactgctcataagctctatgactggaggggttcatcgtgctcatgcgattaatcatcatcttgcagaggcagctcaagtactgggcatttcaatgggagtcgggtcgcaacgtgttgctcttgaaaatgaagcaaacgatgggcttagtcgctcactacgccagatagctcctgatattctccttttcgctaatctcggggcagcccaaattcgtggcgagcgcgggtttaattaacccgaattctgcttaatccgtcattgaaaaatcgtcttctgagtagaaaactttcagtgatggcttcttcaatttaaggcagtaagcaatcaatccacctaaaacgcacaacagaaagccttttatacttcggtggcgggaatgctctatttgagaaagagtttttaattgcccattaatcgtttcaatgataaaacgcttttttaacattatcttatcccactcagcttgcatactcgctttcatgttacgccgttttttcgtgatgaaagtgacatcggttttagctaaatcgtccgccaattcctggctgaggtaacctttgtcaccgtaaagagaacccgttaattcttttgataattcacgaacaggttcccgatcatccacattacccggagtcactttaagcgcgagaatttcaccctgatgattgacaaccaggtgtaatttgaaaccgtaaaaccagcccattgaattttttccgcgctttgctatccccgcaaagaccttatgtcgagggatgcgaatgttatggcagacactcaaacgggtggaatcaataaaagcaatgcctgtgggtttcccttttaattgagtcagatagctgcataatggcaccaaaacggaaggagccacactgacaaaacgaggatagctaagcaaggttggaaaatccttatggtgatatttccaaatatgttctagataaaaatgtttaaaatcacggtaatgcgacatatgaaaaaggatcaaaatggtcatgatttcactgggatacatatgaccttgtcggcggcgtaaacgatgcccgctatcgagacaaaattgttcccattgagggatgaaaaaacggcaaaaatcatcgacatcacagaaaatttcaactaagttgtccatagcctgttcccccctcggagctgtttttggtgcacaccaaaactttgctcctggaacaggcttctcgtcaatttcttatccagaattcgggttaattatgctctgcgagcagtacagatgattgaagccgatgctctaattatccatctgaatccgctacaggaggcgctgcaacagggaggagaccgtaactggtgccatattctatatgctattgaacaactcgtaacaaaacttggggttcctataattgttaaagaagtaggttcaggcttatcgcttcctgtcgcacgccaattggcagaagctggcgtcagtatgctggatatagccggggctgggggaaccagttgggcagcgattgaagcagaacgagcatccacaccgtatcaccgcgcattggccatggcatttgctgactggggaattccgaccgcgacagcactgcgtgaaatacgcgaggcacttccaaatatgccactgatcgcctctggcggtatcagaaatggtgttgatgccgccaaagcttattgcatgggggcacaattggtcggccaagccgctgccgtcatacatagtgcagccctctccacagatgcagttatagaacatttccaattaattattgagcagataaaagtcgcctgcttttgcacagggagcgccgatattgctgcgctgcgtacagctgttttgctaccaacatgagtctttccgctatgactgaatatctttaatctctttcaacaaacacgaatttccgtgatgtatatgactcttgatgaggttaataactgtgtgattgtcggaggatcaacaaaatgatgtacgactgggatctgattctggtgggaggaggattggccaacggactgatcgcaatgcgtttccagcagtgtaaaccacatctgcgagtgttgcttattgaaaacacagaaacaataggaggcaatcacacgtggtcatttcatcaacatgatcttactgaggcggaacatgagtggatagcaccgctgattacctatcgctggtcaggttacgacgtcatttttccagcatttcaacgcacattgccacattcatatttcagtatcacatcccaacactttgcaagcatactccatgcatatttgggcgaacgtatacagactcgtttattggtacaggagctgactccacagaaagtttacttacaggacggctcgtctctaagtgctggcgcagtcattgatgggagaggctggcgaccaggaccatttatagggagtggcacccaggcattttttggtcaggaatgggagctggaagagtcgcactctttaacccacccgattttaatggatactagtgtgggacaggatacaggttatcgatttatctatgtcctgccgttctcctcaactcgtctgctgatagaggacactcattacgttgatcgggggccacctgataaggctttgtcgcaggctactatcgcagagtacgcgaagaaacatggatggaaactgggtaaactcattcgagaagagagcggttgtcttccaattacacttacgggagattttacctctttctgggcacagctagcaggacagcccacctgtgggttacgtgcagctttgtttcaccccacaacaggctactctctgccacacgctattcggttggcagatcgtattgttgctctgccggagcttaccgatacctccttattcattaccctcagggattacgcacgacaacagtggcaacaccagcgctttttccgtcttctaaatcgcatgctcttcctcgctggggatccacaacaacgttggcaggtaatgcaacgtttctatcaactttccccaaatctgattgcacgtttttatgcggagcaacttaattccgtcgacaaggcccggattctcataggtaaaccaccagtgccgataaagggtgctctaaaggcaatgtttaaacaacacaagaagcttcagggtttttattatgattaaagcgctggtaattggtgctggttttggtgggctggcactggcaataaggctccagtctgcggggattccgacatgtattttggagcaacgggataaaccaggtggacgcgcttatgtttataaggaacagggattcacctttgatgccggccccaccgtaatcaccgctcctaatgtcattgaagaattgtttacccaggctggtaaacgtatggctgattacgtcgatttacttcccgtacaccctttttatcggctctgttgggagtcgggtaagatgtttgattacgacaatgatcagcaacatctggaagcacaaatccatacgttcaatccaagagatgttaacgggtatcgacgctttctagactattcccgggaagcctttaatgaaggctacctgaaacttggaacggtgcccttcctctcttttcgcgacatgttgagtgcggctccacagttgatacgtctacacgcatggcgtagtgtttatagtcaggtggcacgctttatcaaggatgagagcctgcgccaggcattttcatttcactcgctattgataggaggtaacccctttgctgcatcttctatctatactttgatccacgcactggaacgagaatggggagtctggtttccgcgaggaggaaccagcgctctggttgaggcaatggtgaaattgtttactgacattggtggagaaattgagcttaatgcaaaggtaaaacgcttcaccacccatggcaatcgggtcacaggtgtccaattagctgatggacgaaatatgacatgtgacgttgtggcctcaaatgccgatgttattcatacctataagcacctgttaggtcagcatccggtcggaatagcccgcgctcgaacactggtgcgtaaacgaatgagcaactcactgttcgtgctttatttcggtctgaaccatcaccatacgcaattagcccatcatacagtttgctttggtccacgctataaggaactcatcgaagatattttttatcatgaccgactgtcagaggatttttcactctatctccatgccccctctgttactgacccatcccttgctccccgaggatgcgcaagttactacgttctggcccctgtaccacatttggggacagctaatttaaactgggatatagaggggccacgcttacgtgaccgtattttcgcgtatctggaaaagtactatatgcccggtctgctcaagcagttagtcgttcatcgtatttttaccccatttgattttcgtgaccaactcaatgcccatctcggttcggccttctcctttgaaccgttgctgacacaaagcgcttggttccgaccacacaatcgggacaaccgcattgataatctgtatctcgtcggcgcaggcacgcatcctggagcaggtattcccggcgtgattggatcagcaaaagccaccgccacattgatgttagaggatatcgctaaatgaatcctgcgctacttaaacacgttactcagataatggagcaaggctcaaaaagttttgccagtgtcacccgacttttcgatacagcaacacgacacagcacaatgatgctgtacgcctggtgccgttattgtgatgatataatagacgggcaagagctggggagacaaataagcagtgttgataagtatagcgcccgcgagaaacttcaaatgctgcaatacctgacaaagcaggcttacgacggtttgccgatgaccgaacctgcttttgcagcctttcagacagtagctctgagtaatgaaatccctcagcaacaggccttcgaacatctggaaggattcgcaatggatgtactctgtgagccttacagaacgttggatgatactctgagatattgctaccatgtcgcgggagtagttgggctgatgatggcaagggttatgggggttcgcgaggcgagtgtgctggatcgggcctgcgatctaggaattgcttttcagttaactaacattgctcgggatattattgaggatgcgaaggccgggcgttgctatcttccgctagaatggcttcaccaagaagggctaatgccagacacacttatttataccgaaaaccgtcctgcgctagctcgggtggcatcccgattgattgtggaagcggaatcttattatacctccgctctgacagggcttgttggtttacctttgcgttcagcctgggtcatcgcttctgctcatggtatctatcgtgaaatcggcattaaagtgcaacaagcaggagtacgggcctgggaatgcagacaaagaactaatcgtggagagaaggttaccttattaatggctggcgcaatgaaggcgcttatatctcgggtggcgataacaacgcctcgcgatcccaaattgtggcagcgacctcattaaaaattaactccactttgtggtaaaagaacatctatttatgtaaaacaaaagtggctggcgcaaagtaaattatttccccgcaaccagccttttcctgacatgctgcacttcccttcctctttcgaggttcaaacccattactgggtaaggattagtcaggctcgcaataggtactccaacggactatgattatcacgacattccgagataaccatttgttttaaaagtaaaaactttacactcaaaacggttatgatgaccttaatgactggcctaccaccataacacattgttttaaaaatcaattaaagaaaaatataacaaaaacgttaaagttttcgttaacttttatcatcttaaggaacaatctttacaaaataagtagtcaaaccgcatgaagctcttgtgcttaacacagagttggtcgaaattatttcatcggtcaagaaggataataatatatagattgtcttaatttttcattcctaccgaaccttggaatacattgcttcctttccaatgctaagttggaacgaataatcaaccagcaaagcacagttcttaattaccatctaactctacgatatatgtaagtttaaaatcattccttaccccgtttttaggttcaataaaggaagtaaagtgaatgactcaacatcttccgagcattttcgcacttgagcagttttcctctcatctgattcaataagatgagaggactaagcagaaaatgactatgagttaaactatgcataagttacacctatgcatcggaacttacttttccaaaagagcttaatctcaaaaatttagaagaaaatagatcgcttggcatctttttcttgagcaactcatgaaaattctcatcatgagttgtcactataatttgcttattgaacataatagaaagcattcgaagagtatcgatcaaacctaaagtattgattgcatcaattgactgaacaggatcatctatcagtatgcaatcaacaggattgccttcatcgtcctttgaagacaaggctctcgcaagaaaaatactcaaagctaagacattaatttgagcagaactaaaactcaaagttggagacattagtttgtcatttttttcactttgtgcagatattaataaccttggattatcatcagacgtacaagtaaaaacaatttttttatactcaggatgtggatcaatgctgctatatatcttatttatcaattctgtattgaagaaagaatcaactcttaattttatttcattcccgagttttcttatatcactgtcaagttcaacaattacttcactcaatttagaaactttagaggatatactataaagttctttctctagtaagctggtatcagagtaatcaacgatctttgatgaaatgctctcaatagatgaaaatttggccaagcaatcagataacgttctgtttttaacattgataccagtgacttgtaactctagagaatctttcacttttgtgtaaaccacagagttatcctcattatcaaatgagtctgccacactaataaaccattggttttccttagataataaagacatcttatcttccaaatcaaccaataaggcgttcatcttttccttactaacacctttaaattgtgaatctttattctcactttcaagcttgttaattttaatgacaatttttccgattctatcctttagccccttttgactatcatttaatttgtcagttttaagcataacaaaagaaataaagtcatccttatttacgccttcacttaattgattagatttaataaaatcagaatacttagataaatgtaccaccaatttaaaacgttcattttctaggtcaattattttcttattaagctctatttgattaactcttgactttatcgactcttttatgtcctcaatctctttagatatagaatgctctctatctctttcacattgcacttttgaaatcaaatgttttgaatagtcatactttgacataaacattacagatgagttaaatttatttatttcagatataaagatatttttactttctacaagagtagattttttctgagaagattcatttattaaattctccaaggaagaaatttcatcttttaaaccatttgatattgattttttcttttcaataaattcaacattaaatctatccaacttcatagataattgttctagttcttccatcaatgaacttttcgaggcattttttttcttttctatatctgatagcatagaattgttattaattctagaaataagctcatcataggtttcgttatctcgctcacataaaggacagtgagattgttttgtacttatgacaatactacttgctttatctattaaaaaagatatgtcagtttgttgttgatttatactttctaactctttatttattgattttattttaccatcaatctcaaccttacttttgtaaacgtaacaatacttagcataaatatcagataactcatttttattatcttcatggataataaaaaattcaggcagccatttaaaatcaaaaagggtcaacttctctaatgatgataaacatatgtctgccacatccttctggcctttattttttttaatctctatttccatattagctagttctttttcaacaccatctaaacttgttgatttatcttttatagtattaaacacaaaatataagttggcttgctctttacctaattggtcaatattctcacaaaccttttggtgaaaaatgattttttcattgagtgaatcatttaaacttttgattaaagcatcattcatttttaacttcagctttaattcttcaatctctttgagagtactatctaactttaacttataggtaaaatattcatgggcatttttgtttaattctctgaggcttaaaataacatcctgatttaataataactctttctctaacgtattaaaactttctttgagggcaccaacttcatcataaaacttaattttgtctaaaattaatgacctttcattaatacactctttgtatttataatagatcgatgcaccaagttttaattgagataaattaacctctattttagaaagcttttcatcattttctttaactctatttttaattatattttcagcttcttttaaacgagctgaaaggtgaaaatgttcatttttagtaaatggtgctattacctcatcaatttttatttcatctaagtactcatttacatctttaattattatattaatgctatgaacgtaatccttgttatctttttgcctatttatttcacttgatagtttatttttggtgtcaactagttcttgttttttcttagacacgtctgatttcaatgataagagcgtagaacgtgcactattaatgtttactaattcatcatctacctcggagaattttttaaatcttgtttcagagtcggtttctcttaaaaaagaatcaatagattcttgatacaacatagaggattcaaaatatttatttgttatactctttgattgaattctccagtctgaacttccctttcttcctttcttatatgatgaaataaatggcttttcagatttactagtaataacctccactcgcgtctcaatatttttaggagcatttttatttcttattatcagttgagattcacctttaatgttatattgattactttcttctaaattaattttctctaacctttcatttctcacatatcggcttattttttttgtgatagcaaagtcaattgcatcaaagaacgatgttttaccgaatccgtttggtgagaatagtgatacaaagttcgcaggctctcccgatgtactatgaataaagtcaaaagtaccatccttcttctctaaatatgatttaaatgcttgtatttcaactttttttattttcatttattcatcactcaatagtttattgatccagttttctcgcatagactttgattttccatctcttcctccagacaacccagccaaaagaatagattttgaatgatcacctagaaattgttcccaacttctatcaaaaacaacattattgctcaaacgtatattggacaagagtaacttttcatctagtatcttcttggtttctttttctatatctgtcttttctaacccttttaattctagtgcaacttttctcatataaaatttatcattctctatctcatactttatattatcaggaatagcatcctgacaaataaaaacaagataattattccaacgctcaaattcagatggttcatatttacttaaatattcataatttaagttatcggaaatctctctccacctttcctttagaatactcgtggtaggagttacataacaaaatgcatttatcattgcagaatcaaatatacaaacagataggacaaagaattctacgcctaactctgaatttagttcctgaaacttattatttattgagaaattcttactgttcatttgaaagatactctctgtaattttcaacaattagctctttcaaatcatcaccttgaaaaatattaattctacttagctcctcttctttgcaagataagcaagcatcattaacagacggccaaaaaagtatttcattagaaatagttttattcctcatcactctttcaatcctttctcctgttatggcactacctatatctgttaatgttttttctgagacatttttatcaatatatggacatccaaaattcaaattattttttgtaaaaattacaattttaccatttggttcaagatcccctatttctgtttctaatatataagttttaaatatctgcctaaattttaaattggtaatgatcgtaaatgaatctaaagttcaaaaacaaccgttctaaataattagaattacaagagtcttcatcatctggagcgaaaattgacaaataaatagcaaaaaactccaagaatgcacaccaaagttctttatcatatagtttttttaagtcttggttatgcgctagaattcgattcgcaaactcttcgactattttgtttggtgtcacataataagagttaaagatcttataattatttagtgttatttttagtaaattcttgacaacatcaagactatcctcattttctaaatcaagattttcaaagatattatcgcgataaaatttaaaactagataaatgaatgggcttaatttcatcccaacctttatcttgaagaaaatcaagataagcatcaattctaatgcagttaattttactatcagcagcctgagtattactgacttcaaattcgatagctacaagagatacatcttggttttcttcattaataaaaaaaataccaccacctgaaaaaccttcaatatcttcatattgagttagctcattaatggtgaatacggatgtattgccttggatatcgtgtaataaacaatcataagaatataattgctctctaaatatgtgattatgtctcttgttttttgggtaaccgtaaaactttaattttttttcttggttataaaagttttcaatgtgagatatttcgacaccatctaaacgttcgactttaagaatagctacatcaatcactgggtgttctactttgtctaaaacagatatatttcgcccttcaatatttttcacttctattttatcaacgcttatatcttctacaacgtgctttgctgtcaatatgtatgaatattgagttgagtatggatttattaatacaccacttccttcttccaccctaactgtagcactttttaacttctctaattcatcatttaacatggatcaattcatcacaattatctgtagttatacctatatttttcaactcttctatctctttaacactaaagattctatttaatagagtcgggtagttgaaaataatgtttgcgttatctacatttttcactattcttgctattgtttttttatttggcaattcatgagaacttccatctgtagatatgataaaatttttacaatctattaaatttagaaatcgggcacttgtattaaactcactaccatgatgagatagttttatataatcaactttcagtttattactagaacttatattctgaccttgttcgtcttttaagctcgatattgcgtcacatacaactccatcatgtgcatcacccaaaagcaaaatcttatgattattgtactcaaacaaaatagctatcgagcttccattatgaatagatttatcacttaaaaatttatcatttagattaagctcttctaatgacttgccataatcagtcttctttcctgatgttatgctttgcgggacctctttttcccacttgcaaagtaaccttgctaagtcttctcttttaggagatagcactgtgatttttgcaccaaaaaactcacaagtatatccactttcaatgagccagttctcccaaatacctaactctgatatccgtttctcgaacgagactccttgttgaatactggtctttccgtcttgaacattgatccgctccagctccaattcgttttctggtagtacgtcactatcaaatgcttctttaatcaatttaccagagttaaaccataccttgtcacacagcgaaattagaagctctcctgacctgaatccatttagtattccacctatatgatcatcatcgacatgggtaagaatcaacttatcaacccgttcattgcgctcttctattaactttaatgttttataaagttcaccttttaacggaccagttttgtatacggatgattttccaccatcaattagaatattgcgagtgactccattgttttcccaagacaataaaatgcaatcaccattttttgcctttagtaccttcaaccttaacatagagtacttcccttaattccatacaatcaaaacgggcgcatactatactgatttcattttctaacatagattcgatagtcgctcatagagcatactatcacacaatttaggattgacactttcttatccatgacaaactcattattaacagattaattacatcgtgacaactttagctacggatgctttcttttttcgtgatattttcttatcaacaacggcagataggttctccgtagactggtgtgtgatgcttcgttatggcttgttccaaaacatctcttcgctccactatgcacctcagattcagcacgagtgacggctgtatataaccaagctctgtctaagtttctggctttatctaaggcaatgttcccctgtgaaaattgatatggcatgtctggcagagcactaatgtcttcctattacgagcaatcattaatttcttccaaagagccgtatccgcttttatgtccttgagttttcttacatgatgaacttcaaaaggatctattctggcactacagtattcacattggggtgccgccattcactccagcaactcagttctgtttgaatacttaacgtattcggcaatacatccgctgaactatattttgacgcatttctgtttttgagtttgaatacttctaactcatatatctttccattacgattttcccgataaacgcaaaagagcatctatttatgtaaaacaaaagtggctggcgcaaagtaaattatttccccgcaaccagccttttcctgacatgctgcacttcccttcctctttcgaggttcaaacccattactgggtaaggattagtcaggcttgcaataggcactccaacagcctatgattaccacaaaacaacatgataaccatttgttttacaaagaaaaatattgaactctaaaacggaatatcatcatcaaaatccattggtggctcattgctttgtggagcggaagattgggctggacgcgaaggtgcgccaccaccgctgaactgctgagattgttgctgtggttgtggctgctgtggctgtccccaacctccgccttgtgattgttggctatcctggaaactaccaccaccagcacgaccacccaacatttgcatggtaccgcccatgtttaccactacttccgtggtgtaacgctcttgaccgttctgatcctgccatttacgggtttgcagagaaccttcaatataaacctgtgaacctttacgcaggtattcacccgcgacttccgccagtttgccaaacaaaacaacccggtgccattcagtcttctctttcatctcgccggtctgtttatcgcgccagctttcagaagtcgccagagtaatgttagtcactgcaccgccgtttggcatatagcggacttccgggtcttgccccaggttaccgattaaaataactttgtttatgcctctgctggccatggaaatactcctgatgaaatgaatttctacaattattaagcaacacagtttaacatgcgacactaaaaatgaaacgcagccgctttagaacgaactttgcgaagctcaccgtaatttaattccgtacttattacattatttcacttaaatactgtatatctaatcagtcaactctgtgtaataataactcacttattattatataccctatggatttcaagatgtatcgcggcggcaagggagtgaatccccgggagcatagcaaactatgtgaccggggtgagcgagtgcagccaacaaagaggcaacttgaaagataacgggtatatgcacgtatgaataatccgggaaatgattcatggataacatcgaagttcggggcgcacgtacccacaatctcaaaaatatcaatctgataattccccgagacaagctgatcgttatcacgggcttgtccggctcaggtaagtcttctctggcatttgatacgctttatgcagagggtcagcgccgttatgtggaatcgctttcagcttatgcgcgccagtttctgtcactgatggagaaacccgatgttgaccatattgaaggattatccccggccatttctattgagcagaaatcgacttcccataatccacgttcaaccgtggggactattactgaaattcatgattatctacgtttgttgtttgcccgtgtaggggaacctcgttgcccagatcacgatattccattaaccgcacagactgttagccagatggtagataatgtgctaacactgccagaaggtcatcgtctgatgttgctggcaccgatcgtcaaagagcgaaaaggcgagcatactaaattattggataatctggcagcacaaggttatatccgcgcacgcattgatggtgaagtctgtgatctatctgatccaccgaaattagaattacagaaaaaacataccattgaagtggttattgatcgctttaaagttcgtgccgatctggcacaacgtctcgctgaatcttttgaaacagcgctggaactttcaggcggtaccgctattgtcgccaatatagatgataataccgccgaagagctgattttctctgctaacttcgcgtgtcctacatgtggctacagcatgagtgagttggaacctcgactattctcttttaacaacccagccggtgcttgcccaacttgtgatggtttaggcattcagcaattttttgatcctgatagagtcattcaaaatggtgatatctcccttgccggcggtgcaattcgtggttgggatcgccgtaatttctactattttcagatgttacgttcattagcagagcattataaattcgatatcgaagcccccttcaattccctcagcgccaatattcagcaagtggtgttgtacggctccggtaaacaatccatcgaatttaaatacaccaatgaccgtggcgataccacagtgcgtaaccatccgttcgaaggtgtactgcataatatggaacgccgctataaagagacggaatccaccgccgttcgggaggaactggcgaaatatattagtaatcgttcatgtatttcctgccacggaactcgcttacgtaaagaagcccgttacgtatttattgagaataccaccctgccagagatctcagatttcagtatcggccatgcgatggattttttccaaaacattaaactcagcggtcaacgtgcgcaaattgctgaaaaagtactgaaagagatccgcgaccgcctgaaattcttggttaatgttggtctgaattatctgacgctctcccgttcggccgaaaccctgtccggtggcgaagctcaacgtatccgccttgccagccagattggtgcgggtttagtgggagtgatgtatgtacttgatgaaccttctatcgggttgcatcagcgggataatgaacgcctactagaaacactaatccacttgcgcaatctgggaaataccgtgattgtggttgagcatgatgaggatgccatccgggctgccgaccatatcattgatatcggccccggtgcaggtgtacatggcggtgaaatcgtcgcggaaggctcagttaaagatattatggtgagcaaagattcactaacaggtcaattcctgagtggagagcgtgaaattgccatcccagagaagcgtatctcggcagatccgaaaaaggtgctgaaactgatcggagcgaaaggtaataacctgaaaaatgtgacgttcaatctgccagttgggttatttacttgtattaccggggtttctggttccggtaaatcaacgctaatcaatgatactctgttcccgattgcccaacgccagttaaatggcgcgaccaatatcacccctgcaccttatattgatattcaagggctagagcatttcgataaagtgattgatattgaccagagcccgattggccgaactccccgctctaacccagcaacttataccggcgtatttacaccagttcgtgaattattcgcaggcgtacctgaatcacgcacccgtggttatacacctggacgattcagttttaacgttaaaggtggacgctgtgaagcttgccaaggtgatggcgttattaaggtagaaatgcacttcttgcctgatatttatgtcccttgtgatcagtgcaaaggtaagcgttataaccgtgaaacactggaagtcaaatataagggcaaaaatatcaatgaagtattggatatgacgatcgaagaagcccgtgaattctttgatgcggttcctgctctagcccgtaaactgcaaaccctcatggacgttggactttcttacatccgtctgggccaatcagcaaccacgttatcaggcggtgaagcgcagcgagtaaaactggcgcgtgaactatccaaacgcggaactgggcagacgttatatattcttgatgagccaacaacaggtttgcattttgctgatattcaacagctattaacagttctgcatcagttacgcgatcaagggaataccattgtggttattgaacataaccttgatgtgattaaaaccgctgactggatcgtggatcttggcccagaaggaggtagcggcggcggtgaggttctgatttctggtactccagaagaggtcgcggaatgtgaaaaatcacataccgcacgtttcttgaaacctatattgaagaaagaagcataatttatagataggggctcagttagccccttattttctagccgcaactttttgaaacgggtttcacatgtggcgctcccaataacaacaagcaattttcgctgccagttcagcgttattgagcactaactgaatattggaagataggctattgcccccggttaactcagagactcttgctaacaaaaacggcgtacacgcttttccatttactctctgttctatggattcgcgtactgcttgttcgatagcagcactgatctccgcttccggcatggcgtatggctcaggaatcggattagcaactaccaaaccgccctgtaatccagtatcccattttactgccatcgcctgagctatctgttctggggaatccagacgaatattgacggagaatggactggtacgacagaaaaacgccggtaaagcgtgagtctgataaccaatcagtggcacaccgtgagtttcaagatattctgttgtcaagccaagatccaaaatggatttagcaccagcacagactaccgcaacactggttttcgctaattcctgtaaatcggcagaaatatcaaaagtctgttccgccccacggtgcacaccgccaataccgccggtagcgaagattctaatcccggccattgccgcaataatcatggtagaagcaaccgtcgtcgcgccattttttccagccgcgataacaaagggtaaatcacgacggctgactttagttatttcatcaccttttctagccaaaaacgctatttcttcatgcgacagacctgctttcatcatcccattgataacagcaattgttgcaggaacagcaccattttccctgattttctgctcaacttgtagcgcagtctttacattttgcggataaggcattccatgagcaataatggtcgattctaacgccacaaccggtcggttattctctaaagcctctgtaacttctggggaaatatccaaatatttattgctaatagcatgatttttcatgattataattccaacagtttttggacactgccatttgacagatttggattattggtcaattcgcaagagagcgtgagcgcggaacacccttgagcaaagcgaacactttctgccagcgtcatattttctagccagcagttcaccaatccggccatcatggcatctccggcacctgttacattgacaatcttgatactgatgggaagtgaccagcctgccacaccatcgctttcactaaagtagacaccctctacgcccatgctgagtactaaccgctgcacaccttgatcgtgaaaccaccgcgccactgccggaacatcggtaggttgggtaattttcattccactaagcgcttccgcctccagacaattaggttttaaggtgtggatataggaaagccagtttttaatcttaggtgctttaaatgcggatactgtatccacaaataccggcaccgttccggcattagtcaacaaccaaaccaaagcttcttcagataaattgcaatcaataactagcacgccggcgtgctgaataagatcacaatgattcgctaacaacgatggcgtcagtttttccaaaatatgcatatcgttgatggcaaccagcatctcaccgccgtcatctaatagagagatatatgtcgaggtactttcaccataaagcttatagcaatagtcgacattaacacctgcacatctggcctgatccagtaaagtgctaccatagaaatcatcgccaacaacagaaataagatgacattctttacctaataaagcgatattttgggcaatatttctgcctacaccaccgggggtacattttatttttcctgggttagagtcttgataaatgagtttattcgatgaataaccgtaaacatccatattaatagaaccaaccaccaccacataatggtgatcagataaaatataacctttgccttttatatatcccttattcattaaattcataatatgaccagcaacaccggagcgacttatacctaaaatatcggccatttcctgctgtggaattaacggatctcgtctcagaagttgcaatatttgtttttcccgattcgtcatttttggacacttgtttgttcttaaacacacgtttgttttatgtgttaaaagcaaaacagtaaagtgggattttttattttacaacgaagttggaagaacgatcgtaagagcccatgactggactatcagccctattttatgtgataaccatcaagttaaatcctgttgaaaactcctttttgctgtatattaataatcaacccgtgttttacgctagaaataaattcaacaaaacaaagatctaagtaaacccctatcgaaagctaacaaatgtttggatataccttgaaatggtgagaattatttttcaccatctgaaacatgtttcatgaaaaattgatctgcttcacattaaaaaacatacttcatagccgaaaatatccatgaacaaattatatacgctgcgattataccctatggatttcaagatacatcgcgacggcaagggagtgaatccccgggagcatagcaaactatgtgaccggggtgagcgagtgcagccaacaaagaggcaacttgaaagatgacggatatagaataattttcacgtcagatttcatcctataaagaataaatctaaatgttcataacgctattacgcttataaacaaaaatgcttataaacctcttgatgatataaacaaaaatgtttatgtttattttcaagttaaacaaacaggaggaggcagtgaagcaaagcgagtttcgccggtggcttaaagctcagggagcagaattcaaagatgggactaaccacttgaaagttttcctgaacggtaagcaaaccacgatgccaaggcaccctagtaaagaaatcccagaaccactgaggaaattaatattaaaacagccaggcatcaaatgacagaccggccccaagggacgggttactcgcataaattcactgagtaaaaatatgcgatatccagtaaaattcgaacatgacgaaacaggttgggctgtgatgttcccagatatcccagaagccttaacaggcggagataccagagaagaagcattagctatggcgcaggatgctctggttactgcgtttgatttctactttgaagaccggcgcgaaataccaacaccatcgactaaaggtgaagcttttgtcgaagtaccagccagtatagcggctaaggttttactgttgaatacgatgcttcaaacaagaacaagcaacgcagaacttgcacggttactgggaactcgaccgcaagaaattcaacgtatagtgtcattaagtcatagcactaaaattgacactatcgcgaatgcgttaaatgccttgggtaaacatctggaacttgttgccatttaaacatcaccatcaaatagtcttaaaccttgccgtggcaaggtttaagtaaataaatttaaattacagcttcattaccatttatctcgatagtcaaatgatattttataccaatatttatctgtttcaattttatttttaaaacatgattcaagtgttggcacccattctttttttacatcgaacgcaccattattaatattatcttcaatagtaagccctaatttttctattactgaaccatcatctcccagatctccagaatattcctcaccaataaactctgccgtttttttatcaaaccacgcaatatttaactttaaccccataattcacctcataaataacttttcataattataatacactcactctttttattctctgctattcctgtagagacatgaatttaaaaacgttttcactttctcaagcaattgccacatatactgacagccatgatttcgtgtcaccgtttcatgtaaggattgccacagacgctcaattttattcagccagggtgaataaacaggtaaaaacaacagattaaatttaggatgacaagccagccaatctctgacccgtcggcttttatggatactgtaattatccaaaatcaaagtgagggtttcagcatgacaatactggcgttcaagttcttccaatacattgataaataaatgagaattcttatttaacccgtcagcataagtcacttttcccgtttgaacattcaggcaacctgcaaaataatgtttttggttttttcctggtgtcactatacgtttctgttgcccttttaaataccagtcagccccgatttttggattcagctcgatgtcgacttcatcttcataaaaaacgggatgtttttctgaacacgttgacaatgcctcggtaattttcgccattttttcatggtactcgggatcgggtaatttaagcgtcggggctgcccttcgccacacgatacccattttatgtaagtaacgatagaaggtactgatggataattttatgtttaataattcattgattttaattataaaaaactcaagactccagcgagaacgcaggcaacccaattgctggggagaatattgcaataaaaaagacagtaaaggataaagcgggattaaattccagacagcgggtctgcccacaggcaggcttttgagtccttccagaccatataaagtcaaccagtttatccagcgatagacagaagaacgactggcgcaaagggttttggcgaccagagagacagactcgcctcgatgcagcatcaatatggccatgagcctgcgagcataatctttatctcgggtgttctggataatttttttcatctggcgtcgttcattgcggggtataggtgctatgataggcataactcagtccgtttagtggtttgggattatctacaattgatcagattgcaaaaattggactgagttccctccaagtgttctactattttgaaaagttatttatataaacacagacaattaaggtagaaaaaaattgatctcaaacaataatgattatcattatttatataaaataaacaccaattaagattaataatactcgttactaactcagtatagaatggaagactgaaaagaatatgtgaatgaagttactataaattcgacatattaaattaatattaggaaagagaataagcgcaccataaatagcgcgctttaaggaggtgtttactgctattctacaaaattgtcgatcattatcatcgatagcaaatcatttacattaaaatttatgacttatttaccgccgcaaatgtttcagcaatacgtgcaacattacgatggttgacgcccgccatacagactcggccattaccgaccagataaacagcaaattcttggcgcaagcgatccacctgtttctggctaaaaccggtatagctgaacatcccgcgctgtttcagaaaatactcaaagtttttctctggtaatgccgttttcagagcatccaccagcaccgtgcgcatttccaaaatacgcaagcgcatatgctcaacttctgttaaccattgtgccttcaaagcaggatcagtcagtactttcgccacaacctgtgcaccaaaactcggtgggctagagtaaacgcgacgcacacctgctttcaactgccccaatacccgttctttggtctgctcatcatcacaaataacagacaagccacccactcgctcaccatacatagaaaatatcttggagaaagagttgctcaccagacaaggcaaaccggctgtcgccatagcacgaatggcataagcatctttttccatcccatccgcaagcccctgataagcaatatcaaggaatggcaggagctctctctctttaacaatttgaacaacttgatcccattgatcataggtcagatccgatccggttgggttatggcaacaagggtgcatcacaataatgctttttgccggcagtttcctgaatgtttccagcatttcactgaattttacccctttggtctgtgtatcaaaataagggtaatagttcaccttaatacctgcccccgcaaaaatagctgcgtggttttcccaagttggatcactgcaccacacttctgaatcagggaaataacgatgcaaaaagtcagcaccaattttaagagcgccagaaccacctaatgattgaatcgttgccaccacccgctgtttcaacaccggatgatctttaccaaataacagttcctgaaccgcaagacgataggattccaatccctccattggcagataaagagaagcagtctgtgacaacgctctaagttgttcttctgcggtagccactgcctgcaattgcggagtcactccctgctcatcgtaataaagcccgatgctcagattaattttttccgcacgaggatcttttttaaattcttcagccagcgaaagaatcggatcaccagcataagcatcaacattctggaacatcaggctctactccttatcagttagttaataaacaatataacttacaacattattcgtccaagtattccatcaccactctggaagtgagtttagtcaccagctcataagtaatgataccagtgtgcttagcaacccgttccactggcagtacatctccccagagcaccacttcatcacccactttatctgtcgcctctggccccaaatcaacagagatcatatccattgaaacacggccagcaatcggcacttcacgaccattaatatgtattggcgttcctgaaggcgcactccgcggataaccatcaccataaccgatagctacaaccccaagataagtatcacgttcactgacccagatcccaccatagccaaccgattcgccagctttatgcttacgaacagcaattaagctcgattttagagtcatcgctgggatcaggttaaaatccacggccgttttatcagataatggcgatacaccatacatcatcagcccgggacgaacccaatcttgatggacttccggccacaacaggatacctcccgatgcatcaatagatttttctcccggtttgtcagcacagaaagcctgaaaacaggctatctgctggcaagtggtgtctaccgttggttcatcagcccggccaaaatggctgacaatattgacaggctgctgtacatttttacaacgactcagccgttgataaaattcttccgcatcttccggccttacacctaagcgatgcatcccgctatccaatttcatccatacttttaccggatgagataacttagcttgttctagagcttgcaactgttcaacactgtgaaccacagtttcaatatggttagcaaccagtactagcaggtcagccgcatcaaagcatccttccagtaacagaatcggtttgacgataccaccatgacgcaacgtcaatgcttcaccaattcgcgcgacaccgaaacaatcggcatcgtccagcgtatgtgctgtctccagtaaaccgtggccataagcgtttgctttcacaactgcaatcaaattgcttttaggagcaatctcccttacccgttgcaagttatgtcgcagcgcgcggcggtcaataactgcggttgccgctttcattctattccttaaatttattgattctttggtcgttaatacttattcgtcgtcataacttggcccggcatagttatcaaaccgcgaccactgaccattaaacgttaggcgaactgtaccgattggaccgttacgctgcttaccaagaatgatttcagccacacctttcatgtcgctattctcatggtaaacctcgtcacgatagataaacataatgaggtcggcatcctgctcaattgagccggattcacgtaagtcagagttaaccgggcgcttatctgcccgttgttcaaggctacggttgagctgagaaagtgcaaccaccggcacttgaagctctttagccaaggcttttagtgaacgggaaatctctgcaatttccaaagtacgattatcggataaggccggaacccgcattaattgcaagtagtcgatcatgatcaggctcaatccaccattttcgcggaagacgcgccgagcccgggaacggacttcggtaggtgtcaggccagacgaatcatcaatatacatattgcgtttttccagcaatatccccatcgtactggagatccgcgcccaatcttcatcatcaagctgaccggtacggatacgggtttgatccacccgtgaaagggatgccagcatacgcatcatgatctggttgccgggcatctcaagactaaaaatcaaaaccggcttatcctgcatcatggctgcgttttcacacaggttcatagcaaaagtggttttacccatagaagggcgagcagccacaatgatcaaatctgatttttgtaagcctgcggttttcttatccagatcctgatatccggttgaaacaccggttacaccatcatgagggcgctgatagagttgctcaatccgctcgacggtttcttcaaggatctgctctattcctttcggcccttcatctttactggctcgattttcagcgatctggaacacgcgagattcggccagatccaacaattcttcgctgctcctgccttgaggatcatagcccgcatctgcaatttcgtttgcaacagcgatcatctcgcggacaacagcacgttcgcggacaatatccgcataagcattaatgttagctgcacttggcgtatttttggacaattcagccagataagcaaaaccccctacattattcagctccccactctgctcaagagattccgataatgtaatcaggtcgatggggttgcccatctccagcaaccgctgcatttcagcaaaaatgcgccgatgtggacgactgaaaaaatcattgctagtaacacgttcggaaacattatcccaccgttcgttgtctagcattaaaccgcccaacacagactgctccgcttccaaagagtgtggcggaagtttcagcccttccatttggcgatctttcggttcagccattttgttgtgagttgatttttttcccgccatgaatcccgcaataatccactgataaatctgcaacagcgcacgagtatacgctatgaagtgccttgagtaattacatatagtttgtaattatttctaacacactaaagcctgttcacaatgagttcaactactacgtgcacacatttcccttacattgatgaggttgagtcatggcaaaacatatcgaattttcctctattggcggccccgaggtcctgcaatattgtgaattcacacccagagctcctgctgacaacgaagtccaagtagaaaatagagcgattggaatcaattacatcgacacttatattcgtagcgggctatacccaccagcacaattacccagcggcttgggcactgaggccgcaggcatagtcaccaaagtgggttctgccgtcactaccataaaagtgggtgaccgtgtagtttatgcacaatcaactttaggcgcttacagtgaagtacataatgttgcggaaagcaaagtcgctgttctgccagataccatctccttcgaacaagcggctgcttcttttctgaaagggctgacggtctattatcttctacgccgtacctacaagatccagtcgggcgaaccctttttgtttcatgccgccgctggtggcgttgggctaattgcctgccaatgggcaaaagctttgggtgcaaaactgattggcacagtcggctctgaagagaaagtacaacgcgctaaagatgctggtgcatggcaggttattaactataactgtgaaaatattgtcgaacgaatttatgaaatcaccaacggtgaaaaagtcggtgtagtttatgattctgttggtaaatcgacctggctgcactcgctggattgcctgaaacgccacgggttgatggtgagctttggcaatgcatccgggccagttaccggtgtcgatttagggattttaaatcagaaaggttcactgtttgttacccgcccttctatcgccggctatatttcaacgcgcgaagagttggatgaggcaagcaaagaattatttgatctgattgccagcggcaaaattaatgtggacgtaccagaaaatcagaagttctcgctaagtgaagcaataagggcacatcagattctggaaagtcggacaacgcaaggatcaagtttactgatcccttaacggtaagatgagcgggttattcactaagccagcaagtctaatatacccgttatctttcaagttgccttttgtggctgcactcactcaccccggtcacataattatctatgttcccggggattcgcccccttgccgccgcgatccatcttgaaatccatagggtataggagatagacaaagcaatactcctattggtaggggtatcatacctcatgcagataagtaacgataagattgaggcgctgttatcccttggccaagcatatttaaaggcaaaggcttatcgtattttttaacattaccaatactaattgcgacagccttttctcttccctcaaaataactatcaaaaaaatccttcgttgtacctgcaaatttatgagtcatttcccatacaacggaaggagagttagaaatgatctctttaatttcaaactcaccgacaatcattcctatcggcatagttgcatatataacaacagattgaacttgattattcttaaaagcaattttcctaaattcaaatttctttgaaccatcaagtattctatcaacatattcaggcttaattgataataaaactttcattaacttcactcagtttgatgattttattaaattgatcatcggttaatttcatcataccccaataatcactactgtttaaaccaacttcattaatgagtctatcacgaataattcttttgggtaaagccatattataagtaaatcttattatgtacgggtactttcttattttatatttttcaattaattcatcttcactaaagacactaaatttactacaataatcaatatagctttctaacgttgagaactcattaatacacctgacttcttcaacaacgcaaagtgaactaatcacagatctataccgtgctggcccttgcttatcagccgttctatatataacaataatatcccctcttttcatatgaagaacatctttcattgcacatatatatattttatgaatactattagtgtgtgaaacatcctgaacaatatcaggtgactcagttaaaagccgagagtcaggaaaaaggcgtgtatgaaattctggatatattgataataagtatttattttttgttttatgaactatcaacggataatcaagaaaaatatcaccatttgtcaatgttaagtctctaacatatacaaactctatacccaagaaacttcaagatgcagtttttagcacctgaaaatggtcgttaattctagacatcagcgagtccgctatatccggtagcgttgtggtgaaaaatttgaagacgttgtctcgaaattcatgtttatcagcgaaataacggttatttcgaacctgttcattcatgaccttccataatcgctctattgggtttaaatttgggctatagggaggaaggtaatgtaactcaatattgctaacataagcccactccttaacaagatgagctttgttgtaacccgctccatccacaataaggtgaattttttgatgatagtcaggataagacttccttatttcattgaaaaaacagcaaatgttgtagtcattgatggtctgatattcctggaacacggtacgaccaatggcattcaggttgagcgcgcccaatatattcaggcgagtccggcttcctgttgttttgactgtttttttctcgcctttccgcatccagccataaccgagtttggtaccttgagtcgggtgaacagcgtcaagaaaaaggatgggttcgtctttcgctgtgactttaagattctcataatattcaataaattgtcgctgtttttctgcgtcgaatttatgagggacgccacccggttttttataagaaaaaccctgacggtgtagccatttattcatgccgggaatgctaaaggtaatattccagagctgagcaacataggccacgatttcatgggtgtgatggaaaagatgttgagataagtgattgattaaaaagtcagtttgttctcgggaaagcaaactatcagaccccccattatcagattgaagtttcccctgattgaggtaatcactgatatggcggtcaacggtggtctgatggagtcgcaatgcctgggctatcatcacagaactccacccttcagaagccagaaggatagcttttattctgtctcgtacctgaccatcacgagtggtgtcatgaagacgttcaagtttgattttttgttctgatgtaataaatattttcatagcgaggataatgatctccatttcggataaaatcaagcatcttcaatgattacgggtatataccattatctgtacgcttttcgccatgcttatagaaaccatatttttcaaataagcgaataaggtaatcatgtttttcaaaaacagtcacatagatattatcaacttccatcactattgctgtatcgaataccttctttataaaacgctgtccacgtaatgtcccttttgattcaaatttaaatgtacctattttaagatgagtattaccaggtaaaggaggatcaacatctgaaacattattctcaagttttaaataaagaaacccttctattttaccagtagtatcatacaatacataagctgattcattatttctagctttcttatttaaccaatctggaaattcaatataactttcttttaatgagtcgaaaaaagcgtcattatgattgaaatagctgaatttttcatatcttaaactatccataaacatctagcctccacaagggtaatttttcgttctggtgtaacagcctagtggttttactaacaccagtgctcttatgtttgtattccaatgttatccaaacataaaagttttatcttgaataacatctcttctttacaagctatcattagttacttaccttactattcgatatttatttaatatccattaagaaatcactaacttctggataccttagtccttgtctactgttaataatcatcatatatcattatcgaaaaaatagaaatgcctaatgttcatacattccgttctggataatacctaacaaactagttgctatgtacttactatcagcaagaatcacgtaaactgggatattattacccggaacagttgtccagatttcaatatgacaaaattaatttattcgaacagcatcacaatatttcgcaaagatatatggatatctgtttttgtccgataatgaaaagctaacccgaaaaaacagattaaagcacggaaaaaaatcgcgacatccataaatattttaatgtttaagtctcatgatagactatgccttcaacggtaagatgagcggatattacatccgctcagtcaccatagctagtgcctgttccacaacagaaatatctgcgcccggtttgtgggcattctcactaagatgacgacgccactgacgtgcccctggaatcccttgaaaaatacctaaaatatggcgggtaatatgtcccaaatatgttccttttgatagctcttgctctatataaggataaagtgctttgaccaccgcaacggtattaactaccggcattgaagcatcaaataattcatgatcaacctgtgccagaatagacgggttctgataagcctcacgcccaatcataattccatccacatgttgtagatgctgtttcgcttcttccaacgatttaataccgccattaatagcaatcgttaattgaggaaaatcctttttcaattgataaactcgtgggtaatccagcggtggaatttcacggttctcttttggactcaaaccagaaagccacgctttacgggcatgcatggtaaatatattgcagccactgtgctgcacaacaatatcaataaaatcacataggaattggtaactgtcctgttcatcaataccgatacgggttttaactgtcaccggcacattaaccacatcctgcatggctttaacgcaatcagcgaccagttcagcttcccccatcagacaagcaccaaaacgaccgttttgtacccggtcagaagggcagccgacgtttaggttaatttcgtcatagccccgttcctgagcaatcttcgcacaatgcgccaacgcctgcggatcactgccacccagttgtagtgctatcggatgttcttgttcgctgtatgccagataatcgcctttaccatgaataatcgcgccggttgtcaccatttcggtatataacagcgtttgccggcttaataaacgatgaaaataacggcaatgacgatctgtccagtccaacattggggcaacggagaaacggttaaggctatatttaaccgtttctttgtctttctcgctgaatttaaacgttttttcaatttctttactttggtacattgctatactttctagattattttggcattcccagcatcccacaaatagggggatataacgcagagaatgatattaaattatggcctactatagcatagagaaacgtctccgtactgatgacactattaggtatcgttgacaattgacgtttaagaggtatcgcaggtgatttaaatgtagagaatcgtacagtttgctatcaggaatattttggggaaagcgcggagtacgtttatacccgttatctttcaagttgcctctttgttggctgcgctctctcaccccggtcacatcgttatctatgctcccggggattcgctcccttgccgccgcgatgcatcttgaaatccattgggtatactacagtataattatttcggcttaaaaggataaacgggaccaaggccccatttcttttactgatattgaacgttgaagttaataaccgcgccacacgctgctgcatagcgttccaaagtcttcatacttgcgccaagaggatttttttcaagccgattgatacctgatggtttgataccgattttatctgccagctcagtctttgacatgccagaacgctcacgcatctcaaacaatatctgtatcagttccaattccttgtcggcttccttatacgcagcgatagactccgtgtcattcaacatcaactccttcaattcgttcagtgatattggtttcatttgaactccttaagcctcgcatgggctgtcttgatggctgctgccggggttttctcagtcttcttcacgaatgcatgtagcagatagatattctgacctcttgcatacgcatacagtgaccgggcaatgtctttatcttcaaccccgtttatctaacatgctacgtgggcaagttccaggggatcagcgaggcaaaaatgctagattgcctgaatcgactagggcgtgacgttcagattgtgatcgggaaaccacgccggacacccggtagccttaaagtcgttttttcttaatacaactttcacaatagcccaatcttctggactattttttatctgtcgtgaagatactcaagctcagttcttgtcaacagatctgactagtaccgaaccttttactaccgcccctctccgtacagttcctgtcctgctgtcgctcaattaaatcattttaagctggttgataataaaagggttagcctgaagcaacaacaacagttttcttgatgcgccagtgggataacggcgttggctttcccaacttttcaccaagtcataacttaccccgaccgccacagcaaaatcttgctgcttcaagccggtagcttcgcgtattgctttaacatcaatttcggtgaaagtatgaacatgttccggtttcggtgtcagctcacccttctcgattttcaccatttcttctacactggccagcagatcggcaaatatttcatctttcatgcgatttctccgctctttaggcgtgggagttactcccataaataatgcaactaattcagcctatccgaatgtactgagtacataaaccaagttaccttagcataccaagtacacttttattaactcagatacctcactacacttgtaacgacactatctactgttccagccagcagatcgacaaataattattaagcagtaattaatcagtgccaatatcatcatgcccttcttcaaattcccattgaatattatatttgtcgataaaataaaaatatcttatcttgcccataatctcgcaagtttcttgttttaaaacagagtttttttcatcctcctcgttaaagaacataaattcatcacgggtaatttcatctattttatatggcttatataatggtgatgaatttatcaatctgacatcaggagaattttttatatgctcaaatacactatctatgttttgtactctcaggcaaatatgcccaataccaccaatatcattaacttcttttatttcaaccctttttattccaattgggctgtgatattccattaactcaataaaaaccctcgctccaggaatttccaaaaatgccattgatacatcaacctgttcagggttatcaataaaacccgctgactttgcaaaacctttatttttaaaatgaggaaagaattgtcttggtattgccccaaatagatttttataaaaatctattgccgccgtcatatcatctacaacaatattaatatggcctaatcctttaaagtctatcattattttccccattagtttatataggatataatctcatctaaaataacaaataataaaactagattacagcagataatcaacaaataagatttaagtttgaaaccggatatccccccaaaatcaaacaggtcaatttgggggggcggattaaaaaaactacatctatttatccccgtggctgttcaggccaatcaatatccattgcctgtgaaacatctatccgattcagaattaccctgtattctttccatgccaataaagctattttctcttcctcagtcgcaatacctaaatcaacagcatcttgcaatggtacaatttgattggttgcctcagcgatgagctgttgtttttggagctcagcatattgccgtaattcatctttcgttggcggaggaatatctgcccattccggcaaaccgtttttatttgctacacggtgttttccttctggcgcattattagcagcatactcctgataaatatcattactgactgctataatatcatccggcagtgaaccagcagcaatataatttcgtttcaattctaccggatagaaagcatttgttttcgcactataataatacataattaatatcctatcgctatccaaaagaatgggctatcccatttggcatttacccaagaatttaataaatcgaaagatgaattattaattacatttacatagccaacagatgcccccataaaacccattttactttgaatagcattaatattgacagcgtaatgtgtattggaaaaactaattggtaattgaatacgttctatatagccagcatcaatgaccttagtacgcccccattgatagataacgcctgtatctccacatctccaccaaccattaatcgctttactggcactattccgattacctttggcattaacttcattgtctacttcttcttttgtgtataccccaatatccacggcatccagatcaatattctcagacaactccttaccattcacctgccgaatattaggtactctgctattaatactttcacttaacaaagttatcatttcttggacaagcttttgcgtgacggccaacgtattactatcacccagcacatcggtaagttgaataacacctttttgtgttaatgaagcacttggaatctctgttacagctttttgctctaaagcgatatttaattgagcggtaagcttatctatatcgccatcatccaaaacatcatcactacattgtgtagagataaaattagccaccaccgatgatatcgttgacgattgacgcaaaaccttatttaataaaccaatggaaataatattagggggaattcccgtattcaattcctgacttttttcatattctccttgagaaacaacattagcatcctgactaacagaaaaagctttaaagtcatttttattactcatgagttctccttaaggaaaaaacttatgttttcattaaataaaactttgaattaatgaaaataaaaatatccacttgatcatcgtatataattttcagatcgcatttcaataatagcccttttttgataaggagtgatgaaatatttttataacttagagaaattaattattttcttatagttgatgccgttaatatatcaatgcctgaagccaaatttatacctaagctattcatttacattcagcatccgaaagtccctctatttgaactattccccaaaattcaggtaagcaaataaaataagctaccatattttaatctgagttttgtgatgcgcctctcataataaaaaaccgccagttccaataggattgatcagcttataaaaacattattgaggatttattagcttgaattattcagaataggtctattcttaatatgtggacaaattctattgtcaatacttattaaacctactaagtaagggaaaattatatgccatcaagaagagacgtcatagttggaggattaagtcttgctgctgccggtacgctatccgctgtgtcctcagccaacgctgcaactgctaacataaaactgacaggagcctataaaacaaatagtgcagaaaaatccctcgatatcattaatctttatgacttggaagaagaagcacgtaaattgattccaacgccccaatttgactatatcagcggcggttcaggtgatgaatggactctacgtgaaaacaccagagcctttgacgatttccaaattattccccgctatctcgcaggagtaaaagagcctgacacaacaaccgaattgctcggcagtaacgtggatatgcctatttttattcctccaatagccgcacatgggctggctcatactaccgctgaattgggaacagcgagaggcgctgcctctgccggtaccctgtttactgcacaaactctgtctaattcatctcttgaagagatagcaaaagtgagtaacggacccaaatggtttcaaatttatttaaccaaagatatgggtattaaccgtgaactgatacgccgggccaaagcgatgggagcaactgccatcgtctttacagtcgatttagagtggagtggtaacagagaagcagataaacgtaataaatttattttcccacactcactgccattccctaatatccctggcgctcccgtaggagcaaccttatcagaaattacagagctatttaaacgggatcttaatttcagtgatttggagttcctcgccaaagaatcgggcctcccaatcatcgtgaaaggcattcaatctgccgaaaatgctaaagagtgtgttaaccacggtgccgcagcgattcaagtttctaatcacggtggtcggcagttagatactgtcccggcagcaattgcctcattaccgcacattgttgaagctgttggatctaaaattccagtctatctagacggaggcatccgccgcggtacccatgtgtttaaagcactcgcattgggtgccaaagctgtcgctatcggtaggcccattttgtatgcgctggcattaggtggagcaccaggcgtaacttccattttaaacctacttaaggatgagctgaaacttagcatgaaactggcaggatgtgcagccattaaggatatagagagaaaatttattagtttgatttaacccattaactaataaagcaaatattggccccgtttcatttgaaacaggtgatttcaggaaacggggtaaattatgttacctttagaaataatagataccatactgaaaaaatccgttctctcactttacagcattatttcctattattaattattcgcttccccttgaaatgttcttcaaggggaaatgtttcatatataccctacggatttcaagatgcatcgcgacggcaagggagcgaatccccgggagcatagcaaactatgtgaccggggtgagcgagttcagccaacaaagaggcaacttgaaagataacgggtataaatattaatggagtacacgagacgctgacagctcagtaatatcaaattcataactttgttgttcttccatgttactgcgtaaaacatcttctactaatgcagaaaaacctgtcatcatctgcctttccataataatgccttttggttcaggccacggcaaactagcaattggccagtcacaatgtgacttataataattaaattgttccagccgctctttagaccgatcaaaatcattactccagtaagcattgcctagccgaaagtttgtataaaactcatcaaaactaccgaagatttcataaatataatcagcggttttcagcatatttttccatgccatttcttcactgatataaccggcacaaaaacagttgcgacttaaaacgattgcaagccataaatcaaatccccacactaatgcaggagggcgcttattaataggtttggcacatttatgaatatagtcgggtgttacttcaactaatttggcaagcactttaaacattttcccatcactaagagcagcatcaatagcaaaatgttttgaatgtaccccctcccacaaacccgttagcattttcatatacccttcttcatcaataattccccagtcgctgtataattgggattgatgttcctgagtcggagataatggcagcagacagtaacgatagctatcatgggcaacccgtgactgtagaggataatgctctagagtttcactccaaaaacctagccaatagtcaccaacaatattgagtcgtaatacctgacgcttatcttcgggtaaaagagataaacctgcttgttgataataacgccgttgttcccattcaggacgcttaacaatgcgataaataataaccaagagtaacattacgccaaataatgctacaccacctacttgtgccagaagtaaatagtccgtatcagggacagatacattacctattataaataaaacaattgctacagataatacaatacccatacataccgcaattacaaataaaatattaatcaacgcatataatgcacttagaaaaggtaactttcttttttcagagataatatgcttcattacctgatagcctttaacggggaactgtctataatgaggctgattttgtaaaagctctttcatcacaaatgcttcctttccgaaaattatctgtcatatacgataattcttgtctgtattatcataaacttcaagaaaacattatttttgctactgagtaccaatttagccaaattaactccatcaggggacaatcacaatgaacttttctggataatattttctattgaagaaacatgataacatcacaatattatcatcgtactggttgtaagaggcgcaatgaaattgattaatcaaaaaaaattactggaacaggccgaagttatttgccaggctcgtggagtccgctttactcctcagcggcttgaagttttgcgtctcatttcagagcagccaggggcaatcagtgcttatgatttactggatttgctacgggaagcagaaccacaggctaaaccgccgaccatataccgggcactggaatttctgttggaacaggggtttattcataaaatagaatccaccaacagttatgtcctatgtcaccatattgaacagccaagccacacttcagcaatgtttatttgtgatcgttgtggttctgttaccgagcgagatggtggaaccattgaatccgccatccaacagttagcaaaaacagccgggttcagtttacgccatacagtcatcgaagcgcatggcttatgttcaccttgtgaagagatagaatcctgtattaaacgagatgaatgccagcatgaccacagaattgaaggaagtaaaaagaaatagatagcaagtaaatacttacttttggtgcagagccagactgaaataaacaaccgcagaatcacgtttaagataatcacaacgataaattcaacaacatgattctgccgtaatattgcaattctttaaccattccaaaaacaacaatttgatattttactatcaggaccagttgccgttacgaatcaccccaaccgccaatccttcaattgtcaggccctgttcacgcaaatccacctcaattggcttaaattcggggttttctgccaacaattcaactttatttccggtctgtttaaaacgttttaccgtcacttcatcttcaatgcgagcaacaataatctgcccattacgaacattttgtgttttatgcacagccagcagatcaccatccataatcccaacatctttcatagacattccgctgacccgcagcaggaaatctgcacttggcttaaacaatgcaggatcaacctgataatgactttcaatatgctcctgtgccaacagtggttcacctgcggcgacacgaccaattaacggtaaaccagattcttccaacagcaaacggatacccctagatgccccagcaacaatctctatcacccctttacgagccaatgcttttaaatgctcttcagccgcgttaggtgaacgaaagccaagacgggctgcaatttcagcacgcgttggcggcatacctgtttgcgaaatatggtcacgcaccaagtcataaacttgctgctgccttgcggtaagtgctttcatttcgtcccctgtttgtttatacagtcaatatgtaagtatatacagctaaataacgattgggaacctactaaggcagaaaatcagcctattataatataatacctaattattaaaccaaattaggccataaaatagtgccaaaggatggttccccagacaattaatgacaacatcatcgtcagaaagaccgccgccgatcccatatctttcgcgcgaccggacaattcatggaactcactgccaatacgatcaacaattgcttcaatagcactattcaggatttccataatcaacaccagcatcactgaaccaatcagtaaaatgcgttcaatagcgccgatatccagataaaatgcaaccatcatagccaatatcgctaaaattatttcctgacggaaagccgcttcattttgccatgtcgccctaatacccttcactgaatatacgattgctttaatgatacgggctaagcccttggattgattcgccataaattattcacaccaaatatgaggttatttgacactttccactcttattattgtcttaacgcaacagatctcaacccccgtttctgatatgctggcaacgtgttgctaacaagaggcttcaagatatttatgtcaagttggcgtaaaatatattataaattattgaatttaccactaaaaatactggtaaagagcaaacttatccctacagatccgatcactgaattgcggctcgatacgacacgcccgattctgtacgtgctaccgtatcactctaaagcagacttactggcattacgtcagcaatgtcttgagcaggatctgccggacccattaaatttactggagatcggtgacactgaacttcccagttatgtatttatcgataatggcccacgtgtattccgctattgcgcaccaaagcaagaatccgtaaaaattttccatgcttatctggatctacatcgcaataatcccaatctggatattcaactgctgccagtttctgtcatgttcggccgttcccccggacgcgaagggcagaacgctccacatttacggctactcaatggtatccaaaaattctttgccattctctggctaggccgagatagtttcgtgcgcttttcaaacacagtatctctgcgctatatggcaactgagcatggcactgacaagactattgcccataaactggctcgtgtggcacgaatgcactattcacgtcaacgcctagccgccgtcggaccacgcctgccggttcgtcaggagctgtttaacaagttgctggcttcaaaagcaatagaaaaggcagtctctgatgaggcccgtaccaagaaaatctcacatgagaaagcccgacagaatgccattaacatgatggaagagattgcggcgaatttctcttatgaaacggtacgactgtcaggccgtgtactgggttggacctggaaccgcctgtatcaagggatcaatgttcacaatgctgaacgcatccgccgtttggcacaggatggccacgaactggtttatgcgccctgccaccgtagccacatggattatttactgctctcttatgtgctctaccatcaaggcttggtaccgccccatatcgccgcgggcatcaacctgaatttttggccagcagggccaatattccgccgccttggtgcatttttcatccgccgcacgtttaagggtaataaactctacgccacgatattccgggaatatctaggtgaattatttgcccgaggttattctgttgaatactttatggaaggcgggcgctccaggacaggtcgtttactcgatcccaaaacgggtactctctccatgacgttacaggcgctgttgagaggcgaatcacgcccaattaccattattccgatttatatcggctacgagcatgtgatggaagttgccacctatgccaaagagctgcgtggggcaaccaaagagaaagagggctttttccagatgatacgtggtttgcgcaaacttcgtaatctggggcaaggctacgtcaactttggcgaacccatcccgttgatccaataccttaacaaccatgttcctagctggcgcgattctattgatccaatagaattccatcgccccgaatggttcaatccgacagtcaatcaactgtctgagaagattatggtaaacatcaacaacacggcggcggctaacgcaattaacttgtgttcaacggccctgcttgcatcgcgtcagcgagcactcactcgtgagcaactgcttgagcaactggattgttatatacagctcatgcgcaatgcgccctacgctactgatgtcaccgtaccaaagaaaaccgcggaggagttgctagaacacgctctgcaaatggataagttcgaggtagacaaagacagtatgggtgacattatcattctgccacgtgatcgtgcagttttgatgacctactaccgcaacaatattcaacatctcttagtactgccatcactgattgcctgcatcgttattcatcatcgccgtatcagccgcgaagcgctgttaagccaggtcgcaatcatttatccactccttaaagccgagctgtttatgcgttatagcaaaacagagctgccagaagtggttaatacgctgatcaacgaactgactcgccagtgccttatctgcaacaaggagcatggcatgctggtgctgaatccagcacgtatccgccccctgcaattgctggcagccggcatccgtgaaacactgcaacgttatgccatcacactctctttactgaacgccaacccagtaatcagccggggagtgctggaaaaagagagtcggatgttagcgcaacgtttgtcggtattgcatggtatcaacgcacctgaattctttgataaggcggtatttactacgtcggtcaatacactgcgtgaagaaggttatatcagtgacagtggtaatgcgattacagcaaatacccaagagctgtatcaggtattaggtgaactaatgtcacctgagattcgtcttactatcgagagcgtcagtttgccaccagagcataacgataccgaagagagtgccagggaaggataagcttcttaaattctggtgataatggttgttatcaccagatatttcagacatagctgaagaagataccaagaaatagcaccagaccaacgtagttattattgaggaatgcctgaaaacaaagctctctttcccgaccagcgatcagtttctgctgataaataaataaagtgcccgtaagcaacagtgaccagtagtagataccgcccagatttatcagataccccaccagcaccagcagcaatagcatagcgagttgcaataacccaataatcaacttgtcgaaacgaccaaacagaatggcggtagacttcacgccaatttttagatcatcatttcgatcaaccatcgcatactgtgtatcataaataaccgaccaaaagatattaaccagaaataacaaccaacactctagtggtaaggactcactaactgccgcaaatcccatcggaatagcccaaccgtaagcggcccccagtacaaactgaggaaaatggctaaaccgtttaacaaaggggtaaagccaagccagagccaacccaacggctgacagccagatagccattttattcagggttaaaaccagaccaaaagaaatcagcgccagtacgacaaataggatcttgctctctttctcactaatagcaccactcggcaggggacgtgtttttgtacgttcaacataaccatcaaattttctgtcagcaaaatcattgattgcacaccctgctgcacgcatcagaaatacacccgcagtaaagaccaataatatatgcatatccgggatacctttaccggccatccacaaagcccagaaagtcggccacaacaacaataatgcacctataggtttgttaatacgcattaaacggcaataggccagccatttactttgcgccatacttcccgccacttctgcttccctcttttaaattttaccttttatacaccggtgattcaggtaaaaagacttcggttaataataatggcttgcctgataacctcagcaatgatcgtcttgcccaacggttcccctgctgccctacatgaatatagtcccgcgtcaatttattaccactaaaaagatatcgccccagtgggactgttcctaaatcaaccaaactttcatcaggaccggttaatgttgtttcagggattaacgtccgccccaatagccaagggatattatcaccgcacagtacgatctcacgcagccaatatcgttgacccgttagcaaacgctcattttcatcagaaagttgttcttcggtaataaaacattctctgaatggtatgatacgaacactgttgcagtattgctcaaaacggcgggtcattgagcccaattccatcaaccagtctaaaacctcatcaggcaaaacgggtgaatccaccgaaagccactgaataggcaccgttgttaatattgagtcagttgacatacgcttttccattaggacaaatttctttcatccgacagtacaattgatcaccgcagagaataccacgttgcaggtatacagaataaaaagttataacaaattctatacccgttatctttcaagttgcttctttgttggctgcactcgctcaccccggtcacatcgttatctatgctcccggggattcactcccttgccgtcgcgatgcatcttgaaatctttagggtatataaatattgttgaccaaaaataagcgaattatgatgaacataattcgctcatatcaattaagtttctgattcagaagaagtgactaacgccatgctttaaaacggttaatcaacccatttgtcgagctatcgtggctgacaaccctattgtcatccttaagttctggcaaaatacggttagccaattgcttacccaattcaactccccactggtcaaaagtaaagatgttgagaatcgccccttgcacaaatattttatgttcatacatggcaatcaacgcccccaagctaaatggggtaatttcacgtaacagaatagaattagtcgggcgatttccttcaaacactttaaaaggtgcaacatgttcaacttcaaccaccgttttaccactggtggcaaattcagcatccacctgctcacgagatttaccaaaggctaatgcttctgtctgagcaaaaaagttggataacaatttactgtgatggtcactcaatgggttatggctgatggctggtgcaataaaatcgcaggggatcagtttagttccctgatgaataagctgatagaacgcatgctgaccattcgttccaggctctccccagatgattgggccggtttggtaatccacgggatgaccattgcgatcgatatatttaccattggattccatattgccttgctgaaaataggccgcaaagcgatgcatgtactgatcgtatggcagaatcgcttccgtttctgcgccaaaaaagttgttgtaccaaataccgattaacgccagcaatacaggaatattttgctcaaatggggtattggcaacatgctgatccattgcatgtgcaccactaagcaattgttcaaaattttcaaacccaatagagagtgcaatagacaaaccaatcgctgaccacaacgaataacggccaccaacccaatcccaaaactcaaacatatttttggtatcaataccaaattgcttaacttcctgtccatttgtggaaagcgccgcaaaatgctttgcaatatgcccttcatcaccggcactttttaggaaccagtcacgggcagagtgagcattggtcatcgtttcctgagtagtgaacgtcttggaagcaataagaaacagtgtcgtttccgggttaagtgctttcagagtctccgcaatatgggttccatcaacattagaaacaaaatgcatattcaagtgattcttataaggtttcagcgcttctgtcaccatataagggccaagatctgaaccaccaataccgatattcacaacatcagtaatccccttaccggtataacctttccactcaccatgaatcacgcgctcactgaaatctttcatttttgccaacaccgcgttgacctgctgcataacatcttccccatcaaccatcatcggggtgttgctgcgattacgcagcgcaatatgcagtacagcacgattttcagtacaattaattttctcacccgaaaatagactgcgcatagccccggcaacatccgtctctttagcaagtgcctgtaacttttttaatgtctcagttgtgatgcgattttttgaaaaatccaccaagatctggtcatcgaatgtcgctgagaacttagcaaaacgatctgggtcctgttcaaacaattcacgtaggtgaatatcctttatctgtgcaaaatgttgttctaacgctttccaagctgaggtttgactaggattgatatttttcatagctatgctctctatcaactggctgtaagtaattgggggtaaagaaagattgtaacctgtaattctatgattcgagtctcttttcctttaatcgctgatattggtcaaaacgattaagtttttctagttctatttgccgggtcatacaaaaaacagtcacctctctctactatcctcaatttattttatgattctcatcgcgtcatgaaagatattgatgtcactcttcactccgttgactcaaacccattaacccgatatttctaaaagactatccagttaacagaaggttattgcaatgagtgctgtttcatcccaatgcccagaaattggcgggcatgtagtcgcaaaatttggtggtaccagcgtggcaaatttcgatgccatgaataacagtgcagatatcgtactggcaaataaagcagtacgtgtggttgtattgtctgcttctgccggtataaccaacttattagttgcattagcggcaggctgtgatgcagataagcgggctgactacttgaaacagatccactccattcaatacgcaattattgatcgtttgcatgaatccgatacgattcgtcaagagattgatcgtctactggaaaatattaaaaccctggctaaagccgcatctctggcaacctctgcggctctgacagatgaattagtcagccacggtgaattgatgtccacacgattgtttaccgaattgcttcgccaacgcggtaaagatgccgaatggtttgatatacgcaaagtgatgtataccgacgagagttttggccgtgcagaaccaaactatgaacaacttcaatcgttggcaacggaacatctcttaccacagctaaaaaatagcctgattgtcacccaaggttttatcggtcgtgaagagaacggccgtaccactacactgggacgcggtggcagcgattatactgcggcactcttgggagaagcccttggcctgaaacgcgttgatatctggacagatgttccgggcatttacaccactgacccacgagtcgttcccgccgcccaacgaattgataagattgcttttgatgaagccgcggagatggcaacatttggtgccaaaatcctacatccggcaacactgtttcctgctattcgctgtggcattccggtctttgtcggttccagtaaaaacccacaggcaggcggtacgctggtctgtgataccacagaagctccaccacagttccgcgctatcgccctgcgccagaaacagacgttactgacactacacagcctgaaaatgctgcacgcacagggatttttggctgaaatatttaccattctgtcacgtcataatatctcagtggatttgatcaccacctctgaagtcaatgtggcattaactctcgacaccactggctccactagcacaaatggcagcctgctgaccaatgcactgatgacagagctttcgacgctgtgtcgggttgaagtggaagaagatctggcgctggtggcaattattggtaatcagctttctcaaaccaacggattaggaaaaaaggtttttagtgtgctggaaaaattcaatcttcgtatgatcagtcatggtgccagtaaccataacctatgcttgcttgttcaaggcaaagatgcagaacaaattgttcaaacgcttcatcaacgtttgtttgaataagtataatttttcaggtatttgatatttcgctcagccaaaagactgagcggaatcttatactacaataaaaaatagctgctacagccagcctaaatggatcctcataatggatcctcataatagtaatactccctctttcttcattttctttagtacggaaatgcagattcaccggcagaatcatgaaaaatttattttaatttttctatctctttttaaatagtttatgttgtaaatctttgtgtgcattagttagcattttcacttacacatttaattatattgagggatggaaaatcacagggagattttaaaaaaacattattttctcatttattagggaaattatacgtagaacaattatatgatcttgataaaaaaagggctatcaattagtatgcatgaagattaaaactaaagcattaatattccatactgtctaataacatatgtatacccaatagatttcaagatgcatcgcgacggcaaaggagcgaatccccgggagcatataccctatggatttcaagatgcatcgcggcggcaagggagcgaatccccgggagcatagaaaactatgtgaccggagtgagtgagtgcagccaacaaagaagcaacttgaaagatgacgggtatagataactatgtgaccggggtgagcgagtgcagccaacaaagaggcaacttgaaagatgacggatatattagcaagcaaatgtgctttagcttgtgcggtagctattacgaatatcaatataccctatggatttcaagatgcatcgcggcggcaagggagcgaatccccgggagcatagagaactatgtgaccggggtgagtgagtgcagccaacaaagaagcaacttgaaagataacgggtatagagaactatgtgaccggggtgagtgagtgcagccaacaaagaggcaacttgaaagatgacgggtataaatacaatcttggtataaaaggacaatatatggaacttgaacagcaagtattatcaatagtcaacaaaattgccagaaaaaatgttgaattaggtgatgagcttttgaagaaaaatctaatagattcaattactacagtagatctgatcctggaattacaagaggagttcgattgctatataccggcaactgatgctgaatctattctcgaaacccctaagtcaattatcaattatttgaacaacttgaaatgatgttaaaaaagatatctattaatattgcagcattattattcgcagcaattactttttcatttattatagtatttgttaatagttttaatcagaaactagtagaatacaaatatattgaagatgatagtaaatcgatcaactatatacctacgattacagaccaacacaatgctattgatttcttaaaagaaaaatctcttgaatatggatttaaacataatcatgtcattttgtttggatcttctgaattaacaaacagaacgcataaattcattccatatgattttttaacaaaaaatttaaatattcctacaataggtattggtaaagcacattttgaattattagcaatttatggttatttatcagcttatcaagaatatttaaataaggatagtagaatagttattattctatcaccaggatggtttgaaaaaacagatctactaccacaagcatacaattctcattttccatcctatatcgcaaataaactcgcaaatgatgaaagtgcaaaaaatatattttctaattatctcaatgaaaaccaagataactttgaaaatctaaacgcaacccaattaaagttgattcataaagacaatataatagcatcgtcagttaccaacattttaaactatatagcagaggcaagagtaaatatcaaaaatataataaccgacaatcatgaaattaaagctgacaatatttatgtccttcatgaaggtcctttaatgaaaaaacaatttcaaattgctaataccgaagttcaatggctagatctagctaatgatgctaaaaacattgaacttaaaaacatgagcaaggagacacaatgggtaaataaaaaatactatgaaaagtatgtaaaggataaaaaaagtaaaaaagcatttcctaatggaatcaagtacagtaaagaaatgaacgcctttgacaatatattaaatttattgacgaaatataatgtcgacgctctgtttattatgcagccattaaatccttatgtatacacagatacaaatgattttaaactagttgaaaatattatatcagagaaaataaaatcgcatggcatgggatatttaaatcttattgaagaacaatatcagccaggagtattaactgatattatgcatatgggggaatatggttggttattaactgataaagctattgtggagcattttgcgaaatgaaatattttataaaggcttttttattatatcttttcctaatgcttaccttattttatcactccgattctatcgtcaatggtagcagtgaagttaaagtaaaatatgaatatcagcaattttagaataaaaaaggcataaaaaacatgtttgcaaattttaactttttcatttatctattttcagcctcatttgttttttctttattttttctattctttaataaaagaataaattctaaaattgcattaagtgtgctttctattatttgctggtgtattattttcagatataaaatttatatccctatagcattatctgtttatttctatttaataactctaattttcaaaaagaatataattaataaattagtatcttctctgctaataatttcacctttatttttagttaaattaaatttggaatttagtcatctattgagtgttatcggtttatccttttttacattcagagctatagatgtcattttattctctagcaagcaacagaaaatagtaatttatgaatatttttcctatttattcttaccattagtttggctggctggccctatgtatcgatggaacagcttcaaacgtgatttacttgaattacaagtgccagtctctttagaaaaatggttttccggcgctggacaaatattatatggtatcgttcagaaatttttattcgccgcccttatctataacgtatttttatctgactatattaataaagatacgattgaatcatacttagtagttgctataagttatagtttttacttatattttgattttgccggttataccaatatggcttgtggcgcgggcaagttattcggcataaacttaccgattaattttcattatcccattttagccaaaaacccacaggatttttggcgtagatttcatattagtttatctgaatggttaagagacgtcatctttatgccattatataagacactaatggagaaagcatttttcaaaaatcatagactttttgcccagaatatcagtatttttatcacattattttgcatgggtatttggaatggactggagcttaattacattataagtggtgctttatttggttcttactcagtaatgcataactgtttaattaattatactagagataaagaaaatatcgctaatatcctaaatacaaaaatcatctccttctttggcagactgacaacgttaactttcatttgtttttctttatatatatttagtggatacagttttataaaatgaaatatctcaacgagtatagtgaatcaaactttgatttattgattaacgatagaatcatagcgccttctcatccagagaatcccgtcatagtcggctcagataaagtcatttattggcgtgatttatattatgaaattaaaaagtggcattctaaatatttagaattaaatttaaaccgcaacacgccgttgatcttatacggacacaaagaggctaattttttagtttcaatttatgcatgtataacttataaaatcccatttattccagtcgatataatttatccaatacaacgtttgttagaaattgcatcactatccaacacgccttattactacgatgtgattaacaatcaatttaaaacaacaaatgttgattatattgagtttgatgaagataatgttgcctatatcatgtttacatccggtagcacaggaaaacctaaaggcgtcgtcattggacgtgaaagtgtttatgatcttatgcgatggatgtacaatgatttcaagcttggtgaaaaacctgttttcatgaatcaagcgctatttaattttgatttatccatgtatgaaacatttggtacattggtatacggtggcacatgtctttgtatttctcaagaaacagcaactgattctgaaaaattttatcaagttttaaatcattaccaaccaacggtatgggtttcaacaccctctttttcctataagcaattactctcgcagagttttaattattccttgttaaaaaatctaaaacattttctattttgtggtgaaattctaagtaaaaatctcgttaaacatttaaggaaaagatttccatctgcaattatctataatacttatggtcccacagaagctactgtagcaacaacgttaattgaaattagcgatcaacaccttcattctgatatggaattattgccaattggcgagtcaagatcgggctctactctgacattagaaaatggtgaaattgttatttctggcgctcatgttatgagaaaatacattggcgctaaaacggaagataataatagattgacaattaatcaacacggaacgagaagtttccgaactggagatatcggcaaattaattgacaatatctggtattgctttggcaggaaagataaccaaataaaactaaatggctatcgcattgagctacatgaaattgaagaaaggctgatgaatattcctattgttgatagcgctgttgttttgccattaaaaaaagaagatggttctattgttcgcttggttgctttctgtaaattcaaaactattactaataaggagaacttagttaacctgcttaaaaataatttaccttcctatatgatacctagtgaatttatcaacattgataacttcccagtcacaaataatagtaaaattgatacaaaatctctattgtcaatatataacaataatgaatgtgaagtagtaaaataactaatacaaagccgaaaataaaaagaaaataacaacaatctatgaaggaaaaaataattttaaatatagacgctcagtgaaaatagatttaccatagaaaacatatcaatacacagtaaattattaaccatgataggtgatcagcccagtatttttagccccgactgatcacctgctatctaacattaagagaagactttttataacttagatactattagtcgttcgcaatgttgaccataatgccttcatggcctttcctctggggaaagcaatatattccggttcaatcaacgacggccgccagctcattttatattgacgttgcgaagcagcaggataaacaatgccgccttttgatgacaaccatttggcaactttataaaagattgccgagtcattaatgtatccctcctcgccgaactccaccaaaggcgtgaagcccaaatgaaggtaggaaactacaccctctttcaggaagtcattaatcgccgtttcattaataaactgcatcgtgccgtcgggtatatccggtttttttcgagatagattatgaaaccatcccgatgtttccccccaagtgtagctataaacaatatatgcctgaatttgttctccctgagttgcaatatagactctgtgctggcctgaattcacttccacggtattgaaatcaatcaccaattttttcagggccttcgcatgtttttctttcagccaaagctgattaatctgttctagttgtggtttaaatcgataatattcctcttgtgagcagatctctcgaacagaaatccccgctcttttagatttattgattttatttctaagctgctgaaaccgtttgcctttcatgtcatatccatcaaggctcaatgaataacttgcaccaagctggttcacagaaaagccgctatttttcaacaatacaaaatcgctctcatcaccgtgcagaaaaaccgggaaagcccgcttttctctggtgaagttgagaaaagagtgcaaaagtgcagcacgttcttcgtcaggagccaaaataccgcctacacacatatgcagatttttgtcctgaaagaaaccaatcgcccccttttgattagtaaaccaatatgtttcactattgaacaacaggctactcaacgggtgctttgaatagcaaagcacgtttctgaggtgactgttgccaagaacatcttgagcgttcccggtggcaataatctggggagcatcaagcaacatgctcataacgctcaccttgattatttcgggaatactggacagggatgaacccatgcttcctggcaatatcccgaatcgccaatgcatcgttataatcaatagatttaccgatgctttgatgaacactcaccccttcaagcgccacagcgacagtttctgataaacaggcgagatttacccccgcaggtacatcgatcacgttgcaatcgctataggtcactttctcaggctgatagactaatcccccctcgtaaatttgatggttgccatcacgaatgaaatcgaaaggtctggccgcatcaaaaacgatggcggaatctttcaaataatttgtattcaagaaaggcttaccttcactggttgccgaaacaataaaatcagcctgactcaaagaatattcataactctctatcgcttccaaaccaaaggtatcaacaacgtcaagaacttgctgatgtaatgtttgtgcatctgtcacacccggattttgtttaaaaagccattttctcatcttatccatgaccgaatctggctggataacatcatgagtccttaacactgcggaaagcagcgccttggtcagttcagagagtaatatgcgtgctttattagggcggctaaccaagataatccggccaaagttatgagctaagccaataactgaaagtctgcctacggagcctctggcacccactaccgccaatgtttgccgggatgcattctcaaccaacattgagcgtattccctcaatcaccgccaccgctgtcagagagttgccattagtcaatatccgaccctgccgattattcaccaagctagtaccaccattagtaataaccgaggtataagcccctaagccaacgatttcagcgccatttttctctgccacatcgagatattccttcatcaataccgcccgttctttcgctgacaatgccatcatatcttcgggactaatgggtgagaaaaggagcataccattagcatatgccgttgaactttcgacaccaaactcaacggcgatatcaggattaaaatcaattgaagaaacctgcgtgatccaattaccgagctgtttctgctgctcctgcgtgtaattctcctttattgacacgcaataagagtgagcgagctcattaaccgaagtggtatgaatcaagaaagcgaatttcttaccctcaattaatccagggataggcgctttaatctgagccaagttgttattttttgaaattggataactcaccgaagcgggtgggagatccgcaacaggtacatctatcaagtgtgaaaaaagaatgtcatatcgtccattttcaactagttggcatacctcatcaaaagcggtgaaaaacgtcttaatatcctctttggaaacgttaagcggtggctcaaaacgtacagaacaaggacgagacattaacggcatggtgaaaagaccataatgtttcaataagaaactacaaatgatataagccaggccaccgcttctttgactgaaattgataaatatgttggaagccgctttgctgtcctgtatttcaaggccacgcatcaacccagccccttgccagtaaaaatgctgcggatatttagcagacaattgttcaagacattcatcaacataacggctgacttcttgaacgtgggttaacgccttaccctcctctttagtcagatgctcgataacagcaatccccatcgttgcggctagaacgttattggcaaaagtggagctatgtttcctgtcgaactcggataaataaaactcatctgaatataacatcgcaccaatcggcgagatacctgcccccagcgctttagaaaacaggataacatccggtttcaaagcgtagagcgtggccgcacaaaatgccccaagcctaccgatacccgtctgaacttcgtcaaagactgacaatgtgccattgtctttacacagtgccaaaatattggacaaggtatctggtggaatcactttcattccaccttctccttgcaccggttcaatgataaatgcggcaaattcccggctctccagctttctttttatttcatctaaatcttcactatcaacctgctcatataatttatcatcgtaaatgaaatcagctttaaaccggtttgatcccgtagcggataatgccgaataggtttttccgtgaaaactgcgatgcaaactcaaaatacgctttctaccagtaaacaggcgggtaaatttaatcgcagcttctacggtttcagcaccactgttagtaaaagtacagtgggtatatttttccttatctatttgctccgcaagcatttcagccaatagccgtacctttttgtgaatattgggctgaaagaagataggctctttatctttagtgaatctgtcaatttcagcgatagcgaaatcaggattatgcccaaatggcagggcaccatattgagccaaaaaatccttaacaacccggccatccgataatgtaagctggttatcttgagcagacttgatatccagttcaaggcccacagagtttaataaactctcacgatattgattaacaaacatagttctctctctcttttttttaggtgcataaaatcatgctgtaaacagcatgggaaaatccttgagttataaataggtgattctaaaagtaatcaagcttgctgcatgatctggttaatcatttggaattctcctatcggatgaaatttaaataactgtactgccaaatagaaattcataatttctggtgttgtcattaccttaattccaccacaacatcggaatatgaaactggcagtttcctcaaggatcttttccaaagtataacgtaacgcgagaatcttatggacggcgttttcatcctggctagcataaaaggcaataatcaacatctgaccgagaataacattaatcttataatcagcttgggtcagagtatatttaattgtttgctgttctactactttctcaggaataaaacgagtcagcccatcaagaatacctgagtatgtattagcagcaaagtaattaaatagcgataaaccataggaaagaattatttgctgctccagccctttataatgagaaagtcgtgttaatgaaatttcggtatccgaaaatttaacttcttgattatcactttcagccataatccccagtcgccagaaaggaataactttaaagttctgatctgatttagaaaccaatactatcctcatatcattattattatcagtatcgcagaccgataacacataatagtcagcaaccgaagataaggaacaaggtttcttcgaaccattaacaaacaactttccctctttagaatgcattttaagcgatggtataaaaatattcgttccaggtagtccctccgcaaaagcggaagcaaccaacgcttttgatgtcataacttcattcaataatacgttgctgtcttcgaatatatcgggaaatttactgcaagccagtacaatatgattatgcattgttagagcaataccaatagcgggaagccatgcagaggcttcacggatagtattaccgacttgatgaagcccatccatattggattgagccatcaaacgtaggcattgtgaagcagcctcagaacccaataacaatcttttcaatctatctggtgtcaaatgttggtatttcccgctattcttcctgagttcttcaacaatatttgtcattttaattctccttagcctattcaaacaacctgctgaataaggccatatctacactaaacccatgtacttaaggcgtgactgctgcatctgttcaaccaaggaatgagagagctcaaggcgagattccaccgtagaatcggacaacaacatcccaggagctaattcataaccttcaataaagcgcaaatagttctgcataccccgttgatagaacatttcacgctccacaaacaaatcatcaacagatacttggttccataacgccagcccttcttctatacactcaagagccgattgctttagagaactctcattttcgagcgccatcttgacgatatttgcacacactgtcagatgtcttaattcatcagcattggctctggcttgtgtctcggcggcaacaatatcaaaagggcgccacttgatttcgctgagctctgacgttggcgcaagcacgccttccagaacaaccgtaatgattaacacgcctgcaatgtagtcatttttcaacaccacccacttatcgaaataagttctcaatgtttccaacatattggtcatttttcctcgtaagaggctttccatttttccggccacattgtcgatatccgcaaagcctattctgaccagatgttctctgaataatttagcatgtctaccttcatcaaatatctgagtcagcatataatcaaagttgatattgtcaggagccttatctgcaagtaacaataatgctttcgttgcctcatattccgaaatcgatttaaaagaaagttccctgatcagagactcccgtaaatcacccggcaaataggttaatttaggatcattggcataatgggttcttttgctttgttcaacacttatctgttcagtgaaccattcatccaagccccaatcttttgcccgcatttctacttccgatgcctgtttaattaaattcataatataaattcctcttcaaataagctatctctctataataatttttttcaatgaacagtaggctgtttaaatatattaatagataacttaggaaaatttcccagtacacctcgatccaggcagatatggacaaatagtgcaataacgctgtaattgtccttaaagaaccagatccagagcaaactaatcacactgagtgtaaataaattgtggcaaatattataaatggtgtaaaaagctggaggaggagtttcttttttattcagtaaactccagatccgccctgggtaataaccaataatatcaatcagaaaaaataacacaataaactgccaccaatttatataactctcaagctgccaagtcagaaataaagtgataaaaaacaatcccaaaaattcccaacgcagaattttaaatgtattaatcatcgctattctccatcatttcttttttcatgatttcaataatatctcctggctgtttaatccaggcgctatgaggattacctttgaaagataatgttatttccctaacttctgcattaggtataagacttgctaatacttgagtagacttcaacggagcccaattatcttctttaacacagatataaacagccttggataaatgcttattctccttccccttataagcacgaacatgataataatttcccgtataagcagttctggaccagtcccgcattaatcccttagcttctcttatgccaaaaccaatctttttcccagggagataaccatataacgcagtcagaatgttaaaaataatagctgctgttattatctgtaccctccccattccctgccaattcttataccatacgttcccggttgccacacaaaacagagaaaatggcctgtcagttgagctggcaaagagcgtcgcaatatgccccccaagactgtgcccaaagacaataggaattttattgctatttaatttaacagccttatctagcaaggccggaagataatcctgcaacagatcggaatagttatagtcattttttcgacttggtttaggttgattgtcgccataacctggcatatcagcagtgacaacctgaaaaccctctttcaccagttgttgtattaaagcgtcatatttcctgatttccacaccaatagcaggtaacaatataacaactctgccattactatctccctgataaactttataattacagaggaaattgccagccactttaaaatgattaccgttaatattatttttcatatctatatgctcccaacaactacatcacgctccagtgactggcattggcgataaatccgccaaaaaaattttattttcagtgcgataggtgtcaaatacttgtccatatcgccgggttattagtgattttctaatttgttattaaccaatataaaagccccttatactttcttagtaacaggctatagataaagcaaggaatatatattattttataaattatttgctggaaaaattattttacacattagaaaaatttaatttcaaatgtaaattatatcattaaaatattaatggataagttataaatcaataataaaatatcaattttaaatgtatttaatttatatgaaaaaatattgatagaaaattataaccatataaaacaacaaacagttaatagtaacaagagataatcttagtttaaatgacacataaaaaaaatgaaatttattcatgagtcaatttgaaaatatattcaaaaaattatttcctaacattattttcacaaatccgtttatattacttccttatatactttacatggcaaaattattaatcttcatgaattatatcattactactatttagtttatgaaatgaaccagccattctgttatcttactttatgactagttttatattagttttaattataacgactaattttatataccttatggatttcaagatgcatcacgacggcaagggagagaatccccgggagcatagataactatgtgaccggggtgaacgagtgcagccaacaaaaaggcaacttgaaagataacgggtatagaattaaatcactcgtttccaaaaaccggctataccaaatcctaaaataagcattggcagaatagcgagtacaccccccactacaggagcatgtaatccgatagaaacaaggtatataattggaacatagagaatagatgtaatgtaagtacagataattaataaaatcaacgcaacgctaaatttattgaactcccgcaacatcaaatccgttaataaaaacaacaaaacaggtaatgtaataagataagatgctgtgggtacaactaatgctgcgacaaggctaaataatccagcaagtatccttaaaatgctctggatatttgatacagttcggagtgaagatgaaaaccatatatttcttatcgctaatgagatagagagtaaaaatgttaaaatacctataacgaaagcggaaaatatagatatgataataagcccaatatagggaacaggaaagtaaactgcatctacactttctttaaacaagttaatctcatcttttaccgcgaaatgcgctcccaaatcccgaatcgttcgctgatatcgccacaaagttccaaggttaagattctcaacagtatcactcatacggtggtaatgctcgtaacccaagatcgtagcaaaattcatcccggtaaaccctctatccagaaagacactaaaatctgtgttattccgcaacatttgatacacgatgggactaaatgaaaaagctaccggcttataagcattctgattccattctgaaacaagagcaagattttttgctgatgtctcaaataagagtggcacgccattatttccccgagcatcaaaattaaaaacaacatctattggttgagtcgcgatctcattaatattcttaacaaagtgatgcgcgccgagtaatcccaactcttcagcatcagagaataagaatataacgttattttttatatccgttctttcagcaagatcccgcattaattggagtaccgaggcgacggctataccattatcactggctcctggcgcagttctaacactgtcataatgtgaaacgaataataaagttccttctggcgcaggaacctccaattttgcgataagattcgttccagttaattccgattgttcctccacttgttttgcaaagttgcctgtatttatcctggcaaactctttatcaaaagctcggcgttgttgactattgaagtttgaatatattctcttctgccgagcggccaaatcagccgccgtgtaataaaatgtctgttcagtgacgctatatcccatatcattcatttcgttaatcaggtaagcccgaactaacgcttgctgtgttgaagccgcaggatggggttccgcggcaataacaccaagcgttctcatcacattcttgaatccactttctttgaaatattcaactgggactttatcaggaagtaccaaaccgataccctgaataatcgcgacaattacagatgctaaaaaacagataatcaaaaaaatgcgtttcattaaactctcccattccgataaaatagtaacaaaatattatccttgatataattaataatattttttcatatttttataattaaaatgaaaatataaaaaattaatcaaaataatttagactaatttaaaacaatataaaacattatttgtaacaataacagacgctcttttgtaattatataatcaaaaaataattagataaaaactctatttcctataaattcctcaaggtattatttaatacatatcatttagagatgttatttataaattatttccactaaaatactattaatacaatgagtcaattcctaaaagtattcatattctacgaagatgactttaataagacgagtccaatttacacacaaaaagtactagcaagtttataccctatggatttcaagatgcatcgcagcagcaagggagcgaatccccgggagcatagataacgatgtgaccggggtgagagagtgcagccaacaaagaagcaacttgaaagatgacgggtatattggcttatatcgtgctgaatcaaaaatgttgcctctttatatccatagacaggaaaccatttccatcttaataatcttgtgcatttatagtgagttaactatcatgatgattcgagacctaaccttgagatttctttaaatcttaatgataggtagcattttccacacatcggatgagtgtttttcaggtttatcgtccataatgagaaatgaaaatgaattccatcttattattcagagggtatttcgatgagcactgccgttaccagtaaaaaaacaaaaaaaaccaagattacggcgaataatgctgttgctaatgggcaagtacagtcattaagtcgcggcctgacacttttggaatatatttccgagtcacccggtggtatcgccctgactgatttagcccaacaagccggattaccaaattccaccactcaccgccttttgactactttgcaacagcacggttttatccgtcagattggcgatttagggttatgggttatcggttcacatacttttattgtcggcagcagtttcttacagagccgaaatttattggcactcattcacccgatcctccgccgtttgatggaagattccggtgaaaccgtgaatttagctattcttgatcacagtgaatatgaagcggttattgtcgatcaggtacagtgtaatgcattgatgagaatgtccgcccctatcgggggtaaattgcctatgcatgcttccggggctggtaaagcattcctttcaacattatcagataaccaactggttcaattactgcataagaaagggcttcattcttacacacaacataccaagacaaccccttcgaatttaaaagaaaatctggagcaagcacgtaaacaagggtattcgttcgatgatgaagaacatgctttaggtctgcgctgtattgctgcctgtatttatgatgagcatcaccaagcctttgccgctatttccatttccggcccagtctcacgcatcactgatgatcgtatcaccgaacttggtgctttagtgatccgggcagcaaaagagatcagtaaagaatatggcgggattcgttaattctctttcataaattatcatattcttctcagggcattgattttttcgtgccctgccttttcagactaataaatttaacttaatttatcatcccgctaaaaatattatcggcaatagaatagaatagaatagaatagaataataacgaaattatttaacccgtttagaaataatatcaatgaaaaatgagataaagagtccgaaaataattatatttccagactctacatatatagaaggatttatagaaggatgagttaatggaacactaatcgatgaatatcatcctgattaaatcacttttgataaattccaagtgcctgtgccattgcctcgattagaaagacgtgaagtatatacattatataattcgttaggaacagtagcattgaaacaagtatcgagaaatcctccacgtacgctatcataaccattcagaaaacggataacatcactttcacgaactttaccatcatatccactggttgtatctgaaaaaatgtaccatgtcagggtctcaaccggacgtgctgctttatccgccgtataaacattatagagttcaggtgatggcgcataaccatttgtgccgagatatccgccattattctggtaaagattgaaaagaaagactatatcaccactgtaaatctgtgtccctatggcttttccgctcgcagacaaaatttgccacgtacccgtacctgtacccggagctcgggtcggcgaattagccgtgtatacgttatattttgcgccttgtgcggttgcataaccattagtatccagatagccgccatttccaaggtagttatttctaatataaatgttatcgccgtataaaattacactagccattattgtttccttaaatacttttacgcagttatatatgtgttatatgagaattttcatgtagttaattacgagtcaaaaatatcaattatttttacaaccactagtcatggctaaaaatccttgactaccaaactctataaaattatagaacctccacaaataagtggatctatttttatttcttaaagaaaccattaaatatatgtttttaactcacattccaattatgccttcctaataataaatatatattatatggaatccaaaatttatttttattaggaatattcatacctcacacaataaaaacaaatagaaattaatttgtatttaatttagagaaataatttaatgaggataataatattagctattggtgaaaatggcgattgctgacagtaatcgccaattcctaataaaatcaggctgaaactttagcaatagaataagtttctatctcagtacgttgactaaaccgctgtttgcggcgatatgcaaacacatcttccacatgaccacttctaatccgctcctgtaacgcccgccagtagtctgctttaaataaatcactatgcatctcttcaaaatagcgacgaatacgactgtcagtgcaaagaaaatgtcggaattcttcaggaaaaacatcatttggtgccacgctgtaccacggttcgccggcaagctcatcttctgggtaacgcggcggcggtatgtctcgaaaattaacctctgtcatataacagatttcatcgtagtcgtagaacactacacgtccatgccgtgtcacaccaaagtttttaaacaacatatctccaggaaaaatattcgccgcagcaagttgtttaatcgcattaccgtactcttcaatgacatctttcaacttccgttcttccacctgttccatatagatattcagcggggtcatgcgccgttccatatagagatgtttaatcaggattttatcacccaaatcctccagcttttctggcacttctttctgcaactcttccattagttcaggactgatgcgggctttatcaataacaaaattttcaaactcctgtgtgtcggccatcctccctacacgatcatgctccttgaccagacggtaacattcctgtacccgctcctgagtcacctctttctgcggcgcaaattgatctttaattaccttgaagacgcgatcaaatgaaggggaagtaaataccaacatcaccatccctttaacaccgggagcaattatcagttgctctttagagaaggtaataaacgccagatattcccggtaatattctgtcttaccatgcttctggcagccgattgccatataaagttcagacgttgatttggcgggcagaatttctctcagccattcaactaaagccgcgggcaaaggcgcataaaccataaaataggaacgggcgaagccaaatacaatgctagcatcagcataatcagtcaggcaggtatcgataaaaatcccaccagattcgttatgatggatcggcaataagaaaggataaacctgaccgccaatgcgaatcttaccgactaaccaagcggctttgttgcgataaaacagttcattagctatctgaaaagttgcctgtaataattctccgactggaaatgtctgttgtagatagtcagtaatataataaatatctctttccagattttcccaaggtaaacgcagcggcagatcattaagaattgtccgtaacattaacgcaagattatcattagggaaaaagtcacgcgataacggccgaggaatatcccgaaatctgcgcgcaggctgcgaggtaaaaataaataatttatccggtgtcaaattacgatgctcaaacagacggcaataaacagaattaaaaaaactctcggcaatttcaaaccggggataatccggtaataaaccggtataaacaacctttaccttggcaatgtactcttcatcatatccgaaagcactatgtatacatttaagctgctcaaccaccagcccaacatgatgatcataaagattaatacgctttttcatcgcttgctgaacagcgtgccagtcggcctgttcaaaacgttgttgtgcacccgaagtcacttccagaaagcgaccatattgtgcatcgaatccttgtaaaatggtttgtgctatcaaatgtgctgaatctatccccatcgcaactcctcaatatattcagcctgcaataagcaggctgaatagaaacaatcagaactgctgctcttctgtggaacctgtcaatgcggttactgacgatgttcccccttgaataatcgttgtgactttatcgaaataacctgtgccaacttcctgctgatgagaagagaaggtataaccacggttaatggattcaaactctctttcctggaccttctccacataatgtttcatgccttcaccctgcgcgtaagcatgtgccaagtcgaacatgttgaaccacatactgtggatacccgccagagtaataaattggaatttataacccattgctgacagttcatcctggaaacgcgcaatagtcttatcatccagattttttttccaattgaacgatggagaacagttgtaagctaacaatttaccgggatatttagcatgaatcgcctcagcaaaacgacgggccatttcaatatcaggtgttgatgtttcacaccatatcaagtcagcatacggcgcataagccaaaccacgactaattgcttgatcgatacccgctctggtacggaagaacccctcaaaagtccgttctccggtaataaactcactgtcatatgcgtcactgtcagaggttaacagatcggctgcatcagcatctgtacgagcaatcaacagcgtcggtacgccagaaacatccgccgccaaacgcgcagcgaccaatttttgaatcgcctcttgtgtcggaaccagaactttaccgcccatatgaccacattttttcaccgcagccagttgatcttcaaagtgaacagccgcagcacccgcttcaatcatagctttcatcaattcaaaagcattcagaacaccaccaaatccggcttccgcatccgccacaattggcagaaaataatcgatatattcctgatgatcagtaccaataccatttgcccactgaatctgatctgcacgacggaaactgttattaatacgttttaccaccgccgggacggaatccaccggatacagggactgatcaggatacatactggatgcagtgttagcatcagccgcaacctgccaaccagaaagataaaccgcctcaatacccgcttttgcctgctgtaatgcctgcccacccgtcaatgcacctaatgagttgacatagcctttctttgccatgccatgcagtagttcccacagttttttagcaccaagctgtgccaatgtatgttctggattaaccgaaccacgcaatttaaccacatcttccgcactgtacgggcgaataatcccattccaacggtcacttttccattcttgttccagttgagcgatttgttgagttctggagattgtcataacttctacttcctatctttgttaaattaatcggatatggtgttttgttattattcgttgctcaaacttctctcagtagccctaatgggatgagctctaatcaagcaattgatatcccggcaacgtcaggaaatctatcagctcgtcctgagttgtaatgcgctccatcaacttggccgcatcgctaaatcgcccttgactgaaacgtgtttctcccacttcctgcttaataacctccatttcctctgccaacatctgcttgaacaaactttttgtcacttttttaccgttagataatgatttttcgtgatgaatccattgccaaatagatgtccgggaaatttcggctgtcgcagcatcttccatcaaaccataaataggaacgcacccatttcctgaaatccacgcttcaatgtattgaaccgctacacgaatattggcccgcataccttcttcagtacgatcgcctgggcaaggttccagtaattgagctgcggtaatcggtgcatcttcttcacggaaaatatctaactggttttgccgctctgccaagaccctatcgaaaacgtccattaccgtgtcggcaagacctgggtgggcaatccatgtaccatcatgaccattgcgtgcttccagctctttatccgcccggactttatctagtacccaattgttgcgctcaatatctttgctggggataaaagctgccattccccccatcgcaaatgctccgcgcttatggcaggttttgatcagcaaacgggaataagcattgaggaaaggttgatccatcgtgacagactgacgatcaggcagaacccgatcactatgatttttcagtgttttaatgtagctgaaaatataatcccagcggccacaattaaggccaacgatatggtgccgaagatggtaaagaatctcatccatctgaaatacagcaggcagagtttcaatcaataccgttgctttgattgtgcctctcggcagatcaaaacgatcttctgcaaagctgaatacatcactccaccactgagcttcgtgataagactgaatttttggtaagtagaaataggggccgctcccctttgccagcaattgtttatggttgtggtaaaaatagagcgcaaaatcaaacaatccaccggcgattggctcattctgatagagaacatgtttttccggtaaatgaatccctcttacccgtgcgatcagaacagccgggtctggttgcaattggtactgtttaccctgctcattaacgtaagaaattgtgccattaaccgcatcacgcaggttgatttgcccctcaatcaccttatcccaagctggtgctaaggaatcttcgaaatccgccatgaaaacttttacgttagcattcaaagcgttgataaccattttccgttctactggtccagtgatttctactctgcgatcacggagatccgctggaatattttgaatttcccattcactttcacgaatggaaccggtttccgaaataaaatcaggcaattcaccatcatcaattttcttctgccaaatatcccgctcgactaacaattttttccgtgcatcagtaaaccgaacaaccagatctttcagaaaatctaccgcttcaggtatcaaaacctcctgctctgctgctccaaatcgtttaataaacgataattcagtcgctaaagtttgctgcgtcattcatctatcctcattttaaagcacacctgaataagagtaatagatatttaaaataaatcaaaaacgatttccatttttttataaatttatttttattcaataaaaaacaacaagttatacacaatattacctattttaaattagagaaattgattccataaatcataagataatttggttaagtttttgttatataagataaactacaaaaagtgcgatattttgacaggtgttaataacaggagagtagaaaaaatcagaagggttaaatggctgaatttcagccatttataaagatattaatccagtgttggattcatgtaggtgagatcatatggtgtgatttggtacacataataattcagccagttggaaaacaataaatgcccgtgactgcgccatgatgccagtggttttctttctggattattatctggaaaataatttattgggatctttggagccaaacctgctgctaaatcgcgtaaatattcactagccaacgttccagcatcatattccggatgaccagtgacaaataccatacgtttatctttactcgccagtaaatacactcccgcatcttcagaactggaaagaatatccagatcagtatgttcacgaacaacctgttcaggaaaatctgcataacgagaatggggagcaaaaaaagattcatcaaagccacgagttaataatgctagagggttcagagtagagtgataataaacacctgatagttttacttctctggtaaacttcggcaaaccatacaaaatattcaacgcggcttgtacagcccaacaaataaatagagtagaagtgacatgttcctttgcccaactaattattctttcaatctgtttccaatatgccacatcttcgaattcaactaatcccaatggcgcaccagtgacaattaagccatcaaagttttggtgttttatctgctcgaaatcacaataaaagttattcaaatgttcagcaggcgtattcctgcactttcggttatctattctcaatagctggatatctacctgtaaaggcgtattggatagtaatcttaaaaattgattttcagtctcaatcttctttggcatcaggttaagcagcaatacctttagtggacgtatattttgaatatttgcacgagtagatgtcatcacaaacacattctcgttttgtaaaaaattcactgcgggtaattcatccggtatacaaattggcatgctataacctcgatttttttatccatttacacgtttagacttctagatagctaaatctaactaagtattaacaaaatgtcgaggatttacaagtaagctgaaattatttcatttttggtctcacacaatgttcaacatgataatagttaataaattttcagtgtttataacagaaaatactttaaattatatttttatataaaaaaataataagtaaaattacaaatggaataaaacatattaaaaatcaatgatattttcagtagaaatgagaaagaccaaaacaaaaaggcaacattataagaagtcaaattacaagctatcgatattaaaaacaatacactctaagaaagcaacaagactaattgataaaatattcttattattaatattgagttataagatttatcttcaatactagaatatgcacttttcttataataataagctaatttgaatcaaatgctaatattaagtatggaaagagaaaaaataggcaattacacaatttaaattacagtctaaatttaacttacagactcaaaacagatattcgaactcattaagatctgttaataactggctcgataatatttatgaatatatacccgttatctttcaagttgcctctttgttggctgcgctcgtttaccccggtcatatcgttatctatgctcccggggattcgctcccttgccgtcacgatgcaacttgaaatccatagggtatagagagaaatttttgtcatgctcggctaagcttaggataacatgactcattttctttcccatcagttcaaaaagttatttaaattattttttatgcctgctattactataatatattttaattattcaagactgataaacaaactatctatttcttaaagggaataagtaaataaataataccttaaaacgcaaaaacccccagctttcgctgagggtttctacggtatttaaagcctggcagtgtcctactctcacatggggagaccccacactaccatcggcgctacggcgtttcactgctgagttcggcatggggtcaggtgggaccaccgcgctatcgccgccaggcatattcggttttcttccggccgttgtcgctcttccgccacaaccacccgaatcaatctctgaacaagctgaaaattcttctctcttctgtcttccgacaccaaaacaccttcggtgttgtaaggttaagcctctcggttcattagtactggtcagctcaatgcatcgctgcacttacacacccagcctatccacgtcttcgtcttaaacgttccttccgtgacctcagtcaggggaagactcatctcaaggcaagtttcccgcttagatgctttcagcggttatctctcccgcacttagctaccgggctatgccattggcatgacaacccgtacaccagcggtgcgtccactccggtcctctcgtactaggagcagcccctttcaatcttcctgcgcccacggcagatagggaccgaactgtctcacgacgttctaaacccagctcgcgtaccactttaaatggcgaacagccatacccttgggacctacttcagccccaggatgtgatgagccgacatcgaggtgccaaacaccgccgtcgatatgaactcttgggcggtatcagcctgttatccccggagtaccttttatccgttgagcgatggcccttccattcagaaccaccggatcactaagacctactttcgtacctgctcgaaccgtcactctcgcagttaagctggcttatgcctttgcactaacctcacgatgtccgaccgtgattagccaaccttcgtgctcctccgttaccctttgggaggagaccgccccagtcaaactacccgccagacactgtccccggcccggtttacgggcccaggtgagaacatcgaacattcaagggtggtatttcaaggatggctccatgcagactggcgtccgcacttctcagcctcccacctatcctacacatcaaggctccatgttcagtgtcaagctatagtaaaggttcacggggtctttccgtcttgccgcggggacactgcatcttcacagcgagttcaatttcactgagtctcgggtggagacagcctggccatcattacgccattcgtgcaggtcggaacttacccgacaaggaatttcgctaccttaggaccgttatagttacggccgccgtttactggggcttctgtcaagagcctcgccttgcggctaaccccatcaattaaccttccagcaccgggcaggcgtcacaccgtatacgtccacttacgtgtttgcacagtgctgtgtttttaataaacagttgcagccagctggtctctgcgactggcttcagctccggaggcaaactccttcacctaccgccagcgtgccttctcccgaagttacggcaccattttgcctagttccttcacccgagttctctcaagcgcctgagtattctctacctgaccacctgtgtcggtttggggtacgattcaatatgacctgaggcttagaggcttttcctggaagccgggcatcaaccacttcaccgccgtaacggctcgtcatcacgcctcagtgttcacagaagagcggatttacctgctcctcccacctacacgcttaaaccgggacaaccgtcgcccggatggcctagccttctccgtccccccttcgcagtcacattcagtacaggaatattaacctgtttcccatcagctacgcctctcggcctcaccttaggggtcgactcaccctgccccgattaacgttggacaggaacccttggtcttccggcgagcgggtttttcacccgctttatcgttacttatgtcagcattcgcacttctgatacctccagcaggcctcacagctccaccttctccggcttacagaacgctcccctacccaataacacttgcgtgtcactgccgcagcttcggtgcatggtttagccccgttacatcttccgcgcaggccgactcgaccagtgagctattacgctttctttcaatgatggctgcttctaagccaacatcctggctgtctgggccttcccacatcgtttcccacttaaccatgacttcgggaccttagctggcggtctgggttgtttccctcttcacgacggacgttagcacccgccgtgtgtctcccgtgataccattcttcggtattcgcagtttgcatcgggttggtaagccgggatggccccctagccgaaacagtgctctacccccgaagatgaattcacgaggcgctacctaaatagctttcggggagaaccagctatctcccggtttgattggcctttcacccccagccacaggtcatccgctaatttttcaacattagtcggttcggtcctccagttagtgttacccaaccttcaacctgcccatggctagctcaccgggtttcgggtctataccctgcaactctttcgcccagttaagactcggtttccctgcggctcccctatccggttaaccttgctacagaatataagtcgctgacccattatacaaaaggtacgcagtcaccccaccccaaaacgctccactgcttgatttgtgtgttgggcgtcgctgccgctccgccaaccgtcatcagtgctgctgttacgcattttgtgcaccacgcaaagcgaaacgctttggtggtggggctcccactgcttgtacgtacacggtttcaggttctctttcactcccctcgccggggttcttttcgcctttccctcacggtactggttcactatcggtcagtcaggagtatttagccttggaggatggtccccccatcttcagacaggatttctcgtgtcccgccttactcttcgaactcacaaccacactaccttcgagtacggggctgtcaccctctctcgccggcctttccagaccgttcctctgatgctgtggctgatgttagttctgggctcctccccgttcgctcgccgctactgggggaatctcggttgatttcttttcctcggggtactgagatgtttcagttcccccggttcgcctcattaacctatgaattcagttaatgatagtgcaacgcattgcactgggtttccccattcggacatcgccagctatatcgcttcatatcagcttaccgacgcttttcgcagattagcacgtccttcatcgcctctgactgcctaggcatccaccgtgtacgcttagtcgcttaacctcacaacccgaaactgtctcggactgttcagcttgagagacacctcaacaatacctcggcgatattattgagtatttcaatttttcagcttgttccagattgttaaagagcaaaataattcgcagcatactgtcgccaatatactctgaattaggttgaatatggtggagctaagcgggatcgaaccgctgacctcctgcgtgcaaggcaggcgctctcccagctgagctatagccccatacagaaatagaccgtcatcgcctgttcagtcaactcgctttgccgccggggatttcaacgcgagtaacgcagtgtgcgcgagcacatgagtcacgcagcgtctggaagacccagggataagtagagttggtaggcctgagtggacttgaaccaccgacctcacccttatcaggggtgcgctctaaccacctgagctacaagcctatcgcgataacgttttctcttctttcatcagacaatctgtgtgagcactgcactcaacctatctcaggtaaggaggtgatccaaccgcaggttcccctacggttaccttgttacgacttcaccccagtcatgagccacaaagtggtcagcgcccccctttcggttaagctaccgacttcttttgcaacccactcccatggtgtgacgggcggtgtgtacaaggcccgggaacgtattcaccgtagcatgctgatctacgattactagcgattccgacttcatggagtcgagttgcagactccaatccggactacgacagactttgtgtgttccgcttgctctcgcgaggtcgcttcactttgtatccgccattgtagcacgtgtgtagccctactcgtaagggccatgatgacttgacgtcatccccaccttcctccggtttatcaccggcagtctcctttgagttcccaccttcacgtgctggcaacaaaggataagggttgcgctcgttgcgggacttaacccaacatttcacaacacgagctgacgacagccatgcagcacctgtctctcagttccctaaggcacttcgctgtctccagcaaattctgaggatgtcaagagtaggtaaggttcttcgcgttgcatcgaattaaaccacatgctccaccgcttgtgcgggcccccgtcaattcatttgagttttaaccttgcggccgtactccccaggcggtcgatttaacgcgttagcttcggaagccacagctcaaggccacaacctccaaatcgacatcgtttacagcgtggactaccagggtatctaatcctgtttgctccccacgctttcgcacctgagcgtcagtcttcgtccagggggccgccttcgccaccggtattcctccacatctctacgcatttcaccgctacacatggaattctacccccctctacgagactccagtcaaccagtcttagatgccattcccaggttgagcccggggatttcacatctaacttaattgaccgcctgcgtgcgctttacgcccagtcattccgattaacgcttgcaccctccgtattaccgcggctgctggcacggagttagccggtgcttcttctgcgggtaacgtcaaaatctaaccctcttcaggctaaacccttcctccccgctgaaagtactttacaacccgaaggccttcttcatacacgcggcatggctgcatcaggcttgcgcccattgtgcaatattccccactgctgcctcccgtaggagtctgggccgtgtctcagtcccagtgtggctggtcatcctctcagaccagctagagatcgtcgcctaggtaggccattaccctacctaccagctaatcccatctgggttcatccgacggcgtgaggccctttcaggtcccccactttggtctcgcgacattatgcggtattagccaccgtttccagtggttatcccccgccctcgggcagatccccagacattactcacccgtccgccgctcgtcagcaaaagcgcaagcgctttcctgttaccgctcgacttgcatgtgttaggcctgccgccagcgttcaatctgagccatgatcaaactcttcaatttaaatcaaagtttgatgctcaaagaattctgactaattatttcgtaatgaattaactgttgttcactcttcaagactttaaaacgtatttttttgcgatacggtcttgtgagtgcccacacagattgtctgattaattgttaaagagcaggctgacataaaaaataacattctcgttcagccgggctgcgtatattacgcttttcacccgcagagtcaagcactgattatcgctttctccgcccgacctcacaatgtttatcagcgttgtgtcggtcagtggtggcgcattatagggcgttctttgacgctggcaagcatttattaaaaaaaaaactgccgttcgcagtttttttcaacaaaacactgataaaaagaacaaatcagttatttttcactcactattttaaggaagtcatcggtaaaataatcaacttgctgccaatcggtatattcaacctctttagttgtatcagtttccccaccggtcattttcataatcattttaaccattatccgatccaaccaatgataacgaggataaagtaatgcaccagcaaaaacaccacacaaatctggcttccacggggtattaaacagaaagttacgaacatacacatttgtttctggtgtacgtttctctggcttccttgctgtcaaattcacgccaaaaaatgcggttggcattttattaagttgctgttgatgacagattgcaaactttttcagtgccgaattgaaatgaccatatctgatcgaagctccaatcataatcttgtcataagattccaaattgatcgtttttactgttgctaaatctctgagctcacataactcccctgatctgcgtagattttcagcaatgcgggtgataattttcttagtctgtccatcccgactggaataaagtaataaacaatgcatagctatatccctctcccagtagactattcacgccagaaggttggtgtaaataaaactaataaagtgaatacttccaagcgaccaaacaacattgttataactaatatccatttggctgctggattcattgcagtgaagttatccgcaacaacacccaatcctggccctagattatttagtgtagcggctattgccgaaaacgcagaaagttcatctacaccagttgcgataagtaataataaactaatgataaataccaaagcataagcagagaagaatccccaaacagcttcaataatcctttcaggtaatgcccttcgccctaacttgagggtataaaccgcatttggatgaaccaatctcttcaattcacgggacccttgcaggaatagcagtaagatacgaatcaccttcagtcctcctcccgtcgagcctgcacagcccccaataaaagcggaacacaacagcagtattggcaaaaatgatggccaacgagcaaaactatctgtgctaaaccctgccgttgtcgccattgaaacaacctggaaaaaagcttggtttagtgtctctatccccgacttataaacagcgtgatgccataagatcagagtgcaaataataacaagcaccaattgaatggagataaacatacggaattcagggtcccgccaatatactgtcaggctacgtcccgttaataccgcgaagtgcaaaccaaagttacaaccagaaatcagcagaaaaatcgcaataatggtatttatcgcggggctattgaaataaccaatactggcgtcatgtgtagaaaatccaccaattgcgatagttgaaaaactgtgagaaatggcatcaaaaactgacatacccgcagcccataacgctaaagcgcaggcgattgttagtaacacataaatcaaccataaagtttttgccgtttcagcaattcgcgggcgcattttattgtctttcaagggaccaggcatttcagcccgatagagctgcattcccccaaccccaagtagaggcagtattgcaacagccagcactataatccccataccacctaaccattgcagcatctgccggtagaaaagaatcgctttaggcaaggaatcaagcccaattagtgtcgtagcacccgttgttgttaaaccggagaaagattcaaaaaatgcatctgtaatagaaagatttggctgttcagaaaaaatgaaaggcaaagccccaacactgccaaggactgtccaaaacaaagcaacgataagaaacccttcccgaggctttagctcgtgtttttgctcccgatttggtatccaaagcattaaaccgataattaaggcaaaaataaatgtctgactaaatgcacgcccagcaccatcacgatagataagtgctaccaatcctggaattatcatggtgacagagaaaagaatgacaagcagcccgacaatacgggttatggcacgaaaatgcatttagctggttccttagaaatccagttacagagaatatttacagatcaggtgttaaatacagtacaccgcgacttagatcacgtaatttatcaccgacttcccccactaaggtagctggaagtgaaattcgcaaagtaacattctctgcatactcactggaaataatttgccctgatgatttctgtaataactgttcaatcatagagatatgggcatattcacactgcaaggaacagagtttctgtggaaccttatattttgtctccagcaatttcagcgcctgttgggcaccacttccatatgcccttaccaacccaccggtccctaattttattccaccaaaatagcggacaacaaccacagttatttcaccgatattatttcccataagttgggacagtatcggcttacctgcggttcctgaaggttccccatcatctgaaaaacccaactgttgtgaatcatccggtgcaccagcaacaaatgcccagcagtgatggcgggcatcagggtactgagctttgatttgctggataaacgctttagcctcatccaccccgtcagtatgctccagcaaggtaataaagcgactttttttaatctcttcagtaaaactcactgaagctgcgggtatcaaataaggcttcattatggcaattgaagatcccgagtcatgttttccactttattttcatggatcacaatattgtcttcaatacgaataccaccgaaaagtttaagcgtcccaattttattccagtcaaaatgtttgctgaactcactttcacgccaaggtgcaagcagcgattcgatgaaataaagacctggctcgatagtcagcaccatgcgaggttctagaatacgggtacaacgcagataaggatacatatccggagcggctaaatgtgtacctgtatcatcctgcataaaccctgccacatcatggacctgtaatccaagagggtgaccaatgccatgtggaaagaatggcgttgtcagcccttcttcaaccatgacttcttcactgacatctttcacgataccatattttttcaacaacttagcaatccgatgatgcatctgaatatgatattcggtatagcgagttcccactttaattgtactaattaacgctttttgttcagcatccatatctttaattaaagaagcaaattcattattactttttgctgaataagtgcgggtgatatctgctgcatagccattatattcagcaccagcatcaatcaggaaactacgaatatccgaaggtgcattgtgctgcaatgcagtgtaatgcaaaacagccgcattctcattcatagcaataatattgttataaggcacatctgtatcacgatgacctgttgccataagataagagatattaatatcaaattcactcatcccagcctgaaatgcttcataagctgccaaatgtccgacaatagccgttttttgtgcttcacgcatacagactagttcataatctgttttgtatgaacgatggaaatgcaaataatcaagaacagactttggattaatattgcgttcagagaaaccaatctcttttgctctttgcggtgaacaaccgatgtaagcaacattctgttttacataagtgcttaacgctgaattaatatctcctgcatttgccagatgaatcatttcaacttctttagtccagtagctagtcggcagcggttctacgctgtgccaataatctaccggcgagtaaaaccataatttaggtttattaataccatctacccacaaccagcaattaggcactttagttactggtacccaagctttgaagcaagcattaactttgaaagggtaatctctatcatcaagaaaaatatgctgtaactcaccagagtgaataagcaaagcatcaaattgattacgggccaatgcttcacaggtacgttgctgcaatgtagagatatgttcgtggtacagagatgccaacttttccatttcaattgaccttttttattttatgactaaaccattagcttatcacagccgttgatatttgcaggtatcacgcaaaaactcactcaatttatccgttcccgctaacaccttatttatcaagatataaaaacaatcattgtcagtgagatacaaatctcacttgtgatcacccttgcaaaaaactaatcactcatttgcatttgcttaacataataaccacaatcaaacccatctggtcataccagatggtatgcgctcatttaggagaacgacatgctctatcaaagtgaaacaattcaagtaagctggctgaaagatggcattgctgaactggttttcaatgccccagccgcgattaataaactagataccaaaaccgttgcatctctcgacaaggctattgccagcctagagcaacaaactggattgaaaggcgttttattacgttctgaaaaaaccgcatttattgttggtgcagatattactgaattcctctctttattcgattcatctgtagaaaaactgcaagaatggcttaacttttcaaatagcatttttaaccggatagaagatttacctgtaccaaccatttcagcaataaacggttatgctcttggtggtggttgtgaatgcgttctatctacagatttccgtgtggcctccccggatatacgcattgggttaccagaaaccaaacttggtattatgcctggtttcggtggctcagttcgccttccacgcctgatcgggactgataatgcattggatatcattgccgcaggtaaagacattggtgcagaagaagcattgaaaaacggtttgattgatgctgttgttcccaaagaaaaactggttgattccgcagtatcaatgctggaacaagcaattgcagggaacctcgactggaaagccgcacgccagccaaaattagagcctttgaaactcaatgaaactgaacgaggcatgagttttagtgtggcaaaaggtatggtgatgaaagtcgccggccctcattatccagctcctatcaccgcagttaaatctatagaaaaagccgctacatttggtcgcgatgaagcattgaaacaagaaaccgccagcttcattcctttagcacagacaaatgttgcccgtgccttagtgggtatttttcttaatgaccagtacgtaaaaggactggcaaaaaaacatctgaaagaagtcacaatacctgaatatgccgcagttctaggtgctggaattatgggtggtggtatagcctatcaatccgcccgcaaagggattcctgtcatgatgaaagacatcagccagcaatcccttgaattaggtatgaatgaagccgcgaaacttctaaacaagcaatttgaacgtggccgtctagatgctataaaaatggcgagaaccctctcttctattcaacctaccttaaattatgccggtatcgaacaggcccaaatcgtggttgaagctgtagtagagaatcctaagatcaaagcggctgtactatcagaaactgaaactctggttaatgaagattgtgtcctagcttccaacacatcaacaattccaatttcagaattagctaagtccctaaaacgcccggaaaacttctgtggtatgcatttcttcaacccggtacaccgcatgccgttggttgaagtcattcgcggtgaaaaaacgtctgaaaagacaatttcaaccgtagtcgcctatgccagcaaaatgggtaaaaccccgatcgtcgttaacgactgtccagggttctttgtaaaccgagtactgcttccttatctccttggcttcggtctactattgcgtgatggtggtgatttccgccaaatagacaaaatcatggagaaagaatttggttggccaatgggccctgcttaccttatcgatgttattggtcttgatactgcacatcattctcaatccgtcatggcccaagggttcccagatcgtatgcatcgtgattataaagatgccattcatgttttatatgacaatcaacgttatgggcagaaaaacggccttggcttctataaatatacgcaagataagaaaggtaaacctaagaaagagcaagacgagcaaacagaccaactgctggcaactatctgccaacagaagagtaatttctccggtgaagagatcattgctcgtactatgatcccgatgatcaacgaagttgtccgttgtctggaagaaggtgtcattgccagcccagcagaagcagatatggctctggtttatggccttggcttccctccattccacggtggtgttttccgttatctggaaacaatgggaactgcggcttacgtaaaaatggctgaaaattatgctcacctaggtgcgctttatcaggtaccgcctggtctgaaagccaaagctgaacgtaatgaaagttactactctacagcagcaacgattgctgtcagcaccggaaaaacagcgtgaggtctggaaacatggaaaatgtagtcattattgatggcatccgcaccccaatggggcgctcaaaaggtggtgcattccgtcaggtccgggctgaagatctctccgctcacctgatgaaaaagctatttaaacgtaatccggcaatacagcaacacgaaatcgatgatatctattggggctgtgtccaacaaactctagaacaaggtttcaacattgcccgtaatgcagctttactggctgatattcctcactctgtaccagccgtgacggttaaccggctgtgcggttcatcaatgcaagcgctgcatgatggcgctcgtatgatcatgaccggagaagccaatgtcacactgattggtggtgtagagcacatgggtcatgttccaatgacacatggcgtggatttccatcctaaaatgagtctgagtgttgccaaagccgcaggagtcatgggcttaaccgctgaaatgttggcaaagattcaccatatcagccgtgaaatgcaagatgaatttgcgcttcgttcgcaccaacgtgcaacacaagcaacgcaatcaggtgcattcgccaatgagatatcaccaatttatggtcacgatgccgatggcatattgaaacggtttgattacgatgaggtaatccgttcagatgctaatctgaaagatctagccgccctgcgccccgtattcgatccggtaacaggctcagtcacagcaggcagctcttctgctttatccgatggtgcgtctgcaatgttgataaccagtgaaagttatgccaagaatctggggctgaaacctcgtgcccgtatccgttctatggcagcggttggttgcgatccttccattatgggatatggcccggtccctgctacacaaatggcgctcaaaaaagcaggtttagtactaggtgatattggcgtgattgaattaaacgaagcatttgccgctcaatcacttgcctgcctgaagggcctaaatttgttggacagtatggatgacaaagttaacctgaatggtggtgcaattgctctcggtcacccactaggctgctcaggtgctcgcatcacaacaacattgttgaacctaatggaacgccgcgatgttcagtttggcctggcaaccatgtgtatcggtttaggccaaggtatcgccaccattatagaaagaatggattaagaacttatctgtaagaattattataactgagtcgttgttgccgtaattcccgcctgtcaggggcgggtttttttattattattttaaatgaattcgaaagcatcaccatacatgttgtcagtagaagcatcacgctcaccacaaaagcgctcgcgagcaatttttgccatttcaaatcgccccgcaatgtagatatcataattggccaaactaccaaaatcctctagtaccgctttaagcactgttcctgtacgtccacaccaaccattctctgactgttcaacaaccggaacaaccgtcaaattagggtagcgctctgtaagtaactgtaattcagcaagatcatataaatgttgtggttctctgcccccccaatacatagagatctggcgttcaggttgttcttccaacgctgtcagtaatatagaacgggtataagaaaaccccgtaccgcctgcaattaataacagcggattaatgctgctttgacgaaaccaggctttaccatgagggatatcaatatcgatcactttctgatccagaattctatccatcacagccattgcatataaattcagttcagaagcaccaatatgtaattcaataaacgccttttctgaaggcgttgatgccattgaaaatggacgtttatctctctcacccattaccaccatcagatactgaccggcgcggaatgagaacggagaatcgggaagtaaccgtacccgataaaccgtatcagtaatagcctctacagaggttactttacagctcagtgttgtcatgcgttccctcttatggtcctaaaatatctaattcatcccagattttgtcgacgcgggtacgcacttcttcactcatcacaataggacgtccccattccctctgcgtctctcccagccatttgttcgttgcatccattcccattttcgaacccaatcctgaaacgggtgatgcaaaatcgagataatctatcggagtattctccattaatacggtatctcttaccgggtccattcgcgtagtgattgcccaaatgacatcgttccagtctctggcattgatatcatcatcacaaacgataacaaacttcgtatacataaattgccgtagatatgaccaaacccccatcatgacccgcttggcatgacccggatattgtttcttcatcgtcacgacggcaaggcgataggaacaaccttcaggaggcagataaaaatcgacaatttcaggaaactgtttttgtaaaatcggtaccagcacctcattcaatgcaacccccaacacagcaggttcatccggcgggcggccagtataagtcgagtgataaatagcatcatggcgctgagtaatatgtgtcacagtgaacaccgggaacatatcgatttcattataatagcccgtatggtcaccatatggcccttctggagctaactcgccaggctcaatatacccctccaatacgatctcagcacttgctggtacctccaagttatttgaaagacatttcacaacttctgttttatatcctcttaataacccggcaaatgcatattccgataatgtatcaggaattggcgtcacagcccccaatattgtcgctggatcagcccccaaggcaacagccactgggaaacgttctcctggatgtgcctgacaccattcctgaaaatcaagcgcaccgccacgatgagatagccagcgcataatgagcttatttttacctaatacttgctggcgataaataccaagattctgccgctctttattcgggccacgagttactgtcagtccccaagtaatcaatggcgcagcatcctctggccaacagtgcatgataggaatacgggttaaatctacatcgtcaccaaccgaaacatgttcctgacaaggcgcagtattaagccgtttagttggcatattaaggacttgcttaaatttcggtagcttatccagtaaatcacgaaaacctttcggaggatcgggttctttcaaaaaagctagcagcttacctacatcatgcaaagctttaacatctttctgccccatccccatagcaacacgttcagcagtaccaaacaaattacacaatacaggcatcgaataacctttgggattttcaaacaacaaggcaggcccaccagcgcgaagggtacgatctgcaatctcagtcatctccaaataaggatcaacttcaaaactgatgcgtttcaactcacctttatgctccaataaggttagaaaatctcttaagtcacggtatttcatactattcatttatgccggtttttaagggggaaaacattataagccatcccactcagcttttttgtgtttttttcagaagactacaaagtaaaccaataagttactaaaaagcaatggggttaattcaaccttgcgaccttaaagtcaaatacaacgaaatggaagctaatgagttaatatttgagcattaaattacccagcaagatgtttagttggaacatattgcattggaacatattgcattggaacatctcgatacctttactcttaccacagaaataatgctatcactatctcctctgggttcactgcacaagatgcagccaattgatcaccacggatttcccatatgcctgctcaatgactatcaaattttgcaattactcaacagaaatactgatatttttcttttattaatattttctgcacaaataacagccaaatttatattaattatcttatctgttacttaccaaaatattacccatcgcttttttactgaaaaacataagacccactcataacaataaatatgcatcattaaacaattatcactaagataatgcctgtaatgcccttttctattttgctatgcttaatagtcattggattaaggttaaataaagatggaaaactggtacctcatttactgtaaacgtgggcaaatttcacgagcaatagaaaatcttgaacgacaggatgttgcttgcctgactcctaccgcgagaattgaaaaaataacccgtggtaaacgtactgtgaatatagaaccactttttcctcattatctgtttgttcagtttgaccctgaaattattcatactaccactatccattcaacacgcggtgttagccattttgtccgttttggtgtacaccctgccatcgtaccggaaacgctgattaaagagatcgtatcagccactgagcaagaatatgtatcaccagatacacctgtggctggtgataccgtattaatcaccgcaggaatttttgaaggattgcaagctatctacaatgagccagatggagaaacccgttctattctgttacttaatattctgaataaacaattacctaaggcacttgataataagcagtttgtaaaaatttaaccaaacaaaaaacgggcagaatttgcattcgcccgtttttaatcaaatattaacgtttctgttcatataactgttgagcaacctgtttcgcaaaataggtcagtacaccatcggctcctgcacgcttgaagcataacagagactccacaattacctgttcctgtaaccaaccattctgaatagcagccatgtgcatggcatattcgccagagacttgataagcaaaggttggtacaccaaatgtatcttttaccctgcgaataacatccaggtagggcatacctggttttaccattacagtgtcagcgccttcctgcaaatcctgtgcaatctcctgcaatgcttcatcactattcgcagggtccatctgataggtttttttattgccccctttcagattacgatttgaaccgattgcatcacggaatgggccgtaatacccagaagcatacttagcggagtaagccataatttgagtatttacatgtccttccgtttcaaatagttcacggattgcaccaatacgcccatccatcatgtcgctcggtgccacaatctcagcaccagcttctgcatgtgacaatgcctgtttgaccaagatctctttggttatatcattcatcacataaccatcttgatcgatgatcccatcctgaccatgtgtagtgaatggatctaatgccacatcagtcagcaatcctagctcaggaatggcatctttcaacgcacgaaccgtacgctgaaccaacccatcagggttataagcttcttccgcatccagagattttttatctgcttcaataacggggaacagagacaatacaggaatccccagccgggcaatctcttcagcttctttcagcaacagatccatcgtcagacgatacactcctggcatagagggcacttcttgacgacgattaatgccctccatcacaaatacaggatagattaaatcattaacagttaattggttttcagcaaccagacggcgggaaaaatcatggcagcgcaaccggcgcatacgtcgaccagggaaagttcctggaaatgcatagctcatatagctctcctaacgcaaacccagcgcactcgcgctgggttaattaatatgctatcgcttcgtgctaattatcttagcactacagaacagcatgttaagattactattatcacttttccgtattcacttctggcgcttcctgctcatcttcctctgaacgatcccccaatttccgctgcccggtataaaaacgggagagcaaaatccccagttcaaacagcaaatacataggaatcgccagcaaggtttgcgagaaaacatccggcggcgttaacaacatgccaacaacaaaggccccgaccaaaatatacggacgctttttcttcaaagattcgggtgtaactaccccactccaacataataaaataatggcaacgggtacttcaaaagagacaccaaaggccataaacagtgccatgacaaagcttaagtagttactgatatccgttgcaatcagcactccttcaggtgccgttttagcaaagaatccaaaagctatcggaaatacaacaaaataagcaaacgccatccccaaataaaatagcaggctactggaaacaagcagagggatcatcaagcggcgttcatgcttatataacgcaggtgcaataaatgcccacacttgatagagaaccataggtgcagatacgaatattgacaccataatggtcagttttattggcgtaaaaaagggggaagcaacatctgtcgctatcatactggcaccttgaggcaactgcttaatcaaaggtgcagaaatcatctgatagatgtcgttagaaaaataaaccaacgctaaaaaaaccactaatacagtaagtaaactgtttagaattcgcttacgcagttcaataaggtgactgataagtggttgagtatcatcaacagccatgttttagtgttcaccattaacttaatcggaagtttttttcttcgttgcagaagccgcttgatcatccactagagcagaaggtccagatgaagccacaacctgagacgctgccggcttttgtgccacctcatttatttctgatgctttcatgctccctgcatcaggttcattttggtatgcttttttcaaagactcagcagcttcttttagttcatccatcgaagcttttagttccggggataaattctgcaaccccgcttcttcttgaacttttttcaggctttcctggagctcctgcaatttcagctcttggaccaactcattttggacgttagcagctaaagagcgcagtgccctgatccaaccagcaaccgtttttacagccaccggtagccgctctggccccaaaaccaccaagccaatgaccataaccagcagcaactcaccaaaaccaatgtcaaacacggtttatacctgctctttgtttttgctctcagatgtttcagattgagctacagattgtttttcagtaatgtttttagtctcaaaatcggcatcactactggttttttgagcctgttgaggctgattatcatcccctatcgcctttttaaaacctttaatagatgccccaagatcagaacctaaagtacggagtttattcgtgccgaacaacagcaccacaatgaccgcaatgatgagtaactgccaaatgcttataccgcccattctgatttacctctatttaacaggaattatttttttagggtatatacccgtcatctttcaagttgcttctttgttggctgcactcactcaccccggtcacatcgttatctatgctcccggggattcgctcccttgccgccgcgatccatcttgaaatccatagggtatatatacacgacgaactataaccgaccttcaaagaaaatgtaccctaagacaaattttactaaattttacacagccgacaccagccaaacaaccatgaaacggtacccgcgcctataaacaaccagggaatatttgctaagccagatagcaaaaacaagctgccacagagaaacaatgtcgcaccaacaccaagtaaatactgtgactgccgctgttttatctgttgccctctcaaatgacctgataacttctcaatactcacctgcaaatgtttatgctgctgaagactgtcatacactaattcaggtagctctggcaacttttctgcccaataaggcaccttttctttcaacgcccggataacagcgggcaatccaacctggctatgcaaccactcctccagaaacggttttgctgttttccacaaatcaagctgtggataaagttgccgtcctaagccttctacatacaaaagtgtcttttgtagaagaactaactgaggctgcactgccatattaaaacggcgtgcagtattaaatagattcagaagtacatgaccaaatgaaatttcagcaagtggtttctcaaatattggctcacaaaccgtacggattgcaaattcaaaatcttcaacattggtatcactaggcacccagcctgaatccacatgaagctcagcaactttccggtaatcacgattaaagaaagcaataaaattctcagccagataacgtttatcatctttattaagagaaccaacaataccgtaatcaataccaatataaaacggatcttcaggatgttcatagctgacaaaaatatttcccggatgcatatccgcatggaagaagctatcgcgaaaaacctgtgtaaaaaagacctgcacgccccgttcagccagcaatctcatattggtattctgcgcttccaatgcttcaatatcagaaacagggataccataaacccgctccattactagaacattttcacggcaataatcagaataaatttccggtacataaagcgttgagctattttcgaaattacggcgtagttgaattgcattagccgcttcacgcagcaaattcagttcatcaattaatgtcttttcgtattcccgcacgacttcacgaggacgtaaacggcgtccatcgggtaataacattggtacccaattagccagacggtacattaaccggatatccgctttgataatcggcaaaatatcagggcggatgactttgataacaatttcctgtccattctcttttaaccgagcagtatggacctgagcaattgaagcagaggccagagcaataggttcaaaatcatcaaaccaagtttccaatgccccccctaaagcggtttcaatatattgacgcgccagagcaccatcaaaagaggcaacccggtcttgcaacaatgccagttgatccgctattgctggaggaaacagatcacgccgcgttgaaagcatctgtccaaatttaatccaaacaggccctaattcctgtaaggcaagccgtagtctctccccaagtgatttatctttatgtctatttgggatccagaacaataaataacgaccaaaacgaagaggccaggttaagcgaatccgaggaattagctcatctaatccgtaagaaagaaaaacccgtatgatcaaataaaggcgccttaattcacctggagtcatattttccctctaatactgccaatcgttgttctatttgctcgatatctttggccaacatgctaacttcttcactgaaataagccacttcaagctgatttggggccagtttccattcttccgttaacgcttccgccagataatttttctggcattccattgaactggaaacacactgaaatccttttttaaggacttgactaatactttcggcagcgatatccccgaaataaggagaaagataatgggccaaatcccactcaaccatatctaacaaagcagaccattgctgaacaacctgcatatccccttcaataaccatttcaccgctattgagcaatttggaaatttgttggcgatcccgtaatttaagcaaagcagaaaagtgagttttaaccgtacaatcggcagatccgctccattggcttaatacgtccacctgtttttcactgaataccaacgtgagtggtgtattcatttcttttaattcgatcgacaaaactttgtccaccagccgcatacgggctggccttaacacaggttcacggtacaacaggtaattcaacgatgtttccatcactgcggttaaaaccggcgtaagtgtggaattaataactgtactcagtgatggtctttccatctcaaaatttaaaacctctgtgtagtgcaacaatgccgccagtcatattggtataagtcacctgttcaaagccagcctcttccatcatcgttttaagcgtatcctgatcaggatgcatacggatggattccgccaaataacgataactgccagcatcctgcacaaaaacctgaccaatttttggcagcacatggaaagaataagcatcatacgctttgcttaatggcgcgaacaaaggtttagaaaattcaagtaccaataaacgcccacccggcttcaacacccgaaacatagaacgcagggctttttctttttcagtaacattacgcaaaccaaaagagatagtgatgcaattaaaatagttatcagggaaaggcaacgcttccgcattagcctgcacatagctgacattaccaacaataccaacatcacgtaatttctcacgcccaaccttcagcatagattcattgatatcagcaagaacaacttcgcctttttcaccaactatacgagaaaatttggcggtcaaatctccggtaccaccagctaaatcaagtatcctctgacctcggcgcaccccactagcatcaatagccacacgtttccatatacgatggataccaaacgacattaaatcattcattaaatcgtatttcgctgcaacagaatgaaacacttcggccaccatgcctgctttttcatcctttgctacagtacggaaaccaaaatgtgtggtttgtttcgtttggtctaccatgttatttgcccattttttattcaaagcattataaaagtgtatcagcctttcagataaaaccctatcctagtattaatcattagcacagaatggttggctggccttatcaaccaattcgggatcaatcggacgtttcacctcaacacctaaattacgaaaactctctgcctgacttatcaggttgccacgcccctcagtcagctttttcattgccagtcgataactaagttgagctttatccagactttgccccaaaccttgcatgtcatcgacaaacaagcgcattttatcgtacatgcgagcagctttatcggcgattaagcgcgtattttgactttgatactcatagcgccacaagttattaatagtacgcacagcaaccaacaatgttgatggactaactagcataatattgtgtttaagtgcttcatcaagcagctcaggtgccttgttcagcgcaaccaaataagcgggttcaaccggaataaacatcaatacatagtccaacgatttcagcccaggcaactgttggtaatctttgcggctcaaaccacgaatatggcctttaattgaatcgatatgttcttgaagggctaactcctgctgatgccgatcgccactgttaaaataacgctcataagcgaccagcgacattttggcatcaatgaccacatccttcccttgtggcaaatgaacaataacatcgggttggaaacggcggttaccctctaccttgatacttacctgagtacaaaactcatgcccttctcgtaaaccagaggcttccagaatacgggataacacaacttctccccaatctccctgaattttattattacctttaagggcatttgtcagattaatcgcttcctgcgccatctgggcattcagttgctgtaagttacggatttcatgtgcaagagtatgacgttcacgggcttcctgaccaaaactctcctgtacctgccgatgaagaccatcaagctgttcacgaaatggcgctaaaagcgtattgagactctgctgattttgttcaccagtacggcgacccgtttgttcaaaaatacgattagccaaattctcaaattgcgtattcaaacgtagttcactgttgatcagcaaccgctgtttctcttcagccgcaaggcgactctcttccaagcgtgtcgtcacttcacgcagttcggattcttgtacgctattgacttctctctgagcccgcaactcttggtttaactgttcgcattcaacccgccaataagcggattgttcaattttctcattagcaacggcaagctggctgtccaatttccgtaattccagctcttgctgttgaatacgttgatgaacggagaaccaaacgagaataccaccgcccaataggccaccaagagcacctatcaacgcatataacaactggatacccaccggtatttcctctatctcatgctttgaccagataaactaaattgctactgtatagatgtccagaatgatttatacagatggctcagtctgcgaagccgctcccaattagctcacccatttcactaaccattgcaaaccaaacgcgcctggagctaatacgccaaaagaccagataagtgcggaacagatattcgctatctgaaaataacgcaatggcatagtacaaatacccgcgactaatggcacaattgcacggaatggcccaaagaatcgaccaaagaaaatactccaaataccccaacgctcaaagaaatggtgcactcgtgtcagtagttgtggtttacgggaaatcggccaaattttaccaacatcacctttaaaataagcacctacaatataagatacccaatcgcccaaaaaagcccctgctgcggccgccaaccaaatcggccagaaattaagaccactttcacctattaatgcccccaatccaagcaatatgattgttgccggtaataacaaggagaaaaaagccagagattcaccaaaagcaagcaagaaaacaatcggcatgatccaggtatcatgagctttaacaaaagcgattaccagatcaactatttcatgaagactcaaattcatattcctatattgatcaatatcccctatggatttcaagatgcatcgcgacggcaagggcgcgaatcctcgggagcatagttaactatgtcaccgggggtgagcgagtgcagccaacaaagaggcaactgaaagataacgggtatacacattcaatttaaccaccgctgtattaaccagaattaaaccaactttttattcaaggaaataatcttgtaatttcttacgagcagtaaaatcaagaccaagatctttctccagccatatatctacactgccataatgctggttaatactgtttaatgccgtcattaaaaactcttctctcacggaataaacataagcgaatttatcaaccacatcgtcactcatagttttcgcatgctcatttaacaaatattcacgataaggagccagagtgcaattagtcactaaataatcttccattaccgtatccaaatcagcccccaatgcaaataataccagcgcagaacctacaccggttctgtctttacctaccgcacaatgctggactatcccacctttttccggttgttgcagtaagttaactaatgtcttataggctgaattttttagcggcaataattcataaagacgaaacataaatgcctgaggattaaattgctccaacatctctgacgccaatttttccagatttgcattcacttcatcagataagggattggccggagcatgatgataattagcaccattccataccaaatcgggtttatcctctatttcactggtatcacgataatctatgatttgaaagagatttttatttgccaggaaagattggtctttttctgttaagcgatccagagaaccagaacggaaaagtaaacctgatttgatttttccaccactcgcgacttttttaccgcctaaatcacgaaaattaatccctccattgagaggaagcactgatggatgtaataaagatgttgtgatcatgatgactcttaatcaattgtgaggtgttaagacattaacagatttctatttaaaataagagtgagccggaatactccggcccaaaaagtatgatttacagcaaacggcgagcagcttctacgacaatccccaatgcattactttctgttttctcaagtaatttaacattaggaatctcctgctgagtacggttaacaataacaccggcaaccatacccgcacgtagaccttggcttgcacacatcgttaataaagttgccgattccatttcataattcatgacccccattgcctgccattcagccattgagcccttgaaacggctcacaacacggccagaataggtatcgtaacgctcctgaccgggataaaaagtatcggaagaggccgttacccccacatgtactgttacacctaaatcttttgctgcttcgtacagagccgtcgtacactcaaaatcggcaaccgccggaaattccatcggagcaaaatgcaggctggcaccatccaaacgaacagctgcggtagtcaccaacacatcaccaacattgatattttcctgaattgcgcctgttgtgccgatacgtaaaaaagtacgtacccccaattgcgctaattcttcaaccgcgatagaggttgacgggccaccaatacccgtagagcatacaatgactgctgtaccatcaatttctgcccgccatgacgtaaattcacgtaaagaagcgagatgaactgggttatccatcaatcttgcgattttttccacacgtttcggatcacccggaacaatagctaaagttgcgccttgcagatcgtttttggtcagacctaagtgaaatacatcagacatatcagactcctcagcaagaagaatttataatgaaattagttgagatctactgtattgggcatttatacccgttatccttcaagttgcctctttgttggctgcactctctcaccccggtcacatcgttatctatgctcccggggattcgcgcccttgccgtcgcgaagcatcttgaaatccatagggtatagacatcttttagtgataaatgtcacttcaaagtaatataaaaaagaaaaacatacattattttgagatataaatcacaaaataaccatgaaacaggtaaaaaaacagggcgttttcttccgtccataaactaacttgaatgagttcatattatggaaaaacaatccattgtttagctatatttatgtttcataacgtatcgagaaaaatatatcacagattatctcatcgaaatattttctccttgagagttaatagaggttaatatccatccaatcacaaagaaaaaattatcatttcataacccggtcataaaacaaaatatttccaataaactatcaacttaatcaaatataaatcaccgtcgttattaaaatactctcctaacatttataaatcaacaacgcaataaactggactatttttaaaataactttttcttatgatgaacatattaaaaaattaactgtattttacttctatagctaataaataatttttcttgcttatttaccaacatattacaattatattttcaacaaaaataaaacaattaccaaatataaatatcacagttgtctttttataggatgcatattgtttagatattagactctttccaccatataagggcactattactatgactactatgactactatgacgacacaaaaaacagttttaattacaggtttcgaacctttcggtaaagaaacgattaatccatcctgggaagctgctaagcaattacaggggcgagaattatgcggagcccgcgttgaagcgcgtcagcttccatgtgtgttcgacgtctctctggcttgtctgtatgctgctattgatgatgtacaacctgatctggtcattgccgtgggacaggcaggcggcagaccaaatattactgtggaacgcgtggcaattaatatcaatgatgctagcatccctgataatcaaggtaatcagcctatcaatacccccatcgtcgcaacaggccctgccgcctacttcgccacgttaccgatcaatgcgatagtcaagggtttgcgtgatgcaggagtgccagcctccatttcacaaaccgcaggcactttcgtctgtaaccacgtcatgtatggcctgttgcatcatttggcatgcatctatcctgaaatacgcggtggagttctccatatcccttatctgcctgagcaagcagctcggtattcaggaacgccaagtatggccctagaaacagttataacagcgctggaaattgctatcgatgaagcattaaaaaacagtgaagatatcgccaataatggagacacagctcattaatttgacattctgcttgcgggactgaaagctttcctctgagaaaatgacaggcacagacagtatgctctactgatagtatcaatcaaacagtaaagataattctctctgtgcctgcacaatatccgtatataaatatcaaatgtctgatactttattaaattattaatcagcacattatttacataggttattttataatttcaactgttattacattgaaatttagtttattcaacaaaactgcttataccgtatgggaatataagtcatctttagttatgaaattagatatactttccaagtctattgatagaactatttcacctagtatcccacggttaatatcatattcatctatttttgttacttttatttctgaaagatgaccattcatatttttaaaatattcatcctcattatttttagttctgattaccctccgctttgaatacagatcatatttataaacctctgtattgattccttctggaaaatacatttgaccaacaaaagcaaagtgctctttgtcatccacatttgtgcttaattttctgattgcaatatgaatatgagtcgctctacccgcataaaacccaggataaatagtcgtaaaattaactatcccatttttatccgatggttgagctcctcttagaaaatttttatcatcagttctattgatagaagctactccagcaacgttagggactacatcggggctaatataactccaaccagaatatttcccccgactattacaatgccaaatatcaacaaataaattatcaacgggtttacatgttttttcatctatgacagtaatcttcaataaaaaaggtattcctaattctgaatcagtaatatcccttcttacaattttgtcatttcggaaatatggccctgatatctgctctggcgcaagcgtacatacgcctattccatgttgtggggataacttttcttctgcacgagctaaattcatcggagcaagtgcagctgtcgccgtaataacagcactactttttaaaaaatttcttcgagagctacttttcttaccttgcaacttattaacatccatataatcctctctttaattattaagtttctattacaatgcttccatcttgttactacccgggttattttgttaataaaatgtattttttcaaataccaatatggcatatataagttactaaaagtttggtaatagaaaagatcccagccaaaccgcaccgttacatgctattgcaaaaagaaagattattttatgaaaaatgcccatcaccagttaaagatgacaggcaaattgttggatgagttatttcactgattcacggaggcgtttcgccgcttgtaccatgtttgccagtgactggcgagtttcagtccaaccacgggttttcagaccacaatccgggttaacccacaaacgttcgaccggaatacgatcagccgctttacgtaacagtgcttcaatccattcaacactcggtacgttaggtgaatgaatgtcataaacacccggcccaatctcattcggataagagaagttttcaaatgaatccagcagctccatatctgaacgggaagtttcaatggtaatcacgtccgcatctaatgctgcaatggaaggcatgatgtcattgaactcgcaataacacatatgagtgtgaatctgtgtgtcatctttggcaattgcagcattcaatttaaatgcttctaccgcccaatcaagataggattgccactcttcccggcgcagtggtaaaccttcccgcaatgctggctcatcaatctggatgataccaatacccgcttcttgcaaatcgtccacttcatcacgcagtgccaatgcaatctgtttagcaatcgtctcacggctgacatcttcccttgggaatgaccaacagagaattgtcaccggcccagttaacatccctttgacaggtttctccgtcaacgattgagcatatttagcccattctaccgtgatagcttcaggacggctgacgtcaccaataatcactggtggcttaacgcaacgggaaccatagctctgaacccaaccattctgcgtaaagacaaaaccgtcgaggtgttcaccgaagtactccaccatgtcgttacgttcagcttcgccatgaaccaatacatctaatcctaaacgttcttgttcgttaattgcctgcttaatatgttcacagatattggtacgataactggtgccatctacccgaccttttttgaaatccaaacgcaagccacgaatttccgtcgtttgcgggaatgatccaatggttgttgtcggccacaatggcaagttatagcgctgacgctgtatttccgcacgctgtaggtatggctgattacgctcactgtcctgtggattaattgccgcaaggcgctcagtaacagcctgattattcacccgtttagattcacgacgagcacggattggcgcactgtaagcatccaattctgcttgtttactgccatctggctgattcaatgccgcagtcagcaaagctaactcctcacatttctgcaatgcgaacgcaaaccagcttttcacctctgcatcaagcgcagtctcatcactcagatcaatagggctatgcagaagagaacaggaagaaccgatccacagtgtgcggctacctaccaatggcttaattagctgatgcttagcggttaaatcagcacgccatacattacgaccattaatcacaccaagggaaagcacccactctttcggcaatgattcatgcagttgcgcgatatcatcctgaccagcaaccagatccacatgtagcccttgtaccggcaaggatttaatcgtttctagattgtgaccaatgctatcgaaataggtagtcagcaataatttaacctgtccttgaagtgcctgataagcaatcggataagctgtcaaccactctgctggcagttccagtaccagcgcaggttcatcaatctgaacccattcgataccacgtttagctaactcagctaatacttgctgataaacaggaagaatatcttgcaataaagagaggcgatcaaatacctgacctttcactttacccaaccacagataagttatcggccccagtaaaacgggtttcacttgatggcccagagataaggcttcatccacttcttctagtaactgagtccaactcagcttaaattcctgcccttgctgaaattccggcacgatataatggtagttagtattaaaccatttagtcatttcggcggcggcagcaggttcacccgttggcgcacgaccgcgagcaatacggaacagtgtatctagatcaatcgtgccatctggattctggtgacgcggtggcacattaccgagtagtaaactggtggttagaacatgatcataccaagcgaaatcaccaaccggcactaaatcaacaccagcctgcttctgttgttcccagtgacgggcacgtaactcacggccagtttccaataattcttgctgagaaattttccctgcccaataattttcctgagcctttttgagttctcttttcaaaccgatacgtggaaagccaagtgtgtgattaatagtcgtcatttcattatcccgtcatttttagccgtctagatgtttacacatccataatcaacaggtaaggtataaaccacaagcgcaatttattcattatcatcctgaaggtttctcatgatcgaaataaaacatctaaaaacattacaatcattgagtcattgtggttcattagcggcagcagccaatcatctgcatcaaacacaatccgcgttgtctcatcagttcagcgatcttgaacatcgccttggcttccggttgttcattcgtaaaagtcaaccgcttcgtttcacgccacagggtgaagttttattacgactagcagaacaagtgctccctctggttcaaaatgcactgcgcgaatgtaaagagccgggccaaacaaatctgcgtatcgctattgaatgtcatagttgtattcaatggctgacacctgcactcaagcatttccgagaaacctggccacaagtcaatgtggatttcaaatccggcgtcacttttgatccacaacctgcattactgcaacgagaattggatgtcgttttgacatcagatattctccctgagagtcatttacactacacaccgctatttgattatgaggtcaaactggttgttgctccggatcatcctctggccaataaactgcacatacagccaaaagatttaattgatgagacattgatgatctatcccgttcaacgtcagagattcgatatctggcggcgtttcttgcagccggcgggggttgtccctacgttgaaaaatgtggataacaccctgttactgatccaaatggtcgctgcccgcatgggaattgcggctctgccacattgggttgttgagacatttgaaaggcaagagttagtggtcactaagacactgggagaaggtttatggagcaggctgtacgctgccgtccgtcaaggcgaacagcaccagcctgagactgacgcatttatccattccgcacgtcaacacgcgatggataatctgccattcgtaaaaggaatttcaaaaataagcgtcgatgacctcataacaacacagtaaccaaacacctttcaatggtaaatttatcagccattccaccggaaccaacatattattcatcattgccaagaggttccggtatctacggcgggaaagccaataccaccagccagatacgagtaaacactatagaatcagctatcaacctgacaggtgaaacacccaccgatcaggctgaacaaggcgactcacaagatgatcgtgataaccaacaaattacaggatatcaatgctctttctgtaccagtagcgcttccagtaaatccaaatcatgcagcaaggtttgaagtgtctcattactaatttttctagttgcacgcagatgatataactcaccacgctctgcccttaatgccgtcagacgaaaacgacgttccaaatcttccactagcagattatgttctatctcatcctgccccacagtacggcgacgcaaatagccaatgaccctggaagcaacctcagtaatcacctcagcatccaactgctcttcggggctagcagaaagacgctcttccatcttattcatactgacaatcgccacttccgccatagcggcccgcgccattcgtacctcactgatatctgcctccttatcggaagtttgcattccccgtaacaggaatggcaaagagaggacaccaattaacaacgagaacaggatgacccctgcggcaataaagataagctgataacgagccgggaatggcgtaccatccgccaaaaacagaggaacagacagtgcaccagcaagagtgattgcaccacgaactccggcaaaagatgccagccacaattcacgggtggtataagtcgcaaaattcagtggattttttctcataaaaactttgctgatattcttcatcagccataaccagcagaaacgcagtaataaaagggcgccataaatcactgccaccgcggcgaacagcatccaggtttcaacggttggatcaatttctgcctgtataacggaagtttgccagatccccggcaattgcaggcccaacatgataaacaccaggccgttaaacacgaacgccagcattgaccagacactatcagcacgcaaacgcattgccaacggagcattacggatgaccccagatttactgatcgtcatacctgcggcaaccgaggcaaggataccggaaacgccaatatgttctgcaatcagataagaagcaaacggcaacagcaacatgaaaacaatttgggttgccggatcgccaccgctccaacgattcattaagcgcagggatttactgtacaaccaggttactgcaataccggataacaaaccgccaatagcaactttgaagaattctatggtcatgccagtaacagaaaatgccatcgttcccattgctatcgcgacagcgaactttaaggctaccaggccggaagcatcgttcattaacgcttccccttccatcacattcatcatgcgcttaggcatacgcctttttccaacaatggatgataaagccaccgcatctgttggcgataacacagcagcaagggcaaaagcagcaattaacggaatacctggcatcagccagtaaatcagataaccaataccgacaacagtaaccagcaccaataccagcatcagtataaaaatttcccgtccatactggaaaaactctctggttggcattttccagccatcaacgaataacaaaggaggaattagcagaacgagaaataactcaggattaaaagtaacatgtaagccaaagtgtggccaagctagcaatgctcccattgcaatctgcattaacggcagaggtatgcggaacggaatcactttagtcagaacaccagaaactgaaaccaccaaaatcaagatcagaatagtaaagaatatttccatgttgcccttacaatttgcctaagaaccgttggtatacagattgaaactctttttcttcccgttaacacaaaaacagtgagaacaaatcttaatactaaagtaactgaatcaatcgaaaaaggtagatacacacggagccgtatccgaaagaattgcaggaatattgtaaactaaccagataaatagaggggaaataattgagaatttaaaagtaatcgcaagaaatgacaaaatgcgcaagggtgaaccgaccttacgcactttttaatcaatcaaatagcccaatcaccagcataaaatgctactaaagcgatcgtaattaccactgtaccgatattcaatttgcgccattcaccggaacagatacgaccaacaactagggaactgaaacccaacataataccggttacaatattgcaggtcagcacaataaagaccgcacacagcataccggacatcgccccaacaaaatcatcgaaatccagctttctaacattactcagcatcagcagaccaacatacatcagcgctggcgcagtagcataggctggtacaagataggaaagtggagaaaagaacaaaattaataggaacagaataccgacaactgttgcggttaaacctgttttgccacctgcggcggtacccgcagctgattcgatatataccgcagccggagaagcaccgatagcaccggcaaaaatactactgacagaatcggcagtcagcgctttaccgccgttaataatctgtccacctttatccaacaggttcccttgccctgctaccgcacggatggtaccggtcgcatcaaacaccgcagtcatgactaacgccaacacgctgggtaacacaattggctgcaaagcccccataatatccatactaaaaatcaaggacaggccatcatctcccagacttggtatcttaaagaacccttgatatttcaccgccggatcaaaaatcagcccaataactgaaatcaccacgatcaccaacagcaccccaccgggaactttcaatttttccaagccaaaaataacagccaacccaagcagagtcatcataaccggaaaagaggtgaacgaacccaaagcaacaggcaaaccttccagcgggttcttaatgaccagaccaacaccatttgacgcaatcagtaacaaaaacagcccaataccaatccctgcaccatgcgcaatgcccattggtatattgcgtaaaatccaagaacgaataccggtaacagaaatcaccgtaaacaagcatcccatcaaaaataccgcaccgagtgcaaccggaatagtaatttgctgtcctaaaaccaaactaaaagcggtaaatgcagtcaacgaaattgcacaaccaattgccattggcaagttaacccacagccccattaacaaagaaccaaaaccggcaaccaaacaagtcgcaataaagacagcagtatggggaaaccccgcctgccctaacattcccggtacaacgatgactgaataaaccatcgccaagaaagttgtgatccctgccagaatttcacggcgtaccgttgtgccacgttcagtcaatttaaaatacttgtccagtttgcatttaactggtgcctgaatgccaaacatgtcgttcccctgcattatgttcatggtacttcttccacttcctcatcaaacgaaaacgattaccttgcttaataacacaacaatttaatgaacattgcaccaatcggttcaacaaatcataaaagcaatcgtttggcttttagaatagaaaacagtgagagaatttgaggcgaaagattatccagtgatcatagtgtctaaatcaatagctaacagtattatttcgccaagcattagcagaataatttccagagattaaacttttcgcaataattaatcgcaatgtttcaatcttaagattcgattcaccagccctttgaaaaaacataagatttactcattgctgactgccattcacagccagcgtttacacctgtacaactatcgactgaacacttcacttttatcacttttattactttgtggattaaaccgatccattgttgaaatcagaaatagcgctgcaatgacgacaagtagaataggtaaacctgatggcgtcactgaactcgctataccggcaagcagtggcccaaacaaactcccaataccccacaacatagccgccgcggcattagccactatcagatcatttcctgaaaaatactgaccaatttggactaatgcaatggtgtagatagccccggcagttgcccctaaaacaatcaacaaaggccagataagatactgatatgtcataacaaacggtaataatgcacttgctccgagcgttgctacaccacaaatctggtataggcgcatacgattcatatgatccgccaaccaaccaaacgggagctgcatcactgcatcaccagcaagaacgacacttatcatcaatgcagctaccgcttcggtatacccacaactcatcccgtagatgggaaacatagaaagaatagtcccgtcgaaaaaggaaaaaaatagcacaccaccacagatcgccggtgcaatcttcacaaattgaacaatagagaaattggatttcttaccgtattgcggtaactcatcgcctttcttctgatctaccatgacaaagagcaccagtgaaaagatatgaatcagagtacaaatcagtatcggcgttttatctgcgataccataaaaagcaataatagaagggccaagcaactgactaacagtaaaaaccgtcgtataaacagccagtaccctgcctcgtttattctcttcagagagttcattaatccaggtttcacctagacagatcattaacccgctagcagcaccagtaactagccgcagaggaaaaagcaactccatcggcaacgagcccaaaagtgggagcaaactgccagcagaaacccctgttgcaatcatcatgacgtgtttcttacctaccagagctacaattttctggacgaccggagcactcaaaagaacccccaatgccggagccgcagaaattaaaccaatgtacaactcatcaataccttggctattcaagcgtaacgctatcattgggatagtcaaaccaatgacaatgccaataacagcgacacttgaggtaatagtaaaaatggcaaaaaaattattatttctataatcacgactgttcattttatttatatctatccagcaaaaatagagagaataaatatgaaatgaactgaaaacaacaaattaataatattatattgaatgcattaattcttattggttactatttcagaaagtaaatatatagcgatatatcagcattaaccctgaagccaatacaataacattgataaacttcaagaatgtttctctggagattttcagagtcacctgacggccaaaatagattcccaacaacatggctggaataaataccaatatcaataacaaaaatgaggtatccagataaatacccatgacaacaaaaataatcactctcgtcagggtactgaaaccaattaaagtcgtctgggtgatcctgaaaatttgcttatctgatatccgcccggttagataaatggcataaagaaaacccccactaccaaataacgcactgaaaatacctccactcagaccaaatggaatagcggctttagcggggaattgacggtaggttttactgaaaaatagtgaataaagtgaatagaaaacaacaaatacccccaacaccagaactaaaacatcaggtcgggccatcaatagaatggcagcaccaatcaagctaccgacaaccattaatggaataattaacttgatctcactaaactctgattttttaccctctctagtaatattaatcactgcggcggttaaatctaccaacgcgagcacaggaacaattttcgctacaggaatataaaatgccagaactggactagcaataagagcagaaccaaacccggccatcccaaaaaccagataagcaaagaaaacgacaaaaatgcaaataaacagatcaggccatgcaagtagatgtaacatttatatttccctgaaaatagttttcaaactaaagtgatcgttttcccaatactaatagcttttactatcatttgtcaggtcagtctgcaaaaaatgggacaccagttaaagatgtacttacgcacacatgacgatggtatggctttggttgaaagataaaagcgataccaccaacaaaccaagagacgaccttaaaaagaatggtatttcactggattggattaatattgtcattaataccattcatacaacgatggtgaaagcgccaacggattaacaggtatttaagcgttgaccaatcaataaaataattttaaaaacaatgagataagctgattttagcctgttaaaaacataaaaagagaaaatggtttaaatcaaatcatagcaaaaatatgctattcaacgggttaaaacaaggtaaagcaagtttaaactgacgtatttacagggctcctatttgtattctgttaaatcagttatctggggattttatcatgccgtttttttatcatcgattatttaactgatttataaaagctttactctccgattgaaaacgttattaaagcacttcattttgaaaaatagattaacggattaacggattaacggactcatattatcatttatctttctccccgaaaacataaccaaaccagtttttatttctctgcttccattaatggctttataattggcaggttttaaaccattattaaaagtcatttttttaaccgatgattttaattagcataaaactttaaccgttgtttttaccacttataacacttgctttttcactaactgcctatcccaatagagctattttatttgccattttgaacctgggcagtgctcaaaatcctcacgtactacgtgtacgctccggtttttccgcgctgtccgtgttcaaactgtctgcaacaattacgcctattgagataggctctaagtttaatcattatgagatatcgtactttacgtttacctaacgtaggttaccccggctttttatctttattaacactattttatagataattttaagcagtttttataaaatatcaccatttgttttttacataaattactgtagcggtctaataaaaccggagacccatttaggtggaaagattaccacgttaaaagaggtattcaatgacaagacaacgtcgtacgttttcttcagcggacagcagaactttactgggcatgatgcgtactctggggtaccaaatggggcgtttcaaggtcagaagcctgatgaaagaggccgggatagtcagcaagcagccaagcccacacagttataaaacagcccggattgaacgattggatatcccgaatcatctacgttagcgcgccagatagtgtctggtgcggggatattatctatatttaggcagaaggcggctggtattatctggctgtggtactggatttatactgtcgtcatgttgctggctgggcattatcagcaaagcccgatgcggatttagtggttaaagcacgggacatggcatacgaacaacgcgacagaccgtaaaaggtgatgtttcattcagaccaaggtagtcagtataccagctgttcattccggcaaaggcggtggtgttatcgtatgacgcaaagcaaagtatgaaccaccgtggcaattgctgggataatgccccaatggaaaggttgttcagaagcttgaaatcaggatggaggcccgtaaccggttatatgaccagagcagaagccctgcgggatataagttttcctgattgattattacaactggagccagccacatcagttcaacgaggaagtgccaccagcaaaagctgagactctatctaatattatttactgcccggaactagttggccactacaatttaagcaagcgcaaaattcatcaaaatgagtgttgtaaaaacgaggatgaccatagagttatactctctctcatctctctcatctctctcagaaaagcccgtccagctcatctgcattcacctttacccgttcttcccactgctgttggtcgtccatcttccacaccgtccgcacccaccctttacccggtgcatttggccatacaaacgaacgcccatccgtcggcgcgtaattgtgccgcagaaaaacctcgcccgtggatggactcacccacaggctccggtctgaatcgatgttccagttcgccgaacagtgcaggtatcgcccgatgatgtgcagctcatcggtggtgaagctcactggcgtctctcctcgccgcacagcccgtccctgtgctatcgctttctcacagagaggggtcagctctgaaggcagttgcaactccttgttactgctgagtattggggaaaaaataacgccagcgtcctgtgccgcatccagcattacccgcatgcacaccttttcccagtcattcgggatactcttgcgggtcagaaacaccgctgcgcccaccttcttctcaaaaatatgctcccgcgccttgtcccggttgaccagcggccatgctatcatccgcgtttttacctctccgtgcggcagctggtatttcagcgcgggaagctgatacaacgcctcccgcatagcctccgttttccggtaaatcgccgtgctggtttctgccatgtcgtcgcgaaccacctcaaaattcggcatcgtcagtagcgtgtcctcattctcctccgcgttgtacccgccgccgatatccgagtgcacacccggcagcatcagctccggccacatccccgcgatgctattcaagctgaagttatgacggcattcgtgcattgcgcttatctgaaacaccttctgcgccacggatggccgcagctcaagatttacgccggggttgttgcgcccgttgatgttgtagaagttcagtaggtggcctatggccgctaccgtgtcaaacagccccagaaaccgcacctccccggaaggtttgccgtggtggttgtgcgtatccagccccctgtctatcgcggaagctatcgccgcgtcctggttcatcactctgttggcaaaatgacgcgctgcggccgccccccgactgaatccgaacacatcaaattgcaccttttctatcgtcgcttgatcacggttacgcctgatgaactcacccagtgcagaaacgatctcatcaagagccctgttcgttttcgtcaccaccccttcaaactgctttatcagactgctgcccaacgctattccgaacactgcatcgctttcaccgtctgccgtcccgatgccggagatataggccttaacctgcgcctctgtctgctcatctttgaggactgtatcagttttataaagatggtccaggcgcgcaatattggtgagcccgccctgatagctctgattgcccaaaccagattttgagcgccgctcatattccacgcatgcttttgcccgttcctcacccgcaagggagctacagttgctataggctagctgaaggtcatatgagtttgttcggttgttgcccgttccgtcgaagaacacgccgaccgtcaacgtgatccccttcatcggcacgcgcctcacggtaatggtcttttattgctgcaccggatgtctgtgcagtatgtggggtcatcaataatttcatactggtgacagctggtgccaattgaggtcgaggctgatttatcatctgttgccacaataaaatccctttaatctgaaaggttaaaatagctacatcatagggggttgtaagccggaactttctaaaattttattgtattaatttaacccctatttttcattgggtagcaccttatagaaacgtttggcttcgctgggatactggaaggtgaataccatgtcatcggcatacctcaccatctctgcccgcccgtgaatatgtgaacggctgatttcaccaaaccattcatctattacatgatgcaggtagatattggccagtaccggcgacaggattgaaccttgcggacatccgcgaacattgcgggatgtcactgaccgcaagctggacaagtttgtcctctgtgcacgaaatagccagtggtcgcttactgtcgtcctcttttggaatttcagtgatccgggctgctttcgggtggtacgtccctctgcgtatccgcaggatgagattttgtatattctcatcaaggtgttcaccgtaagcggcttttgtcatgcgatcgatacccacggctttattcccgtcaagccgcagaaattgccctttcagcatgtcactgttcaacaggtgccccaagttattgaacacaagttgtttgttacctgctgacttctcacctatacgctcaagttttgttaaccataataacccgtcgttgctgtgtacggtcattgttgccctcttacgttcgatctgtctgccagcccttcgctccacggtcattactcgcttcattgctactatggctgactccaacttcccgatattcatttctcaggctttgtgtttggcacttgtgcccgaaatactcattccattgagaaatatcagaatctcctgggttccgaactgttctctacaaactcgccgacgcctgcggctccggtgtgtactgctgaatggatatttgccagtgtgaccattcagacgctgctgcctgctagctgaacgatactatcggcacacacgattaaatgtatttcggagctatcacgttcaccttttggtttcggctcgagtgtttcgctgtctacgcttcgtctcctttgttaccgccggaaacgcaagactcgctacgtagtggtctggctaactccctttctacgacgggacttttacccgcaagatcagtacagctttgcccagcgcaccgttcattacattctcctcaggttatttgcaacaataccggaaatcgtggtgtgcccataaactcctccttgtatcttaaaagtggattgcttatgggcacaaggtttcttctggctcagttttttatgaaaccgtattactcaactaattggtgataagaaacggcaatattagctgcttgaccagccagtccagaacgatcatttgcgatgaacaccccgcaaatataatgaccatcaagagagaacttacggtaattagaggaattacgttgacctattgtcaacacatctccattcgttaatgtaaattttgcttcatcaatggccccattcccccatacttccaacgtcttaatcaaattacctttgagattgacgatttcatgctcattcgttgcttggccctgttgatacttgctgccattctcaaatgttatctccagccccccaacacgtttagcgccaccaattcgtactatgtaccctttgaccgatgcaattttattaaaccgttcatttaaaaatttgggtttgaacggttctggcatatccttctctggccttaatgccaaaatacgcgcatcacttgttggcgaaccaaagaatgtagagtagctgatagttctcggataaaacccagtaatattattacctctggattggatatttttaatgatgtccatatattccagaccatgtatttgacaatatccatggacatacatgatattatcagccacgcgattaacatcagagtctgacactacactatcaagttctaacttataaactctattcacgtgatgctctgcatcactaactaactttttgatatatgaccttagattctcgacttcaatatcactcaatccgatttccttgcgacgctcaatgccaacagtccaatacataatctgcatcagggcaagtgtggaatacatcggcaatatgtgaaaatttgtcttattttcatgaaaaatcaagctagcttcttttccaaccatactcctggcaagatgcatgtagtcatcccttgcttcttgggtacctaaattcttctccagagaacggattacctcattcattttttcttttaattcattgatgttacctgagagtatacctttaactgcttttaatatactatcttcaaccagttgttgaacttttcctacaacctcctgccaaatgtctttctctttatctttccaaaaaaaaccaacaatgtaagaaagatatttccctacatgtggtacatacgacaatcccttgacgacggcttgctttagaatagcagatgaatcccactcaaatgcatatacggcatttgaataaacagcataagggatcggtgcacttacatcgttatacttaacaatatcgctcattgtttattccttatatttccacgaagaaatggatagtgttatttttctcttactgttacaaatgccacggatttagtgttgttgaaaatgactactttgctgtaatacaacgggtttgaaggggcaaccaacactttgctctctccaaccttgacatcaactgagttatcctcaaaatattctgacgtaaaagaatgtgaccagtaatatttcgccgtgataacatcggcgagaccttcattggttacaacgatattctttcgggattcaggaataatcggtgttgcaatgtagaacttttcctgacttgaattagggtcgacctttactccaaactgttggcgaattttctccgcagttgatgaaacaaccgagttgatttcagtatcatgtcctaccacatcattatcaactgttatttttctcatatttttcaccttttcattatgtaagccaatctgattgactggcataaaataatctacgccattcttttaattaaccccaataaaaatagatcaaaatacgaattaaactgccttaatgaatagtcatcttgtgtagatcgaaaataataaaaatttaatatctttttatattattatatcgtcacctcacttaaaataatgcagtacaatcacccagtgcatgtcatacttgccgatatatcgcatacggattttcatcacttttaatttgataactgccgcaattgatggatgacacatttgtatcggtctgggaaaaacaattttatctgtatttcattttccagtgtctgatataaccgtaaaatatatatacccaagaaacttcaagatgcagtttttagcacctgaaaatggtcgttaattctagacatcagcgagtccgctatatccggtagcgttgtggtgaaaaatttgaagacgttgtctcgaaattcatgtttatccgcgaaataacggttatttcgaacctgtttaattatgaccttccataatcgttctatcgggtttaaatttggactatagggaggaaggtaatgtaactcaatattgctaacataagcccactccttcacaagatgagctttgttgtaacccgctccatccacaataaggtgaattttttgatgatagtcaggataagactttcttatttcattgaaaaaacagcaaatgttgtagtcgttgatggtctgatattcctggaacaccgtacgaccaatggcattcaggttgagggcgcccaatatattcaggcgagtccggcttcctgttgttttgacggtttttttctcgccttttcgcatccagccataactgagtttggtgccttgagtcgggtgaacagcatcaagaaaaaggatgggttcgtctttcgctgtgactttaagattctcataatattcaataaattgtcgctgtttttctgcgtcgaatttatgagggacgccacaaggttttttataagaaaaaccctgacggtgtagccatttattcatgccgggaatgctaaaggtaatattccagagctgagcaacataggccacgatttcatgggtgtgatggaaaagatgttgagataagtgattgattaaaaaatcagtttgttctcgggaaagcaaactatcagaccctccattatcagatttaagtttaccttgattaaggtaatcactgatatggcggtcaacagtggtctgatggagtcgcaatgcctgggctatcatcacagaactccacccttcagaagccagaaggatagcttttattctgtctcgtacctgaccatcacgagtggtgtcgtgaagacgttcaagtttgattttttgttctgatgtaataaatattttcatagcgaggataatgatctccatttcggataaaatcaagcatcttcaatgagtacgggtatataccctatggatttcaagatggaccgcggcggcaagggagcgaatccccgggagaatagataactatgtgaccggagtgagtgcagccaacaaagaggcaacttgaaagatgacgggtatactaaggaatacgcggtcacggtgtagatggacgaaacggtgactaacgtgctaacgcattttgactccctagagcatctggtgaagctgcactcgacgaatacgttgaagcgcctgaacaaggtgggcaaacagaggacagacgtggtgagctagagagtagaagggcctgacgtatgagcctgagcaaatcaggataagcgcatagcagattttttttcgctgataaaactgaagtaataattaacctgtcattccgcagctatatctgtaatatactgattttaaattgtttgtataaaattcactcacttgttaattcttaattaaaacagcaaattacgaatgcggtgcggaatgtcggattaaccatctttttctcctgttgtaatgaaaaaacgttgccacagattttccaatacacgactgcccatagcaccaaaaagtccggcaattatgagtgtcatataatgactggcaccactatctaaactcaacaagccgcctaatagcccagtaaaacttgaaatgacaatttggttgataacactaacccaattccattttctgtcagctttttgcctgtccatcagatacttcaccactcccccccatgcagcaaaaaatccaataactatccagcttattgattcttcttcatagaggtaatttagtatcatcaaaaactccatctataatcttaagaattcgtataattcacggccatatttgtatatgtaaaacccgacaagtcagtgattaagtattccgcattaaactatagtactgaatttaaatccaggcatgcagtacacatgcattcctcattgctatttttcaccaaaaacaatgggagcattagagatgccaacctattagtgttgattcactcaacttactacacattaatagttaaattatttcactttattgcttttattgacttttttatatttacagggataaataacttgaaacataaggtaaaagtgactcctcaatcacataacaaaataatttcatgttactgatgaaatagaaactagttccgttgctctttatgaatattaatccagcggcagtttacatcgtcatagaattcagaatttatgcggattgcagccagagctaccgcatgagttaatgatttattaaattaatctttcaaaatagatttaacgcacaatatttaatctgacatgacgtgattatagtttaataaattgctcgataattaatcataaaaagtaatctaatcaaaacttttttgttaattaatttctcatattaacacttttgcaactcattcgattgccccgggcttaccgctatataaactccgatctaaataccacactagttaataaaatccctagtatataagaataaatagttgtgtattcaatccgttgattggtatcagcatagtatttactctcaataaaaataccaatgaccttatcatatcatacattgagccgcttaattcgagtacgcattaaattctctcgctcaatatgttgagtaaaaatctttccggcgcgatgctggctttttggtaatagattgtaagtcttgaaattatcagtacaccagaacacaacattgaacgaggcgagcttcttgagaagtttcctgaacgttttctcgttccaaatatatgagcaatggcacgctcgataggcatattcaagttgaaagatttggttgcaggagaaacagcgataacgttggtgatccgcatcccctttactatgctttttaacgaattcagtttgctggcaaaatcgacattttacttcaagcgtctccatttaatttctccaaaaaacggtgattatatacaaccatcaacggattggatacatgaccagaataaattgttatattctcgacattccgcagatatgtctataatattttaatatcgaaatatttgtatgaattttacatgtatgttaattcttaattaaaaaaataaattgtgaattctgtacggaatatcagatattttactcacctcatcaccattaataaaaacttaacaaaaaaatggtttattttgttttttttcttataaactggaatagtgcttctgtttaatctgcacttccctccattgtttattgaaattgaaatattgatatcacagtcgaagctagacagttttttccttaaactatataaaagttgtgcaacattatttttacctatagcattcgctcttcctttccaaacatgttctattatgtgtttggtcggtatgttactttcatctcttctttctaataaatacgtcaacataagaaattccttttcagtaaaggaaacggttttctctccatatgttaatgttctgttttcagcgtttacatacaagaatatcattaaaattctatctccaattattaattgtgaaatgaacaacactttactttatttttttgactttttaaataagtaatcatcgatagatgtttttttttgaaccagcttaaacaaaaaattacttttatgttattttattattatgtattgtaatgctgggatgcttattatttcataattttaattattaaattctatttttggttacggataaattacaaaatatatacaattaagaagcttattcaccacaaggggcctgaaggtctaaataacttttcataattataatacactcactctttttattctctgctattcctgtagggacatgaatttaaaaacgttttcactttctcaagcaattgccacatatactgacagccatgatttcgtgtcaccgtttcatgtaaggattgccacagacgctcaattttattcagccagggtgaataaacaggtaaaaacaacagattaaatttaggatgacaagccagccaatctctgacccgtcggcttttatggatactgtaattatccaaaatcaaagtgagggtttcagcatgacaatactggcgttcaagttcttccaatacattgataaataactgagaattcttatttaacccgtcagcataagtcacttttcccgtttgaacattcaggcaacctgcaaaataatgtttttggttttttcctggtgtcactatacgtttctgttgcccttttaaataccagtcagccccgatttttggattcagctcgatgtcgacttcatcttcataaaaaacgggatgtttttctgaacacgttgacaatgcctcggtaattttcgccattttttcatggtactcgggatcgggtaatttaagcgtcggggctgcccttcgccacacgatacccattttatgtaagtaacgatagaaggtactgatggataattttatgtttaataattcattgattttaattataaaaaactcaagactccagcgagaacgcaggcagcccaattgctggggagaatattgcaataaaaaagacagtaaaggataaagcgggattaaattccagacagcgggtctgcccacaggcaggcttttgagtccttccagaccatataaagtcaaccagtttatccagcgatagacagaagaacgactggcgcaaagggttttggcgaccagagagacagactcgcctcgatgcagcatcaatatggccatgagcctgcgagcataatctttatctcgggtgttctggataatttttttcatctggcgtcgttcattgcggggtataggtgctatgataggcataactcagtccgtttagtggtttgggattatctacaattgatcagattgcaaaaattggactgagttccctccaagtgttctactattttgaaaagttatttaggctttgccccgcaatcaaccatgttatataggggtagtctcagaaagcggaatttaaagcatattaagagcctatctcaataggcgtaattgttgcaggcagtttgaacacggacagcgcggaaaaaccggagcgtacacgtagtacgtgaggattttgagcactgcctaggttcgctctttatggcaaagaagggcaaataaaatagccccattgggataggcagtaagccgatttcatacactgaacggcggattcaactaataagcgtaatttttcagaaaggaggtcagttgctatagtaggcatctttcccgccacaggagaatgcactatggcctatacataactgaccgaaacagaaagatacccgatttccagtttaagagaagcgcttttcctgtgcaaaccaacgccggatgacccgattcaagcaactgagtcatggcgagcatcaccagtgtcttcataaaatcgacgaaggcgcttttccgcaactgattaaagccacagctgcgggcaattttttcaagaaaatgtcactgaagaattgtattaactgaggttttgtggagataactgtcatcggctttattctctgatctcgatattttgtttggcgacaattatcagatcataaataaagccttttttctatctaaaataacaggttgctgctaaaattcctgtttaataatttttaaaaacaatgagataagctgattttagcttgttaaaaacataaaaagagaaaatgatttaaatcaaatcatagcaaaaatatgctattcaacgggttaaaacaagtttaaactgacgtatttacagggctcctatttgtattctgttaaatcagttatctggggattttatcatgccgtttttttatcatcgattatttaactgatttataaaagctttactctccgattgaaaacgttattaaagcacttcattttgaaaaatagattaacggattaatggactcatattatcatttatctttctccccgaaaacataaccaaaccaatttttatttctccgcttccattaatggctttataattggcagattttaaattattattaaaagtcattttttaaccgatgattttaattagcataaaactttaaccgttgtttttaccacttataacacttgctttttcactaagtttaatcattatgaaatatcatactttacgtttacctaacgtaggttaccccggctttttatctttattaacactattttatagataattttaagcagtttttatagaccaccaccatttgttttttacatgaattagccaataaataatctaatgatataaagatacccctttattttttcggataatcacctctttttcagggcttaaatccggccaaattaaccgttttatcccttttttattacattgttttttacagtttgcttcacaaaataacagtgagaaaatactttcatatcatcctgttaggataataacattttacgtactagtttgttttcaactctctattaatagacttatacccgtcatctttcaagttgcctctttgttggctgcactcgttcaccccggtcacatagttatctatgctcccggggattcactcccttgccgtcgcgatgcatcttgaaatccatagggtatagattaaatacaatcaaccattattatgaatgaaagtttatttataaaaaatcaatcacttaaacaaaaacccccgacattttcgtttttaaatagccataacaggttagtaaaatacaaaataaccgaagaataacattgccgataaatgcattaaacatggtagtcaataggccgtttttagtcccccttcaccttttaaaaacctcgcattaatggagcacctgtttttttaactcttagctgattaatcaccgataaaaatgatcgtgtgatcaccaaaaaattaatatgcaggtaaaaagaaatggttaaccatgttaatagagatgataaacctataaagcaactcccgttacaaggtttttcatcttttcaattaaaaattcatttagaaaatagtttttattgagtagtttactgcctatctcaatagggctattttatttgccattttgaacctgggcagtgctcaaactgcctgcaacaattacgtctattgagataggctcttaatgtaaatataatagttttttcatctcctaacccggtttaaaaccagaaagggtaaaaggtatgttaatggtattaaaatcaacgcccatttctttaataaattttaatcccgttaatcccgttaaatgttttgatataacatcgtattattaggttaacactgttattttatcactttggttaatcaatttaaaacccgtttcctccgatgttttctcttttaatatcaatataacgtcaagttttttacccgctttaaaaaatccttaatcacttctttttacctttgatgatttaagtttttacctgtttactcatagtacacttgcctctttatcacgttcaggataaagcatatttacttctacttgaatgagagaaagtttctgtaaccctttgctttcagataacacgaaaaacgataaaccacatagtctagcctgagtaaatcaggatctgcgaagtaagtaaaaagcgttctttaggttaattggcgcagtgtataaatctactttctgggttggtcgtgccgattttcacctttctctaccgctcttttatgactgatttcaagttttttccggccataactcagtctttattgaccgctttcgccaatatcttaaagaaacaaagataggtttcccggctatgccgacttgagttacgtcaacataaaataaaaaaccttcgtagtgattgtaatgataactattctcacattaagatgatgccgtgattattgacttttgatgttatagggtatgtctgaccgcattgttgtttccgctgagctaacgtttgaatcgctttacggcgcgcatcatggctggctgaaaaactggctcacacgcaaattgcaatcgtcttttgacgccgatgacgtagcgcaggataccttcctgcgtgtgatggccggcgactcgctacaagccattcgcgaccaaaaatccttcctctgtacgatcgccaaaagggtaatgattgatctgtttcgccgcaacgcgctggaaaaagcctatctggaactgctggcgcaacggcccgaggcgtttatgccctcaccggaaatccgtcagtgtcaacttgaaacactccagcaaatcgaccagatgatcgatggcctgagcaacaaaacgcgccaagcgtttttactgtgccagcttgaaaatctgacctacagcgacattgcttcacgcctcaatgtgtctgtcagttccgtaaaaaaatatatggccaaagccaccgagcactgcctgctgtttcgcctggaacatggactctgatatgaacaccatgttaacccactctcgccgccaggcattaaaatcagcatcacactggtatgcaatactgagtagcgatcaggtcagtccgctgcaaactgaaaaatggcagcgctggtacgaacagcatcaggatcatcagtgggcgtggcagcaagtggaaaatctgcgcaaccagatgctggtcgtgcccggcaatgtggcaagccatgcacttcaggaaactcacctgtcacgacgcagagtgatgaaaagcatactgttgctgctaggagctggcggtggctggcaactgtggtgttcggaagtgggtgagggcctgcgggccgattatcatacaactaagggggatattcagcatcatcgactgagcgatggcacactgcttacactcaataccgacagtgccgtcgatgtccattttactcctcaacaacgtctggtacatctccggtacggcgaaattgccatcactaccgggcatgataccgaagcaaaactattgcgtgtacaaacccgtcatgcgcaactaaccgcgctaggtaccaaatttacggttcgtcaggaagccaacaccacactacttagcgtgcagcaacatgccgtagaggtgatactgaccagcgctgaccgcaaatgtattgtgcgtcaaggtgaaagcctaagattcagcgccaccgattttggtgaactgaccgcagcaaccgacgaagacaacgtatggacgcaaggcatactatgcttcagcgatcagcctctgagtgaagtaatagcaaccctcgctcgctatcgaagcggtatattacgctgcgacccggccgtttcctcattacggttaagcggtactttcccgataaaaaataccgatacgatattaaccgtcatagagaaaacacttcccgttaagattcagtatattacccgttattgggtgaatgttctgcccgcagaaaaatcgttaacgtaaaaaattatcattttcaattgtcctttttgtttcctcgttcgacttcataagtgaatacagcaacaaaatgattatggagacgttatgatgcctttacgtgcacagccactgcgcgcgcttcacaaagcaacaccgctggtaatggcgattcgtttgagcctgttaccggtggcttgcctaacctcagggataacgtatgctgcggtagagccagctagcacacactatgacattaatgcgggcgaattggataaagttcttaatcagtactccacccacgccggtattaccctttcagtagatgccagcttaacccgcggcaaacagagtcgcggtctacacggcaattactccatcaccgatggactgaacaccttgctgatcggcactgatttgcaggtgaagacattgggtgataacacgttcacactcaaacccgcccctgttgcgcagaaagatgtgctgaccgtggtaggcgactggctaggtagtgcgcgtgaagctgacgtgtttgaacatgcaggcgcacgtgatgttatccgccgggaagattttgccaaaacaggcgcaaccactatgcgtgaagtgctgaaccgcattcccggcgtcaacgcaccagaaaacaatggtaccggcagccacgatctggcgatgaactttggcatccgtggcctgaaccctcgtctcgccagccgttctacggttttgatggacggcgttccggtacccttcgcgccttatggacagccacagctatcgttagcgccagtatctctcggcaacatggacgcagtagatgtggtacgcggcggcggcgctgtgcgctacgggccacaaagcgtcggtggtgtggtgaatttcgtgacccgcgctatcccgcaggattttggtattgacgcaagtgtggaaggacaacttagccccacatcttcacaaaataatccaaaagaaacccataatttcatgattggcggtacagcagataacggtttcggcacggcgcttctctactccggcacacgcggcagcgactggcgcgaacatagcgccacacacattgacgatgtgatgctcaaaagccgctatgctcccaatgaagtgcacaccttcaatagtctactgcaatattacgatggcagtgcggatatgcccgggggcctttcacgcgccgattacgatgccaatcgctggcaatccactcgcccatatgaccgcttctggggccgccgtcagctcgcaagtctcagctatcagtatcaacccgaccagcagcacaaattcaatattcagggcttatatactcataccttgcgcagcggttatcttgagcagggcaagcgcattactctttccccacgagaatattgggtgcgcagcatcgaaccacgctatagccagctcttcaatttagggccttcggcccacgaagtagggatcggctaccgttatgtgaatgaatccagtcacgaaatgcgttactacaccgccaccagcagcggcgaattacccagcacgtcaagcccttatgaccgtaatacccgctccggcaccgaggcacatgcttggtatattgatgaccgcattgatatcggcaactggaccatcacgccggggatacgattcgaacatatcaaatccttccaaaacaacaatgtaaaaggtacccgccaagaagtcagttatgatgcgccgttgcccgcactcaatgtgctttatcaccttactgatagctggaatctttacgccaatacggaaggctcgttcggtaccgtacagtacagccaaattggcaaagcggtgaaaagcggcaatgtagaacctgaaaaggcgcgaacctgggaagtcggaactcgctacgacgacggcgcattggcagcggaaatggggctgttcctgattaatttcaacaatcaatacgactccaaccagactaatgatacggttacggcacgtggaaaaacccgacacactgggctggaaactcaggcacgttacgatctttccgaacttactcccaaactgaataacgtttcggtttacgccagctacatatatgtcaacgcggaaattcgtgaagagggcaacacctacgggaatcaagtgccgttctcaccgaaacataaaggggcatttggcatagattacaaaccgggtaactggaccttcaacctcaatagcgcatcccaatccagccaatttgcggataacgcgaataccgtgcaggaaagcgccaatggcagcaccggccgcattccgggctttatgctgtgggatacgcgcgtggcgtatgacttcggtccacaaatggctaatctgagtgtggcctttggggtgaaaaacatctttgaccacgagtattacacccgttcctatgatgataataacaaaggcatctacgccgggcagccacgtacgttctatatgcagagttcgctaaagttctgatgttacattaatccgttcgccgggccattgcccggctttgctatttctggagttaagttatgtctgcactgattcgcgttacgtttatcgctttgctcttcttcaccagcctgccccatgccattgcggtcacggtacaggatgagcagggcagttttaccctcaataccgttccccagcgcgtagtcgtgctggaattgtcatttgccgatgcattggccgccatcaatatcagtccggtaggtattgccgatgataacgatccgcagcgcattctcaccgatgttcgccagcgtattaagccctggcaatcaaccggcactcgcgcccaaccaagccttgaagccatcagcgcgctgaaacctgatctcatcattgcagacagtcaacgccacgcggggatttatcgggcactcaagggcatcgctcctgtcctgctgctaaaatcccgcaacgaaacctacgaagagaacctgcaatctgccgcgatcatcggcaaagtcatggggaaagagagtgagatgcagaaacggctggcagagcaccgtgaacgcatgaaaggctatgccagccagttgccacaaggcgtcagtgtggtttttggcacctcgcgcgaacagcaatttaacctgcactccagcgatacctataccggcagcgtcttaacagcattagggctaaaagttcccgcatcagttaatcatgcggcaatggtttctctcaacctggaacagttactggcactcaatcctgactggcttatcgtggcccactatcgtcaggaaagcatcgtgaaacgctggcagcaggatactctgtggcagatgatgacagcacagcacaagcatcagatagcagcggtagacagcaacacctgggctcgtatgcgcgggatatttgccgctgaacgcattggcagcgatgcggtaaaaatcttccaccatcaaccggttaatgaaacaccatgagacgccgccatcatccggtctggctttggggattgccgttggttgcactgcttagtgcattctggctaagcctgttttgctattccgctattcccattcccgccatcagcgcactcaaggcactggtgccaggtcatacaccgacattgcctgaagcactggttatcaatctgcggctaccacgcagtctggttgctattctgcttggcgcggctctggcattggccggtgcactcctccagacgctcactcataatccgctggcctccccctccttactgggcattaacagtggtgcagcactggctatggcgttggtcagcgctttcagcccggcaccgctagccggatattccatttctttggtggcggcctgtggcggtggaattagctggatgatggtgatggccgcaagcggtagctggcaacaaaaatacgatcgcaaccaactaattctggcaggcattgccttatctgccttatgtatggcactaacacgtattacgctactgcttgccgaagatcatgcttacggcattttttactggctggcggggggagtctcccatgtccgctggcctgaattctggcaactattccctttcgtggtggtcactgtacctgtagttttgttgctggcgaaatcacttaatctgctcaacgctggcgatgtcagtgcccatacgcttggcgtgaacctgacgcgactgcgcatcttcgtcagtctggcagtactgattctggtaggggcctgcgtcagtgtagcgggaccaatcgtgtttattggtctgctaatgccccatctggcgcggttctgggttggctacgatctgcgccgcacactgccaatgtgcatgttgctgggagcggtatttatgctacttgcggatttactggcccgtgcgctggcctggcccggagaactcccggcaggtgcggtactggcgctgattggcgctccttgctttgtctggctagcaaggaagcgaacatgaatcgtcaggttatcttacttttagtcgtgttgctggcagttacgctggtgctagcgctacgcatgggcacgcaaccacttccctgggacgctttaataagcggctggcaacccggtgacaaacaccactttgtgctaacgcagtaccgcttgccgcgtattttactcgccatcgctgtaggcgctgcgctggcgctttccggcgtcttggtccaagggattgttcgtaatcctttagcctcccccgatgtactgggggtcaatcatgcagcaagcctggcgtcggtaagtgcgctgatccttttcccttctctgtcagtgcagtggcttccgctactcgcttttggcggtggaatggctgcgctaatcctgctacgagcgatcgccggcccctcttctccactgcgccttgcattagttggcgtggcactttcagctacctggacaagcatcaccgattacctaatgctctcacgcccacaagatatcaacaacgcgcttttgtggctgacaggcagtctgtgggggcgcgactggcagtttgtagctatagccctaccggtattgatgatactgataccactcagcctacgcttttgtcgcgatttagatttgctggcactcggtgatgacagcgccagcacactgggcgtttcgctcccacacgtacaatcctggggattaatgttggcagtagcgctcgccgcaacaggcgtcgccgtttgtggtccgattggctttatcagcctcgtagtaccccatctcgttcgcagacttgtgggaggacggcatcgctggcttatacccgcatccatgcttatgggtgcacaagttctgctgctagccgatttgctggcaaggaccatagcgccaccgatagagctgcctgctggcgtgctgaccgccatcattggtgccccttatttcttctggcttttagtgaggacacgttaaatgcaactggctacggaaaagttatctgcaggctatggggagaaacgcattctgaatgacctgtcgctcaccctcccgaccggaaaaatcacggcgctgctcggccccaatggctgcggaaaatcaacattactgaaatgcttttcgcggctattaacgccattatccggaaagataacaatagatagtgaacctttaacgcacttttcctcacgcaagctcgccaaacatctggcgcttttaccacaacatcctctcacaccagaggggatcgccgtccatgaactggttgcatacggacgtagcccttggcttacattttgggggcgtttagcacctcatgatcgtcatcttatacaacaagcaatggaaaaaacgcagattagccatcttgccgataaatgcgttaccgatctttcaggcgggcagcgccaacgcgcttttctggcaatggttctggcccaagatacgccggtggtactgctcgacgaacccactacatatcttgacatcaaccatcaggtggaattgatgaagctactgcgtgaactgaacaacgaaggaaaaacggtcgtgaccgtacttcatgacctcaatcaggctagccggtactgtgaccacctggtgctgctttcccaagggcaggttgtcgcccaaggctcacccgaggaagttatgacaccgaaattattacagcgggtattcagcatcgaagcggaaattcaccccgaacccgtttcaggtaaaccaatgtgtgtagtgtgttaagcaggaatctaatgtaacgtgttggttctcttttccagtgtagcttaatatgttcggctttttgttaaaggttgtttcgggattaattgtttataccttccaacccaaaaagccgagcttgaatttatgtgatgctaataattgctgttcttaggtaaagttaacgttatttaggctttgcggtctcgatttgacgaacattaggcttcattttggggctcatttttatcgaagtgaagatgctctcgcatccgcaacatcagggaataattttattaaattatccatttaatttgctgttctcctctggctatttcttcatcacagcaaatatacgacacttaacctatcttgtagctagcattcccgaatagtgcttcgtgataaggaagatgaataaagtatggggggctttgttaccagactgtgacgtatgtcataacgcttaagccaaacgcctacaaaacccatattgattgctgtactcttatcattcaaggcatttattagataattcaaagagctatgatggccgcaatttccctttcgaatgatattctccgtacctggcaacgtatagaattcttccaaccttatacacttgaaaaaaaagataaaagcttactaattccgcttaaaacactctatcagctgggagataaggcactaccctggctttcgtcagaactccgtcaacaacatgatattcccgatcaaaaagtcttatacaacttgtacgtcggtttgtttgataaagctatcgctaacgcgatcagccaagcggtgtttggtccagatgaagggtattatgcagaagaatttgagcaacggctggataaagaaggaacaacctgctttgccaaaattccattaggcacggaaggaaaccctgctctggataaattttcagtgagttctcttccttgggctttagggcacctgcgtgatgaacgttttgaacagcttaatacgaaggtattttcagccagttgcgagcatcttaaaaataccctcggcaactttagcgtctctctgaagccaatacgagaaaatggccccggtattttaaaagcaaatgatattttaacactgttgacgacacatctggtgagttgggcagattttgaaccccaatggcaatatgctttacaaatagactggatggagggaaatggcgactgtacagaagcatcacaagaaaatagcgatgaaattgaagaagaagtcagctctaatgataaaacctttgcacttcctattttaaatagttttttctttgaggacattgaatacgctattacggccctaaaacgaggagatagatgcaaagctctcagagcatatctttctcatcatagtgtccccaggaatccagacctttattcacaagacgggcttgcctccatcatcagtaaactccatccagcgaagatgcctcatggacgctggccttccgatcccaaacatgccatgtcgctaatgcagcaatttgctattaatacggcgatagaagagctcgctgatggtgggctgctttccgtcaacggccctccgggaactggaaaaacaacgcttctgcgcgatctaatagcacataacattgttgaacgagcgaagatacttacgcgttatcaaaaagttgatgacacgctggacaattccggttttattgtgaatgcgctcactggtttcgaaatggtcattgcgtcatccaacaacgccgcagcagaaaacatatcaaaagaattgccgcaaaagaaatcattggctgaagaattccaatcgcttgactatttagcaccaaccgcaaaccagatagctgccgagaaccgcccgaagcgcgaacataaaaaaagtaaaaatagtcagggaaaagttagaacctatcacctctatcgtccattgaaggaagagaaacaatgctgggggatcatttccgctgctttgggcaacaaaccaaaccggactaaattttctgatcgcttattttttgatgaacattttttacgcgacaccccaactgaagcctctcgtcccgctgaagagaactttctcagtctttggcgctggaggcactatcacaaccccatctctttcgccaccgctaaaaaacgtttcctcgtatgtctggaaaaaacaaaaaaacttcaacagcaattagaaatgcttgtgtatctgatagaaaaacagcataacgattcactcgacacgttatcactaaagttgaagcaaacagaagaactgtacgcaacacagcttaacaggctggaacaggtggaaacaaaacaggatgtattagaaaaacagctccagcatgcagaacagcaacaaaaaattatcgaaagtgatgcaccaggatggctaatgcgtctgatgaatcgcaagcgagtgcatgcatataaagaaacgttgcggtgtgcacaacacgaagtattaagactgatggggttgcaaaccgaacaagcccagcgcattgcggaacaacgcaagtcagttaacggcatagctgaaaaaaagcgaatcttacaacaggatatcgaaaaaattatccaacagcgggtgaatgaccatcgttctctacaaactttgaagcagcagttttccgatatcacattgccagatatcaaccaacctatcactgatgcaacattacaacgaacggccctttggcagaacgcacagataaatcgtcaacgttccgcattatttatcacagcgatggaacttcatcaggcttggctttatgaagcactaggagtacctcgttttagagacttcataatatttaatctcgcggcttttttagcacaacctcattccaaaatcacgcctatacgctggtggcaaacgctgtttatgtttgtgcccgtattatccacaactttcgcatctatagggcgcatgttccacggagtggaaagcgaagaacttggctggttaatgatcgatgaagccggccaagcacctccacaacaagctgtcgggggactctggcgtgcaaaacgggtactggttgttggagaccctttgcagattgaaccggtatttacgacccctccgccgttggttgaacgtctttgcctagatgctctgaatgaaaaggctaaagactggaatccgggattactttcagtgcagcaggttgctgatcgcgtcaatcattggggatgtgaattagaagtcatgaacaacctgatctggctaggtattccattgtgggtacaccgtcgttgtattgaaccaatgttcagtttggctaataagatggcctacaatggccgcatgattcatgggcttgatgctgacaagattcgctgccaacctgtgaacaacattctggaaaaccattggctggcatcggttggagggacaggtgaaaaacaatatcgtgacagccacggtaaagatttgctcaagttattggaccaactgcttgttgcaaatgtttctcttcattcgatttatgttattacaccgttcaaagcagttaagtcagcactgtgtgaattattaggaaagcgtgatctggctacctggcggcaatctatgccattgatgacacgaaaagaactcaacgtatggcaaaaaaattgtattggtacagtgcatacttttcagggcaaagaaaacgatattgtcatttttgtcctaggctgcgacgaaaataatgatggtggcgcaaaatgggctgccagcaagcctaatctgttaaacgttgcgctcacccgagcaaaaaaacacattttcataattggcgatccagcggtatggcatggtttgccttggtttcgtgatgtagccaaggagttgccagtggggacatatcatcatttacaataactccaaggtggaatgatcaaaaaacgaataacgaaatgagtaaacagtccttataccgttaggtaatactgcctcacaaattgcattattcgtaacatgaacctgaaggtgattagggttatctaagctaatgaatggtgagctaattgtataaacaaggagtgataatgaatcgagctcaggcccaacaactactacaaactgcactagccaatccaaatgctgagtttcacgatggtcagtgggaagctattgatgctttagttaaccaacggcagaaactgttggtagtacagcgtactggctggggtaaaagctcagtttactttatcagcaccaaaattttccgtgatcgcggcatggggccgacgattattgtttctcctttgctggctctgatgcgtaaccagattgagtccgcccagcgcctgcgcatcatagccgagactatgaattccaccaatacagcggactggcagacggtgacacaaaggattataaataatcaaatagattgcctgctgatttctcctgagcggctcgccaatgataacttcattgaaaccgtgcttcatcctatcgctgaccgtattgctctgatggtgatcgacgaagcccactgcatctccgactggggccatgacttccgcccagactatcggcgtatagtcaatattttgcgccagttgccacctaatacaccggtattaggcacaacggccactgccaataaccgcgtggtggctgatatccaaacacaactgggtaatatccagatccagcgtggtccactgatccgtgaaagcctctcgctacaaactatggtgctgcctgatcaatcctctcgcctagcttggttggcgcaagtgattcccacattgcatggtactggcattgtgtacaccttaacagtgcgtgatgccgaacaggtagcaaattggttgaacgtcaatggcataaatgccagagcctaccatagcagtattgaggctgatggttttgaaaacagtaacgattaccgacaatatcttgaagagttattgctaaccaatcaacttaaggtgctggtggcaactactgcattgggtatggggtacgacaagccggacttaagctttgtgattcactatcaagcaccaggttctatcgtggcttactaccagcaggttggccgcgcagggcgtggtatcgacaacgctattggtgtgttgatatctggtatagaagatcaagatattcataagtttttcaggaattcggcattcccatcagaaactcaggtaaacgaaattttgcaagtactagataatagtgatggtttatcgcttcgtagcattgaagagcaaaccaacctacgctatggccagattgaaaaggtattaaaactgctaagtacagagaacaccgctcctgtgattaaagtcggaaacttatggcgcagaatacccgtgccttatgctatggatcgcacccgtatcgctcacctcaccaaccagcgtaagcaagagtgggctgaagtacaggcttatctgtcagataccagatgtaagatgactttcttgcgccgtgtactggatgatcacgaccctacaccttgtggcaaatgctcgtcatgcatcggccagcctgttgttaatcaggctattaatccagtgttagttcatcaggcaggcacttttcttaaacatgccgaaatgattatccagccaagaaaacaggtagcaacttctaatcgagcctttcctacatattgttttccacggcagttaggttgcttagttgctcagccaggtagggttctctctcgatggggagatgctggttggggaaagactgttattgaaaataaacattcgggttatttttctgatgaactagttgatgctatggctgaaatgatctcacagcgttggcagcctaatcctagtccaacttgggtgtgttgtgttccttccttaagacacccgaatttagtccctgcatttgcatgtcgtttagcacaaagattgaacctgacatttgttgatgcggtagcaaaagttcaagataaccagccccaaaaggaacaacaaaatagttttcatcaatgccacaaccttgacggtgtttttgagataacacaaattatacaaaatcaaccagtactccttatcgacgacatcgttgactctggttggactcttaccgttattgcagctttgttacagcaagcgggtagtggtattgtatatcccgcagcacttgcctcttcttcggtgaaagactcatgaatttatcgccaacagcacaagccacattattgctcactagttatttttccaaggcgagcagtgatgatgtcaaacccctcactaatgctgaatggggtaggtttgcgttatggctgaaagaaaaatccacaacaccagcagatttgttggtatctgagcctaaatcaatattaagcacctggcaggattcccgcatcagcacagaacgcattatacagttactgaatcgtggccacagcctggcgttagccgttgaaaaatggcatcgagcaggtctttgggtagttacccgctctgatcctgaatatcccaagcgcttaaaacagcaattgaaaaccgactctccgcctgtgctatttggttgcggtaataaagctttactgaatgttggtggtttagcggttattggctcacgtgaggccaacaatgcggacttgtcttataccgagctggtcggttcaagagcggcatcagagggcattgcgattgtatccggtggtgcccgtggtgtggatgagacggctatggtgggagcaatgcttggtggcggcaacgttattggggtactggcagatagcctattgaaagccgctaccagcgcaaaatggcgcaagggtttgatgaatggcagtgtaatgctgatttcgcccttttaccccgaggctggcttcagcactggaaacgctatggcccgaaacaaatatatctattgcttggcagacagctcgctggtaattcactcggggaaaaaaggcggcacactaagcggggcagaagaaaacctgaaaaagtgttgggtgccattatgggtaaaaccaacgaatgacagtagcgcggcaaatactgatttagttgcgaagggagggcattggtgtgaggcagatgttcacaaccttaaggtttctgatttgttctccgtagaaaactctactgcttcgcagaaagaagctgaacaggttgatctatttttcatgccagcacagtcagaattatttgcgaaacctgcatcggaatttgatctagaggtagcggaaaatcgaataattgttgctcactcaatcgaacaagatgaaatccagggttcaatcgatcacgaagcagaagcagaagcagcagcagcagcagcagaagcagaagcagaagcagaagcagaagcagaagcagaagcagaagcagaagcagaagcagaagcagaaaaaactgtaatgcaggctgtggatttttatcaattgtttattactgagctccatcgattgacagtaagccctattacacttgatacccttatcgagaacactggtctgcataaatctcaattgaaggaatggttaaaacgagctattgatgagggacaagtgaaaaaactcggtcgtcctgttcgttatcaaatagaaaagaaaaatcaaaaagttgtttaaatgattgttgttgtgactataacagaaaaaaccaatgttcaagaggtaacggcggtttacttgctgaatagattacagttggatggaatctgctatgagcatgtatgaacggttagataaggaatatgattcacgctaagcttaagggtaggttcagaaacgctgacctgataacttcactatatgtcaaatagctaaaattgcgatcctctggttattaaccagtacaaaccgagctttgacttagtgctttatagctagcggagaaagaggcgttgcgcctggcactgtattagtgtgcagctaaattgctgtgcacctttgccaatatcaaataatacttgaggttattaaggggctaataattcagccccagcctgacattttcttgtttttctacctcctttttttactgagattgatgccattacagatcattatcttaatactatcgtgttgctccctagctttccctacccgcaaaccgatatttcagataccaccattttgaacaactgggtttgatgagaagagacaaaccttatacatcagtaagtttgtattctttttcacgagactttgccgcacaagcttccatgtctgttaaatgcataattacggagttaagtgaccagccagcgctgataaaaaattgcgcccttgaccactcgtctgaatacctgcgtgaagccctctcagtgtggttagccgccggtgtagaaattaaatattcagcgcaggacagagatattttaacagccatcggattccggcctcacatggcttcgctggcagataatcaggaaaaatatacacccgtgcagaacctgatttatgcactccgtaaggctgaactggtcaggcaggagcctgtgtaaaatccccgaaaatcccgctatttttcctaaaaaaccatgcatgcataaggtgcatggctttacatgcgttttccttccttgcaatcccctgcccgcgccagtcccagcacagcctgagcacatccatgcaacaaaaccaccccagcgcgtcgtaatggcgctgttgtgtttcgtatatgctgacatgtgtgtcgtgtagtgatgatgcgtatgcggagcgcccgtctgagatgcgttgctgcaagatgagaaacaccgcccaatcgcggtgcttaacgacttatttagagttaccggggctatatacccgtgctcattgaaactgcttgattttcgcccaaatgaggttcatggtatcagtcatgaaaatattcattaccgatgaacaaaaagctgaacttgaacacctccatcacacctgccgggataagagagagtgtgatcgcatcaaagcggtcctgctggcctctgagggctagagttcagtgatgatcgctcaggccctgcgtcttcatgaaacgaccattaatcgtcatatcagtgattaccttaatcaccgcaaaatcaagcccgaaaatggcggctctcagagccatctcagcgaaacacagactcaggaacttatcgcttatctgaccgcgaatcttctgcccaccacacaagcggttatccgccttgtcaaagaaacatgggatatcagttacactgttcccggcatgaataaatggctgcaccataatggatttagttataaaagaccgaccggcgtgccgcacaagttcaacgcggagcagcaacgggcctttatggaaacctacgggaaactcaagcaggaagccggagaccatgaacccatcctgttcattgatggcgtccatcccacgcaggggaccaaactcgcttatggctggatgcgcaaagggcagaaaaccgcagtgaaaaccacaggaagccgtacccgtctgaacctgatgggggccctgaatctggctgatatcagcaaaacggtagtacgtgagtatgaccgtatcgacagttatcacatcgccgagttcttcattgccatccgtgagacttatccggtcagtcagaaggttcatattatccttgacggagccggttaccaccgaagcagactggtgaaagactgggcttatgtgatgaatattgctcttcattacttgccgccatacagcccgaatctgaacccgatagaaaggctgtggaaggtgatgaatgaacaggtcaggaataccccttatttcgcctcgacggtcttgttcagacaggcaatacatcgtttttttacggaaatattaccggaacttgccaggaacctgtcgggccgtattaatgacaacttccaggttctgaatcctgcatcttcaagttaagcgggtatatattagtgagcaacaaaacatctgcacggtgactacctattgttgcttcgagttgagcattcaatattttaacttttctgcgaggtatatctacttctcttcccaaaaccgataatttaacttctggtatatctaaaatttcctgttcagaaaaatactcttggaaaaatcgatgaagcattgtcatataacatgattttttctcagatgttgcatgcgcgaaatgatgctctttgattttaccttgcttagcgatcatctgatcgtcacagccggggcaaacacaattacactttcgcccattcttagcatcgtccacatgaagtagccgctttgtttcattacttattgcatactcaaacatggccataaaatgaaactccgttaatcacctcatttgcaatttttagcataaccccaaatcaatccccttgcccgatggtagttaacccatataaacatagaatccataacggatgaatcctatataggtaatcctaggctctctttacatgcattcactaagtcgacgttataaaaattgcagcttcatctccttactttaaaaatatgtaatctccgataactctgctcagctcacaactgtaaatatatataggttttactattcataaaacaaaaaaagtgagatactattaaaatagtccagataaaattatttcaacatactaataaataagaggttttaaaaaaatgggcgaattaattggaattcaggcagatttagcccggttagtaagattggttattaacgagcagtacgatgatgttaggctatatgtagcacggctagtacgtaagtatcgagagaacacgccggagctatcagcacagcttgacttgtatttacgtagtaagcccttcaagaaaactcaaagcttacgtaaggcaactacaccacctaatataatttcagaagccttaccagtagatgaagattcaagactaacgctattaaaaacatcaccaacgacagatgcgataccaaagccattattaaatacagggattgaagatgcgttagaccagctaattcttgaacgtaaaaacattaataaactagaaaaaatcggattacaaccgacccgttcagctatctttgttggtcctcccggggtaggtaaaacattaacggcaagctggctagcccaaaaattaggcgtgcctttctatgtacttgacctaacagcagtaatgagtagttatttaggcaaaagtggtaataaccttagagcagccttagattttgccaaaagaggtccatgtgttttattactagatgaaatcgattcaatagctaaaaaaagaagtgacgattcggatgttggcgaacttaaacgtttagttacagtgattcttcaagaagtcgatcaatggccttcgtctagcgtgttacttgctgcgacaaactatgaagagcttatcgatcccgcattgtggagaagatttgaccttgtacttcattttgaaaaacctgatagcgaaacaatcaaagaagctatacaacgctttctaggttcagattatgccatttttgctcgatggatcgatattcttgtaatcctgtttaaaaatgagtctttcagcaatattgaacgttcaattaacaaatttcgtcgttcaatagctttaggtatcgcatctgatgaggtactaattgaagatttcattaaagatagcttatcaaagcttgataaaacagaaaaaagaaatgtcgctattaatttaagtaaaaactctaaactatctcagcatgcaatatcagatttaacaggtgttagtagagacaccattagaaaatacagtgctgcttaacgggctttagtaaggaaattatatggctaatactaattttttgatcggtcgtggcgaactattaacacatgatatcccatcgcctaaaagaagaatggataaatctgaggtttatacactaacagaagcaaaaaaacgtttaacacctcaaatacaaacaactaacgatatatttaaaaagctaccagcacactcctgcccgcatgattatgcagtagccaaattaacaatgaaccctagctatattgcaaggtcttatttccctacggctatgttgagaaatacagatttaaaatctgtgggtagcaaaactgtaaaaattgtacctgaaaaatggaaaagaaaaatagatgttattgagcacccaactactcagctatttgtagccggaaaacgttcagcatttagaaatttatctgagtggatcagtgaattagaaaataactctgctgaatcaattgatttcgccagaatagaagcgtttgaagcatatctaccggaagaacgttttattattcctgaaaatatacaagaaacacatttcgaagtaggaattcatcttcttcaaaatgatgatgaggattttgtccagcgtaaatttatcgattatgcaaagtcattggatataaccgtatactctgatctaacctttacggccggctctttatggtttttacccgtgcaaggtaatatatccgctataaaaaaactagctcagtttaccttcgttagggtaataaggcctgttcctaaattaagaggtttaaggcctttaagaagaacatccggtaccgcaataccgtgtacactccccgaagaagccccgctatcaaatgatataagagttgcaatacttgatggtgggttgcctgataagcatccaataaaaccgtggttaaaatcatatcgggtgttagacgagcatgcgaatgacaatcccgatgctttagaacatggtttaggcgtttcgtctgcatttttatttggaccgataaaaagcaatgttaagccccctatcccgtacgcgtatattgataatttaagagttctagataataaagcatatgaagaagacccgttagagttataccgaactttaggtttaatcgaagaggttttactctctaggcaatatcaattcttaaatttaagtttaggccctgatttaccgattgaagatactgaggttcacgcttggacatccgttattgacgatcttctaagtgatggcgaaactttaatgaccgtcgctgttggaaacaatggagatatggataaagaatcaggaaatgccagaattcaaatccccgctgattgtgtaaacgctttagcaattggtgcatctgattcaactaatgatgataactggcaaaaagcttcgtatagtgcaattggaccgggaagaagtcccggtgtaatgaaacctgatattgtagcttttgggggtgaaacatctgaatattttcatgttctcacggaaggctctaagcctaatattactcctgagcgtggcactagctttgctgctccatatgcactaagaaatgctgtaggcataagagctattttaggtaacaatctcaacttattagcaattaaagcactattgattcactcatcaaaaaataaagatcatccaagcattgaagttgggtgggggaaaatacctgaagatttaaatgatattattgttagccctaatggtgtagcacgcatcgtatatcaaggggaattaaaacccggtaaatatttaagagcccctgttccgttaccaatctcaggcttaacaggaaaaataaatttaaccgctactttctgttacgcaacggctacagatccacaagactcagcatcatatacaaaagccgggttagaagtatcttttaggccgaatgactctagaattaaagacggtaaaaagaacgctgaaaccgcaggttttttcgaacttaaaaaatttgccactgaaagcgagcaacgttctgatatgggaaaatgggaaaccgtccttcatgcatctaaaaatatgctaggttccactctaaaaagtccagtattcgacatacattataatgctagagagtccgggggaagtgttccgggaaataaagcagacaaaattcaatatgcactaatcattactgtaaaggccgcaaaacatcaagatttatataatgacatattacgagcttataataaaattttagtgcctatacagcctcaaacgtctataccgattcgttcgtaacgaatctcattaatatagcctcgtcacaaccatacgaggctattagataatttttagcatggttcaaaagtcacactatctactcaggcagatttacctataagcagcgacattttgaggcggtacgggttgctggtggcaaggaaaaccataaagtaaatccagttctaaagtttcatccgatgcggttaagcagcctaagataaagctttcagctattgccatgcgtttacggacttcactttcatttaacttatatttacggcctatagaacgtttcgacatgcctttagcatagtgacattcgataaaatcgcattcttgttccatctggacgttacgcaatttcgcaatacacccatcaatgatcagtccatcctcgtcacagcatgaaagcttagtaatgctcgttcggctcaccaagcctttaaatccagcggtaacagatgaccagccaaggccagagcgcccatgaacaacccaaccaccccaatgtaaaagtatcttctgaatatctctttgcatttttacacgcgcagttttctgtagttagaacctatagttttctatagtgaaagctataaagtgatctgggtttttctgtaccagttgatacattttatcaaagaaaagagataaaacgaatcgcacataactaattgatttatattaattatactggataagcagagttgagttttaagggtgtagtattttgcaaattgaggtggtggttttcaggcagggttatctatcacccgccagcttttagaagtgaatacttatagccaaagtgttcactctaaaacttattaatattatcaaataattaattactatatttatataaaaatgaacactatgaacacttatatataagtttttaaaatcctaaattatctaaaagagtagataactacatttcagtggtggagatgttatcccctgcctgttgattgggcgtagtcatagggtgaaataaatccttgcctattagcatctaggtaatccgcccaccattgcaacataaggcgacattcatctaaatgatgtgatgtgtgtaggtaagccgctttaacattatttctttccaagtggctcagttgcctctctataacatcatcagcccaaatcccagactctcccatagcgccccgcgccattgttctaaatccgtggtaacaaatttctgtcttaatgtcgtagcccataactcgaagtgctttattcaccgtgttttcgctcatgaccttattggggtctctatcaccggggaataaacatcgattatcaccgctatattctttaagcttttcgagtagtgccatagcttgactgctcaacggtactatgtgcggtgttttcatcttcatcccgcgttctgaaaacttaacgttttctatggcttcgcgcttaccgggtatttcccatatcgcattatcaaagtcgaattcatcccacctaacgaaacgtagcttactggctctaacaaaggtcaataaaccaaattcaatagcgatacgtgtcacttcacgccctttaaacaaagcagtcctttcgagtaattcaggtaaccggctaggcggtaaagcaggatgatgttcggttttcgttgtagaaagtgcccccgccatatctaaagcgggattgctttcaataattccacattgcacagcgtagcgcataatagcggtaacacattgctgtagacgtttagcaacatcgaccttatcagcatcatcaacggcttttataggtacaagtagctcacgggtctttaactgacggatatcaattttaccaatatgaggaaagatgtattgttcaaggctgcgcagtacacgcgcccggttatagtcaccccaccgcttattactggagtgccatttcctagcaatagtttcaaaattgaattcgcctgatgcctcagcttgtgtctctttctgtgttgctttgggatctataccattagctatcagttttttagcctcattacgtttagctctggcatcagcaagagaaattaccgggtaaaccccaaatgctaacctgtcttcttttttatcagtaggtcggcggtatttcatacgccagtattttgaacctcgcggagtaatttccagatacaacccgccaccatcagcgagtttataggctttatcttttggctttgctgcctctatttgcctggcattgagtttcatgttgggggcacattattaatcgaatcggaagatgcccccacagatatgtggattgtaacggacgataatagaccttgatagactattttatttgatttataaggagttttcttagataagtggactttggtgaactgctatgaacatagtcatggtcgaaggccggactcgtcaaaaaatacagtctattgatttttaatgtatttcataaattaaatattgtattgaccaccattttgaccccctgaattttttatacaacgctattttgggcaatctttacggcagatatgagggggaatattcccccctttaatcaaatgagatgaacaaatctgacagccattaataacgaggaacgaacattgacaaaatttgtaattggacatttattgcagacgtgaggtcaatctgctctcgccaagattttaccacatacacaaaactgataatctcttaattataacaagattgttataattcatactgaatccatttatcgttcatagcagaaatcgaacacctcgctaaaactggcttcctccttcagtaatcgtgcttctagatcgtcaagtttatcaactttaggcagagcatttgtaggtgaaatcgcgacgtgaaactccgcattgtactgacgacctattctcgtaaactcgttacccagcaactctagtatataatcacgcaaaatcagctggtttcgccgaaaccgaatcagacgatgacaaacgaaaaagtctgaacgttttgacgaatcatactttctaccattccaaccagtttcacgggtagcacggtacaatgctcgctcttgcgtatccctccaaacacaaaaatcaaagtcgttctttgggtttggattttcatgtgtcgccttaggaaagaatccagtgccgtcatattggtgtccatccaagaccgctaaagtccgattctgttcagacagcatccgtttaattgatcttggcatactaaagtgcatcaatttagctctatccaagatacgtaattctctgggatattccctgtcctcactattccagttcttttcacatcgttgtggcactaactgaaaatatatatttaaaaaactgaaaacgccgattccactgaaagacgcgatgcagatattttcctcttcaggaaaatcatgaagaaagtagtatgccgtaccgaacgaaaccaatgatcgagctatttcctcaactaactcacgcatttttttatcaatgttgtgagatctatgtcttgtcttaatatacctaaataatgtttttgtaagctcatcgtcattagactcgatactaaaaaggttgctactttgtctggagccagaacaaaaaattctcgcaaaatcctgatcaaacatgcttcggttaaacgtaggccgctcactcttgagtttgataaaaagcctatcaatgaaactgagattaacatcagcaaagtaatagcgatcaaatggggaggtcctgacaattttcattctgaaccctcgtcacattcctcatctaaaaacctggcgagagaagtgatatgataatcaatctcaaagtcagttggagaaaaaagttggggaagagcctcaatggcgaaaaacaggtgagacgcatctgaatcggaataaagaaacgctctaacaattttgttcttatgagattttcctccactcatccccatttgatcactgaatccgtcgtgtcttgctcgatgctcaaatgccattttccactttgacctaatcatatttctgggcgaagcactcaaactgaaactatatgagtttgacaggcgtaccattctcgtcaggtactgttgtttgtttgccgttttatcaataagtagtttaaatttatcaagtgcggcttcagacaatttcatattgtcaaaataattactgtaaaggatagcgaagccgaggactgacgccaagtcgttgatcaccgatgaaatgagatgtaggcgaaactcgtcattcacattgagtgctggatcaacaaatttggagtctatcgccagcaatgccaaggacataaacattgggaaaactttactgaattttttttcatcattctgttcaaggtattgaatacaggcctcagccagctcgaagtatatctgtccaaaatggtctggcaattcgtcgttatgttcgcccgcaaaaatatgcccaacaatgtctgctctaccaagcatcgcgatagcttcatctcgcccatatgtaagacgagcgatcatatcggctatattgatattcggtaactcgtagtgcttttcggggtagtgattatactccccacatctttctaagatgttgagaaatttcatcaaaccagttaggcaacttccaatagttatgcaaacttgcgagaatcacttgagttgcagcttctgacatattcatttttgtcaatgagctaataaaacccggcaccatacctccgtaaaaatcagatatgattggcaatatctttgcatattgctgcaacaacttttgaacggctaattgttgaacatattttggtttagataatttctgtccttcaatctcttgttcaaagttaatgcgctcaataataaaagctaattcaacctgcaagaaaaggaggtaacgtctgtagagacttttccgtccaaatgtcgttattaaagaattgtctcagttccttctcaaacgttatcatacgccgcaacgtttcaaggcaaagattactacctaatgcggcccacgaatctgcaattcctatccgcagagtgacttcttcattccctggaatgatatctgacgaaacaaaggcttcttcaatgagttccttcatacgctgaagctctcgcatcccaatgtcgaactggaactgctcagcataagttgatattcgcgatgagaatcggctaataagtttcaatcctagtttgaaatcacccatctcaaacgcaagctcaatgtgaccagccaacctttcaataattacattttctagccattgatggtttgcttcttcttcgatagataattggctatttgtttgcagagcagttgtagtcgctagatcccctgccaaaaaccattggttgtgcttttgtcgcctaggaaaccagtagctctgatggtcgattctgtgtttttgatgaatgtagtgtagaagcaataccatataatcatcactcaatgcaggtaaattatcgccaagccctactttttctcctttcatacggtcatcaatatagcagagctgctcaaaagctgagcgtgcgacttttgaatgatggttggccagagatattgaattattgggattagctgcaccttcaatatggtgcgcaatccttgggagtatttcgctacgcgccaactggttaaggttaaaaaaattgaataacctttgacctaatggaaacaaggccagagagcttataagcgttaagaatgtccctatcgcagtaatgaagagaccgggttcaaatccaaccaactggagagtagttgcaccaagacaaaaaacagctgaaagcaccaaaacccgcgaataaatactaccaacctgctcggtagtgagtaattgtattatatcccgtctgagtctggtatagccagtactcaatatgatgccaatagtcgcgaaatatattgaaaatatcgcagtaagcagttgtgcatataatcttagttgatcaatataaaattttttgtcgtctgcactaagcggcttgagtaaaacagttttactacgaagataatcctcaacgaaacctagaatagatagcgtcaatacaacccaaaatagactatttaagccaacccacgtgaaagatccaagaatgcgaacattagccttcgccttagaaacatacgtgcggcgtttgtacgtgctgttctcaaagagaaaactaatttttgcaattctagccctgaatcgccaaaaccatgattgagaaatcagccagacccttattatatcaatcaagaaatacctgccttatcgtcaatccatacaacatagaacctctcccagtaggtattattggtgcagccagtttggcacgaacagcgtgcaaaatccggagcaaaatacataaggattttgaacacaacgcaagttcgaaatggcaattgagatggtttctaagtctgccagacataatcaaaccaacaccttcaacccatgcttctgcaccacggtaagcagtttcagcgccaatccaccagggcgttttacgccgctttcccatttctgcaccgttgacacactggtattcagataactggcaaaaactggctggctgacgttcagcttctcgcgcagcgccttaatctcaacaggttgcaggtcgtccacgttattaaggcacgctttatcaaagtggcgcatcgtttcctgcgggatagcatcgacgctgaataatccagaagccgcgctgtggatggcctcaaatgcaggactcttgaatttactttttgcagccatggcaaatctccaccagttctttattcttaatcagtgccgtaatcttttcatcagcaagggcagcgtagtgctttgctaactcacggaatccggccagttcgcgattatcaatgtttgccatatcctgtttggcatacaggaacgtgtaaaaccagtgttccccacctttcgccaggataatggcgcgatcgcgattctggttcagccgcttcttgtaaactcccccgccgaggtcgtcagccttaccttgcatcgccgcctcaatagcctggcataactcactatctttaattgcgtgcgatttagccgccttgctgaaccatttagttttaaatacgcgcatcaggctgacatcctgttaccttaactatagcacctggtgctaggttactctcttttttcactgatgcaaagtgcttgaagccaacataattttgccgtatttttaaccacgcatacccgctgtcaacgacagccagccaatgtttccagtatcaggatgatacgagtgacctgtgagaaacgccttcgggtggtcacgagccaaagtcatatggaatggagtgtggtctgagactgacgccttcgggcgaccacaaagaaagttgtcgtaacctgaaagacaacgctggatgcggtaaacctgcccacctttgaaagcaggtatcgtcaacaaaaacgcacctatgacgtgacgataaaggttccttaaacttaagagacggctaataacgagcgtttcctcgccgatcggcattatttgtaaagaatgctgtattcggtcttctcctcagtgaatgagttgctgcaagcaaggctacagcttttgcctgcgatgacagcagtatcatcacccgcttaacgacaggtacatcccgtactgacgggttttctgtacctcttttctggcacgtattaaacgccgctggctgcgccttgctatgccgtcaggtatctgcatgcgcctgccttgctgcgcgctaatacgtggcgtcactttttgcgtgttaacgcatgaaagtgacgccacagcacgaaccagcctcagcctttgaggcaggcaacttcactcaacgagccatgaatctgacgcacaagttcgggagccgaactgaccactttttacaggagatttgaaccgataccgaggcaggccaacagcctgaggggataacctgcaatcgcaggaggctgcacagagtgcattaccgatgccccgcaatacctcaactgctgcccgctctggcgcacaggtatcgttcagggcaggtcaatgtcgattgtttctgccatttagcccacgcgccagagaaatgcagctcgttgaaattgagaaaagttagctatgagtaaattaagccgtgaaatgaagatgctggcgaaacaagtcggcggcagctttaaaactgttcatgatcgcacccgcattattgaccgattttgtcggcacctgattgcactcaatatccaggtccgggatgttcagcatctgaaagctaaacatatcgaaagctatattgccgatcgccaggcaacaggtatctctgctcgtactctgcataacgacatgtcggtgtttcggttggccggcagggaaaagctcgttacatcaatacgtttagcgaataaaacgttgggattaagcggagcaagtcgtgcaggcacgaaattcgcgatcccggatgagcgatttcaggccgtattgcgcagcgcacagcagcatgaccggggactgacttgcgcccttcaacttgcccggttgctgggattacgttcacaggaagcagtgcaatgcgccagttcgctgaaaacatgggaaaaacagcttgaacgcaatcaatcaacgctcaccattgtttttggcactaaaggcggcaggccacgtgaaacgcggatcatcgaccgtcatgctgttcagcaggcggtaaaagaggctctgctggttactaaaacacataatggcaagctaatcgacaagccagatttaaaaactgccatgaacttctggcgttctcataccacacggttagggctaaccggccattattccccgcacagcctgcgctacgcatgggcgcaggatgccattcgttattacctgtcacaaggattctcccgcagtgaagccagggcgctgacgtcaatggatctcggtcacggcgatggtcggggccgttacgttgagcgtgtttacaccaggaaggaggactgacgatgacaaacttcaagctgttgcgcttatcagaagtaatggaaagaaccggcttcaggaaatcatggatttatcttctgattagccagggcgattttcctccggcagtcaaaattggttcccgctccgtggcatggctggaaagcgaagtgaatgactggattgctgggcgtatcagcaaacgcgagggaatacagcaagcggggaagcgaaacgatgagtaaatccgtaaccgataccgaagcagaatttaaaacctcgcttcctctgcgcaaaggttctgatggctttgacacccaacaggactatctgattaagggatatttgccagcctcatccgttgccaacgcttacggtgccagcggatcttacaaatccttcctggcggtatcatggggatgccatatcgccactggcaaaccgtgggcagggaaaccggtcacacaaggagcggtcatctatgtcgtcggtgaaggtgggatcggcgttcctcgccgtatccgggcatgggaacagacacttaacggcggcagcccgattgatgcgctttatcgcatcgattgcccggtctttcctgccagcccggagagtgtacaacaggtgatacaggccgccaaagatgttaaggccgcaaccagtatgccgatccgcctgatcattctggataccctcgcccgctgcttcggtggctcagacgagaacgccgctaaagacatgggtgcatttattcagggatgcgactatatcaaagcggccacacaggctacggtgctgatcattcaccattccggcaaagatcaggataaaggcgcgcgcggctccagcgcattccgggccgcactggacgtggagtttaacgtgcgccgtgaaggtgatggtggtgcattgatactcagttgcaccaagatgaaagatgccgaagagccgccacgtcgcgcttatgacctgcattccgtcgatttatacgtggatgatgatggcgatcggatcacctcgctggtgctgaacgatgaaggccgtgaagccagggaaaatgatgttaccagcgaccctgatttgatcggcatttcgcggctgacggaaaatcattttgccctatggcaggccattcgttcgcgcacggccagcggcgatagctgcacccgcgcattagtcagggacgatatgaaagcgatgggatttgatgtatccaaaaagtttacccgctggctggataaactggaaaaggatggtctgattgctttagatggggaacgcattacgccgttgtcgcaaagagataaaacgagggattaaccgggggaagtggggggaatctgactctgttagctaccaaattcaacatattcccccacttccgccatgtatatatacgcaaggtgggggaataacttaaccctataataattattgtttttttcagaaagaccaaaaatctggtgggggaataaaaatttatcattaagtgggaataaaatgggggattgtgtgaccattacagaccttgttctcgcgtcaacttcacgaaagatatcaactacaaagcattaaatccgccttacctctggttatcttaccgccaaccagtaacgctttttagacctgactgaggcggagcgcaacgaagtgagcaccgaacagtcaagtctaaaaagtggaagaactgcacaggctttaccgttccatcctcctggaaagtaacttttttgccacaacagcttttcttcctttttgatctcaaaccgacccagaaactaagtattacttagtatattttcatcaagcacagatgagaatcgagccaggacaagttagtcatctgggaccctcatgctacctcatcgtttaaaagctgcacgcttgaaggctggtttgtcacaggaacggctagggattcttgcagggatagatgaggcgacagccagcacccgtatgaatcagtatgagcgcggtatacatacacctgattttgcactggcctgccggttagcgtcggtcatggggattcctgcctgctatttttatgtggtggaggacgatctggcggagataatactggaatatgcgaatactcgtcagtccgggatctaaccgatatttgaacccataccgcatatcatcatttacgattagtcatatccctgattgcccccgcataaagcgcctcaatattgatatcctcatcaatttcctcccaatggattcccccgcctgcattaagggtgaagcgctttctctgttctaccgtagcgcgttcgaggcgagggaagttttggagtggaatatttagcagtgctttccctttaacctgaacgtgtaggcattcatctgagaaataaacaacgactggcgattgatcaaatagcagactgtttaccttcttcattcaattttttccttatgcgcatttttctgtccagtagcgtaccagaactatcaaaataacggctgggccagatcttcgcaggatgaacgtccagcgccgtggccacaatccattccccttttggccacggacgagaaagcacattggcgagtgttgaagaactaagtcccgcagaacgcgatagcgcggccagtgttgtacctttcttacgtaaggcggcgatgatatctgcctgatgccagtcatgatgtgatgtcatacctttctccattaagatcccaagtaaccacacaccaaatactaaggattacttagtatattttcaagacacacagatgagaatcgcgacaagccacacaagtaatcaggattctcatgctacctcatcgcttaaaagccgcacgtttaaaggctggcctgtcgcaggaacggttagggattcttgccgggatagatgaagcgacggccagtgcccgtatgaatcaatatgagcgcgggatacacacgccagactttgagctggcctgtcggttggcatcggtgctacacgttccagcttgctatttttatgccgtggaagacgatctggcggaaatgattcttggatattcagactcgcaggaaaaatcaaccctataagacgtattagctccagccccccgagaaatggggctggagcagtatagaggtagatgcgcagataatggatggataatattccttaactatctgtaagactctttattctttaaaccatttaggcatacttgattcagttacaggaacacgttttaatgaatcttggtttttatcatctttaatacagttgatttcctcaaatccccattttccatcacgattagaaaaatagactgtgtatttatttgtattaaatccaaaatagtgatctgttgaatcactaatattcaaggaaccgcacgttgcggaagtatgccattcactgctagtagcccaatcaagcacaactactataaaattctccgcccagcgaggtaaagcaaacagcagtaatgatgttaacattatgatgccaaaaaaagtcatcaactgatgcccttttaatttatttgatactaatagaaaaataccgtatgaaactggttgtaagagcataaagaaataaatagcaaaaaaagcaagtttccacccaaactcaagcaacggggaatcacttatatccatattactcatttgcataaaataactagctgcatatgtacttgtaatgaaatataataaggatacgctactgacaaatacaattttcagcttgctaaagataatattattttcacgctccaggtcatagaaggtaaatactccgctgataacaacaaatataataaatacaagaataaaccatctcgcaagccacaccaagccaatatttagtaagaacaaagatgatacaaagaacaaccaggctagtaatgatagtcctcctgaaatctttttgacgatcttgtcattattaaagtaaataaaataatatattatttttttgaatgcatccttttgatagaaacaaataactatcgtcaaaaaaagaaacaatacaataaatgttttcttaaaaatgaattcgtgcctaacaagaaaagtattagtaattaaaaacattgatagaattatataaagaaaatacgtctttatcttcttgaatagcatggtattttatccataaaataattgcaggttgaattatgagcacataaaaatcatgcccccataaactcatacggcaccacatacccttcccgattcgcatccagataatccgcccaccattgcagcattagccttcgttcttcaatatgctcagccttatgaatataagccgcccgcacgctatcgcgttcctggtgactcatctgccgctcgaccgcatctcgtgaccactgccctgactcaaccagtgcgctacaggccatcgtgcggaaaccatgcccgcatagttcagtagtggtgtcatatcccatgacccgcaatgcattattgacggtgttttcactcatcggtttagtcgggcgacgatcgcccgggaatatcagttcgtgaccgccgctgatagcctgaatttctttcagcaacgccaaagcctggcgggataacggtactaaatgctcagtgcgcatttttgccccacgctgagagtgttttacacccggtatcgcttcacgttcagccggtatagtccacatagcacgtttaaaatcgatctcggtccagcgggcaaagcgtagttcactggaacggataaagacgcacagtgtgaactttaaggccagggtggttaatgtccgccctttatagttttcaatccttgccagaaaatccggtagcttatccagtttcaacgccgggcgatgggttgccttcggcggcgctatcgccccggagagatcctgagcaggattacgctctatcaaatcattctgcaccgcatagcgcataatatcggtcactcgctggcgtagtcgtgacgctaaatcgagatggccgttttgctccacggctttcagcggctcaagcaagtctttagtcttcagatccgctatgtggcgatgacctatcgctggcaaaatattgcgttccatatcgcgccatacccgtccggcatgggtttctgaccagcggttttggctgatatttcgatgccagtctcttgccactttctcaaaggttatcagcgcgtcctgagcctctttttttccctccccccgtttttccgccgggttgataccatcggctagcaacaaccgtacctcatcgcgcttttctctggctttcgccagtgagatcagcggataagcgccaaaagcaatccggctttccttaccttcgaaacgatacttgagataccagcgcttagagccgccagggcttatcatcaggtacaggccatgtgcatctgcgagtttgtaagcttgctcgcgaggcttagcggtgcgggctacaacgtctgtcagggccataattgggggtcaactcctaatcgaagtgaattgaccctcatcttgacccccaaatcatctggatgtcaatggacgaaaaaagaccaacgtggataaaacagataaatcagagaatgggtagataagtaaaaattacttatttaacaatgaaatatggacataaatggaagattatggacataaaaaaagccacccgaaggtgactgatttttccacaatggtgccgaaggccggactcgaaccggcacacccgaaggcggttgattttgaatcaactgcgtctaccgatttcgccacttcggcactgaagtagtatgcggaaaacgagggctattatacctgtcagcgatctgttagcaactgttatccttctcactttggtttaagtgttgaaaaaaagatcaaacccatctttcaacacaaatgtgcgttcaattactgaacatcaaaaccctaaataagtacacctagcaatatcttttctacctgaaatagctcctcctctgcaataccagagaaaaaacaactctccccacaacaatttttacagtcatagttagtcaaaccacctgacgctgatagacaacctataatcaccttatataatctcagcatgataattcgctatgaggtaaatggttatgacgattattagctggattggtgctgggatctttttgggcattgtcattggcgcgttgatgatgctgtttaaaaagaataaatagccgcttttgctatctttatcctgtttgtgaattcactggaaatatgcctgattggtcaattcaaaatgaataaacagttttttaagatcttctccatttctgccatgatgttggctctcgcagcctgctcttcttcaaacaaaatatattcggcaaagtttctgcaaccgaagaaacaaccattgaaatgggaagtgttcgaaggaaatgcgagaactaaaaagctagcttcacagttggttgatcagtatgcacaggatattttcaacagcagtaatgcacaaggcatggcgatggtggtgattgataataatcagacggtttaccgcagtttcggtgaaacccgtccgggaaacggcatccgtccaaagcccgattcaatcatccgtattgcctcgctaactaagttgatgaccagtgagattatgatcaagctcgaagaggatgaggttctgcgttccaccgatccgttgcaagactatagttattatggcgtgaaagtgccccaatacagccctcttcaacccatccggttattccacttggcaagccataccagtggcttacctcgtgagcagccgggaggtagatgggggcgtcctgtttttgtttggcctacacaagccaatcgctggacctggttaaaaacagctcaattagactccgcaccaggcactacagcatcttattccaatctggcttacgatttattggcagatgcgctctctaaggctacgggtaagccatatacccgtttgttatacgataagatcaccggcccttattgcatgaaagacacgacactgacaccaaaccgttctcagtgtgctcgtttgatggaaagttataagccaagtccgtgtcttaacactgttgctgcggcaggcagtggtggaatctattcaacgccaaaagatatgcagcactggatgcagcaatttttatcatcagacagtcagttacgtaaacaaaccgcgagtcgcgaacaaggtatttattttaagcgttccgctctggcttcaattaaagggatggatgttgccggtcaggcagatggcgttggccttggttgggtttacatgaacgcccgcggcgatgtaccgggtatttatcagaaaaccggcggtggtggagggttcaatacgtatatggcaatgatccccgaacaaaatatcggggtgtttgtggtgatcactcgtaaacaacacagcctgttcagtagcgtaacaacgggggttaatcaactagtaactgcattgtcgaaaaatcaccatcaagcttgaatcttttacgtcgtaaaatcgagatatccaggatagggtttcttagccaaaaaccctatccctatggaccctctaatatctggctccatactagtaccactatttctaaaagctactgtcttctcttaaggagtaaataaatactcacagtaaggaacaataggcttggtaatagtgccgccaaaaccgctggcacgctgtacaccaagctcagtggaccaaagatctcattaagtacataaaataggaagccaaagctaatccctgttactatcctcactcccatcggcacactgcgcagtggtccgaagataaaagagagtgccatcaacatcatcactgcaactgaaagcggcgcaaatatttttttccacatattcagttgataacggcctgattcctgttcactctgcttaaggtatttgatgtactgatataagccactgatggaaagcgcttcaggctcaagtgcgactacattcaactgttctggcgtcaggagaattttccagtcagcagaaatacgttgtgatccggtgatttttttgctgtctgtcagatcagattcttccacctgagaaagcttccataggtcgttatccttatcataaaccgcactggctgcatattttacagagagtagttttttatcatcattaaaatgatagatattgacgcctttaatctcggtatcactcacaatccgctggatgtagataaaatcgtccccatctatcgtccacatacctttatttgttgaaaccagagaaccaccaagcatcttctgagcccggtaattacgcgccatctgttcaccttgtggcgcgacccactctccgataaccatagtcaggatcaccaacggaatagccgttttcatcactgagccagcaatctgcatacgggtaaatccagaagcttgcataaccaccaattcactacgggttgccagcgtaccaagccccagtaaggcaccaagcaaagctgccatcgggaagaatatctgaatatctttcggcacacttaacaaaacataaagaccagcagaaatagtagtatattccccctgccccacttttcttaactgctcgacaaacttaataataccggagagtgataccagcataaacagcgtcatcagaatagtctgtagaatagtccgcccgatataacgatccaatacaccaaacatcaggctactcctctgccgttgaaacgagcccggatcctacgcaccggcaacgtatcccaaatattgagaaccagcgccaacatcagataagtcccattagtcagccacatccaaatcatcgggtccaatttgcctttactaccgttagaacgcagggagctttgcaataagaagaaaatcagataaagcaacattgcgggcaacatgcttaatacccgcccttgacgtgggttcaccacacttaacggtacaaccatcatagccataatcagtaccgagagcaccaaagtcaaacgccaatggaactcagcacgggagtccttatcattatcctgccataactggataatagatttctgttcaactttattattatctacgattgaagtctgatgcccaataatcgcttgataatcacggaactcagtgatcctaaaatcacgcagcattgcagtgccttcataacgcgtaccatgattaaggacgaccacctgtttgccgtcaggtcgctccaccatatgaccgccattagagatcaccacggaaggacgctggttatcaacggggcgaagttgagcaaggaatacgttttcaaacttattgccgtgcacgttgccaatatagagcaccagattaccatcctcggaaggtttaaacctcccttccatgatcgctgccaagcttgggttagctttagcatcagccaccacctgttcttgatatttcgaggaccacggcatgacccaaatgacattcactgccgctagcgcggaagttaacaacgccagaataagcgccgaaaccaccagcacacgcttgcccaaaccacacgcatgcataacagtaatttcactttcagtatagagtttactgaaagtcatcaataccccaagaaacagactcaggggcaaaatcaactgcgccatttcaggcacacctaatcctaacaaggataaaactaaatttgccgggacgtttccttccactgcggcacccaaaatttcgactaatctctgacagaaaaagatcagtaaaaggataaagagtatcgcaacttggcttttcagggtttcccgtaccagatatctaatgatgatcacgcttattacgcctgtgaaaacttgtctttttgcaggaaaatcgctaacttcattgtatatataccatttattatgtgcatcagtttggcttcctcactgctaaaatgatatcgaagcattccatattcaggttcccagtcagaacatacttataagttagctaaataataacaaatagtgcgtttagcttaacataaatagttaattttctatggggtagattaatgcggaacgctatattttagcgatagcatccgtctttgtctttaagattcaggagaacgcatggagtttagtgtaaaaagcggtagcccggaaaaacaacgtagtgcatgtatcattgtcggcgttttcgaacctcgtcgcctttcctctatcgctgaacaacttgataaaataagtgacggttacatcagtgcattactgcgccgcggtgaactagaaggcaaagttggtcaatcactgttgctgcatcatgttcccaatgtgctatctgaacgtatcctgcttatcggctgtggtaaagagcgcgaattggatgaacgccagtataaacagattattcagaaaactatcaataccctcaatgaaacaggttcaatggaagctgtttgcttcttaacagaattgcatgttaaaggccgcaataattattggaaagtgcgccaagcggtagaaacagcaaaagaatctctctatgctttcaaccagctaaaaagtaataaaaatgagttgcgccgcccactgcgtaaaatggttttcaatgttccgacccgtcgggagctaaccagcggtgaacgtgcaatccaacatggccttgctattgctgccggtatcaaagcggccaaagatcttagtaatatgccacccaatatctgtaatgccgcttatctggcttctcaggcacgccagctcgcagattctgccaatagccatattacaacaaaagtgattggtgaagagcagatgaaagagctaggcatgaatgcctacctggctgttggtcaaggttctcagaatgaatctctgatgtcagtcatggaatataaaggcagttcagataaacatgccaaacctatcatcttggttggcaaggggctgacttttgactccggcggtatttcaatcaaatctgcgggtggcatggatgagatgaaatacgatatgtgtggggctgcaacggtttatggcgtgatgcgtgtggtttctgagctacaattaccgctcaatgtcatcggtgtcatggcaggctgtgagaatatgccaggagggcgcgcttaccgtcccggggatattttaaccaccctatctggtcagactgtcgaagtactcaataccgatgccgaaggtcgtctggttctgtgcgatgcgttaacttacgttgaacgttttgatccagaattggtcattgatatcgccacactgaccggtgcgtgtataacagctcttggtaatcattacagtgggttgttatccaaccataatccactggcccatgagttactcaatgcttcggaacaatccggtgatcgcgcatggcgtctgccaatgactgatgagtttttcgagcaaatcgattctaactttgccgatctggcgaataccggcggcagtggcggtggtgcaattaccgcagcctgcttcctgtcccgtttcgcaacaaagtatcactgggcgcatctggatatcgcgggtacggcctggcgttcaggtaaaacaaaaggcgcaacaggccgcccggttgcgctactgtcacaattcctgttaaatcgggcaggaagtgccggtatcaataacgacgattgatctgattcctctcttagtttaaaagggcatttgacaatgccctttctccgtaacagagacattatgaaaagtgccacgttttatttactggaacagccatcacctcaagcagatttgcaagctcacgaatggctggcatgccagtttgcggctgaccaatggcgagcagggaaacgggtgctaatcgcctgtgaaaaccagcagcaggcagaaaagttagatgaagccttatggcaacgggaacctcatcagttcgttccacataatcttgcgggtgaagggccaaggtatggcgcaccggttgagttatgttggccacaaaaacggggaaatgctccccgtgatatcctaataaatctgttgccgcaatttgcagactttgccaccgctttccatgaagtgatagacttcgttcctatagatgaaaatttgaaacagttggcgcgtgaacgatataaatcctatcgcagcgtcggctttaatttgaccatggcaacgccgccaacatactaagtatcaagataaaatggaaaaaacacccgcaactcaaacgcaagccgagccatctctcgataaaacgtacaatcctaaagaaattgaacaacctctttataaccattgggagaaaagtggttacttcaagcctaacggcgatactagccgtgagagtttttgtattgttatcccaccaccaaacgtgaccggtagcctgcatatgggccatgcatttcagcaaaccattatggataccatgatccgttatcagcgaatgcagggtaaaaatactttgtggcagtccggtactgaccacgcaggtattgctactcaaatggtggttgagcgcaagatcgcagcagaagaaggcaaaacccgtcacgattatggccgtgaggcgtttatcgataagatctggcagtggaaagcagaatccggcggcacgattaccaatcagatgcgtcgtctgggtaactctgttgattgggagcgcgagcgtttcactatggatgaaggtctatccaatgccgtaaaagaagcctttgtccgtttgtatcaagaaaatctcatttatcgcggtaaacgtttggttaactgggacccgaaattgcacactgcaatttccgatctggaagttgagaaccgtgaagttaaaggttctatgtggcatctacgttatccattggccgatggtgtcacaaccgcagaagggaaagattacctgatcgttgcaactacccggcctgaaactatgctaggcgataccggcgtagcagttaacccggaagatccgcgctataaggatttaatcggcaaagaaattattctgccattaattaaccgccgcattcctattatcggtgatgaacatgcggatatggaaaaaggtactggttgcgtaaaaatcacaccagcccatgactttaatgactatgaagtcggtaagcgacatgccctaccgatgatcaatatcatgacttttgatggcaacatccgtcataaagcagaagttttcgatactcatggtgagatttctgacagttacagctctgatattccggctgaatatcaaggcatagagcgtttcgctgcccgtaaaactatcgtggcggagttcgaaagactgggcctgctggttgaaattaaagctcatgatctaaccgttccctatggcgatcgcggcggtgtagttattgaacctatgctgactgatcaatggtatgtccgtaccgcgcctctggcgaaagtggctatcgaagccgttgaaaatggcgatatccagtttgtacctaagcagtatgaaaatatgtattactcctggatgcgcgatattcaggattggtgtatctctcgccaattatggtggggccaccgtattccggcatggtatgacaccaacggtaatgtctatgttggtcgcagtgaagaagaagtccgtcgtgaaaataatctgggcacagatatctctttaaaccaagatgaagatgtactggatacctggttctcttccggtttatggactttctctacccttggttggcctgaacaaactgacgcgctgaaaactttccacccaaccgatgtgttagtgagtggctttgatatcatctttttctggattgcccgtatgatcatgatgaccatgcatttcatcaaagatgaaaatggcaaacctcaggttccatttaagactgtctacatgaccggtcttatccgggatgaagaaggtcagaagatgtccaaatccaaagggaatgttattgacccgctggacatggttgacggtatttctctggaagaactgctggaaaaacgcaccggcaatatgatgcagccccagttggctgaaaaaatccgcaaacgtaccgagaagcaattcccggcaggtattgaaacgcatggtaccgatgccctgcgctttacgttagccgcgctggcctcaacaggtcgtgatatcaactgggatatgaaacgcctgcaaggttaccgtaatttctgcaacaaattatggaacgccagccgctttgttctgatgaatacagaaggtcaggattgcggccaacatggtggcgaaatggcgctatcgttggctgatcgttggattctggctgaatttaaccagacagtaaaagcctaccgtgaagccctggacacatatcgttttgatatggcggccaatattctttatgagttcacttggaaccagttctgtgactggtatctggagctctctaaaccggcgattaacaaaggttcagaggcggaagttcgtggtgcccgtcatacgctaattgaagttctggaaggattattgcgcctggctcacccgattattccatttatcaccgaaaccatctggcagagagtgaaaatagtgaagggaattgaggcagataccattatgctgcaaccgttcccagaatttgctcaagaaaaaactgatgaactggcactgaccgatctggaatggattaaggaagcgattattgcagtacgtaatatccgtgctgaaatgaatatcgcaccgggtaagccactggaagttctgctgcgtaatgctgatgctggtgcccaacgccgtgtagcagaaaacctgaattttattcaggcaatgggccgcttatcttctgtgactcttctgtctacggacgaagaagcaccgatttctgtcactaaattgattaatggcgcagaagtattaatcccaatggctggcttagtcgataaagaagctgaactaagccgcttaaataaagagattgagaagctggataaagagattggtgccattgaaggtaagctatcaaatgaaggcttcgttagccgtgcacccgaagctgttgtaaccaaagagcgtgaacgtctggcaaactgcaatacatccaaagaaaagctgctggctcagaaagaaaccattgccgcgctgtaatattttcaaaaagtaaattctcaccaagccactgacaatgaattgcagtggctttttaatttaaatagtaaacgataaaattaataataaaatataaattcaactcattctatataaacataatcaaaaatattgaaaataacaatacctatctccttaacataagtgaatatttattttattcatttttaaatttacatatcttaaatgacaatatgatataattttattttatatataaaccattatatttagcatattatacagagagtaaaatcatataaatatattattacaagtaaaaaggaaactaataatgcaattctagcccaattaaatatccaattatttattgttatgaataatttatttcagcggaaattattaaggtagtaataaattaattcactaatttattactacccggagaaacaaaatgaaaacacttattaccctattattggcaaatactatccaattcggtctcgtatattcagctaatgcagaaccaacccttgataagattaaatccaccggcacactcagaatagcaacggaaggagcttatccaccatttacttatcgcgacgcctcgggtactttaactggcttcgatgtcgacattggccgtgaaattgcacaccgattgcatgtcaaaccaacatttattgaaggaaaatgggacggacttattgccgggctggatgccggacgttctgatgcagtaattaatcaaattgcaattacacctgagcgcaagaaaaaatatgacttctccatcccctatatcacatcgcaagcggtacttatcattaataaaaataataataacattagaaaattcagcgatttaaaaggcaaaacctcagcacatactctaaccaataattttgcccaaatagccagagataatggtgcagaaattatcggcactaatggatttagtcaagaaatcgagctggttagtaccggcagagccgatgccactattaatgatagcctatcttatctggactataagaaacataagccaaacgcaccagtaaaaattgttgcagcaacccccaatgcgggtcaaacagcagtgttgctccgcaagggcgagccagaactaaaagttgctattgatcaagcaataactgacatcaaaaccgatggcacttaccaacgtatctggactcactattttggcgataatcttcccgaataagtgaaagattatcttattcagatagacagttccctaaaagttgaatacaaactctgaccagggaactttatcatcaaccgtgttgaattgagtaatcagaaaatattttagttaaatattatatatattaatttatataaattttttatatatctaaaataaccatatgatataactatatcttatatatgtaagttgacagcttgccatatgatatttaaaaaaatcactataaatatatataccctatggatttcaagatgcatcgcgacggcaagggagcgaatccccgggagcatagaaaactatgtgaccggggtgagcgagtgcagccaacaaagaggcaacttgaaagataacgggtatagttatattacacacaatagggaaaatatatggaaccctcttggttcaatctagtactcgattctttttggcctatgctttatgcgggctttgcttttactattccactaactcttattacttttactctcggtatcatactgggttttattgttgcgctcatccggctttacgggccaaaaccacttattgctgtcgccaaattctacgtctggctgatccgtggcacaccgttgctggtacaactgtttcttattttttatgccttacctagcgtcggcattacgttaggtgcatttacctcggcagtgattggtttcacattaaatattggtgcctatacctctgagataattcgcgccactttattgtctgtaccaaaagggcagtgggaagcagcttattctatcggcatgagctggacacaatcattgcgtcggatcattctacctcaagccgcaagaatcgccattccaccactctcaaacacatttatttcactggtgaaagatacttcactggcttcagtcattaccgtaccggagcttttccttgctgcacaacgtattgcagcggtgacttatcaacctctcattctttatactgaggcggcaatactttatctgataatcagttcagtattgtcatcactacaaacccgtctggaaaagaagttttcgcaaaagagtgacatacaggaattaaaagatgattcaactctccggcattgaaaaaagttttgacgggcaaaaggtcctgaaaaaaatcgaacttaccattgaggaaggcagcctgaccgcactaattggcccatccggaagtggcaaaagcacgctattacgctgcatcaacttattagaaattccccaagccgggaagctccaaatcgacaatgaaaacataaccttcaccggcaaagggcggattgctcacaaggatatacaacggatccgccaacaaaccggcatggtgtttcaaaactttcagcttttccctcacctcaccgtcattgaaaacatcatggaagggttaatctgggttcagaaatggtcacgtgaacaggctaaacagcgagcgcttgaactactggaaaaggttgacatgtcacacaaggccgatgtctttccagccacactctccggtggtcagcaacagcgcgtagcaattgccagagcactggcaccctcacccaaagtattattatgcgacgaaccaacttccgcacttgatccagagttatcgcaagaagttgttgccgtattaaagcagttggctaaagaaggaaccacgatgttaatggctacccatgatctgcgtttggcagctaatcttgcccacaacgtcatatttttagaatccggggaaatcgtcgaatcgggaacgtcgaaaacgattttcaccggtgcccttaaacaacgtactgtggaatttgtttcaaccttaaccaataccttaccggattgggaaatatagcccaccgttaaaataactttgccgtaattgatctgagaatcagttgataacaatcaaataaatcttttaacagtttggagaaagaaaatgaaaatgttgcttaccgcattattagcgggtgtcattcaattcggcattgcatattctgcgcatgcagaatctggccttgataacattaaatcagcaggcgtattcaaaatcgctaccgaaggaacttacccgccatttacctatcacgatgtctcaggagctttaactggatttgatattgatattggccgcgaaatcgcacgacgtctgaatgttaaagccgagtttaccgaaggcaagtgggatgggcttattgccgggcttgatgccaaacgctatgacgcggtactcaatcaagtcgctatcacaccagaacgcaaaaagaaatatgacttttccggcccatatatcatatctaaagccgtacttatcacccggaaaaataatgacagtataaaaacgttcagcgacctgaaaggtaaaacctcaagccatagcttaaccagcaattatgcccagttagcaaaacatttcggtgcggaaatcgtccccaccgaaggatttaatcaggccatcgatttggttgctacaggcagagccgatgccactatcaacgataatctgtcctatctcgattttaggaaacacaaacccaatgcaccggtaaaagttgtcgcgtccgaacccaatggtgatctagtcggggtgctaattcgtaaaggcgagccagaattacaagccgctatcgataaggcactagccgatatcaaagccgatggcacctatttacgcatttccactcaatatttcggcaccgatgtttctaaataagaaaataatcacctcttcttacaagaggtggttatctatttatcaattaattatctctctttttacattcaaaaaatttcaatcattattaaattaatattttctcgttaacgattactttaaatatatattcaagtcagttattaattaattttttcttaatcacaatcgaataattaaaatatttatttcccctttcgtattctatccctatctattgggatattaattctcatactgtcaatctcaaaaattatcacgctattctgttaaaaattttattcattccgtagtaaagtctcaggtcgttactattaagccgactaacagattaaaacaacataagggactgcaatatgattcgttacaattctgcaattaaccgaaataccccatctgtcagcgtacgagataatcgagggttaaatatacatacgctggaatatctgcggactcaagctgatgaaaccaatagcaacgaattgatcactcgctatcaatttaatactcacggacttcaagtaaaaagcacagacccacgtagatataaaaaccagagtggttcaaacttcactcgtatctttagtctcgctgggaatacactgcgtgaagaaagtatcgatgctggccgaacgattaccttgaacgatatcgaaggacgcccagtactgactatcaatgcaatcggcgctcgtcagacccatcactatgaaggtaataccttgcccggccgcttgctggctgtcaccgagttaatacaaaagaacgagaaaaccacggagcgccttatttggggcaacaatacagatgcagagaaaaaccagaatctcgccgggcaatgtatacgccattatgatcctgcggggctggtacaactggaaagtttgtccttaacaggatcggttttatcacagtctcgtcaattaatagccgacgatcaggaagctgattggcgcggtgatgatgaaaatagctggcgtacaaaactgaatggcaacatattcacgactcaacataaaactgatgccattggtgctctgctaactcaaatcgacgccaagggaaatatgcaacggctggcctatgatgtcgcgggccaactgaaaggtagctggttaacactaaaaggccaagccgaaaaagttattgtacagtctattacctggtcagcagccggacaaaaattacgagaagagcacggtaatggcgttattacggaatatacctatgaaccagagacccaacgattaattaacattacaacccgccgaactagagatagtacaaaaccactacaagatttacgttatgaatatgatcccgttggcaatgtgatcaatattcgtaatgatgcagaagcaacccgattctggcgtaatcagaaaatagtaccggaaaatgcatattcctatgattctctgtaccaactcatccaagcaaccggccgcgaaatggctaacattggtcagcaaggaagccagctccctcctttaattacccctcttcctaccgatgacaatacttatactaactatattcgtacttatacctacgacgatagcggcaacctgacacaaatccagcacagtgctccggcaagtaacaataactacaccacaaatatcaccatttcaaaccgtaataaccgcggtgtcctcagtaccctcaccaacgaccccaatctcgttgatacattctttgatgcaggtggtcatcaaaccagtctgttctcagggcaatccttaaactggacaccacggggagaactacaacaagtgaaccaaagtggtaataccgcgcgtgagtggtaccactatgacagtgacggcatgcggctactgaaaataaacgaacagcaaacatccaataccacgcagcagcaacgagtcacttatctgccagggttggaattacacaccacacaaagcggcaccaatatcaccgaagacttacaagttattactgtcaggcaagcaggaaaagcacaagtacgcgtactacactgggaaaaaggccaacccaccggcataaataacgatcaagtcagatatagctacgataatcttacacacagcagcgaattagaactggatatgcacggagaaatgatcagttgggaagagtattacccctatggtggcaccgcagtatgggcagcaagaaatcagattgaagctggttacaaaaccattcgttattcaggtaaagaacgtgatgcaacgggactgtactattacggctaccgctattatcaaccgtgggccggtagatggttaagcgctgacccggctggaaccgtagatggtctgaatttgtaccgtatggtaagaaataatccaatgaccggcatagatgaagatgggcgtatgtttaaaaccgtagcaacaggtgcattaggcattggcggtatggcatacgagctttacaaatataaaaatcaacaagttgaaaagcctcagatgccatctcctgtctctgaatcctacggtgatcaacaagtcagcaaaatcacccaaaaagcgagtgctttaaaagcaaactatgacccgatgaagcagatggcccataacataacggggcgtaaagaagccgcagaacatctcgcacagggtcaagtccctggcgctcaagcaataaaagaaggggcaagcttagtcgcggctgccggagaatttgctgcggctggcaatgtcggtgaactaaacaaaaccacgctaacaaaagccgccggcaccgacgcaattaataattttagtctcaccttggacggtataaaaaaggtatttaaggcaggcgcggctagtgctaccgtcagcccagaaaaattggaagagctgcaaaaagcaactgatgatttaaaagaggtcgcaacagatacgctaattaccggggcatcgctaggtgcgacagtcggagccacactggataccgccgccgcggtcgtgccacacccggtagccaaagtggcactcaaaggtctgtcattggcatggaaagttaccggcattgttcacaccgcagaagaattaagcgagctcgcagaaaaacataaggatctggtttctaatgagctaggacaagaattaaaaagggaggtcaccgaggcaaaccaaattaggcggggaaccattctcgcaaaagttagagaacacggtttgataaaatagtctattaaatgcaatagtccttattcgccgaagcagataaggactattttgttttgaatcatatgtatcaatcacgaccagaattaacacaagattcttaacatactgatcatactaatgaagtctactctcaccctgctccggcaaatcatcttcatcttgctcatcaggatcttcgaagtaagtgccccaaccgtcataattaatgccaattttttcagctagattcaccaactgttcaacctgggcatcaatcagttctgcattcaatccacactcactgataacatcacaacacatcagaatagtcccatcttcgacttccaattcttccgcatcagtcacttcataacccagtttaaaggcttcaaccgcagccttttccaacagactaaaatcctcagcagaaaagtgatgctcaatggcataaagtgcatctggatcactaccatcttccagtaattcttcaataataagccgcgtttcttcgcgttgttcttctaagtctctctgatttgccatacctaatatcctcaagcagttggccgtcccaatactcattctcccacaccataggcgggctaaccactgtttacatcaaagaaatctaatacggagttgaaattgcatttttatagatatagattgaatttaaatgcaaacaataaatacggagacaccaaacaatgaatccgttccatcagcgtcattttctaaggttacttgatttttcctcagcagaaattcatgccttgctaaagctagctgctgaattaaaatcgactaaaaaatctggtacagaaaaagccctgttaacaggcaaaaacatcgtgctgatttttgaaaaagattccacccgtacccgctgttcatttgaagtggcagcttacgatcaaggagcaaatatcacctatctcggtcccagtggcaaccagattggacataaagaatcgatcaaagataccgctcgtatacttggccgtatgtatgacggtattcaatatcgcggctatgcccaaacaatcgttgaatcgctggcaaaatatgcaggtgttccggtatggaatgggctaacagatgaatttcaccctactcagctactggcagatctactaactattcaggaacatcaaccagaaaaaccattgtcagaaatcaaattcgcctacttgggggatgcccgtaacaatatgggtaataccatgctagaagccgcggcactaacgggtatggatgttcggttgattgcccctgaaaaatactggcccaatgccgcactggtgactgaatgccagaaactggctgaaaaaacaggaggtaaaattactctgacggaaaatatcaccgaaggggttaaaaataccgattttctttataccgatgtctgggtttctatgggcgagccaaaagatgtttggcaacaacgagttcacctcttgaaaccttatcaagtcaatatggatgtggtgagtatgacaggcaatccacaagtcaaattcctgcactgcctgccagcatttcatgatgaagaaacggcattaggcaaacaactcgctgctgaatttaatatgtatggaggactggaagttaccaatgaagtttttgaatcagagcacagcattgtgtttgatcaaggagaaaatcgcctgcataccattaaagcggtaatggtcgcaacattagcaaatgatcttaaaatttaattagttggaatatcggcaggattatgtctttaaagatatgctcctgccaatattatttttcttcggtcaaatgtttgctgtaagatttttcgcgagtataatgcgccacaatttgccgggagaaatcatgaaagacagcgcttatttttgtcatcaagcacaactgcctgaaagaaggcagctagccgtcattgttttcccgttgctaaaccaatcatttaacgcccctcaatgaggggcttttttttgcccggtaatcaattcatgatcgccaccccggatgtcagcattagaggagagtgaaaaatggctaatccgttatatcgcaaacatatcatctcaataaatgatctgagccgcgaagatctggaattggtgttgcagactgctgctacactgaaagccagaccacaacctgaattgctgaaacccaaggttatcgccagttgtttcttcgaagcctccacccgtactcgcctctcttttgaaacagcaatccaccgccttggcgcttcagttgtcggtttctcagacagcagtaacacctctctgggtaagaaaggtgaaacgctagccgatactatttccgttatcagccaatatgttgacgccatcgtgatacgtcatccacaggaaggtgctccacgtctggcttctgaattttccggtgacactccgattatcaatgccggtgatggtgctaaccaacatccgactcaaaccttgctggatctattcactattcaggaaactcagcaacggctggatagtctgaatatcgcgatggttggtgatctgaaatatggccgcacggtccattcgctatcacaagcactggcgaaatttaatggcaatcacttttattttatcgccccggaagcattggcaatgccaaaccatattcttcatatgctgaatgaaaaaggtgcgacctacagccaacacgctaatattgaagaagtattaccggagctagatattctttatatgacccgcgtacagaaagagcgccttgatccatccgaatatgccaacgtaaaagcacaatttgttctgcgtgcttccgatctgatcggagcgaaagagaacctcaaagttctgcatccattgccacgtattgatgaaatcactgccgatgtcgataaaacgccctatgcttattatttccaacaggcagagaatggtatttatgctcgtcaggctctactatctttagttttaaatgaatgattaaagtaacgagaatataattgaccatgttaattttatatttaagttaatccaaaatacttcttgcccattaacgggcaagataaaattaaaattcgttaaataattatcttttaacctgaaaaataatttaaattcagtctttaaataaagataataaacaattttccataggaataacagaaaacaataaaataagaggtatcataattatgaaaagttatttatatccattgaatatttaattctataattaagattataccctatggatttcaagatgcatcgcagcggcaagggagcgaatccccgggagcatagataactatgtgaccggggtgagtgagtgcagccaacaaagaggcaacttgaaagatgacggatatagatattcttttaactataaaataccctatacttattaatattgaaaataaatattaatcttggatttaattgtttataaatcagttcaattttaataattaatcctttaggcattaaataatttattaaactttaaatgacaattttaaatcctatattatccattaattttaaatataaaacagatacttactctattacctattttacaatcccccaataattacactaaaaaaacaaaaaagtatgaagtgtaaatagctgctgaaaaccctctaccaaccatttaacctaacttaaatttcaacattaacaatataccctatgccaatgtttctgcctcatttctgcaataaagtcagagcagtctgtcataaatacctccagccagacacaacagacactaaacccgaagttacaattctaccagtagaggaaacatgatgactatttggacattgaaacaaattgttgcactagcacaagcaaattcatcgccttacagagaactttacgctggtctaagtcctgaaagcgccactctgttggatctgccggtcctttctcatgaaagattaatggaaattgttcacaacaaagatgccatccgtttctttaataccgatacgagtgcaggcattatctatcaatcctctgccacaacctgtctttcctacacaaatattttaacccgcccccgcgttattgaacttttccctcatagattgatctcaataaaaaacacgacttgaggtaatctttatgttttcaaccagcgccgaacaatgggcaaatgacacgtttcaacatgcggaattaggtgataaacgccgtaccaaccgcctggtgaaagtggcctgttcgttggctaaccatataggacaatcgctcgtgcaatctcttgactctcctgccgatgttgaagcggcctaccgactgacccgaaattccgccattgcgcctcaggccatcgccgaagccggatttaccgccaccgtcgctcacgctcaacgttatcattgcctgttagcgctggaagacacgacaaccctgtcattttcccatgcgtcggtcgccgatgaactcggctataccacctcaaaggaaaaatcccggggcatgcaggcacactcggtgttgttatttgcgcctgaagaacaacaggtcgtggggttgatagagcaacagcgctggtgtcgagatgtcagtgattatggcaaaagccgacaacgcgatacacgcccttatgaagggaaagagagttataagtgggaacgggcctcacaagccgtcgacagccggttaggggagcagatggccaacgtgatttctgtctgtgaccgtgaagccgatatcatcgaatatctgcgttataaaacgagccaaaaacaacgtttcgtcatccgttcgatgcaaaaccggcgtatagaggaaagtcaggataaactttatgactttattagccggttacagagtgctggagaacgattagttcaggtcagacagaaaggcgggcgtcaggcgcgtgtcgcgcattgtgatatcagttatgccgaagtgacgttgaaaatccccgaaggaaaaagcggtgaggcggtgcggatattttatgtcggttgctacgaaaaaggtccggaggatgggctttgctggcatcttctgacctccgaacccgtcaacagtcaggaagacgcccataaaatattcagttattacgagcgccgctggctgatagaagaatttcacaaagcgtggaaaacgggcggcacgcaggtagaagcgctgcgtatgcaaagcaaagataatctggagcgcatgatagtgctgctggcctttattgcggtacgaatacaccagctgcgttttatgggtctgaacaaagaagaggcagagaaagagagctgtgagacagtattaagccccctggcgtggaaattactgtggtcaaaacaagaaaaacgccgtgtgccgaaaaaagccccgagtttgcattgggccttcatcaatctgggaaaactggccggctggtacgattccaaacgcacgggtcgagtcggatgggaacgactttgggaaggctggtttcggctgcaaaccctgatagacggctatttgctggctaaatcagttgatttggagatctgatcaagagacaggccacaacggggaagcctaaagcttacgctagtaccttatatcacgcctaccttgcttatatgaaaggcaataacctgaataaaccgatttctgtaacccgtttatggatatgccgggtgcattggcagagtacgatcagcattacctgcgcaagatataggttatcaaaagtagatgtgttatgaaaataacatacttgatccaataaaatacaatagtactgtaaaggcaattcttagttttctttctggaagagtattggctaattttgctcctaacaatgctcctggtattgttggtattatgaataaccatagataattataatttaaaaaacctatatttccaggtggtaagttatttttatttaggccgagtgatatcataaatattagtacaaatacagaatacaaccagactacaacagttgttgtccctattgattttttaatatctaagccaatgctctcataataaggaacaacaaatgaagctgccccggacaaagttgatattaatcctagtaaaaaacagccaatataacgaaatgaccagccaagatctctatttgtattattttgttgggtattagaaattaatttttgtgttgacctaatcgccaaaattagtgttgctaaagagaagacatatataaccgatcggcttgaaacaacagtcatggtaaaacaacctagtattgaaccaattataattagtggagcagaccattttagaacattccaatcaatatggttgtatttgtgatgtttaacaatagcaactagaccagatatcattagagaagctatcatcgttgtgatgctagtttgcatgatataactagaatttgggttagcataagataaaaataaataaattgtaggagtaaaaatcaaacccgctcccccaccaaaaagcccagatagtatacttccagcaaatgcagatattataattaatatatctatatacatacacgcaccttacattaacccgaattctggataagaaattgacgaaaaacctgttccaagagcaaagttttggtacacaccaaaaacagctccgaggtggaatgggctatggacaacttagttgaaattttctgtgatgtcgatgatttttttccattttttcatctctcgatgagaacaattttatctcgatagcgggcatcgtttacgcctccgacaagatcacatgtatcccagtgaaatcatgaccattttgatcctttttctgtcacattaccgtgattttaaaaatttttatctagaacacatttggaaatatcgccacgcagcagaagttgcagcgtcttgattttagagatttgattacacccttctgtagcgaaatcaattccaccttctatgaaggcagatttttactataggataagccaatctctgcacgaaatagctctactaaatattgaattatcatttataacatctagcatagaatagctattttgtatcaattcaagccttactaattctggatctgttttatcttgaaataacctagttgcagtgtgaaatcctcgatttataccaagaccatgtctaaagtctgtgctagctaaactatctccgacagcgcaagctgttactgaagaaatttgattatgtaatgaattattatcattcgaaaagataagattaatttttgttgttactttatttgttgataaccatctctcggctctagatggtataaaaataactctaattttcattaaatctaaaaagttttcttcaagattagcatatgtgttttctatagttactcttttatttattatcctacgaacgactaaagcaagactgtctgcctctgaccaattgaaaccttgcaagtgattaatgaattctaatccattaataccagaaagtttatttcttctaatcatattgaataagtcaactgctcttttatatagaaaatgatctttcttaagagatgttattttttctaagaatggtggtaattttattgaaaaaggtgttgtatcaaattttagaaatggtaatttggtactcctgtgatttatagaatacccacattcttcaaaaaattcactaaatttatcagacggatatgagaattcagctacagatgagtttccttcgctaaaaaagattgtattttcatgacagtcatgaaattcagtttttttattttcaacatgagacatttcatgttctggccaggtcatttttagagctgaaccgtattcatgctcactttcgaattgaatgcctattgttttattcattaagatggaatggtatccagttgcatctacaattaattccgggtttaaattttttaaaatactattatcatcaaagtgctctgtaaaaatagaaattgaaacaatatccttgtcaaaggacatatcttttaatcctaccatgaaaaaacgatttttataaaatttttccatattttctagaatagtggattgtatgttttttatactcatgtgatctaaatcactatacttcttccgattatcttcataatcttctttaagtactccataaggacactttttcactatttttggaagataagagagagaaaaaagctttcgatgaaattgtacaaccattgatctttccgcccagcctttaaaggtgtaagcagaaataaatcgcttatctaagatcaatacattttccgcaaaattattttctaatattttaaaagcagaaaatagacctattgggccagcccctaagacaataaccgtttcgtatttattattcatatatacccacttattccataaaggcccgttgctgttccgcattgaacttgtgtggtacgccggtcggttttttataactaaatccattgtgtggtgctcatgccgggaacggtgtaattgatatcccaccacgcttcgacaagacggataacagcctgtgtggtgggcagaagattcgcggtcagataagcgataagttcctgagtctgtgtttcgctgagatagccctgagaatcgccattgtcgggcttgagtttgcggtgattaaggtaatcgctgatatgacaattaacggtcgtttcatgaagacgcagagcctgagcgatcatcactgaactccagccctcagaggccagcaggatcgctttgatacgatcacattccctcttatcacggcaggtgtgatggaagtgttcaagttcggctttttgttcatcggtaatgaatattttcatgactgataccatgagccttagatacgtttcttagtactttttaaaaactcttgaattttatataactcaattagagcattctttaatctcccttggatccacattataagattaaatactgaactcaccatgctctccatttaaaaataatatcatgggtaaatcgattttctttttgaaatagcacccatttatagaaaatggcgtgttcataagtagatttttttatatattaaaaaacatgccttcattttaaatcatttcaaaaaaaattaatactgtttttatatgaatttgcttttttaatttcaagtatttatttttcattttattaattatgccaatttattattaacttttaatatatttacagaaaattaatatttttaattattaaccgtcattccgcacctaattcctaatttaaaataagtatttctcgaccaactagccggctttcatgggacatacagctgcctttctgtacttcaaaatgaaatttcactattctgtgctaactcacactctctgcggtgatatggctttctgatattccttggtagattgtcctgtcaggaggagattgggaacaatttgtagtactgaatcaccggcgctttatctggataaacgaggtaccaccgcctaaaatggaagacgtgtcgattcttaacaatattctggaggatgaatacagaaagttgtcactaaaatgtattcatacaaaacactatgacccaagatcataaactacaagtcgaagctattagatgcggtacggtgattgaccatatcccggctcaggtcggcttcaaactactctctctgtttaagctaactgaaaccgatcaacgcattaccatcggcctgaatttaccttccaatcgactaggtaaaaaagatctcatcaaaatcgaaaatacattcctgacagagcagcaagctaaccaacttgctatgtatgcaccgaatgctacggtgaactgtattgaaaactatgaagttgtgaagaaacttcccattaacttgcctaagtgtatcgataacgtattagtctgccctaacagcaactgcatcagccacaatgaacccgtagaaagcagttttcgagtcaaagtgacagtggaagatgtggtgctaacctgcaaatactgcgagaaagaatttgaccgcaatgtggtgattctcaacgattgaacgatctatacccgttatctttcaagttgcctctttgttggctgcactcgctcaccccggtcacatagttcgctatgctcccggggactcgctcccttgccgtcgcgatgcatcttgaaatccatagggtatatgtcagttgctgaggcagaagcgggcactataatagtacccttgatgaaatatttattcagttatcacattaacaggagaacctatgtcatacgagattaataccaataaagccccagcggcaattggtccatatgttcagggggttgatctaggcaatatggtcatcacttccggccagatcccagtcaatccagaaacaggtgatgtcgcagaagatatcgccgctcaagctcgtcaatcactggaaaatgttaaagctatcgttgaaagagcaggtctcactgtaggtgacattgttaaaacaactgtcttcgttaaagacctgaatgacttcggtaccgttaacgcaacttatgaagcattcttcaaagaacacaatgcatctttcccagcccgttcttgtgttgaagtagcccgtctgccaaaagacgttaaaatcgaaatcgaagctatcgcgattcgtaaataatccctgccctgttttctacaaccccttggttagttactgaccaaggggttgtacttttcactgaaccttaaaatattaagtctccattctttgtttcagatcaaatgagatcgtgattatcccactcaaaattactatatattgtgtttaaatataaaaataagactatatatagcaacatctatcttcaaactggatatcaaaacgagaatagtttgcccttcggataacattctcaaggagtcatattgtgaaaactgttgtgataaaacgggatggtcgccaggtaccatttgatgaaacacgtatcagagatgccgtaaaacgggccacttctgccgttggcatgacggatgatgagtattgtatccaagttgcatccgcagtaacgcaatcaatggctgactacaggcaagttgatgtacaagatattcagaacgcagtagaacatcaattgatagcaaacaagcatgatcaccttgtccaccgctatattcaatatcgtcacgatagggatactgtccgagaattacacagccgacttaatcaagaaatccgtggcttagttgaacagagtaacgtttccctactcaatgagaacgccaataaagacagcaaagtgattccaactcaacgggatctgctggccgggattgttgctaaaaattatgccaaacaatatattctgccgcgtaatgtggtattagcccacgaaaaaggcgaaatccactatcatgatctcgattattccccctttttcccaatgtttaattgtatgttgatcgatctgaaaggcatgctaactcatgggttcaaaatgggtaatgctgaaatagaaccaccaaaatccatttcaaccgcaacggcggtaacggctcaaattatcgctcaggttgccagccatatttatggcggtaccaccatcaatcgtatagatgaagcattggcccccttcgttaaagccagctatgaaaaacatttggcgattgccgaagagtgggatatcactgataaaaaatcttatgccgaagtacgaacagaaaaagagtgttatgacgcttttcaatcactggaatatgaagttaatacactgcataccgccaatgggcagactccttttgtcacttttggctttggtctgggtacatcaaaagaatcccgtctaatccaacaatctattctgcgtaaccgcattgctggtttgggtaagaaccacaaaacagcggtgttccccaaactggtatttgctatccgtgatggcctgaatcacaaactcggtgatcctaactatgatatcaagcaactggctctcaaatgtgccagtaagcgcatgtacccagatattcttaactatgatcaagtggttaaggtcacaggctcctttaaaaccccaatgggttgtcgcagtttcctcggtgtttatgaggaaaggggggaacaaattcatgaaggacgcaataacttaggggttatcagtttgaacctgcctcggatagctatcgaagccaaaggagatgaaaaacatttctggcaattactaaacaaacgtctggcactggcaaagcaagcactaatgacccgtattacccgcttggaaagtgtcaaagcacgagttgcacccatcctttatatggaaggtgcctgcggggttcgcttgaaagccgatgataatatcgctgaaatctttaagcatggccgggcctctatctccctaggctatattggtattcatgagaccattaatgcattgtatggcaatcaagttcatctatttgatgatcaacaattacgtgtaaaagcactctcaattgttgatcatctgcgaaaagccactgatcaatggaaaaaagagacaggttatggtttcagtttgtacagcacaccaagtgaaaatctatgtgaccgtttctgccgccttgacaccgctgagtttggcgtgattgaaggagtgacagacaaaggttattacaccaacagtttccatcttgacgttgaaaagaaggtcaatccttatgacaaattggattttgaagcgccttatccatcactaacaaatggtggctttatctgttacggcgaatatcctaatctgcaacataatctaaaagcactggaagatgtctgggattacagctactcacgtgtcccttattacggtaccaatacccccatcgacgaatgctatgaatgtggattcaccggtgaattctcctgtaccagtaaagggtttacctgcccacgctgtggcaatcatgaaccttccagagtatcagtcatccgccgcgtctgtggttatctgggaagccctgatgcccgcccattcaatgcaggtaaacaagaagaggtgaaacgcagagtaaagcatctgacaaatgggcaattaggctaatttaaggcaggctgataacgtgaattaccaccaatactactctgttgatgtggtcaacggccccggaacccgctgcacactatttgtcgcggggtgcgaacatcaatgccccggttgttataacaaaagtacctggcgggtgaactccggccaaccatttacgcaggaaatggaagaccgtgtaatttttgatttacaggacaaacgtattaaacgacaagggctatctttatctggcggagatcccctacatccacacaacacatccgcaatcctgcaattggtaaaacgggttaaaacagagtgcccagacaaggacatttggctttggacaggttatcggctaaaggaacttagcgaaattcaacaggaaattgtcagctatattaatgtgctagtggatggcaagtttatacaagagctttatgagcccggtttactatggcgtggtagctacaaccagattatttatagattaagataattttatcgctgccagcagatttttttaccaaatccaagcgtattatcagtcatctttatttcattgagattcagttgccaaataggtgttttaacagcaattgacacaggaaaacggcggcaataacgtgctctggccactttatctttttcaccctcaagacgaatgacttctcctttgaactgaataccttttatctgtgcaatatgacgaatctgcccggcaatggtacctgcaacttgtggatttacctgcatcatttcaccgtggcgagtatgaagttcagtcataaaccaaaaggctatttcatcggcattgaaaacatagaaacaatttgcgcaccaaacatcatcaccggttgctgtacaaagcgttaggacatgctgtcttgcgaggtatctgtggataatctgaaagttttcagtcgcgttcactctctctccaatagcaggattgtatctgcctcgaagcccagaaccacgccgggataaacatcatcctacggcgtgttctgatatctcctgacagggacagggttcagtatgctctactataaattagttatagatctcagcaacacctgataattgattcttaccgctggcagagataatacggaaagaagatgcacctgctttgtcagcttttttggataattcggcacttagggtttccaaagtatcagcccccgttacagaaactacaccaattttaggggaagaagaagtttgaacttctgttgccgctatactaccaaaagagatagcacttaaagctaaagcaacagcgatatattttacgtttttcatactatgatccttgatcaatttttagtggaatgagttactctctgtgatgtggatcatagtatgctctaaaggccggaataaaaattagcaattattgctattttatttcaatttttttgaataaataatgcgacgtatagcaaattgatatgtaacaggttttataaaactgttatattgtaataacttaaactaaattattcagaaaaatgatatagaaaaacgttcgagtaaaatataaatatcaaaaatagaaaattcagaaaaaaattatatggctgaaaatcaatgggttctttacttactgaaaacaaaatcaggcatgctttataccgggataacaacaaatattcaccgccgttttgcacaacatgaaaacgggaaaggagccaaatcactgagggggaaagggccgttacagctagttttcagtagttatgccggagaccgctccaatgcctcacaactggaatatcaagtaaaacaattaagtaaacagcaaaaagagaggctggttatttgccagcccgtctgtatagcagaatatttagcatcaattagaaacggtcaaagtgtgaggagtaagtaaccaaccccttatggtcagccaaggaactatcagctaattcatatacctgaaaataagattcacacgttgaccactggcaatgcaactgatgctcactggcaagcgtaaaaccaaaccggcaatagtagtgtggatcacccaaaacaacgacgacgccatagccaaattcattcaggctatccaaaccttcatacaccagcttttcaccaatcccctgccgacgatattcttcagcaaccgctaacggtgccaaaccaacccattggtgatcttcaccattaatatccaccggactaaaagccacataaccgattacctggccttcgtcatctgtagcaaccacacctaacgtcaataatccatcttcccgcaattgttggaccaattccgcttctgccggggtatcaaaagatttccgtaataattgatctattcccgctgcatctactggaatttctactctgatcaacatgataattgcgcaagatcgtgctgttccgcgccctccggcaaactcgcttttatacacttaagccaattgggaccaaacccgcacaaagaacagcaagcatgaacttttttgctaacgtatctaccaaatttttaacacacaaccctaattctgtacgaataaccattagaatcagataattggcttcgtcgctgaaactaacctcttcctgcttatactggttgataactaaatgactatcacgaacagtaataaaccagtgcagagtaagattgtggatttttcctaacacagctcagactccttacttgataaagtaacgtagctatttagccaaaatatatcggcattcgcccgatcctacatcaagaatccaatacagacctaactgtaaattttaccttttaattattagggtaatatctgactataaactgcgctaaatcaaaacatcccaccactaattcaattacaattactaatcatttattactttattccggtattttatatggagtaactttgccccacaaaaaatttatttacgtgacacagttgtcgtcgataacgaagaagaacttatctatatctgtctgaaatatgatattaaagcccatgattctttaatccaaatggaaacaaaagcatctcataaacatacagttatagaaaaaaatgtaaacataagttgcatgctgaaattaaaatttacacatactgattatagccgattgcaaatttttggcttaatgtatggcatcagtccatatgtatttcttaaattattgagagagataatgcgaaaaagtacgcataggatttattaagatttgcttctttattgattatccttgggctgaattgtcacaaatgtatatagtttaatccttatacaataaataggaacagtgtatggaaagccaagatatttattcaaaattcattggtaagaggataaagctatggatggatgagcgtttcccgctacaaaatgcgccgcttttctttatcttttatatcattagctattccgtagctttttattcaataggggaaaagcccattttgtcatgggagatcctgctcggttgcctgatgtccttctcctattttttactattacggatattcgatgagcataaagattaccaactggattgtgaacatcatccacagcgaattttacagcgcggtattattacgctgaaaaatctacgggtacttggtatctgttgtatcgcattacaattaggtggaagtctatttctagatcggggaattggctcagttacttttgcctggctgttggtctttatctggacctgtcttatggggaaagaattctttatcggtgaatggctaaatcaacaccttacttggtatgccatttcccatatgctggtaatgccactcattatctggtggttaagcaatatcgccagtcctaacctcacactcaatttcccaatatgggttttgatgggattgtgctttttctctggattcagttttgaaattacacgcaagtgtaaaggcccagatgaagaacgtcttgaaataccgacctattcatctattttcggcagaaaaggagctgtcgctattatcgcggcattgctcactgtaatgctgatattacagatttggctaatccgtatcaccactgatggtatagcgttatgggcgttaattaccttggtcgtttgttatgcattgtgtctatggcaattaggcaaattcctccataaccctaccatccaaaatcgcaaacgcgatgaagctatcgtgggaatattcatggtgctaggttattcagtttgcactgctagcattttaataaagcttgggtttgcttaggcattaaaggaaatacagttatgttgcaaaaaaatctccaatcatatgtatgtgatgtttcagataataccactgcacacacagaaaactgtgcgcgaagttctattctagaattatcacacgatacatttagccttaaacaccaagaagcaacccaagtagaattactgccacgccgccacctctatacttatacagagaaagcccggcaaaaacgtctggattatttagcaaaacataccggacatacattgaaacatgtagcagatacccatctggatgcaacgcaattaacaaaaaccattgaagggtttatcggttcaatagaaatccctgtgggaattgctggccctatcttgataaaggggcaatatgctcaaggggtatattatgcgccacttgccaccacagaaggcgctttaattgcgtcaatatcccgtggctcctcagccattatgcaatcagggggtacaactgcgcgtgtacttggacaacgaatgatacgtgcccctcgttttgaattttgcagcgtttcgcacagcattatgttcagtgattggatcaacgaacatatcagcgaactacggtatgaaattggacgccattctaagcatgcacaattggtggaagtaaagccacaaatcatcgggcgcagcgtccatctgcaattcatctataatacagccgcagcggcaggtcaaaatatgaccaccatctgcacctggtatgcatgtcagtggatccaacaacagttagccaaaatggcgtttataccactgcgtcactttataatcgatggtaatacttcgggcgataaaaaagtctcttatcaatctttcatcgaaggacgtggaacacgtgtagtagctgaagtttatctagaagctgaatcctgtcagcaaatattacgggtcactccacagcaactcgtcacggcttatcaccatgtctgcgagggcgctatcgcctcagggatggtcggcataaatattaatgccgcgaatgttatcgccgggatgtttaccgccttagggcaggacatcgcctgtgtacatgaatcttccgtcgcgcatttacacatgacattgactgccgataaccgtgtctattgcagtatcacactgccctctctaattgtcggtaccattggtggcggaaccaatttaccacaccaacgtgaatgcctgaacatgttgggctgcactgatgaaaacggcaccgctcgtctggccgaaatcatcgctagttattgcctggctcttgatatttcaacactgtcagcggttgctgcggatgaatttgcgcaatcacatgaaaaacttggccgctatcgccctgtcaccactaacaatatcactgcgcacaccccacaagagcttgatttgcccttcttccagcaagcaaattttaaccctgtgttacaaggggcccatttaacgacaatcaaacctaaattttcgggtgatgatgggtacagcatgctgacacatctaagttcaaattatgcggaacgtttaattggcttatttcctttttctatgacgacatccgcacagaacaatttatccgtgatgctgaaattgaagcctctggggagtgaggtcgtgaatatggtactggatatcgctaaacactgctcttctgagttgtttgccgttttccaggattttgaacatcagcttgaatttaaccaaagccatagccgtgagctggctattatgaatcagcaagatccacggttgatgcgctatattcccgttatctatggtgtgattgaaaacgaagcaactggaacttatgccctgattgaagaattgctccacgatatggtgttaatgaacaatattaacctggaaacaccttgggagcagcaccaccttgaagccgccatccggggagtagccgatattcactctatctggttgggacgggaagaagagctcacgtggaaattctcgcaactgcaaattccgaatgccgatacagtttcacagatgaatcccctgtggcaaaaactgggcaattttatccaccaaacgtttcctgagttgttcactgccgaacaacatgaagatttccagcactgggtggataatgccgccacttggtggaaagagatcgaacagatgcccaggacattgatccacggtgatttcaacccacgcaatattgccttccggcaacaggaaaccggcttgcatttatgtgcttgggattgggaattgtctactttgcatctcccccagcgcgacctggcagaacttctggcctttagcttagacccacaaagtgatgcagataaggtggcttattatattgaactacaccgggttgaacttgagcaaaaatcggggctctccctcgaccccataatttggcgtcgtggctatgaattagcgctgcatgatttatggatgagaagaattccgttttatatgatggcacataatgttgttggctacccatttatggagcgcacaatgaaaacgctccgctggcttatttcattaacacggaattaataatcaaccaaataaactatttaattgactcttcctctaaaataagggtgcagcaatagcttgtaatatattcatatcttattgatctattcacgccaaaaatattacgtgcaaataagagcatgatgtaagcaagatatactattgctgcattggtggaacaatatgaaatatctctacacgcaagataacgctattgaattggcggaacattccttaggtggaaaagcggctaatttattatggcttacgcaaaacggttttcctgtacctaattattgggtcatcagcagcgaggtgcttaataacctactcatcaacgatacgtttgcaagcaacatcatagagcagttggctaccgtaccacatgatattagccaggaaaaactcgatgctattgctgcgccattgcgtcagtggctacagtcgattccattgcctgctaaattagaagaagaattagctctcttgtcagagaatcacccagatgaatttttcgctgttcgctcatcagccattggtgaagatgccgccaatgcttctttcgccgggcagatggacagctacctatttcagcggggtaaatcagcgcttgccaatagcttacgtgccgtgatggcctcagcttttaacacgcgtgcattacaatatcgcctacacaaacggctaccgatgggcaatatcagtagtgctgtcatcattcagaacatggttgccggtgaagtttctggtgtcatgtttactgcacaccctgttacgggtagcaggcaacattgcctaatctcatccgcctggggcaccggagaaggtgtagtttccggcgaatgcgataccgatgaattttcagttcatctcacctcacctgagatcgaacgtcatatcacacaaaaagagacagcaactgttttcaatactaccaacggcagcggtacagtaaccatacccgtcgcgaaagaaaaacagtcggaaccgaccttactcgataataaaatctatgcactacgagatattggcaaagaaattgcggcagcacgggggtgtccacaagatatcgaatggacgattcaaaaccaccaaatctttattctacagacccggccaataacccgattgccacgtctggatgataaaagcgaacatcatattattttcgataattccaatattcaggaatcttattgtggaataacaacaccactgactttctcttttgcccgggcaggttatgccaccgtttatgaacagacaatacgtgctttaggttgctcagataaacaagttaatcagcatcgttccatgctggaaaatatgctcggcttagttaaaggtaggatctattacaacatcaacaattggtacaaaggactactattacttccctctttccaaaccaataaaaaagatatggaaagaatgatggggctggaagatccggttgattttattgaggataaaacactttcactgggcgataaaataaagaaattgccaaaaatggggtgggcactcctgcgcttgctatatgcctttaggactatggatcaacgggtagaactattcttagagcagtttaaatggcatgccgccgccataaaacaatcagagttgcatacttgcaacagtggccaactgatcgaaaaattaaaatatctggatgaacatctgctacgacgctggacgacgccgatcctgaacgacttttacgtgatgatgtttaatggccgggtacatcgagggctggttgctgccggtattgagaattcatctgcactattaggcgatctcctctccggagatgaagatattgaaagtacccaaccgaccaaagtgctgttaaagatgtgccaatatgcacgccagcaccctgagttgtgcaacctgttgaccctcggtgatgcgcgtaccctgctgacccaagtacgcccactcgatgaatcattccaccagcagtgcattgattatattaaaaaatatggcgatcgcacgatgggtgaattgaagctggaaaccatcacactaaaacaagatcccagttttttatttctgatactaaaaaactaccttgctatcgataccctcacaccagagacgttatccagccgggaaagaaagttgcgtactcaggccgaaaataccgcatttcagcaaatacagcagcgacttggctccaagcggatgaacacctttaaaaagaatttgcagaaattacgccaagcgatacgtcaccgggaaaatatgcgttttacccgaactcgtatgtttgggctgtatcgagatatcttcctacaacttggtcaggcatatgcattagaaggaatactcgctgaaccccgcgatattttttatctcacgttagaggagatctacagcggctacgaaggaacagcaatacagacccaacttgagcctttagttgctatgcgcaagcaagaatatgccaactacgaaacagaggatgaaccagctcatcactttttcattagaggctcactgtatcaacagcaagattacagctatccctatcaggaacaacaagccccaaccgatagcagcatgctacagggtataggttgctacccagggcaagttgaaacaactatccgattaattaaaaacccacaggatgaaatgtcactagcagggcaaatcctgtgtaccgtacgtaccgatcccggttgggcaccattattccctacagcaggcggattactcattgagcgcggttccacactttcacattccgccgttgttgctcgtgaactggggatccccgccattgtcggcattcccgccgtcacacaaattttaaaagatggcgatcgggtacgcatggatggagcaactgggactgttgtccgcttgcacgacaccactgtagaagagctgacatcaaggagtgaacatgcctaatattttcatgggagaatggtctccggccaatccactacctgaaggttttcttgaccttccacccagtatttatcgcgattggccgctatggcctggtgaagaccgggaaaaagtacaacagcagtttagcccgaagaattcttggtttgatcacagtaaagcctggattggctgcattccagggaaagcccgtcttgtcggctttttagtacctcatagcgttgatggccaatctgccgcatttttcggcttttgggaaactgataatgacatagcaagcaacaccatgttgtttagcgctctagaacaatgggccaaggaaaatggtgcgtgcaatctctacgggccgattaatttttcaactttcggacactaccgcgttcgacttgatcattttgatgtgcctccctttgagcatgagccttataaccctccttactacccccttttgttaaaagagttaggatttgatatccgctatcgctatacctcaatattcgacgatacccaagcaacagaagacaactttcagcaggctcatcaacgtgcgcaaagacttcctgaggttcaagcgacattattgccgctaacgccagaattatggatgcaagaacaggttaaactctattcttttatcgactcggtgtttggtgagaatttcgcttatgccacgccatcttggcccgcatttcagcagcattgcggtgaggagtttatcaaacctttttgccattaccctgcgtcatttctggctaaaactcctagtggcgaaattgccgggataattttgagtctgtcagtcctgcaaaacggtcagcccaccattgggttgctgaaaaccgtggcagtcgcaccgcaataccggggcagccggctgtacaacatgctgtaccactcatttgaacagagtgccagacgtattcaccctcgtctaggaggggccatgatgcgtgaagataatacatcgctcaaaactgccaaacggcttttcaatacacctgctgccaccaagcatcaatatgcgctttattacaggaggatcgcatgacaaatatttgtcagccaattgtcgatgcagcccaaaaatatcctgagcatttagccctgcaagcgccacattcacgggatcatagtagcggtttaagctttcagacgtttttttctcatgcctcccatttccagcatcagttaactcaagctgggttcgtcgctggcgatcgcttgttagtgattatccaaccaggcttagtactttatccattgcttattgccattctggggctagggctagttcccgttatgcttgaacgcgggcttgccaaaaagcaactgagggagatactgcgccacagtcaattatcggcggtgatcactcaacctacgttaggaaaattctggtttctgctccctgaactctggcgactgcgacgttttgtcatcgggcaacgtatcttgggcatgaaagtactagaaacacccaatcaacatttaccattgagtagctttatctgccgggatttaccgccggatacaactgggttaattacctttacctcgggttctaccggcacccccaaaggcgcaaaccgcactcatgacagcttactagcacaactttatgccataacagcactttttgccgaggggaagaatgagatagatctacacagtttccccgttatggtgctgcactcattatgctgcggcaacagcagtattttgcctgattttgacttttcccatcccgcaaccgtcgatccacagcagatcgtcaagcaagtgcaaggcgaaggtattacatgcctcagcggcgctcccgcctatatgagcaaaatcaccgattatgctaagaacaaagggttgtcattccctaacgtgcgaacagtcatcgtaggtggtgcgcctgccaataaggctctgcttgaaaactgcctgacagtctttccacatgctcggcatttagtagtctatggttccaccgaggttgaaccgatcagtaccgttgaaatgacgactcaattaaaccactgggcaactcatgatggttatctagtcggaaaacccgttacacaagcagaaatatgtatccgggaaataacggctaacccccaacaaattactccactcgccaccggtaatgtcggtgaaatcttagttgccgggccccatgtgctcaaagactatattgataaccctcaagcaacgaaagaaaacaaactcccacgtaaacaaggaggtatttggcactgtaccggtgacgtcggctatctggacacgacaggacagctctggctacttgggcgggtaaaagacaaagtggtgttagatgatggtcgtatcatccatccctacgtactggaaaaaaggatcaatgaactgcctggggtcactcaaagcgcattcgtgttacatcctttaggcggagccgccctgatactggaaagcgctacactaccgacagatttacccgctattttagacgagctggatctcacgctggttactcgtatttattgtgctaatcctatccctgttgacattcgccacaacagcaaaataaaccgcattgcgctgatcaatatgcttaggaaaggccaattgtcctccgttccatacaaggaaaaattatgaataataatcatttcatcattcatctaaacagagcagactatattactatcgttggggcggtatttagcgctcttgccgtggctgccgcgttacaacattggcattacttagcgattgcatttttgtatcttgccatgcttggcgacgcacttgatggtattctagccagaaatttaaatattgtccgcccgtttggccgctatcttgatggatttatggatcaacttatttacttgatctctccggccattatcctctacctttccggttatcaatcttggtattccctgtttatcattttaatgatcattagcggctgtctgcgattatccgtatttaatgaagttgggaatattcagaatgaaaaccagctctcctatcttggtatgcccgtattctggagcttatttattatcagtggttacgctttggtaagcttggtagccgagccgtggttaagccatctcttactgacattagcgctccttacattcagtatcgccatgctatgggaccgcccgttttataaattcaagagtctcaatactattatcagtacaacacttgcagggttcgtcttatttactggtcttcatttctggagtctttatgctcaatagtttttatcacggatggattttaatgatccccgtcatccttggtggttgtttacatatggtgattgtgacgaaaaactatttttcccgctgggctattccagtacatcaacgttattttggtcgcaacaagacctggcgcggttttattgttgtacccattattaccgcgctattttcactattatggttagttcccagcaccggaacacaggacacggttattccgcagacgatttcctcctgcttatttgccggttttctggcgggcttaggctatgtccttttcgaattaccaaactcttggctaaaaaggagactcggcgcaccaccggggcaacacccggaacaaaataagcgactgtttattttattcgatcaacttgattccgctattggcgtcacaatagcctattttatttatcttaatctgacttacatcgatgcatttttcgttttcctctgttttttaatcagcgccttcgttgttaaaaatatattgtttttattttcgctgaaaaaaacgagattttaagcgaggaaatcagatagaaatattgcaggaaaatggcttcctttaacggaagcctcttagaacaagtagatcttaagtatcaccaccaacagaacacacattctgtagtattacttcgcagttaaagataactcaacaccacatgcagcagcataacgtttaagtgtgtgccaactagctttcgttacattcttctcaatacgggtaaccgcagacggattaattcccatccgtttagctatatctattttctttagacccgccttttcccgccactcagtgagttgttccagcagctcatattcttctgtagcctcaacataggcttgtatagcttccggtgtattaagaagtcgctttctcacttctgaatgtgagataggagttactttagccatatgtcatatcctccaatcgtttcagtgctaactctatttcagatggtggtgttttatctgttttcttcacaaagcatcgtaaaatgtaaacctgcttcccttgtgaaaaaagataatgaatagatacttatctcagaagggattaaatcaataagttaatggtgaaatatttataaaaacctagaaaatgtaacctcgcaacctaaaagaaagaaaccatcgacaaaacacaattcagcgatacattgatagaattgacttagactatatagaaacataaatcatcacttaaacaccctacgcaaataataggttattttcctgaattcaccattacgcaccatacctatcaaaattcctagcagagtataaatcacaccaagaaccagcatcatagcgatatctcccaatacattctgtactggcaatcccatctgggtaacaccgggcaatcgcttttggtgccccaagtagacggtaaagcagaagaaattgctctcacccaatcaggcattgcctgcaccggccagactgtgccggaaatatagaacacaggcgtggtaagcaaggcgatcgttaaatagatcatttctacacttcgcatacattccgttaccaatttccctaatccgagtactgccaacataaataggaacgtcagcattaataacaacggaatagacgcctcctgccggtatcccaatacccacggccaaagtacaaaaaagatgatggagagaaaaagccaaatcggtaataacgccgacaacgctcccaaatagacaggtaatgggggtttacctttcggtgtaccacgtattgtaatactgacccgtacacaagatatcaataacgagtgttgtaataacatcaccaacaaaccgggaaaaacaattgcggcaaaactgacaccagggttaaataatccaatagtttcactacgaatcggcatcagtaataattctgtctgctcagggctaaaaccatattttaataataatttgctgttatattcgtttagcaattgccggtgagcagaggtcaactcttgctgaatttgtccattggcaagacgactggttgcatcgccataaatcggcaaggtgatattttttccattaaggatatttttctccaagtccgcagggataataataatcgcaaagatttcacgtagcagtagatcgtgacgagcatcagccaaattatcatagctatggacagcaattttagccgtagaattaagctggcgtatcaaagctcgactagcagagctgtgatcctggtcgatcacagcaaccggtagatcccatactgttggccggacatataccaaactcatcatacacaaggaaaccagcatcaacatccacatgggcttttccaacattcccattaatacccggcgaaaagtttgccaatacatctgcattattcattaccctgtggcaagccaagccgtttaaataaccggtttcgtactaacagaaagcaaacgactggataaataagtaataaagcacaaacagataaaatacccagtaaagaaacctcacgcaaaaaaatatcaaacatcgcatttaaagcatgtgttaaaggctcaatattggcaattatccgcgctggcaatatcattgataattctggcaccgacatacctgaaaaagtcgtcgcaatactgactagcactccgattaaactgtaagccgtcagtgcactattagtgaaagtaaacagcaacaggccaatactttgagcggcaatgacgtagaagaaacccactatcaccatatatattgggttaccattcacttttgcatcaaatacaccaatcagagcagccaattcgacaatcaacaacagagtaaaaaacagggtataaggtgccaattttcccaacagagcgaaagtaaacggtttcattgtcatcagtgtcttgctgcgtgccatgctataaatcgtgcaggttacaacaaaaagctgtaacaaatggattgtggccgcaaactgctgataatagatataactaccgctggcattaaaaaggctgtcataaacgagcgtaacattggctaatggaggtaactgatgacccatttctgtcgccaatatagaacggtacttcgcattaatctctgccattaatccactgagatcttgaatagaataacttccggcaccataaaataacgcgttgtaatacatacgcacggttggctggtctcctttgagtgcattagcttcaaaatcatgcgggatataaagtaaggagtaatccttagcactgccaagccgttcaagagattcctgcaatccgccatcataagatttaatctgcgcatgagaagccgcgtccaagttacgtattagatgacgtgacagcgggctctgatcattatcaaccaccgatactggcagattgagtaatgtcccttctgaaaaattagcgctgatcagcacaaatagcatcaaaggaaataaccagcctaaccagtgaaaaaccggactacgaatcacagcccggatttcttggctaaaagcgcgttcgaaaccacgccatgcaaccttgctccgcatcagtcacctactcatcccaacgccacaaggcactcataccaggacgtaaaccttcaatagcctgtaaaggatacaagcgcacttcaaaggttcttaaatcgaaatcaccggtggcacgagttgcacgtttagtcgcataattacccatcggagagatataacgaatttcggcttcgatctctttgtcacctagcgcaggaagacgaagtttgactttatcccctttttgcacctttgccagaatgtcttcccgcaggttataaataaaataagcttctggtacacggattaatgtcaccaaaggactattagcattaaataactcaccaacttctgccggaatcggcccaacttcccccgcgacaggtgctttgacctgcaaatcatgactctgagtttgtaactcaatcagttgctgttcagcctgacgcaaagctgctgcatatttctggcgaagctcaatcctgtcaccatgcataccttcatccaatgccgcttttgcactctgcattttctgataggcaacatccctacttctatgggcattatctagatcgttgcgtgaaacataacctttagacgctacgctctgaatacgatcatattcacgtaccgcattatcatattcggcctgagcttgtgccaaacccgcttccagattccgaatactttcttcgcgtgttccatgcagagattgctccaactgcgctttggcttgatcacgagcagcttctagtgaagcaacctgggccagcaattccgggctttcgagtgtaatcagcaactgtcctgccttaacatcatctccccgttcaacatgacgtttgatcactcgtcccttagctttagatgccacaatcacttccggtgcatcaacttcaccttgcaacaacaaatattggttatgggaacgaaataacacagccattgctgtaagcaaaatcaccagtaaaatcgtaaaaagtgttctttttttcatgatgtcttacacatccaaaattacccgacccgaaactaacgctatagcttctcattgttctacggaaaatttcttatatgtttgtgcgtataatcactgacagaaaggaaaacgcttcataatagtgtagtggtttatgattcttgtcaaatattaacctacttaaactaaacttttaataatattattagctgtttctgtaaactaataacattcacaaatcctcccggaaagtctatgtacgaatttaatcttgtgttgttattactacaacagatgtgtgtttatttggttatcgcctggctactaagtaaaacaccactatttattccgctgttacaagtcactgtgcgtttacctcataagctgctgtgttatgtcgctttttccattttctgtattatgggaacctattttggtctgcatgtaggtgattccattgccaatactcgtgctattggagcggtccttggcggccttctaggtgggccaggtgtcggtgcgctggtgggattaaccggtggactgcaccgctactcccttggtgggatgaccgcttttagttgcatgatatcgaccattattgaaggtttaatcggtggcattatccacagctatctgacaaaacgtggtcagataaaccgactgattaatccctggacagccgctatcgtcacgttttgcgctgaaataatacagatgggcattttactactgctcgcccgtccatacagtgaagcattagcattggtcaaaaatattgcagcccctatgatcgtcaccaatagtatcggctcagcaatgtttatacgtatcctacttgatcggcgagcgatatttgaaaaatatactaggttatgtccctcaattaaattatggccttaagaaataagcggatacaacctaatttcaccatagcgatataatttcttgctgtcttttcataacgggtggcgatgcgacgatgctctttgagtcgaccaaaacatctttctacaacatttcttcttcgatacgtttcatggtcgaatttaacccgtccatctgaccgcgctttttcatttgatttatagggaattatcacttttattccctgactttttaaccggttacgtaatgcgtggctggcataacctttatcagcaatcaccgcttttgaacgacgtttcataaaaccgtttttacgctgaatacccagaccatccagcaggcgcactgcatattgactttcatgacattgacctgcactgagtaccacattcagtggatagccttttccatcgaccgccagatggattttggagccataaccaccctgagagcgacccaggccatgattttcggtgacatcgggatgttttttttggcgcccgccgcacaatgtgccgcacgaatgttactgccatccagagatatagctgaccaatcaactaaaccttgttcatccagtattgacaataacttattgaaaatgaggttaatgagccccgattttgcccaccgattaaagcgattatagacggttttccaggaaccataacgttcgggtaaatcccgccagggggcaccggaacagagtatccaaaacatgccgttgataacccggcggtgttcaacataaggatgtcccgcccgttgagaatgttcagggggcaataaggggagcagtaactcccatgcttcatcaggaaggtcgtaacgagccataacatgttttttccgaaagtcagagccacatagattattctatctcagcctattgcgggacacaccctagtgcattttctgctcaggcactgaaaatcgctgtctatacggagggtattctgcgaaaaggatttaatgaaaataacagtatgcgagtagcaaaagttatttatcaacaactggaaatcggcgcagttgctattacagacagagaaaaactcttggcatttattggtatcggttcagatcatcaccttcctggaacacctatttcttcggaacaatcccgtcgagcaattgaaaataatgaagtggtttatgctgatggcaatgaaataccttaccgttgttcaatcaacccaatctgcaaattgggttccaccttagttattccgctacagggagaaaatcagcaagttattggcgcaatcaaactttatgaagccaaaaaccgtctgttcagctcaatcaaccgccccctaggggaaggtattgccagcctgttatctgcccaaatcctcacaggacaatatgaacgtaacaaacaatcactgctccaatcagagattaagctgcttcatgcgcaagtgaatcctcactttttatttaatgccttaaataccctgcaagcagtgatccgacaggacagcgatcaagcaagtcaattagtacaatatctctcaacctttttccgtaaaaacttgaaacggtcagaagagattgtcacgctgtctgatgaaatagagcatgtgaatgcttacttacaaattgagaaggcgcgtttccgtgagcatctgcaaataaacattgaactaccggaatctctgcttcacaccaaattacccgctttttctctccaaccagtagtagaaaatgcgatcaaacacggcacatcacagttattagaaaccggtagggttactattcgtgctcatcagcagaatcaattgttaatactggaagtggaagataatgccggtctttataaatcggcctctatgggggatggattaggaatgagtctggtagataaacgactacgacttcgctatggtgaaaattatggtgtgcaaatagattgccagccagaaaaatttacccgcgtaattttacacttgccactcattaaagaggctaataaaactgtgtgaatatgaatatattaattgttgatgacgaaccgctcgcacgagaaaacctacgttgtttgctagaagaagaacatgatattcaaattattggcgaatgcgccaatgccgttgaagccattggtgccatatatcatctaaaacccgatgttgtatttttggatatccaaatgccacgtatcactggattagaaatggttggtatgctcgatccagaacatcgtccctacattgtttttctgaccgcatttgatgaatatgcaatacaagcgtttgaagaacacgcatttgactatttattaaaaccactagaaaaaaatcgtctaaccaaaacgttacaacgattacggcaagggcatcaaaaacaagatatttctatcctgaaaacagaagaaccactgaaatatatcccatgcaccggccacagccgaatctggcttgtgcaactggatgaaatactttatgtcacctcccgtccaagtggagtttatgttatgtgtaccaatgggcaggaaggatttactgaactgacactccgtacactggaaacccgcacaccattgatgagaaatcatcgtcaatatttggtcaatatgacccatctgcgcgaaattctatttggtgatcacggacaggccgaactgatcctacgtaatggtgaaactattcctgtcagccgccgttatttgaaaccattgaaagaagcattaggattgaagtaaccgtgatattcatcacctttttagcaggttagtcagttcttactcaccgctcacctgctgaatctgaccacttaacccgccatacaaccactcactcagacactcccttatagcttcctttacctatgacaagatacgagtaaaaatttataactctcaggagaagagaaatgcaacacgctctcacatttgtcattgcaacgttgtgtattctggttatctgctaccgcttgtacggcgtattctttgttaaaaaggtactgaaagcagatgacagcgaggttacaccttcccatttattggaagacggtaaagattatgtacccacgaaaaaatgggtcaattttggtagccacttcgccgcaatcgcagccgcaggaccgctggttggccctgtgttagcagcccaatacggttatttgccaagtatgttatggttattaatcggctgtgttatcggcggggccgtgcatgatacggttgttttattcgcctcaatgaaacatagcggtaagtccctgtcagaagttgccaaaacagaacttggcccaattgctggttggtgcaccggccttgcaatgctgttcatcattactattactatggcaggtctgtccatggtggttgttcacgcgctagagcgtaacccttgggggacatttgcagtatttatgaccattccagtcgcaatcggtgtcggtctatgggagcgcttcacaggtaatatgcgcggagcaacatgggtaggtattattaccattatggcttgtgtgattgtcggcccttacattcaagcatccgccttcggtgaatggctgagcctgcgtacatcaactgtcagcttggcactgccaatctatgcattttttgcaaccgctctgccagtatggatgctactgactccccgtggttatctttctagttttatgaaaatcggcgtattcggcgcgctagttgtgggagtcatctttattaacccggagatccagttcccggcagtcactgaatttattcatggcaatggccctgtactggctggtccggtgtggccttttatctccatcaccattgcgtgtggtgctatttctggttttcatgcatttatcggctctggcacaacaccaaaacagatcgataagtggagtgatattctgccagtgggtttcggtgcaatgctggcagaatgtgtcgttggtgtcatggcgttgatcgctgccacttccctatatcctgctgactatttcgctattaactcctccccagaggtctttgctacattgggtatggatgttatccatctaccaaaactgagtcaggaaattggtttggatctgtatggccgtaccggtggtgcagtcacattggcggttggtatggcagatatcttcacccgcatcccttggttcagccagctagcatcctactttttccagttcgtcgtcatgtttgaagccgtatttatcctgacagcagttgattccggtacgcgtgttgcccgctacctactgcaagatttcctgggcgatatatgggcacctctgaaacgtatcgactggttaccgggttccattggttgcagtatcgttgcctgtttactgtggggctacctactgaattccggcgatatcaattcagtctgggcactattcggggtatccaatcaactgatggcctccatcggcctgatgattggtgcaacaattatcctacgtctgtctgaaaaacgctggtatatgctgacctgcctgataccactcgcttacctgtacgttactgtgaactacgcagcttactggatggtgaagaatgtttacttcaactccgcaacaaaaggtttcaatatcttcaacggaacaatctccattgtgatggttatcctcggcattgtgattatggtctcttccattattcaatggctgaaactgtggcgtgtccgcagtacaagtaattcagttgaagtactaactaactgatctctttctgcatatcaaaagctgccttttgtataaagaacagcttttttattataaaaatattaaatcaattaactgataacaaaaacggctcctgtaaaaagagccgctttattatttaaatatcagttcagatgattactgtgcgttactattgttataacgacggcgtggagcagatgaaccatgatcatcaccacgaccacggaaattgctacggctctgaccttcaccacgaccttctccaccgcggcgttcaccattgaagcgacggccaccaccattgaaattctcacgatcacggcgagggccactaccactactattaccgttaccattgccgttacgcccaccaccacgacgttcacggcgctcaaatggctgtgcatcacccattaactgcatattcattggcttattcagaatgcgggtacgggtaaagtgggataacaaatcacctggcatgccttttggcaattcaatcgtggaatgcgttgcaaacaatttgatgttgccaatataacggctgctgatatcaccttcattagcaatcgcaccaacgatatgacgaacttcaacaccatcatcgcggcccacttcaatacggtacaactccatttcaccaacatcacggcgttcacgacgaggacgatcactacgttcgccacgatcatcaaaaccattacgacgacgatcatcacgttcgttgaattcgcggcgaggacgacgaaccgggtccggaggcagaatcaacgggcgctcaccctgtgccattttcaataatgcagccgccagcgtttctatatccagatcttccgcaggttgcagtttagacaacagagtacggtactgatctagatcgctactttccaattgctgctgtacattagcggcaaatctttccagacgacgctgactcaataattcagcatttggcagttcaacttccgggatagtcagcttcattgtacgttcaacgttacgtaacaagcgacgttcacggttttctacaaacaacaatgcacgacctgcacgacctgcacggccagtacggccaatacggtgaacataagattccgcatccattggaatgtcatagttaacaaccagactgatgcgctcaacatccaagccacgcgctgcaacatcagttgcaatcaaaatatccaaacggccatctttcagacgttccaatgtctgctcacgcagtgcctggttcatatcaccgtttagcgccgcactgttgtagccattacgctccagtgcttctgctacttccaacgttgcatttttggtacgcacaaaaataatcgcagcatcaaaatcctcagcttcaaggaaacgcaccaaagcttcatttttacgcataccgtaaacagaccagtagctctggctgatgtcaggacgagtcgttacactcgcttggatacgcacttcttgcggatcgttcataaaacgacgagtaatgcgacggatagcttctggcatagttgcagagaacagtgcagtctgatgttcagcaggaatctggctcatgatgttttcaacatcttcgataaagcccatacgcagcatttcgtctgcttcatccaaaactaaaccgctcaggttagacagatccaacgtaccacgcttcagatggtccagaagacgccctggtgtacccacaacaatttgtggcccttgacgtaaagcgcgtaactgaacgtcataacgttgcccaccatacagtgcaacaacattcacgttacgcatatgtttagaaaaatctgcgcacgcttcggctacctgtaccgccagttcacgggtcggtgccaacacaaggatctgcggagctttcaactcagcattgatattatgtagtaaaggcagactgaatgccgctgttttaccactccccgtctgtgccatacccagtacgtcacggccatttaataaatggggaatacattgttgctgaattggagatggcttttcatagccaagatcttccagcgcagaaaggataggtgctgataaacccagatcagcaaaagagatttcagtctcagtggtcatgtaatggtgcctcattagttatggcggccagtctacataacgcatcgaaaaaaatttcggtcattttcatttaaaatgtgaactggctcaaattatttaattaaacgaacaaataagccctcatcggtcaagatgatggactttgttaatcgatctcgaaatgttcgtcagctattgctggtccgattctgataggtcatcttgttcctggcctaacagcgccaattccaacaatgcatagcggtgctcaacaaagttatgtgcgttgttagctaccgtcagcttgaataacgcagatgcgctatccttgtcccccagacttaggtaatgtttacctaaatagaagtcagtttcactgagatgctcagcgagcgaagtgttatccgttgcattctctttcaagcgattcatcaatgtatattcactaattttgcctaaatagaattcaactatattccagccccattgcccccggttcgctttttcgtagtgttgcgacaagttcaacatcgctcctttaggataaaattctttttccaccaggtacaaccacaacgaacggaaaggatcatttggatcgtcttgataaaacgcctgcagatcatcctgcgctaacttataccgaccaccgtaatacaacgcgatgccacggttaagacgcgcgtaattgtaagttggatcaagctctaatacagaatcaaacgcttcataggcagcatcaaaattgctagcctgtgtgaagtaaattcccagataattaaaaatctctggaatattaggccgaatagataaggcaacagaaaaatcattccgtgccaaagccctcagcccgagactatcatacagcacacctctctcatataaaagctgcgcgtactcatcttctgtcaatgaccgactcgcaagaatctgttccatgcgagccagaatgacttcttgttgcaatgaaggttgtaacggaatagcaaaaacttcgtttttacgccaatccttgctgctgcatcctgccaaaagaagtattgctacagcataacaccagcgcagaaaaagattcatttcctactcccgaaagtcagacattgattaagaatgccctatcacccatattgcatttattgggcctcctgccctgagtctataaacggcgcttttttacaaacgccgtttatacccgttatctttcaagttgcctctttgttggctgtactcgctcaccccggtcacatagttatctatgctccagaggactcactcccttaccgtcgcgatgcatcttgaaatccatagggtatatacatcaaatttattctgctgattgtggtgccactggtgtatcctcgacaattactccgactgtcgcttctttaatactcagacgaacacgaccctggcgatcaatttccagaactttaactgagacttcctgaccaacctgcaaatagtcagccactttctcaacacgcttatcagcaatctgagaaatatgtaccagaccttctttaccaccaccgatagcaacaaacgcgccaaaatcaacgatacgggttactttaccagtgtaaatgcgagctacttcgatctcagcagttatttcttcaatgcgactgatggcatgttttgctttttcaccatcagttgcagcaattttcactgtgccatcatcttcaatttcaatggtggtaccggtttcttctgtcagtgcacggataactgaaccacctttaccgataacatctttgatcttatcaggattgatcttaatagtgtgaatacgtggtgcaaattcagaaatatcattacgtgggctattaattgcctgttccattacactcaggatatgcaaacgcgcaccttttgcctgattcagagcaatttgcataatttcacgggtaatgccttcaattttgatgtccatttgcagcgcgctgataccttcacagctacccgctactttaaagtccatgtctcccaaatgatcttcatcacccaagatgtcagacagaacaacaaaattatcgtcttctttcactaatcccattgcaataccagcaacagcagctttaatcggcacacctgcatccatcaacgcaagagatgcaccacaaacagatgccattgaagacgagccgtttgattccgtgatttcagaaacgacccgaacggtatatgggaattcgttagcttttggcataactgccgccacaccacgtttggccaaacgaccatgaccaatttcacgacgttttggtgaacccatcatacctgtttcaccaacagaatatggcgggaagttgtagtgcagtaggaaacgatctgtgcgctctcccatcaactcgtcaatgatctgtgcatcacgttctgtacccaaagtcgcagtaaccaaagcctgagtttcaccacgggtaaacagcgcagagccatgagttcgaggcagaacaccagtacgtacatccaatgcacgcaccatatctttttcacgaccatcaatacgtggttcaccacgcaagacgcggctacgaacaacttttttctctaagctacccagaatttcatggatttcagcttcctctaaagcttcatcctgttccagcagtgctgccgtaacttcctctttgatagcatcaacctgagcataacgctcctgtttttcagtgatacgataagcatcacccaaacggtcttctgccaatccagctacacggtcatgcaacgcttgattaacagattctggcacccaattccatttttctttgcctgcttccgcagccaacgcattaatgttatcaataaccacctgttgttgttcatgaccgaatactaccgcacctaacatttgctcttcagttagaatgtctgcttcagactcaaccatcagaacagcaccagcagtacctgaaaccaccagatctaaacggctattttttagctcatcactggttgggttcagcacatactgatcattaatataaccaacgcgagcagcaccaattggaccattgaacgggataccagatagtgccagcacagcagaagcaccgatcattgcaacaatatctggattaacttgcgggttaacagaaacaactgttgctacaatctgcacctcgttcaggaaaccgtccgggaacagaggacgcagaggacgatcaatcaaacgagcgactaacgtttctccttcacctggacgaccttcacgacgaaagaaactgccaggaacacgaccagcagcataagtacgctcctgatagttaacagtcagaggaaagaaatcctgaccttcttttactttcttttgaccaacaacagtgacaaatacagccgtgtcatccatattgaccatgacagcagctgtggcctggcgtgccatcatacctgtttcgatagcaacggtatgttggccatattgaaatttacgaacaatcggattaagcaaaataatatcctttcgttaacattgccttttatattcagcagacaacaatgaatgatctctccatgccacatcctcgcgactaacgacaggtcttactcccttaagcactctcattagccgcgcgaacctctgtaactgaagagcctaaacaaaaaccaccaccagcatttttgtgctgttatctatgatggcttctcagaagaaaaggggccctatatggcccctttccactgaaacttgcttgattagcgacgcaggccaagacgcccaatcagcgcagtgtaacttgttacatttttacgcttcagatagtccagaagtttacgacgctgagaaaccatgcgcagcagaccacgacggctgtggtgatcttttttgtgctctgaaaaatggccttgcaagtggttaatctgtgcagttagcaaagcaatctgtacttcactagagccactgtcattcacatcacgaccaaattcagcaataatttgcgcttttgcttcagtacttagagacatattacaactccaaaaacatataaaataaaattacaggtgccgatctctaattcagccacccaacatataactgcgccattctacgctgcaaataagttaagcgcaagataacccaaaataccctaatcccggctttcgacaactaaacggcggggagcaacaagcccatcatcattgataacagcaatgccaatgaatttccgttcatcaccttcagtcacacgtaccatactttcaactaaagctggggatttggcactgcgcaccgcctgaccttgtttaaaataagccgcaactactggaatcaaattaacctctgggaaatgagcaattgcactatccattggtaatagtaatgaatcaattaattcgcccacaggtatttcttgatctttggcctgcttttgtaattcatataattgctcaagtgtcaccatgcgatcatttggataattcgctacctgtaaacgtcttaaataaataacgtgagcaccacagcctaataattcacctaagtcatcaataatagtgcgaatataagtgcctttcgaacagtgtatttccaattccagttcatcattttcccaacggataaactgtaattcatagactgtaattggtcgtgcttcgcgttctacctcaataccctgacgagcatactcatacaatggttttccctgatatttcagtgcagaatacatggaaggaatttgcatggtatcaccacggaatttatccaaagctgcatcaagttgaacctgacttagctggattgccctttcactgatgatttgcccgtgtgaatctgatgtgtcagttcgctgaccaagacgagctatcactcgataacgcttgtcagaatcaagtaagaactgggaaaacttcgtcgcttcaccaaggcaaaccggtagcataccggttgccagtggatccaacgcgccagtgtgaccagctttgctagcgttgaaaatacgttttactttttgtaacgcatcattagaagaaatatcctgcggcttatccagtaacaacacaccatgtatatcacgaccgcgacgatgacgccccattacttctcctctttgtgatccgtagaagcccggcgctgttcatcattctttacaacattagtaaccagattggacatcctcatcccctctaccaaggaattatcgtaggagaaagtcagttccggtacgacacgcaaacgcattgctttacctagcagagagcgaataaaaccagaagcttcattcaatgccttaataccattctttaccacatcagaatcatgttcttcagtcaacacattcagaaaggtgacgaatactttggcataagccaaatcacgagaaacttcaacgccagaaacagttgccataccaattcggggatctttcacttctcgctgtaaaatgatggcaatctctttttgcatttcctgtgcaacgcgctgagtacggctgaattctcttgccattgtcatatctcctgacatttggggggcaaaagccccccaataatgaaattaaccagtggtaggaattaagcgatagatcgtttaacttcaataatttcaaatacttcgatcatgtcaccaacacgaacatcgttgtagttcttaacaccgataccacattccatgccattacggacttcgttaacgtcatctttaaagcggcgaagggattccaattcaccttcataaatcactacgttatcacgcaacacgcgaattggattattacgtttaatagtaccttcggtcaccatacaacccgcaatcgcaccaaatttcggtgatttaaacacatcgcgaacttctgctagtcccatgatctgctgtttatattcaggtgccagcataccactcattgcctgtttaacctcatcaatcaggctatagataacagagtaataacgcagatccaaactttcattttcaacaacccggcgtgcagaagcatcggcgcgaacattgaagcccagaataattgcattagaagcagcagccagtgttgcatcagtttcagtaataccacctacgccagagccgatgattttcactttcacttcatcagtagacaattgttccaatgcttcgcggatcgcttcacatgatccctgaacgtcagatttcagaacaatattcaattcagaaacttcaccttcttccatgttagcaaacatgttttccagtttagatttctgctggcgagccagtttgacctcacggaatttaccctgacgatacagagcaacttcacgagctttcttctcatcacgtacaacagttgcttcatcaccagccgcaggtacgttggataggccaaggatttccactggaatagatggccccgcggagaacacttcacgacctagctcgtcacgcattgcacgaactcgtccatattcaaagccacaaagtactatatcacctttgttcaaagtaccttcctgaaccagcactgtcgcaaccgggccacggcctttatccaagaatgattcgataacaacgccgcttgccataccagaacggactgcttttagttcaagaacttcagcttgaagtaagattgcgtccagcaattcatcaataccaatacccgctttagcggatacattgataaactgagtttcaccaccccactcttcaggctgaacaccgtgctgagaaagctcactcttcacgcgatccggatcagcttctggtttgtcgatcttgttaaccgcaacaactacaggcacactcgctgcttttgcatgctgaatagcttcgatagtctgaggcatcacaccatcatcagcagcaacaaccaggactacgatgtcggtagcttttgcaccgcgtgcacgcattgaagtaaatgccgcatgccctggggtatccaagaaagtaatcatgccactgtcagtttcaacatggtaagcaccgatatgctgggtaataccacccgcctcaccagaagcaactttcgtagaacgaatataatccagcagagaagttttaccgtggtcaacgtgacccatgatggtcacaaccggcgcacgcggttcagcaacagcttcacctgtatcgcggtcgctcatcagcgcttcttccagctcattctcacgacgcaggataactttatggcccatttcttcagcaaccagctgtgcagtttcctgatcgatcacctgattaatggttgccattgcacccattttcatcatggctttgatgacctgagaacctttgacagccattttattcgccaattcagcaacagtaatagtttcacctatcacaacatcacggttaacagcagctacaggcttattgaaactttgttgcaatgtactggttttacgttgcttgccttttgtacgaccaactgcacgggcttcttcacgatctgctttagattcagaatgtttattatttttcttctggcgagtagccttaccactacgaccgcgggcacgacgatcaccttcaactttagcatcattttcgtcttctgctgcacgggcatgacgggaggtagtgacatgataatcgtcgctatcaatggaatctgaatcacttgaccacttatcctgattctcttcagccatacgacgagcttcctcagcaacgcgtttagcttcttcctctaccttacgacgcatctcttcttctgctttacgcttaagatcggcagcttctgcttcacggcgtgctttttcactttgaattgttttatcagtctgtgctggtttctgtttatgttcggtatgttgattggtcactttttcactttccgctgcctggcgcttagctttttcagctgcttcacgtttggccttttcttctgcctcacgtttagcctgctcttcaacgagtttcttcgctgctgcttcggcttcgcgttgcgctttttcttctgcttcgcgccgtgcttgctcttccgcttcacgcttcgcctgctcttccgctttagcctgttcaactgcatcacggttcacatatgtacgctttttgcggacctcaacggctaccggtttgcttttaccatcggtgcctgaaacattcagcgtactacgtgtcttacgctgcaatgtcaatttatcgggtttaccagctgaaccaccttgctcgcggttcaaatgcgccagtaaagcttctttttctttctgggagacaaaatcagtttcggtttttttaatccctgcatcagcaaattgctgtaccaagcgatcaaccgaagtctgtatctcttctgccagtgattttacggttacatctgtcatgctgttccttcctgctacggtttattacgcatcatcgccaaaccaacagatatttcgggcagccatgatgagctcgcctgttttctcatcattcaaaccttcaatatcagataggtcgtcgataccctgctcggcaagatcttccagcgtacagatgccacgggcagctaggtcaaatgccagagtacgattcataccagtcagatttaacaactcttcagttggttgtttatcactgaggctttctttctgagccagttccagagtagttaaagcagctttcgcacgttcacgcaggacttcgatagtttcctcatcaaggccttcaatttctagaagttccttaattggtacataggccaattcttccagagttgagaacccttcttcgactagaacagtagcaaattcttcatcaatatcgagatgcttagtgaatgtatcaatagaagcatgagcttctgcctgatgttttgcttgtaactcttcagcagtcatgacatttaattcccatttgtcatcaccacgatgttttttcaacaactgcgcagccaggcgcacattttgaccattacggccgatagcctgcgctaagttgttgctttcaacggcaacatccatcgtacacttgtcttcgtcgacaacaatagatgcaacatcagccggagccatagcattaatgacaaactgagcaggattatcatcccacagtacgatatcgattcgttcgccgcccagttcactggaaacagcctgtactcgcgcgccacgcatgccaacgcaagcacctaccggatcgatacgcttgtcattcgtttttactgcaatcttagcgcgagatcccggatcgcgggcagcagctttaatttcaatcagctcctcaccaatttccggaacctcaatacggaacagttcaaccagcatttccgggcgggaacgactgacaaacagttgcgcacctcgtgcttcagggcgaacatcatacagtacaccacgcacgcggtcacctgggcgaaaattttcccttggtaacatatcttcgcgaaggataacggcctcagcattattgcctaaatcaagagtgatattctcacgattgactttcttaaccacactggtgatgatctcaccttgctgttcgcggaactgatcaacaaccatagcgcgctcagcctcacgtactttttgtacaataacctgtttagcggtttgcgttgtaatacgatcaaacgttactgattcaatttgatcttcggtatagctacccaaatcgatttcaggctcttcaaatctagccgcttctagcgtaatttcacgagtcggctgagtcacttcttcaacaactaaccaacgacggaaagtgtcaaaatcaccagatttacggtcaatgctgacacgaacatcgatatcttgttcatattttttcttggtggctgtggccaatgctgtttccagcgcctcgaagatcttttcgcgtggaagggatttttcgttggaaaccgcttccacaacagccagaatttctttattcatcctagttgcctcatccgaactttaaaagtggggtaccaggttcgctttctggatgttgctcagtgcgaacacttcatcttttccatccaccgtaaccgtgatcatttcgccgtcgacagttttaataatgcccagccatttccgacggttttgcattgctatacgtaaaaccagactgacttcctcaccaataaaacgctggtaatgttcagtcgtgaacaatgggcgttctaagccaggtgaagaaatttccaggttataaagcactgagataggatcttcgacatccaataccgcactgacctggtggctaacatcagcacaatcatcaacagtgataccattctcactatcaatataaatccgcagtgtagaaacacgtgcacgaataaactccaagccgactaactcaaagcctaaagcttcaactggtgctgaaatcatcgctgttaatttttgctctaatgtggacaagcccacccccaagacataaaaaaagggctaattagcccagtagttctgttgtcaaataacaaaaaaccccgaaattcggggctttatgcaactggaccctatttgctgccagtggcttcaaccactcacttcatgcccctttaaatcagaatcaatatttcaaatattgctgaattatttcgttcaaaaaggtgcatctcaatttaagaagtggttgcgggagccggatttgaaccgacgaccttcgggttatgagcccgacgagctaccatgctgctccatcccgcgttcgaaaacgtggcaaatattacgccgatagctgcaaaaacgcaagctatccgaataatggtaccgaggacgggacttgaacccgtaagccctagtgtgggcactaccacctcaaggtagcgtgtctaccaatttcaccacctcggcactacatgaagctatcactgattaaacagcctcatcttaattctttcctgtgacgactactgaggaatatcactatttggtgctgctggtgccgtcggaatctccgttgacttctcgactttagcaggctcgccaatgttttcccacttactgcttgcaccagtctggttactggtcatattgccaagcaccaaactaataatgaaaaacagagtggcgaaaagtgcggtcatacgagtcataaagttaccagagcccgatgaaccaaacagcgtcgcagaggcacccgcaccaaaggaagcacccatatcagcacctttaccctgctgtagcataaccaaggcaattagcccgatagcaactagcaagaaaacaactaaaagagctccatacatatgtcgtacctatgtcctcgtggggtttaccacggtttacgtggctaccttataccgcatcacccactcaaacaggctaatcacctgaccgagtgggtctgaatactaaccaaaccacatctgatacgcaaggttaatttcaataatcagaatcacttgaggaaaaaaacaacaaattagcccgcatgtttcaccgcatcagcaatacgatgagccaaggccgtgacttgcacatcatcttcaccttctaccatgacacgaatcaatggctcagtaccagatttacgtaataatacccgtccacgaccatttaattcagtttcaacagatttagtaatattaattacattttccgatttaagtggatcgtgtgaaccggagaaacgaacatttaccagtacctgtggcaaaagtttcataccactacacagatcgtgcaaactcatatggttacgtaccatagcactcagaatctgaaggccagcaacaatgccgtcacctgtagttgttttatccagtaagataacatgaccagagttttcggcccctaaacgccagccttcttcctgcaatttttccagcacataacggtcacccactttagcacgcaaaaatgggataccaagctgcttcaatgctaactccaatcccatattactcatcagcgtaccaacaacgccaccacgcagttgtccttgtctcaatgcttcacgggcaataatataaaggatctggtcgccatcaactttctgtcccaaatggtcaaccataataacgcgatcaccatcaccatcaaatgccaaaccaacatctgctttctcttctacaacacgttgctgcaacaaacgaacatcggtagcaccacacttttcattaatattgataccgtttggttcacagccaatcgtcacaacatcagcccctagttctctgagtacatttggagcaatgtggtaagtcgcaccgttagcgcaatcaagtacaattttcaatccattaagactttgctcacttggaaatgtacctttacagaattcgatataacgaccagcagcatcaacaatacgatttgcacgccccaactctgcggattccacacaagtcagtggcttttccatttcagcttcaatcgcttcttccacatcatccggcagtttcgtaccatcaatagagaaaaatttaataccgttatcataataaggattatgagaagcagagataacaattccagcttcagcacggaaagttcgggtcagataagcaacagcaggtgttggcataggaccagtgaacgaagcagataaaccagccgcagctaaacctgcttctaaagaagattccagcatatagccagaaatacgggtatctttaccgataatgatcttacgagaaccatgacgagccagtaccttacccgcagcccaaccaagctttaacacaaaatctggcgtaattgggctatctcccactttgccacggataccatcggtaccaaagtatttgcggttactcataatttcttttcttcctttgctgaaagtgttgctccgacaatgtgcattgcctgcacggtttctttgacatcatgtacccgaataatttgcgctccttgcatagcagcgataactgcgcaagctacactaccgataaccctttcttgtggcggcacatgaagcaactgacctatcatagatttacgtgacattcctgctagcacaggtaaaccaaattgatgaaattgatttaaatgcgccagtaactgatagttatgcttcaagttcttgccaaaaccgaagccaggatcaagaacaagtttatcttttgttatccctgccatcgcacaacgttcaatttgctcagtaaaaaattggttcacttctattaacaaattttcataatgtggagcatcctgcatagtacgtggttggcctttcatatgcatcaagcaaacggataagccagatttagctacgctttccaaagcaccaggctcttgtaatgcacgaatatcgttaatcaaatgggcaccagcttttgctgactcactcatcaccaatgctttcgaagtatcaacagaaatccagatattaaatcgttgagctaaagcctcaacaaccggaacaacacgatccacttcttcctgctcactaacttcatcagctcccggacgggtagattccccaccgatatcaatgatcgcagcgccttcattaatcatcttctcagcatgttgtaaggccatattcagggtattatgagccccaccatcagaaaatgaatctggagtcacattcaaaatacccattacttgtggacgggaaagatcgagaacattgtctctggctctgagtttcatgttaggctaccttcaatgtcaaaaccccagggcttacctggggtttcatgaatatcaatcagactacgaaaccatagaacaattactgatctttatttcctgactgccctacttgctcaccaccttgcgccaatgtattgatatcatcagttggttttgcagcttgtggaggaggtgtattacctgttgggcgactgttattactgctgccgttatcactttcccatcctgctggtggacgaacatttgtacgattcattaagtcatcaatctggggagcatcaatagtttcgtacttcatcaatgcatctttcatcgaatgcagaacatcaaggttgtccatcagaatctgacgagcacgttgatagttatgatcgataattgccttaacttcctgatcaataagacgagcagtttcatcagacatgtgcttagctttagcaactgaacggccaaggaacacttccccttcttcctctgcatagagtaatgggccaagtttttccgagaaaccccactgcgttaccatgttacgggcaattgatgtcgccactttgatatcattagatgcaccagtagaaacactgtctgggccataaataatctcttccgccagacgacctccatataaggttgaaatctggctttccaacttctggcgactagcgctgatctgatcgccttccggtaggaaaaaagtcacccccaaagcgcgaccacgcggaataatggtaactttatgaacaggatcatgctcaggaaccagacggccaataatagcatggcctgcttcatgataagcagttgattctttctgctcttccgtcatcaccatagagcggcgttcagcgcccatcatgattttgtctttcgctttttcgaattcaaccatagaaactacgcgtctgttaccacgggcagcaaacaaagcagcttcattcaccaagttagccaaatcagcaccagagaatcccggagtaccgcgagcaatgacagaagcatcaacatctgtatccagaggaacccggcgcatatgaactttcagaatctgctcgcggccacgtacgtctggcaaaccaacaacaacctgacggtcaaaacgacctggacgcaacaacgcaggatcaagtacgtcgggacggttagtcgcggcaataacgataataccttcgttgccttcaaaaccatccatctcaaccaacatctggtttagagtctgctcacgttcatcgtgaccgccacccaaaccagcgccacgctgacggcccaccgcatcaatttcatcaataaagatgatacaaggtgctgctttcttcgcctgctcgaacatatcacgaacacgggatgcaccaacaccaacaaacatttcaacaaaatcagaaccagagatagtaaagaacggcactttcgcttcaccagcaattgcttttgccagtaaagtcttacccgtacccggaggcccaaccatcagaatacctttcggaatttttccacccaacttctggaagcggcctggctcgcgcagatattccaccagttcaccaacttcttctttcgcttcgtcgcaaccagcaacatcagcaaaagtggttttaatctgatcttctgtcagcatacgggccttgcttttaccaaaagacattgcccctttaccgccaccaccctgcatctgacgcataaagaaaatccagaccccaataagcagcaacatcgggaaccaggaaatgaaaatagaagttagcagacttggttcctctgggggttcaccaaccacttttacgtttttattcagtaacgtatctagcagtttttcatcctgtactggtaggtaagtggtgtatctgctgttatctttcctactaacgttaatttcacgacctgtgatacgaacttcgcgcacctgatcctgggctaattcattgatgaaggtagaataatccaccctacgactattggaatcgctgggaccaaaactctggaataacgacatcagcacaactgcgataactaaccagagaatcaggtttttcgccatgtcactcaagggattaacctcatattacaactgtgttaacaaatagcattcagggtactatagtttccgccctgtcgctacaatgtatacttcacgcgatcgggcccgcgaagcgtctggcttacgaattttcacgttcgtaaatagggagcgaatttccctcaggtattcatcaaagccctctccctgaaacactttgacaataaaactcccctcgggggccagcacatcacgacacatatctaacgccaattcaaccagatacatggatcgaggaatatcgaccgcaggtgttccgctcatattgggtgccatatccgacatgacgacctggactttgttatcaccaactcgctcaagcaatgttttcaatacaagttcatcacgaaaatcaccctgaaggaaatcgacgccaacaatgggatccatcggtaaaagatcacaggcaatcactcgcccattatcactaatttgactcactgcgtactgagaccatccaccaggagctgcgcctaaatcgacaacggtcatgccaggcttaaaaattttgtcactttgttgaatttcatcaagtttaaaccaagcgcgagaacgaagcccttttttctgtgcttgtagaacatatttatcactaaagtgttcttgtaaccagcgactggagcttgccgaacgttttttattggccattgtcctttccaactatacaacgaataaagagccagatatctattgctccgtacatcaaaaccacaacacactatttatggtgatagagatgagatggcggtagaatgtctcgttttcaatcctaactaagcaaaaaaacaatggcccttaacaaaaaacaagtacaacacctgaaaagtctcgctcacccgctaaaacctgttgtcatgattggtaataacggcctgaccgagggtgtgttggccgaaattgaacaaacgctgtcacaccatgagcttatcaaagtcaaaatcgcaggcgaagatcgtgaaaccaaaaatttgatcgccgatgcaattgtccgcgagaccggtgcatataatgtgcaagttatcggtaaaactctagttctttaccgccaatcggaagaacgcaaaattattttacctaaataatcaaaccacatttatataaaatgcggtgcgcatattatgataaaaaaggccatattcggccttttttacttttccacgatccttatgcaactttacctaacgtaaatcaatagcaacaggacaatcccgaagttaaatatattcaactttcaggatctcatattcaacttcaccgcctggtgttttgataataacaacgtcatcaacttctttacctatcaaaccgcgggcaattggtgaattcactgagattaaattttctttaatatcagcctcatcatcacccacaatccggtaagtctgctcttcatcagtattaacattcaaaaccgtaactgtagtcccaaaaataacacgtccacccttgggcatttttgtgacatcaatcacttgtgcattagaaagcttagcttcgatttcctgaatacggccttcgcagaaaccttgttgttcacgagcagcatgatactcagcgttttctttcagatcaccatgttcacgcgcttcagcaatgtctgaaataatttttggacgacgtacgttctttagataatctagctcttcgcgcaacttatccgcgccacgtaccgtcattggaatctgtttcatttattaatcctctaaatctttcctgagcaaaaaaccaacatcatcctgatgttttcagataacagcacaatgagcacaccttgtcgggcgggcttacagacaataaacaatagtgcaaaccataggactacccagagttcacaatcatattttacatattaatatatcattctaacgtagacttggtgatgggtcatcgtttacttttccccactttgcgccttagtattgtggtatgtctacatccatatgcgaaatttatgtccttctttaaaattgccggcagattaatttgcgttaccgctctgtatttaactatacccaacgcaaacgccacacctgttgaggaatatacgcaatatctgcctgatggtactaatctggcgttaatcgctcaaaaagcgggcagcagtaccccgttaattgattatcacgggcagcaaatggctctaccagccagtacgctgaaagttgtcacagctcttgcagcattgttacaactgggtaaagattatcgctttatcaccacactggaaagtcacggaaaaatttcaaacggcatcctgagagggaatttgattgctcgttttgtcggagatccgacactgacccgtcaacaacttcgcaatatggtcacagttctgaaacaatctggcgtggaaaaaattgacggtgatcttttgatagatgtttccgcctttgccagccacgataaagctcccggttgggtatggaatgacatgacccaatgtttcagcgctccccctgctgctgcaattgtagatcgaaattgtttttcagtttcgctatatagtgctgaacaccccggtgatactgcatttatccgcgtagcatccttttatcccgtaaatatgttcagcgaagttaaaacgttggcaaaaggctctcctgaaagccagtactgcgaactggacgtcgttcccggagagctgaaccgttttactcttaccggatgccttactcaacgcagtgaaccgttgccactggctttcgcgattcaaaatggtaccagctatgcgggtgcaattctcaaaaatgaattgcaaattgcaggaattgaaatcacaggtaatcttaaacgccaaagtttaccaactgaaccgggaaaagttctggctcaaaatcaatcagcaccattacatgatctgctaaaagtcatgctaaaaaaatctgacaatatgattgctgataccgtatttcggacaataggccgacaacactttgatataccaggaacctggcgttcaggttctgatgcggtaaggcaagtattaaaacaaaaagcaggtatcgatctaggaaataccgtgatggtagatggctcaggattatcccgccataatctaattactccagcaaccatgatggaagtattacagtttattgctcagcatgatcaagaattagattttatttccatgctgccattagcgggtcatgatggcacattaagataccggggagggctggatgaagcaggagtaaacggaaaagtttcggctaaaaccggtgccctgcaaggagtttataacctagctggctttataaccactgctagcggtcaacaagttgctttcgtgcaatttatttctgcttacgccgtaccgccaaaagagcatcgcaaccgtcgggcccctttgattcgattcgaaagcaggctatacaaagatttataccaacacaactgataaaattggcgccacaaagatggcgcccttaattatgatgagaaagtatgatgagaaagtgaaaaaatcagcgtttgtaaataacttcaatgccttcatcgtcatcttcgtcccaatcgtcatcccagtcatcgtctacttccgaaacctgttccaattgcttcttatggtagtcatcccacatgaattcaactttctcaggctgagtttcaccttctgttctgctcatattacgaggctgagttttcataaactccataatatcccagcaaagcgctttaacaccctgacgatttatcgctgagatcatataaaagtcgccttcccaacccaattcatcagcaatagcttgggcacgctgtctagcttcttctggctccaacagatcaactttattgaacaccaacctgcgtggtttttctgccaatttttcactgtattgctgtagctcgttgacaataatccgggcattttcaacaggatctgatccatcaacaggacaaatatcgattaagtgcagcaatacccgacaacgttccaaatgtttcaagaagcgaatacccaagccagcaccatcggaagcacctttaatgagccctgggatatcagcaacaacgaaactttgttcgttatccatccttactacacccaagcttggtaccagagtggtaaatggataatctgcaacttttggtttagcggcagaaacagcacggataaaggtggatttgcccgcatttggcatccctagcataccaacatccgccaacagcatcagttccagcatcaattcacgggtttcacctgaggtccccatcgttctttggcgaggagcccggttgaccgaagatttaaaacgagtattaccaagcccgtggaatccacctttcgctaccattaaacgctgttcatgacgaatcatatcgcctagaacctcaccggttactgcatcacggacacgcgtcccaacagggactttaatcgtggtatcctgaccacgcctgcctgtacaatcacggctttgaccattttgtccacgttctgcccgaaaggatttttcaaaacgatagtcaatcagtgtattgagattttcatctgctagcagataaacatccccaccatccccaccatccccaccgtctggcccacctttcggaatatatttttcacggcggaagctgacacaaccattgccaccatcccccgcaacaaccagtatcctggcttcatctacaaatttcatattttttctccgtatgatagccattacagtgctggacggccgtgttacccagagatggcgtattttagaatataaaaagccccgcaacacatgcagggcttctgattcggtttatacccgttatctttcaagttgcctctttgttggctgcactcactcacctcagtcacatagttatctatgctcccggggattcgctcccttgccgtcgcgatgcatcttgaaatccatagggtttataactcgaaaaacttattcagcttcgatgctgataaatttgcggtttttcgggcctttaacttcgaatttaactttcccgtcagctaatgcgaacagggtgtggtcacgaccacaaccaacgttattgccagcatggaatttagtgccacgttgacgaacaatgatgctgcctgctaatacagactcgccaccaaaacgttttacacccagacgtttgctttcagaatcgcggccattacgagttgagccgccagcctttttgtgtgccattaatctgctctcctaaatcttaagcgatgccagtgattttaacatcggtgaaccactgacggtggccttgctgcttacggctgtgtttacgacgacgaaacttaacgattttaattttctcgccacgaccgtgggcaaccacttcagctttgattttaacgccttcaacgacaggagcgccgattttgatgtcatcaccattagcgaccatcagaacctggtcaaactcaacagtttcacccgttgcgatgtccagcttttccaggcgaattgtttgaccttcgctgactcggtgttgtttaccaccactttggaaaaccgcgtacatataaactccgctttccgcacgcccccttaaatatcattccagagcgcgctataaatattcataatagggcgcgaattctacgcaaaaaagcctaagaagacaagagcagaattagagcagatgataaaaaaacatagttgctgaattgtcatttatttagactgtttttcgagtacaatcaagacacagcaataactattttaatgttaatatgaacacagctctgcattaaaacccatagccgaaaaaatatgaatttagaaaccattatcaagctaaccgctgatgatatggcagcggtaaatgaaaccattcttagtcagttgaattctgacgttactcttatcaatcagttgggctactacataatcagtggtggtggaaaacgcattcgcccaatcattgccatcctggctagcagagtattgggttatcagggtgataagcatattactgttgctgcattaattgaatttatccacacagcgactctgttacatgatgatgtagtagatgaatcagacatgcgacgtggcaaagcgactgccaatgccatgtttggtaatgcagcaagcgtgctggttggtgactttatatacacacgctctttccagatgatgacagcgcttaactccatgcgagtgcttaaattaatgtcagaggcaaccaatgttatcgctgaaggcgaagttttacagttgatgaactgcaatgatccaaatatttctgaagatgattatatgcgggtgatttacagtaaaacagcccggctgtttgaagtcgccgcgcactcttccgcaattctttctaacgccaccccagagcaagaaatggctttacaaaattacggacgttatttaggcactgcattccagttaattgatgatttgctggattataatgctgatagcgatacattaggcaaaaacactggtgatgatcttaacgaaggtaaaccgacattgcccttgctacacgctatgaatcatggcactccagaacaatcagcacttatccgtgaagcaattgaaaagggtaatggccgtcatttactcgaaaccgtactgacaaccatgaaacagtgcggttcactggaatatacccgtaaacgagcagaggaagaagcagataaagcaatagctgctttgcaggcgctggaaaactccccatacaagcaagcactcgtggggttagcccatatcgccgtacaacgcctttcttaatcgatagaacgaaacctggggttaatctgactccaggtttttctctgcgtcttcaacacctacatcaatataaccaataagttttgcgagcccctcccgaagaataaatttcacaattttttcccgctcaactttagttaattgatagtaagcctcaatccaaattaagaatgggtcttgtcgtttgtttgtataatcaatagtgctttcccctacggatagcacattaagtacatcttcaggcaaactatttatatgatattcaagagccttgccctgaacaccccgtttacgtctatattcccatccttcccgccttgccatcagatttattccctgtggcgaagaaggaagtccggcaataccaaccagctctttagctgagtaccattcttttttcatacttttcttctcactttgcaccgggataatgaagaagaatccaagttagttggcatttccaatttccaaaaatgggttaaataacagaaagtttttctaaaaaacttctgataccatcccgtaaaatcatggctatcacagcctgtttctcagattctgataactgatgaaaagcaccaacccaaatcgacaaaggatcttgcttctgtacctgatactcagaagatgattcatgaagctccaatgctacaatggtcgtttccgggaaacaggagtagtgatactcgactgctttaccttgtacaccttgtcttttctgacgtaaccactcctctcgttttgctctggcattaactccttgtggtgatccaggtaactcacccacgccgattaactccttggccgaataccactcttttttcatcacgtttctctatttttgtaaccaagttcaaaaaagaagtttttaagaaaaaatttggaaatacttttagaaaaataatgctattttatttctcaataacaggtttaagttcgttattgctctcatgcatacctgttatttataccactaacatagcatcaaatttaataaaaaaaggattaaaaatgatttcaaggaaatctgattggcatcctgccgatataattgcagctttacgcaagcggggaacaaccttagctgaggtatcacgcagggcagggctcagctcatcaaccctggcgaatgcactatctcgtccgtggccaaagggagaatggataattgcgaattatctggaaatacacccttcagaaatttggccaagtcgttattttgatccaaatactggagaattattagaaaggaaagtacgcgaacaaacaaataattagctaacgaattataccctaatggatctcacgatgcatcgcggcagcaagggagcgaatccccgggagcatagataacgatgtgaccagggtgagtgagtgcagctaactaaagaggcaacttgaaagatgacgggtatatattagttgaacaaaaaccgccggtaattcgctataccagcggttttatcgtttcatagatatatattttttatttataaaatatattaattagttattaataaatttttcgcctaattctatatcttttctcaatacatctagcatgccttccagtgctttctgttcaaaatcactcaactcaccaatgttcaaacgctcttctacgccatttttacccaaacgaactggctgagcgaagaagcgagcatatttaccatcaccttcaacataagcgcattctacaacatcactttcgccttgtaagccacggaccaaagagaggcccagacgagccgcagcttgccccatagacagagttgcagatcctccacctgccttagcctcaacaacttcagtaccagcattctgaatacgcttagttaaagcagccaactctccatcagtaaagttcacaccagggatctgagacaacagaggtaagattgtcacaccagaatgaccaccgataacgggtacttcgatttcctgtggttttttacctttcaattcagcaacaaaagtattagaacgaataacatccaacgttgtaacaccaaacaggcggtttttgtcatatacacccgcttttttcagcacttcggctgcaatagccaccgttgtgttgactgggttagtaataatcccaatcagtgatttcgggcaagttttagccacttgttctaccaggttacgaacgatccccgcattaatattaaacagatctgaacgatccatgcctggtttacgggcaaccccagcagaaatcaatacaacatttgctccttccaacgctggagttgcatcttcaccagcaaagcctttaattttcacttccgttggaatgtggctcagatcaacagccaccccaggtgttactggagcgatatcatataaagaaagttctgaacctgaaggaagctgggttttgagtagaagagcaagagcctgaccaataccaccggctgcaccgagaactgcaactttcatcctgatactccttaaatcgtttatactttaaaatgctgtgaattcatctagttaagaaccatagattactacttttttgaaaacaatcggttaacaaccaaattgtggacttacgctctaatcgtgggacgcaaaagtcgccgtattctaggcaaaatgcttatctgttaatgagataacggacactattttgagaatttccttatgattttacgaaacaattggctaaataccttacacccaacaacaacgccaaacaacatcatttgattaacaatatatttacttgataaccggctaaaaaagcaaatttccatattcatattttatgaatttctatataacataagaccaattttgcgcggttcaaattggctataaaatcattattattgcataaaaattcatttatatgcataatacaagcttcatagctgattgaatatggtgaaatatgcgcactccctctaaacaggaagacttagtaaaagctttcaaagcgttattgaaagaagaaaaatttagctctcaaggtgaaattgttactgctttactggaagaaggttttgagaacattaaccaatccaaagtctctagaatgctgactaaatttggtgctgttcgcacccgtaatgctaaaatggagatggtttactgcctgcctgctgagcttggtgttcctactgccactagcccactaaaaaatctagtattagacgttgattacaaccatcctatagttgtgattcgcacaagccctggtgctgctcaacttattgctcgtctgctagattctcttggtaaatcagaaggtatactcggcagtatcgcaggtgatgacaccattttcgttacactcaccagagattccacaacagaacagctgcgtggagccatccttgggttgttcgaacaagagctttaaatgaacgcgccaacatggcgcgattcattttcccgcagctattctcaggattgataagcttttttattcaacttagagagtaatttttcatgaatatcaccaaatcctccattactcataaccagaatatgatccccctgctgtgctttatcaacaatcatatgcaccagtgaatctatatcagcgctccaatacgcaggctgaacacagtgatctgcaatttctgatacgtgccatttaatattagctggctggaataaaaatacttcatcagcacgccccaatgctggtgcgatctcattcttactcacacccattttcatcgtatttgaacgcggttccagtacggtaataatacgggctgttcctccaaccttactacgcagggcttcgagtgttgccagaattgctgtcgggtgatgagcaaaatcatcataaacagtaacgccgttttcctcaccacgtagttcaagacgacgacgggcattaataaattcacttaaagcacaacaggcatctgcgggctggacaccaacatgatgtgcagcagcaattgcaatcaacccattgcgcatattatgttcacccaccagcgacccgttcacttctccgacaactttaccaccataaaacacctgataatgacgactgtctgtactgatcttttttgcctgccagttacccgtttcacccactagttccaactcactccaacagcccatagacaaaacctgtttcaggttaacatcgttatccgggacacagatcttaccactacccggaacgatcctgacaagatggtggaactgtctctgaatagcagccagatcgccaaaaatatcgccatgatcgaattccagattgttcatgatcagcgtacgtggactgtaatgcacaaacttagatcgtttatcaaaaaaagcactgtcatattcatcagcttctattacgaaaaacgggctttccccgatctgagctgatgtttcaaaattccccggaacaccaccgattaagaaacctggtttataaccacaggcttccaaaatccaagctaacatacccgcagttgttgtcttgccatgcgtccctgcaaccgccagcacccaacgttctggcaaaacataatcatgcagccattgtgggccagaagtataagggagcccacgctccaacacagcttctacacaaggattcccacggctcataatattaccgatgatgaccatatctggcacagaatccaactgtgccgggtcatatccctgaatcagattaatcccatgtttttccagtaaggtactcattggtggataaacattggcatcagaaccagtcacttcatgaccaagagaacgagccaaaattgccagtcctcccataaaagtgccgcagataccaagaatatgaatacgcattgatttcctattccatagcatgaagttagccactattctaaccatcaaaagcaagataagaaatggaatagcctatgaatcatccctttctttggctaaactgcccgcgtaagagtgcaatggacactctaaaaccactatcaaatcacattcaggactttcgtcatgaaaacattaggcgaattcatcgtcgaaaagcagcaagatttttctcacgctacaggtgaactcactgcattgctttctgctattaagctcggagcaaaaatcattcaccgtgatatcaacaaagccggtttagtggatattttaggaaccagcggtgtgtccaatgtccaaggcgaagtacagatgaaactggatctgtatgctaatgaaaaactcaaagcagcactgaaagcacgcggtgaagttgcaggaatcgcttctgaagaagaagatgatatcgttattttcgaaggcgaccgcgctgaaaacgcaaaatatgttgttttgatggacccattagatggctcttcaaatattgatgtaaacgtttccgtcggtactatcttctctatctaccgccgtattacccccattggtcagccagtaactgaaaaagatttcctgcaaccaggtcatcgtcaagtcgccgccggctatgttgtttatggttcttcaactatgctggtctacaccaccggctgtggggtacacgcctttacttacgatccttctttgggagtattttgtctttcccatgagaaagttcagttcccacccaatggcaatatgtattccatcaacgaagggaattacatcaaattccctatgggggtaaagaaatacatcaaatattgccaggaacaagatgaagcaactcagcgcccttataccacccgttatattggttcgctggttgctgatttccaccgcaatttactgaaaggtggtatctacatttacccaagtaccgccagccacccatcaggaaaattacgcctactgtatgaatgtaacccaatggcattcctggccgaacaagcgggtggtaaagccagtgatggtgccaaccgcattctggatatcactccatccaaactgcaccaacgcgtacctttctttgtgggtagtaaatcgatggtggaaaaggcagagagttttatggctgagttccctgatgagtaatttcatcggttaattacggataagcggcgggatttttcgtcgcttttttaattttaactatgttcgttagatgattctttaaaatttatggtcaccaacgggtaacccaagccacctcgaagaagtaaactataccactgtgtgattgacgtattagtgatgagttattttattactgattggtggccacctagcagatcaccttcaacaaaatggtgactacacaaaatcgtgcgcaggctcaaggagtagtcaccacttctgtcagatacgaaaaattcgctcatctccagttggaggttctacggctttattagaccactacagctttattaaaagctccatcccaatagactataaattacacttttgaaaaaaattattctgaaaatttcagtatatccaacaaattaatataccagcccaaatagccgggaaaatcggaccttatcgagagctaagtgacaacctgtattatcggttagtaactacaccacggagcaatcatcaaactcagagacagcatttaccaacacagaaaaatggagagtactttaaaaaatgttttggctataataccccacactctattctggtttgaaataaaggaaactttcatgagcctgaacttagtaccagcaggaaaagaactgcctgaagatatctatgtcattattgagatccctgcaaatgcagatccgattaaatatgaaattgataaagaatccggtgcactgtttgtagaccgttttatgtctaccacgatgttctatccatgcaactatggttacatcaacaacaccttatctctggatggtgacccggttgatgttctggttcccacaccatacccactacaacccggctctgtgatccgttgccgtccagttggcgttctgaaaatgactgatgaatcaggtgaagacgcgaaactggttgcagttccacatagcaaactaaccaaagagtatgatcacattaaagatgtgaatgatctaccagaactactacgcgctcagatcactcacttctttgagcactataaagatctggaaaaaggtaaatgggttaaagttgatggttgggataatgtcgaagctgctaaagcagaaattatctcctctttcgaacgtgctgctaagaaataacttttctctatttaaataattaaaaaacctctggggaacatcaccggcagaggttttttaataccatactccctttttatgacaaaaaagggtttttatttactcttccacatggcgcttcaaccaatcaccgctttttatccgccgtaaaccggttattggaaactgataaagatatatccatgcattgccatacggtgtctgaatcaattcccttacatactcccgcgaattatctttcaaatcatctaattctgtcagtatagtagaattgattcgatatacctcacattcaatacttccgtcaccacggataaccgcaggataatgcccaaggtcatatagctcatagccttccagccgatgatcacctaaccattgagcatcggtcatccaatgatgattgccctgtttgcgccgtaagctgccataaacaataattcgcatttttaaaactcaaactgatagagcaaatccaatgtctgatcaataccagataccgcttccagatacaatctaggcattaatctatagcgtaaggttaatgttgccagtgaatcaaatataccaacaccatacttaacttgcagatcttttgtaattttcccgctaacaactacctgtgatttatcaccaaccccctgagtatccagtgctaagtcggaaacaccaaatatttcaccgatcttacccaccaactgaccactctgtgcaacccccaaacctattaatattgccgtcatctgtgagttgtccgagttactattctctaaaccctcaccacgcaacagataagaaagtgcttccaattgtgatctaacaggctctgaaaaaatttctacttttggctgatccgccaaaccagtcacccttacccctgcaataacctgcccatcggtagaatctggattacggatagcctcaatgttgagtaatggctgatcaggtggacctgagaacataatcagccctttacgaacgatcagatcctgcccataagtacggaaacggccatcaagaatatcaacttgaccattcaaacccatgccttgtttatcttgaacaaccatcagatcgcctttaagttgtgctttaagaccgaaagcactaagacgaacatcatctcctatatgaatcgtcaagttactttgaatcgggatagatgcttttttctgttgtaatggctgaagattttcattcaatatgacttcatccgatgaagtctcaactgtcgattctggtagctccttcacggtaatacgcgcccaaggaatgccaacgctaccatccaatttcagcaactgaggagaagcctcaaacaccagagcagggctaacatcaattttcaccattggtggaaaaacgactcttaacttgtcaccgttagccgttactcgtgcatgccatgcatccacattacgccagtccgcgtcaccatttaggttaagctgccccttcggcgttttaataacaccatcaagaacggaacgtattccatcaaaattcacacccatttgcccttgaacaatatcaaatgggatccaatggcccgaagcttgcagtgcactcaagtctaaccggccaaacaataatggatttctgacattgcctcccagacgcaggttagcattcaaatgaccttcagctttatcacctttcccaagaatcggcttgattaacgccagtgaaatatcctgaatatctacattacccgacagcttacggctcccagcaagatcagcaacttgtacgccaccgttgaatcggccatttcccataatcttaaataaccaattcaactctgctgtgccattcttcaagcctgcattgagtgtcagggtctggaaatctaccggtaatgcagtgccatcaaccatctgcttaacatgcaccccatcaccacgcaaattaacgttggcctgaggcaatccgctttccgcactccatttaacgtcggcattgccactgaatatacctttcaaatgtgtttcaggtgccagtaatggctgaatcaaagcaagatccaaacgttcaagaacgatggatgcactaccgctgacaccagcttcaatggatttaggtacgcagaactgcgcatgtggatttagccaacagtgagggcccacagtaactttctgctgctgattaagataatcaagagttatcgctttagttaagcgccattctccaaccggggtgtcaaaacgggtattgttaatgctacctttccatcgctgttgcttacgatcaaaactaccatgcaatgcaagttgacccgcaatcggtttgccgtcaatcttcaattgcaagtcgtgctgtttctcattgcccttagcatccaacgtaaaattacggacaatcaaatccgcttgtttcaactcactgactttagcagcaagattcccttggatctgttcagcagaacgtacatcccctttcacattcactcgatcaacacgcaaatcctgccatttcaacccgttagcattgagatcaaccaaaagctgaggcgcttgtatattaccgcgcagtttcagcgtcccattcacgacaccgccaagccccggaaatataccatccaacttcggtgcacggatatcgccatccagtttccactgtttggacaattgtccctggagattcattttattgcgccctaaagccagctcgaattgaggaatattccactgacccgccgcgttaccagaaatcttacctttggcttttattaagttctgttttacgttaccgtccagcgtaatttccgggatctgaagctgccaactaccaccgtgtaaactcccccgagtcactattttcccatcgattttagcaggccattccggccactgtttagcggtattgatcccggagagtgtcagcaccgcattccaacttaccgccttactccaatctgccacacctaccagttcactctttccctgcaaagcagacaggcgtaaacgggtcaacttaaactgttcttcattacctttggcatctaatacaagtaatgctggcgggatttcactaccgttaataccggaacgcaatgacaaatcataaccactggccttaccattaaggcgcatttttacgccatctagctgatattctggcttccccgttaaaggccaacttagttgttggctttcaagcgtcacccgcacgggtaaacctaccttagccagttccgcttgagcatcaagtttagcactgacaggaccagacaaatttagccctaagctgagttgctcctgtaaagcgccattaagctttacattaaccttttgtccttggatctcttgtcgatttagctcaccttttattaccagttttatcggccattgctgtgccagagttgcggaaccattaatggcgagagaaccttccggcattttaacattcaatttattgagctgaatctgctgcccctgattgctaagttgcaataaaaactgattgattgtgatattggtatcacccgtcagccgtaattgcttaccacttatccctgcaacagtgatatccagtggaataggcacttctggtaatgttgccaatagcggttgagagaataattttttcagaatttctgccaacgatttttccggttcactccctcgtttcgctttcccctctgcttccgctattttcagccgttcaggcggcgtttttggcagttccaccagcaatccattaattttcgttggtttaagcgttaatgctttttgctgccagtgagcagcggtcctaaattcatcaagggcaaatatcgtatcatttacggtgacagtgacatttttaacggatagcaaatcaagtgagactggatacggtgtcctcagttcggtgaaaggttctgactttggcgacggttctcccgcaggaggcaattgtttagtattaatcgcaacttttacgccttccgttgtcaatgcattcacacataattgactctttttcagacaggaaagacgcaatgaaaggtggagttgatccacattgacattaacaccgggcatttggtacttaacgcctttcagggtcaaatcacgccaaccgccgctgacgctggttatatccagccccggtacccaacgggcagcactgttaatcataaaatgcaggccagattgcgttcctaccaatccagcaacagcaataaccaacaaagtcactatcagcagaaaagcaatgctgacctttttcatccatctcataattcagatcctaacccgatgtaaaactggatgttacgggattctgaatcccctattggtctggcaaggtcaaacttaataggtccgaccggagaagcccaacgcacaccaatacctacgccggttttaaaattgctctttctaacgtcattaatggcttcaccggtatcaacaaaaacagcactccaccaattacctgttacgttatattgatactcaagcgaacccacaaccaatgcggatgcaccggtcaattttcctttattatctttaggcgagattttctgatatctgtaaccacgaacactgtgatcaccaccagcgaaaaaacgtaggtcgggtggaaccttctcgaatgcattggtttctatccaacccaaattaccccgagcaacaaaacggtgattatcccaataagttctgatccaaacgttttgcgcctgtaacaccaagaaatcaacatcagagccccaaagggtatcagagatatcaatagaatagcgctggctatcgccccaataaggcatcgttcctccacgctggcggatacggctgacgttcgcccctgggtacaataacattgccgtattggtaacattagcctgagtaaagtggctgagactccaacgcatattgatcccatactgccaacccgttgaaagatcccaattacgggaaaaatttactgtcgcggtatctgatacggtatcgttgatatctttacgcttataacccgtctgcaatgcgtaatattgctctaacggattcaccttcagcggcattttataggtagcatcaataacctgttcaggtgcagaaaggttgatactggcgctaaggctgtgtccacgggaattaagccacggttttgtccatttcgcctttacccgtggccctacatcagatccataacccccacccagttcaacatagtttttggaacgtggcgttaataccgcttcaagaggaagcattccgtcaccattttttctagcggaattaaaatccggtgagactactgctgaattaaaccagccagtttctgctaaccgccgattcaattcggctaattgttcagaggtataaaaatccccttcgctgaatggaactagatgattcaaataatcttcgcggatctgtgaaccacgataacgcacctgaccaaagtgataacgctcaccgctattaaaaacaaagtcccagaatgcctcatgtcgttctttggcaacacctaattggctctttttcataaccgcgtcaaaataacctttcctaatagcgagcccggtcaaagaacctttaaggttttcatattcatcatgattaagaatcgttcctttctttgggcttttgcttttaacaagtttggcataatctccatctgtcttagccccaccttccaaaacaacattaacatcggcaattctcaccggttcgcctacagtaacttttgccgttaataccgagcgagctggcggtctattttcctgataggtaaattcgataatgggttcataataaccaagcgggcgcaagccttcacgaatcgctttatctacacgagatcgaaaacggccatctggcgcaacttcatcagtactaatagtggagagatgaattcgggcatttttttccaacttacctgttaatccttctattttcagacgaagattagcactatgagcaatgggagttacgatagacacacaaagaaagcataaaacggggtatctcgacacgcgaactcctaacctgatcggaataatttaactataatcaatttatcttgagtaaagtttacaatatatacaatctatcaatatctgaaaacttaataattacgggagtgaattgtgccaacttcagctaataaaagcctatctattgatcctcatagtgcattaccaggcagaactgagccacttaaggtttcacctaaccatgctgttactgatcatacgatagaacctgttccagaaaatatggaagtggcctattttggtatgggatgcttctggggcgtagaacgcctattctggcaacaacctgatatttacaccacctccgcaggttatagcggcggtacaacagccaatccaacttacgaagaaatttgtagcggcctgaccggacatgctgaggttgttagaattgtttacgatccagcaaaaaacagctacgaaaacttattaaaactcttctgggaaaaccacgatcctgctcaagggatgcgccagggcggggatattggttctcaatatcgctccgcgatttataccgtgtcacctcagcaacatgaactggcattagccagccgtgaacatttccaaaaagcaatgcaacaacaaagcgacaatcgccctattacaacggagatcacagaagcggggccattctattttgctgaagactatcaccaacagtatctatttaagaatcctgaggggtattgcgggctaggcggtattggtgtttgcctacccaaaatgaacgaaaactagtcgctacatttaattaatgttataattactacgctaatcaatagctttctaagtgtttgtcgtcactttttattttatatgatttttattgtttcctccggtgcttttctaatgacaacctaccctaccaccggaggtagaacatggattccttatgctaaatagtctcttaatagtatttctattgtgcgcgataagcgcctttttttcgttatctgaaatctctcttgctgcctctaggagaatcaaactaaaactgatggcagatgaaggtaatatcaacgcagctcatgtcctcaaattacaagaaacgccgggaatgttttttaccgtggtgcaaatcggcctaaatgcagtagcaattttggcaggtgttgtcggtgaatccgcattctctccttcattgaaaacgtttttcatgaaatttatgcgccccgaatgggcagaccagttgggctttatctgctcatttatcattgtgaccagtatatttattttgctcgctgacttgacaccaaaacgtatcggcatgattaagcctgaagcagtcgccgtgaaaatcgttaacccaatgcgtttctgtctgaccgtttttcgtccactagtttggctatttaatggcctgtctgatcttatctttaagctctttaaaattccgacagcacgtaatgaagatatcacatccgatgatatttttgcggttgtggaagcaggggctgttgcgggtgtgctgcgtaaacaagagcatgaactgattgaaaacgtgttcgagctcgaatcccgcacagtgccttctgccatgacctcaagggaaagtatcatttacttcgataaggatgaaagtgaggaaagtatcaagcagcgggtttctagccagccacattccaagtacctgatatgtgatagagatattgatcacgttatcggttatgtggattccaaagatctgcttaaccgtgtcctaagtggtcaaagcctaagcttcaataaaggtgtccagatccgcaacgcgctgatcattccagataccttgacactttcagatgcactggaaagttttaaagcggcaggtgaagatttcgctattattctgaatgaatatgcattggtaatgggtgtgattacccttaatgatgttatgaccacactgatgggtgatttagtcgaccaaggacaagaagagcagatcatcatccgtgacgaaaattcatggttagtagaaggaggaacacctattgatgatgtacagcgtgtactggatattgatgattttcctgattcaagtaactatgaaaccattgcaggtttcatgatgtttcggttgcgtaaaattccaaagcgtactgattcagttaagtttgctggttacaaatttgaagttgtcgatattgataactacaaaatcgatcagctattagtcacaaaaattactgatactctcaccacggcacccacgcaaaaccagcctatcagtgatgataaataaaaacggcctattcttgagctaaggccgtttagtattctcatgttaagcgccacttattgttattttgtggcgcagattacaccagtatgcaacccgattctttttcgttatctatcctatttcggcctgcaaacgtagcacttgctgattgacttcgctcattacactaaaatggcgcttatctctcaccttcggcggtaaaattttgccgcagtcaaattcaaaagcccccatgtctttaatgtataaacgtccacggaataaagttttaacgtagagagcaattttcagtgggttatatcggtgaaaaattttcatctctgcttttttcctcctagcgacttcttacggttacgtttggtgagccaactccacacaccataccgttatgtagaataatagactgaatttatccgattttgttccctccatttttagttttatgcactgaatttacataaaatgacagatatttagatatacataactatgtaactttatctcttacttaatgttaaaaatttgatcttctttaaagagataaatcagttaatacccgctatgctagagatccatgcattgtcacactaacctacaaaggaaaaattatgataaagaactttatgctatatgctgcgctactttgttctcctgctttagcattcgcccacaacatcactctggaacaacaggttcctgcgatcagtgtttctgataaaggtgagttgttactcaacaataacaagtttagctaccaaaattgggatagtggaaaactgattggtaaagtgagagtcatacaacatattgcaggtcgtagtgcagctaaagagatgaatgctccactgatagaagaaataaaacgcgctgatttttcaaaagaaaaataccaaacaaccaccatcatcaatatcaatgatgccatattcggtactggaccctttgtccgcagcagtattgaagatagcaaaagagagtttccgtggtctcagtttatcgctgacagcaacggtgtggccaaaaaagcttggcagttggaagctaaaagttctgccattattgtcctggacaaaaatggcgcagcgaagtttaccaaagaaggtgcattaaacagtagtgaaatcaaacaggtcattgaattagttcgtaaggaactacagtaaaaacatccgtggtgataacgacttgcaggtatgttttcgtttgcccttatcaccacagctccgctaaaaaacagccatgattaaaaaatcgttactctaaatcccggattcaggaatgattcacgaggcgtataatctagcgtctgacctttccagttcgtcacgtgagcaccagcagcaatggctatagcgtgacccgccgcagtatcccagatatgagtgggcccaaagcgaggataaagttgcgcttttccttccgccaccaaacagaactttagtgaagaccctacagaaaccgtctgatgttcacctaattgattgagataatcttctaattctgtatccatatgagagcggctaacaacgaccattggtggattagcatcacgaatcttaatcggcaaacattgacctccacaggcttttttccatgcctgccgcccttgcccggaataaagcgtatcctgcacaggagcatatataacgcccatcacaggaacgccctcatcaatcaaggcgatattaaccgtaaattcaccgttacgattaataaattccttggtaccatccagaggatcaactaaccaatagcgcttccaatcacgcctctcttcccaagtaggaagctcttcttccgacaacagtggaatttctggggcgatacgggataatccggctttaattattttatgagccacaatatcagccatagtaaccggtgaatcatcttgcttatgatcaactttcaggggatgttcatcctgataaattgtcataatagccgcaccagcttcctgagccagttggcagatttgttctagcatcacacacctctgcggttagtcatctgttatcattttatacccgttatctttcaaattgcctctttgttggctgcactcgctcactcccggtcacatagtttgctatgctcccggggattcactcccttgccgccgcgatgcatcttgaaatccatagggtatagactatattaccaattgatctttttattggaacggtaagaattttattaccactcctaaaataaaaacagccggatatacctgctcaagttattgacaatctgatgcaatcactgtgatcttcatgttctcaccaaacacttttgcccaatatgatgccgtcatccaacccgctgtaccaccaacaattcatctaagcaagcattaaaccttcaagatatttgaccgcattgtgatcaatcagacattcgcacggttcatccatcacacccagcgccgtattcgggagcatttcagtgatagctcaagaagagatgcattcatttccgccagacttttggcaataaaagcgtttttctggaccatattcctaacatcaggagaattcaaaatttattttcgggcagtttcattctcaattagataacgtaacgagcttatcagatggaaactttccatcgatttaatcaccaagacatcggttggtaaatacggtgagaaaaatagggtattaataatgatatttcaattgtattcatttcctttatatcaagataacttcctggcttattaatccgccagacctttcataatcgttgatacaataaagtatccatgccattcttaaatatatacccgtaatcattgaagatgcttgattttatccgaaatggagatcattatcctcgctatgaaaatattcattaccgatgaacaaaaagccgaacttgaacatctccatcacacctgccgtgataagagggagtgtgatcgcatcaaagcggtcctgctggcctctgaaggctggagttcagtgatgatcgctcaggccctgcgtcttcatgaaatgaccgttaaccgtcatatcagcgattaccttaatcaaggtaaacttaaatctgataatggggggtctgatagtttgctttctcaagaacaaactgattttttaatcaatcacttatctcaacatcttttccatcacacccatgaaatcgtggcctatgttgctcagctctggaatattacctttagcattcccggcatgaataaatggctacaccgtcagggtttttcttataaaaaaccttgtggcgtccctcataaattcgacgcagaaaaacagcgacaatttattgaatattatgagaatcttaaagtcacagcgaaagacgaacccatcctttttcttgatgctgttcacccgactcaaggcaccaaactcggttatggctggatgcgaaaaggcgagaaaaaaacagtcaaaacaacaggaagccggactcgcctgaatatattgggcgcgctcaacctgaatgccattggtcgtacggtgttccaggaatatcaaaccatcaatgactacaatatttgctgttttttcaatgaaataagaaagtcttatcctgactatcatcaaaaaattcatcttattgtggatggggcgggttacaacaaagctcatcttgttaaggagtgggcttatgttagcaatattgagttacattaccttcctccctatagcccaaatttaaacccaatagagcgattatggaaggtcatgaatgaacaggttcgaaataaccgttattttgcggataaacatgaatttcgagacaacgtcttcaaatttttcaccacaacgctaccggatatagcggactcgctgatgtctagaattaacgaccattttcaggtgctaaaaactgcatcttgaagtttcttgggtatatttaataaatcaatattgtttttataataaaaacaaacaaaatattgtttatttgtcactaaagttattaaaaaataaaaaatgctcgaaagactgaaactcagccaaaggtaaagtaaataagtgctaacaagctaaaggagacagtgaaacctaatcttgccaatgcaaaacggcattatgaacacggttaagattagagagaatccaaatgctggtggcaatgacacagaatagctaggaagatagtgggccaaagatcttatttaaagaaataattaggaaattgagggaaagccagttcatcggcaacatcctagctgaaattttcgatggtttgaaaataccccccattttttaaatgggtttgtcagtagtctgagacgaatataccggctatttttttaaacctacttgtggataaaacttacagaatatccaacaattccacctcgaaaatcagagtgctatatgggggaatcgatgcaccggcaccacgctcgccataagccaaattataagggatataaagttcccatttagaaccgacaggcatcaacgtcaatgcttcaatccatccagcaatcaccccattcacaggaaattcagcaggttcaccacgctgtactgagctgtcaaacacggtgccatcaatcagacgccccgtgtaatggacacgcacgtggtcagtatgggcaggaattgcaccatcaccctgctttagtacagagaactgtaaaccagattctgtcgtgcttataccgtcacgctgagcattttctgccagaaatttctgtccctcttctgccataacttgctgacgttcacgacgcacaccatctgcacgttcatgcatttcacgtaaggcacgatgcaatatatcgaccggcaccgctggagaatgattttccagcgcatcgcataaccccgctaacaacgcttcaggttccagaccttgcaggccagactccagtaattgctgaccaacttgcaagccaaccccataacttgcttgtgcttcgatagagtcaaaagaaagttttgccatgaaaatacctgtgatcaaattaaattagacctgtaagcataacagcgcgatgcagcagggtaaaccgaagatgtcaccaggaaaatacatgtcgccccaatatataagcgctaataatcgatataattctaagtagcatatttatttcttaaaggttacaatataaaaattcaattttttaaattttttacttataattgattatatgaataaaatattttttatataaaattaattttattgcaaatattatatgatgaggaaaatcttatgaacacatcatttaatgaaattttatcagaaattaaaaagtccaaaaccatgcctgaattagaaaagaggctattaaacgcgataaactatctgggttttgaattctactcaatttatcaggaagaaaaatatccattcacgacaaaaaaatatgttctaataaccaacctaaatatagaaactgcaagtaattataatcaagataataatcatgacagcgaccaattaatgaatggtgattacactttctctattccgtcagtttgtaatgataaaatatcaaaaaacactgattttacgattgaaaaatcaaattcaaataaaaatgaagtcaaaaatagtctttcaatcaaaattaaaggttatcatggagaaaggtcgattttttcagttgccagaaaagaaggcactatttctcataatgaaatacttaataaagcaggagtattaggcatattggcaaatgaatgcataaaaacatttaataacctaaaaaataaaaaggataaaatcattattccaacactctctaccagagaagttgaagtcataagatggacttgtgagggaaaaacttctgctgaaatagccgatatactggatatttcaacaagaacagttaatttccacattaacaatgttatggagaaattagtggttcccaataaagttgcagcagttgctaaagcaatagcatataatctaatcatataacaattagagcccaaataaggctctaaccacacgaaattataaaatataattagacaatatatccctccatgcatcattaatttcattcatcagggattcacatttgacgtgctcatcattaatatgcacacaaacataaccacagaaatcattattgctttttggtgtttcataaaccggtgaattcttatctaaattaatttttattgcaataatttcgtaatataatttactcaaaatattatcaacagatgctaataacacttcattaatttctgtttgatcgaatttatcattaattttgccgtctttacctgccagtaaattaatcaaaaatgctcttccctttgcttctggcaatatcattcgatcactaaatcctttgactaaatggtcaacccaaatttcctgcaagcttataccatatacccggttagccatatcccaaatacgcatacccgcgggtctacgattagtttcaaccagaaaagtttctcccgttttactatcttgcttaatctcattatggaatgcgccaaaagtctgccctgaaatcagattcattgcctgccctgctttatgtaatgcaatcgtatttctgccatcacattgcgccggaactatttgccctatttcaacaggaaattcccctttctgggaaactttttgcgttaaaaatgccatacaaccaataccatcgtacgaatattctgtatcgaaaataataagttcttctgcaagaatttgattaccaccagattgctcaacagattgagcaaaagccgttgggattttacttctatctttaaccgctaccacgcctacatttgcccgaccacaattaggcttaataatcacaccatacggaacagaatcataaaactcttctagctctttaatctcattaatgaaagtatatcgaggcgttttaatatgttgtgccgcaagcaacggtaatattcgagtttcttgttggcgaaattgatatttctcaatacctgcgaaacttaatttgggatcatcaccataaacgtttaatttcttcgcgataacagccgcatacccagataccgcatccataaaaggaagaataccagcacatgtcatattaagttcagcaagaacggtcatcacacgatcaacataattgtcatcaacataattttctgttcgtacaggaatatgatagacaaatggtgtaacatttttttcctcaccggacaacatatcgctaataatcaccaactcaagggagtaattatatcgaatatagtcacgaatattgacgatttcattcagccttgccggaagataatcaagcactaacaaatattttttcgaactcatatttcctccattattgactattatgcagattaaatttaagcgaacgataagggttaataataataaacatcaataaaacaaatgcagagaatatcagataaatactattgtaggaaaaatagttcagtaaattagcacaaataaaactggttaaaggtgtcgctaactgattcaaaaccagcaccacaccaagatactgagaaaaacgctgcttcggaataagacttgctcgataagagcgggaaaaaagattaaaacaaccttccgaaccaataaccagtaagaaacctaatgtgtaaaccacaaataacggcccagtagcaaacagtgtcagaccacataacgcaatcagaaaagccgttacaccaacgatacgtacatcaaaaatccggcacaattttggcgcaataaaaaaaacacaacaattcaccagccccgcataagccaaaagctgagcataactccctttcggctgtgaaaaaacactggtgataacataaactgccgttgacaaaatagcaccttgcatcacattcatcaggaatgtcaggctaatgacgcgtaacaagggtggattttccatcaagaacttaaaaatggccggcagattatacccttctctattagcgcgttcttcaatcctgtttttcctttgtagctgaaaccatatcaagctactaatcaggaaaggaaaaaatgcaaatgcaaataccgcataaacactgaatttataaaccagcacgccgacaaccgccggggctgcaatataggtaaactgttcaacaaattgtaaacgagagttaaccgaaggtaattctattgcactcatgtttttagagacaaaaccttcaaggttgacatatcccgccccgctaaaaaaggataaaacacatgagagagaaataatgatatatacgatgctattatcagaatatataaatgaaaggataaaaagaaataagcaaactaatgatcgaagaatatcactcaggaataacataaccaaagtatgcatcctgtcccccatccaaccagaaatagggagagaaatcactctgaatagccgttcaagcccaaaagcaaaagatgaaagtgaagcactattagttgaggtatatactaatacaggcacagcgaacataacaaatgcctctgaaaaaacagaaaaaaatcgagccagtatgatcttatgtatcattaatattacctcaaccttattatacccgttatctttcaagttgcctctttgttggctgcactcgctcaccccggtcacatcgttatctatgctcccggggattcactcccttgccgtcgcgatccatcttgaaatccataaagggtatatctatcccattaaactattgtatttatcaatttgaaactgagcaatgcccaaattgatttcatcaattacacctactgggatagacgtttactctgcaataattaatgaatcgatttaatcaaataattccccaaaactaaataatcaatattagttttcataaaagttttaatagcatcttccggtgaacaaacaatcggttcgctatcattataagaggtgttcagcaacaaaggcacaccggttttccgataaaatgcctcaatcaactgggcataatctggatttgatgcactatctaccacctgaactctggcagtaccatcttcgtgaaccactgccggaattttcgatgctttatccactttagcatccatcgctaacaacatatattttgcagcttccggtaattccttccgaacatggaaccaatcagcaacatgttgacgcaatacactaggcgcaaatggcctaaacatttcacgatgtttaactttacgattcattaaatcgcgaatatctttatttcttggatcagccaacaaactacgattacctaatgcccgcggcccaaattccatcctcccctggaaccagccaacgacattattttcagccagcaagcctgcgacaacttcatgaatattctcttcatatgtccagtccaaaccgtgggccttcaaactacgctggtaatcatcttcactatattccagaccccaataggtatgagtcagaggatagcgctgattattttcaagaatatgatgccaaataaatagggcggcacctgtggcagtcccggcatcatgtgcagcaggctgaacaaagatatcttcgatatccaactcttcatataatcgtttattcgttatgcaattcaatgcaacaccacctgcaaggcagagtttattcgttgctgtttcctgcaaataatgatgagccatatttaacactatttcatcagttatttgctggagagaagcagcaatatcataatattcctgcgctacctctccaccgggaactcttttctcaataccaaacaaagattctaatttagaaaagtcttggctgcggaaattgagaatggtgttatcgatagtaaactcacctttctcataaattttgacaagttgttggaacgccggcataaaaccttcaggcttaccataagcagacattcccatcaccttacaggcatcgtatacagagaagcccaggaattctgccaatttctcccacataaaaccgattgaattagggtattcaatagttttaatttttttcagactattgccatcgcccagatatacccctgcggtattatcctctcccacaccatcaagtgataaagttaacgctttatcaaatggcgaaacaaaataagcagatgccgcatgagctgtgtgatgaggaacccaatgaaattgaccacggaatcccattgattgtaaaatttctggtactgaagtggttttacgataaaaaatggactcacccgatacacttccccaattgccttcactggtgacttcatcaataaagactgattttcttcgctctatcggatcaatagaaaacccaatatgactcacatcttccaagcgaatacccgcaaagtctaatgcaacttcaatggaagccaatggcagttcatcaggattatcaacatttgctggttttccgtgttttcttctattgagacgctcttcttcaatggcaaaaatagtttctccatcttttaataagcaaactgctgattcatggtaaactgaatttatacctaaaatatacatgacttattatcctcccattataattatttaacttttaatactaagcaacgcagactaccaccactctttaagaattcactcatatcgcatttaatgacattataaccataattatttaattgacgttcaacctctatagaacaatcatgcatgagaatatctttacctattgggatattattacagacaaataattccttagcatcatgttctgatattgagattcggcgttcaaatgtttcagcaatataattctggctctctttagtaaatgcttctgggtagtaaataactgtatctttgtcaataaacgagaatgccagagccacatgaaagaaagtcttatcctgaatatgcagttcacctttaacttcaagttctggataaactttctgaattgtatttattgcttctttatctgagcgaggaccataaccaaatatgatgtcattatcccaatagataacatctccaagcccttcaaaatagatatcttcatcaacacgatgtatctcataacctagattttccagataatcgatatagtgctggctttccccctggcgttcagcgtgtcggaaattactcgcaaggaatttattattatgcaccatgccacaatcacctgagaaagtcatatcaggcaaaccattaacaggctcgatagtgcgaatagtgataccacgttcagtcaaccgttcataaagaaaatcccattgttgctgtgccaattctttattgacgctattattagggtccatccaatcattaataacgtattcaatattataaaaatccggtttacacattaataactctttaatcataacttttgcctcatcttagatttagcactttgcttagtatgaatattaaatatttttgcaaatccctctgcatcgttttgactatataaatgcccacaattatatattgctaaattatcatcatagatagttgtctttgaaatacgggaacaaacattggcatatttataacctaattcaagcttaatctcaccattgacatgttgattcatgctatcaataaagtggtttaaatgagttaataagggatcataccaaagcccagaataaactaattcaacccattttttatcaactatctctttaaaccaattttcgtgacgattactacaataacattctaaatcacgatgtgcggtaattaagatatgtgcggcaggtgattgataaattgcgcgtgttttcaaaccgacaatgccatcttcaacaatatcaaaaataccaattgataattttttaccaatctcatttaatatttcaataatttcatataatgatttcttttcgccgtcaatcgatatcggtataccattctcaaaacctaatgacaaaaatattggctcagtagctgatagtgcatgttcaaataatttctctctggcatcttccggaattaatgcttccggttctgccaacggtccacattcgacacttaatccccatatattttcactagtagaataagggttattacaaccaaattcttgaggaataccatatttcatcgcataactatttacaatattttcgtcgtatttaaaatctctcaacgaagcaataggtattttattcagaatttctatattcatatccattctgacttgatcattacctctgaattgatgagcaatataatcaatattgagctcattggcaacttcaactgctgcctcagcaatcgcaggccgggaaagtgcagcactgagaaaataaccattttgataaatagcattcgcttttatcgcttttgtaaggaagtgttcagcatattgcgctcgataatctttatagataaatttatcagcacctgcaaccatgcattctaattcaatatcttcaatatctcttacctgcccttcatcaatataaagagcaattacctctctatattcagatttaagacttcttatgataagaggattatagaggcgattatagtaaatcaccaaaacgcgatcagaactcatttaatacgcaccccatgtttgtaataatttcttctaattgaggttctgttttactttcctcaattaattctgagaaattattttcaaataaccaagcatcattataaattgtgtcgatataacgttctccactatcaggaataatgacaacaatattatcgccaggtttaaaatcatccaggcgatttaatgctgcgcttaccgcacaacctcccgttccaccaattaaaataccttcatttctggctaactttcttgctactcggaatgcatcaatatctgcaactttcaaggtaatatcgatattggtacgatccaaaatagaaggtataaacgctaatcctgcaccttgtaccagatattttcctggttcaccaccgaaaataattgaccccacgggttcaacaccataaattcgcacctgtggatctttctctttcaaataacgggaaattccagtcagtgttccacaacttcctgctgtcgcaaaacaagctgtcaaattattgccaaagatttcatacaactcacgccccgtggaacgataatgctcatcaggattaacctgattttcaaattgcatagggctaaacgcattcggatagacttttataatctctttagttaaatcaatgcgatatttgacagtatcttttcccgcttcaaattctggtaggaaaataatttccgcaccaaatgcttttattttatcgcgttttgctgccggcaccatgcgatctaaaaccgcaataaatcgataacctttaacagcacacgccattgccagaccaattgccgtattccccgatgatggttcaatcaccaccattcccggtcttaattctccctgagcctcagccctttccaacatagcaactgcaatacgatctttaatactcccaccggggttaatattctccattttgagaaagacattaatacctttagtatatctaccattcaacataactactggagtattacctatagtttgtaatatgtttttactaagattcataccagctttatcccttatgtctaggttaatatgaagaacatataatgatgacaaggtatttttattaacaaataaataaatcaattaaacatctaatatacctattaatttattaatgaaaccattcaatttaccaataactatggagaataaactcatacctattaacaataagcgcattcatttgtgttctcacacaagggttaattaacaaaaattataattataaaattacacttaaaagtctactgtcaactctgacagttatatcaataaaatcccatataaatttttgatattattatttaataataaggatatatattgatattattaaacattcttatgtgaaatcatataaaataaattatcattataaagacaaataaccaaaattatataataatatatttttaattattatgaaataatcactcgtgtaattaaccagatttagacgtagatatatcaaaatattcgataaaaaattcccacatcacaacagaattaacaatgttgatattatctaataataaaaaatatgaattagattatttatagataataatctaataatgaataatattttcaatataaaaacgcaaaatcaataataataaaaaccagccaaaagacaacattacagaagaatagacaagagaaactatgattctataaacggcaaataaggtagtaaatgtaaaatatacccaatggatttcaagatggatcgcgacggcaagggagcgaacccccgggagcatagataactaacccgaattctgcttaatccgtcattgaaaaatcgtcttctgagtagaaaactttcagtgatggcttcttcaatttaaggcagtaagcaatcaatccacctaaaacgcacaacagaaagccttttatacttcggtggcgggaatgctctatttgagaaagagtttttaattgcccattaatcgtttcaatgataaaacgcttttttaacattatcttatcccactcagcttgcatactcgctttcatgttacgccgttttttcgtgatgaaagtgacatcggttttagctaaatcgtccgccaattcctggctgaggtaacctttgtcaccgtaaagagaacccgttaattcttttgataattcacgaacaggttcccgatcatccacattacccggagtcactttaagcgcgagaatttcaccctgatgattgacaaccaggtgtaatttgaaaccgtaaaaccagcccattgaattttttccgcgctttgctatccccgcaaagaccttatgtcgagggatgcgaatgttatggcagacactcaaacgggtggaatcaataaaagcaatgcctgtgggtttcccttttaattgagtcagatagctgcataatggcaccaaaacggaaggagccacactgacaaaacgaggatagctaagcaaggttggaaaatccttatggtgatatttccaaatatgttctagataaaaatgtttaaaatcacggtaatgcgacatatgaaaaaggatcaaaatggtcatgatttcactgggatacatatgaccttgtcggcggcgtaaacgatgcccgctatcgagacaaaattgttcccattgagggatgaaaaaacggcaaaaatcatcgacatcacagaaaatttcaactaagttgtccatagcctgttcccccctcggagctgtttttggtgcacaccaaaactttgctcctggaacaggcttctcgtcaatttcttatccagaattcgggttaactatgtgaccagggcgagtgagtgcagccaacaaagaggcaacttgaaagataacgggtataaatcagattaatgctcagttactgggcattaccggcaaaagccttatcgactaccaagagaacagtaagttgaggcaataaaaaacgccggcattgccagcgttttttacttgttagcatcagttaatcagagattaagcttcagcaacaatgttaacgttcaatttagcgaatacatcgctgtgtacctggaagttaacttcgtgttcaccaatagtacgcagaacgccattaggcagacgcacttcgctcttagagacttcaacgcctgcggcggtaactgcatcagcgatatcacgagtaccgacagaaccgaacagtttaccttcgtcacctgctttagaagcgatagtaacggaacccagtgcattgattttctcagcgcgagcttctgctgttgccagaacgttagccaagttagcttccagttcagcacggcgagcttcgaaaaattcgatgtttttcttagtcgcaggaacagctttgccctgcggtactaagtaattacgggcataacccggtttaacgttaacttgatcacccaggctacccaggtttgctactttatcaagcagaataatttgcattaccttatcctctcagagtcgttaatggactgtgccgattactgatgacgatcagtgtaaggcaacaaagacaggtagcgcgcgcgcttgatagcacgagcgagctgacgctggtattttgcacgggtgccagtgatacggcttggtacaattttaccgctctcggtgatgtagtttttcagcgtagcgatgtctttataatcaatctcttgaacgccttccgctgtgaaacggcagaacttgcgacgacggaaataacgtgccatttggctagtctccagaatctatcaattcaatctgctcggcatgaagaaccagtttgttaagaccattgcgaccttgatggcaactaatgaatcctgaaacggttaatcgactgccgaccgttatactgtgagttaaaacttgtaacaattgtccgctggcaataacgggcattctgcaccatgcttgcctgctcaaaccggcttcctgttgctgtgaacggtgctcaagcacaaattgacaatgaggaatgccggcaggactgacttttcgaatggggaccttgcacactgtgccagaaagcaccaaacgattagttgtcacagttattactcttcagaatccccagcttcttcagcatccatattggcgtcttccagagagtagtcacggctgcgacgttcatctttggctttaaccattggagatgcttcagttaccgcgtgcttaacgcgcataatcatgctgcggataacggcatcgttgaagcggaagttagtttccagctcatcaatcacttcctgcggtgcttcaacgttcatcagaacatagtgagctttgtgcagtttgttaattgggtaagccagttgacggcggccccagtcttccagacggtgaatctgaccttgcgcgttagtgatagtcgcactgtaacgctcaatcatgcccggaacctgttcgctttggtcaggatggaccataaaaacgatttcgtaatgacgcattagaattgctccttacggattattcagcctcctgtcagggtcaaccgcggcccgtggaggcaaggaacttgtttaagtgcggctgaaaaattgacgcgtaactatacctaccctacataaaaaactcaaggaatgaacaatgcaaaaatacttttgttcatatacccgttatctttcaagttgcctctttgttggctgcactcgctcaccccagtcacatagttatctatgctcccggggattcactcccttgccgccgcgatgcatctcgcaatccatagggtatatatgggaggtggattgtcacgagctacgctgacgcaccgcctcaaacaggcaaactcccgtggcaacagacacattcaacgacgagacagagcccaccattgggatgctaatcaattcatcacagtgttcacgagtcagacgacgcataccttccccctccgctcccatcaccagtgccataggaccagtcagtttgctctgatacagcgtatggtcagcttctcctgctgtacccaccacccaaatattgtactcttgcaataaacgtaaggtacgcgcaaggttggtgacacgaataagtggtacgctttccgcagcaccacatgccactttcttcgccgtggcattaagctgagcagaacgatcacgtggaataataacagcatgtacacctgctgcatcagcactacgcaagcaagcgcccagattatggggatctgtcacgccatcaagcaccaacaagaacggggtttctacttgtgccagtaaatctggtaggtcattttcttggtactgacgccctggcttcactttggcaataattccctgatgcaccgcaccttccgtttgattatccagccactgacgatttgccagttggatagtcatcccgatgctttccagcgcatgaatcaatggtgtcaggcggcgatcttcacgtcctttcaggacataaacttcgataaaacgctgaggatcacgctccagtaaagctttaacggcatgaataccgtagataatttcactcataatcttcttatttttactgttatacatatacagcactgacgaatactgtaagcctattcgataagcttcacgtactcagggggagattaaaatattcaggctatcctgcaacaggatagccctttgattatttatctgcgcttttcttagcccgtttggctttgaatttagcgacaattttctgagttttggtagaaagcgtcttaccctttttcttatcccctttaggcttatccgcagatcgctctttacgaacagcaccatcaggctcaaaatgagcttctttgcgataaccacgcccttttttcttactgctttcgcggccaagttctacttttctctctctatcgcgcactgttttacctacattccgggctttgcgggcggtagaaagcagcttaaagtcaatattacgctcatccatatgaaccgcttccacacgaatttcaacttcatcccctaaccggaaagttttacccgagtattcacccactaaacgctgaccgatattatcgaaatgataataatcattactcaacgtggaaacatgtaccagaccgtcaataaacagctcattcaagcgaacaaagaaaccaaaacctgtcacactcgtgatgatcccagtaaaagtattgcccacttgatcctgcataaaatcacacttaagccaatcagcaacgtctctcgtcgcttcatctgcgcggcgctctgtcatggagcagtgttggcccagttgcaacatctgttccatatcactgtgccatcccccggtcggtgttccacattgctcaacaatgccttgctgtttcgctagcagatatttaatcgcccgatgcaacaccagatccgggtaacggcggataggtgaggtaaaatgcgcataagaatttaatgacagaccgaagtgaccccggttttccggatcataaactgcctgtttcattgaacgcagtaatagggtttgcagtagctcatgatccgggcgttcagccacttgatgcatcagttgcgcataatcctttggtgttggttgcatgccaccgggcagcgtcaatcccaattcgccgaaaaccgagcgcaagttaacaatactttcttctcttggccgatcatgaatacggtaaagcaccggctccccatttttttccacgaagcgcgccgcagcaatattcgccagaatcatgcactcttcaatcaacttatgagcatcattgcgaacaatcggttcaattcgctcgatacgacgttcagcattaaagataaacttcgcctcttctgactcaaacgagattgcaccacgttgctcacgggcattttctagtgcctgatacaattcatgtaaatgctcaatatgctgaaccagtggcttgtagtgctcacgcagctcttcatcaccctgcaacatacgccatactttggtatatgtcagacgggcgtgagaattcatgatggcttcgtaaaatttataggatgataatcgcccctgcgctgaaatcgtcatctcacacaccatacaaaggcgatcaacctgcgggttcagagaacagagtccattagaaagcacctccggcaacatggggacaacctgagatgggaagtaaaccgagttactccggttacgtgcttcggtatctaacgccgtttgtggacgcacatagtaactgacatcagcaatggcaacccataaacgccaaccaccgcttcgctttctttcacaataaacggcatcatcaaaatcacgggcatcttcaccatcgattgtcaccaacggcagagtacgcagatcaacacggtcttttttcgccgattctggtacctgctcattcaaggaagcaacctggttttccacctgtggcggccaactgtgaggaatttcatgagtacgtagggcaatttccactgccatgttcgttcccattttttcacccaacacttcaacaatcttaccgatagcctttgtgcggcgcgccgggcgtgtaattaactcgactaccaccacattccccatgcgagcaccaccgctttcatctttcgggatcaagatatcaaagcttaaacggctatcatccggcacaacaaatcccataccagaatcaagaaaatagcggccaacaatctgactggtcttaggcactaatacacgaacgatacgtgcttcattacgccctttgcgattcagggataatggttgtgccagcacaacatcaccatgaatagccatttttaactgctcggcagagagataaaaatcgtctttgtgaccttctactcgtaggaaaccataaccatctctatgcccaataacagtacctttcagtaaatccaatctttccggcaaggcatagcattggcgacgagtgaaaaccaattgaccatcacgttccatagcccgtaaacgacgacgtaacgcttcaatatcctcatcgttaatcagattcagctcttgtgccagttcctggcgacttaccggtacagtatgtttagcaataatgtctaagatatactcgcggcttggaataggtgattcgtatttttctgcttcgcgccccaaaaaaggatcttgtgacatagctgttcctccgttgtcatcagcaggctgtttgcgccatttcttcattcggtcagaagcagcttataaaggggaatattatcttcaatcatatcagctaaagtatgcttatccagttcttctaaaaacctttctattgcctgatttaatacgaccttcagacgacacgcagaagtgatatggcaagattcctgactacagttaaccaatgataatggctcaagagcgcgaacgacatcgccaattctgatatccttcgctggcttacctaaacggataccgccgtttttaccacgaacagcatccactaatcctaaatgactcaattggttaatgatttttaccatgtggttacgagaaacaccataaatatcagtgacttcagaaatactggtcatccggctttgcggtaaagaagccatataaattagcgcgcgcaagccataatctgtaaaactcgttaactgcacatcaacctctggataataagatataaactaatatatccgagaacaaactgaaaaaataagtatttgttcaacttatataccatgaatctaccaaaatcatgttgatctcctcatcgttaaacaaaaaaggccacaataaatagcaaaaaaccgggctgaaaagcccggcttcacctgattataggtaccatcaggcatcaaacggatcacgcagaatgatagtttctgaacgatccgggcctgtagaaataatatcaaccggaacaccggtcagctcttctacacgtttgatatagttcaatgctgcctgaggcaattttctatgctctttcacaccgaaagtgctttcattccagccaggcatggtctcataaacaggttcaataccttcccagtcatccgctgctaaaggtgtcgtttcaattacactgccatcaggcatacggtagccagtacagatttttacttctttcaagccatccaacacgtccagcttggtcatacagaaacctgacagtgagttgatctgtactgcacgacggatagcaatgatatccagccaaccagtacggcggctacgccccgtagtcgcgccaaactcttggcctttttcgcgcaagtaaccgccagtttcatcaaacagttcagttgggaatggaccagcaccgacacgagtagagtatgctttgatgatccccaaaacataatcaacatagcacggacctaaaccggaacctgttgcaacgccacccgcggtagtgttggaagaggtcacatatgggtaagtaccgtggtcaatatccaacaatgtgccctgtgcaccttcaaacatgaccaattcacctttctgagttgctttatacaacaaatcagaaacgtcgacgaccatatccgtcaaaatatcggcaacagccatgatttcatctagggtcttctggtaatcaaccgccggttctttgtagtagttaaccagttggaaattgtgatattcgataatttctttcagcttaacggcgaatgcttccttatcaaataaatcaccaacccgcagaccacgacgagcaactttatcttcatacgcaggaccaataccacgaccggttgtaccaattgcttttgcaccacgcgctttctcgcgggcattatctaatgcaacatggtatggaagaataagtggacaggcttctgaaatgagcagacgctcgcgaacaggaataccacgggattctaatgcgttcatctctttcatcagcgcatcaggcgctaatacgacgccatttgcaataatactgataacgttttcacgcaggatccctgatgggattaagtggagaacggttttttcaccgttgataaccagtgtatgaccagcattatggcccccttgataacgaacaacatacttagctcgttcagtcagcaagtcgacgatcttgcccttgccctcgtcaccccattgggtgcccaatacgacaacgttcttacccatttcaaaattcactcggttgcttaaaaatggattctaacatctcatcccacacctttcagtaatttttatcacatccgttatttttgttagccaccagacatgacaaggcccgcctgatgcgggcctaatcaatagattcagcatctattagtgctgacctgcacgcttttcaggtgctttcatatagcggaagaaatcagcttctgggcttaataccagaacatctttcccgtcttcactaaagcttttctcgtaagcacgtaaactacggataaaggtatagaaatctggcgcttgactgaacgcatcagcaaacagtttagcggcgtctgcatcaccagcaccacgcaatgtaagcgcttcacgctccgcttttgctcggatttcaataacttgcttatctgctgctgcacgcagcttttctgcttcttccaaaccttgtgaacgatgacgacgagctaccgcttcacgctcagcacgcatacgctggtaaatcgcttctgaaacttccagtggtaaattgatttgtttgatacgcacatcaacaacttcaatacccaatgccgccatactgtttggattgatagcaagctgtttatctgccgtttctcgctctacacgagccgccgccgatgcaatagcatcatccgcttcagttgtactcgctgtttctttatccgttgtacctttgttcagcgcatcacgaacatctgtggtcaattgaccacgggaatccgttacgataccacgaacatccttacggccaatctcagaacgcaggcggtcactgaatttacgttttaacaatacttctgcctgagaaatatcaccattgccggtcgccagataataacggctgaaatcgttaatccgccatttcaggtaagaatcaactatcaggtccttattttcactggtcaagaaacggtcggcttgaatatccatagtctggatacgagcatccagtgttttcaccgtttcaacaaaaggtattttaaaatgcaaccccggctcataaacaatcggtttatttcccgcatcacgcagaaccttaccaaaacgcagtacaataccacgctgtccttcctgcacaataaatagagaggcatagagtgcaactaataccgcgacaataacaacgactaatgatttacgcatgattattatctccctaccctgataatgtcattacgcagattatctgttcggttataattcgctccccggcctgaatttgaaggcacagttgggcgggtaacccgcaggtcagaagctaccgtattatctgattgcactgttccctcttttttaacaccagaaacatcgccacgtaacatttgttctaatggcaataccagcaaattgttattgtgatcattaacaataactttgcgagtacggctcaatactttttccatcgtttcaatgtacagacgttcacgggtaatctcaggcgcctctttatacctaggcaacattttggcaaagcccgccacttccccctgcgcttccaatactacacgagccttataagctttcgcctcttcaatgatacgttgcgcatcacctttcgcgcgtggcaagacttcgttcgaataagcctccgcttcacgaatagactgctgttcattctcacgagcagcaataacatcgtcaaaagcagccttgacttcttctggcggacgagcagcctggaagttaacatccaacaaagttattcccatgcggtacggaagaatcgtcttttccaactcacgctgagtatcatcacggacaatcatacggtttgccgtcaagattttatccatcgaatatttaccaacaacaccacgtaccgcgctatctgtcgcctgacgcaggctgttatcaggacttgtcacgctataaagataagcggcaggatcagttacacgatactgcacgttcatctccacgcgaacaacgctttcatctgatgtcagcatcacgccagaggttgccaattcacgaacagattccacgttaactggaacaacttcatcaatgaatgtaggtttccagttcagacctggctgcacaatatggctaagtttacccaaacgggtaacaacaccacgttctgtctctttaatcgtataaaaaccgctagcggcccagatcacgacgacagcagcagcgacaaggctaacaatacgcccgccaaattttgccccttggtcagaaccattaccgcccttgttcccaccaaaacccccgagtttactgctcagcttacggaacagatcgtcgagatcagatgccccacggtttcgaccacttttgttcccgccggaattgccgcttttattgctgcttccccacgggtcgcggtcttgtccgttgttcccgggctgattccacgccatgttttagctccattcttttatgattggtttttcaggccaagagcctcttataaacaagccgactctcaatcacataagttttctgatattcacctgacaggcacatcagacaacataatcaaacaaatcctgttcttgtttgcatagacggtgccagtcaacaatcggcattctcacttcgataccaactttaccgtcctcttctatccactctttctctattgcttgcagttgatagaagcggctgcgtaaacgacctgcttccggtggcaaacgcaattcgtagtgtgcaatttcacccgaaagacgctccgttaacgcttgtaacaataacgggataccttcaccagtttgcgcagacagccaaactctaaccggtaagttatcttcgttgcgatcaatacgcggcgtgaagctgtccagcatatcaatcttattcatcaccaacagtaccggaatttcatgcgcttcaatttcttccagtacgctgtcaacagcggcaatattttcgtcgatgcggctatccgcagcatcaacaatatgcagcaacaatgttgcttgccgggtttcctgcaatgtcgctttaaatgccgccaccagatcatgaggcaaatgacggataaaaccaaccgtatcagccaataccaccgtaccaacatcattaacgtcaatccgtcgcaacgttgggtccagcgtagcaaacaattgatcagccgcataaacctcagcagccgtcatacggttaaacaaactcgatttaccggcgttggtatatcccaccagtgaaaccgtcggtatatccgctttatttcgcgcttgacgcccctgttcacgctgtttctcaacccggctcagacgattcaatatctgacggattttatcccgcaataaacgccggtctgtctcaagctgcgtttcccccggccctctcaaaccaatcccacctttctgacgttcaaggtgagtccatccccggacaagacgggtagaaagatgacgtaactgcgccaactctacctgtaacttcccctcgtgagtccgtgcccgttgggcaaaaatatccagaatcacgccggtgcggtcgataactcgacactgacagagccgctcaagattgcgttcctgtgcaggactgagtgcatgattaaataacacaacatcagcaccactagcctgcaccgcctcagcaatctcttccgccttaccttctccaacaaaatatttcggatgaggggctttcctgctccccgtgacaatttgcacaggaactacaccagcagaagttaccagtgattcaaactcactgagattatctgtgtctttatcctgcgagaaaaaaacatgcaccacaacggcttgttcgccgccttcataacgttcaaacaaaggtgcgacctctcaggctgagtaaaaaactacaggaaaaaacataggtaaaaccccctacctatgtttttcttcattctattactgatctcaaacttattcagtgccatcactttcctgttgtgctgccggagcagaaacgccaccagaatgataattacctacgctcgcccctacactcgtattgctactgtgatgagaaactgggcgggaaggtacaacagtagagatggcatgtttataaaccatctggctaaccgtatttttcagtaaaatgacaaactggtcaaaagattcaatctgaccctgcaatttgatgccgttgaccaaataaatagaaaccgggaccctttcacgccgcaatgcgttcaggaacggatcttgcaaagattgccccttagccattctatattttccttattttgttgtttttaactaagaacctaaaggttcgaaaaaatgaactactcaaaaattgcgctttggtactcatcaattgtacacaatcaataaacctatgcactaacaacctgcataactgtgcttaaagcttgctctggttgagaactatccaaccaatgaaccgacttccaacctctgagccaagttatctgacgctttgccaactggcgcgtcgcacaaataccgcgataaatcatttcatcgtaatcaatttcgccggaaagataagaccacatctgacgataaccgacgcaacgaatagaaggtaaatccacatgcaaatcatgacgagcataaagtgctttaacttcctcttcaaaccctgattcaagcatttgatgaaaacgcgcttcaatgcgttgatgaaggagctcacgttttgccggtgcaatagcaaattgatgaacacgataaggcagcgactctcctgacaatgtagtcagttcagtgagagttttacctgaaataagaaaaacttccagtgcccgagaaagtctctgtggatcattaggatgaattcttaacgccgccgcaggatcaatcttctgtagttgctgatgcaatgcatcccatccttgctctgccgcctgctgttctatttgtgcccgaataaccggattagcagaaggtaaaggcgacaaaccttcaagtaacgccttgaaatagagcatcgttcctcccaccagcagaggaatacggccagaagcagtaatttctgccatctccttcaaagcatcgtgacaaaaatcagcagcagaataaggttgagaagggtccaagatattgattaaacgatgaggtgccaacgcttgctcttcggttgttggtttggcggtaccaatatccattccacgataaattagcgcagaatcaacgctgatcagttccacaggaagatgctggcgtaaagcgacagataaagctgttttgcctgaagccgtcggacccataacaaaaattgccgttggtagatgttgagttttctgatcactcatgagtaagagatgccaccactgcttgtaaatcaattaattgtaataacccatctggtggagattttaccagttgtgggcaaagacgctcaacatcagctaataattgtaccgcctgagcaacgttccacgtttcatactcactgccaatatgacgagcaagccaagttacaacctgttctgccgatgctgatggctgttgtgccaaataacctagcaactcaggaattaatttaggcagattttgttgacgtaatggtaacgataccgcacatagtgtcgcttttccatgagatacagatgcttcaataccaaaagagcccaataagtcactataacggtttaaagcaccagcttcctctttactaagagatagtttcagcggtatcaacaatggctgtgatttcagcccttgctctgttggtgctaactgtgcttgtcttaaccagcgttcagctaccggcaaagataacaacccaagtcccaatggagattcaatcagagcataacatggtgaatatatgctcaataccttaccaaaactatgattgctatttttaacctgaacaggagcagaagtggccttttctgccataaccggagcggttcttgccggaaacagctctcttttttcttcaggttcagactgcatcagtttctgatatacctcaccctgacgtttctgataatgatcgccatgatattggcgattctcaccaccgcgagagccccccatattccctttacttgacaaaacctcttttggtgatgatgctgccacagatgtcgcattgctttgccgagaaaaatgatttccccctgctgatggccgattttccggctcccaggctggcgcaggttcacagcaagcgatatccagttcggcaccgcttccgcgctgttttaatacggctattacaccctgatagataaaatcatgtaccaaacgagcttgatggaagcgaacttcatgcttcgcaggatgcacattcacatccacttgatgtggatcaacccccaaatataaaacataagcaggctgttgttctccccggagcaaatcttgataagcttgacggatagcatgattaattaaacgatcacgcatcatacgcccgtttacataacaatattgaatatcaccgctcgcctcagtattcatcgggtcaacaacccatcctttaatcgataaatcgtcgtgctgccaggaaagagaaagtgcccgttgcataaaagcggtaccacaaatggagaccaaccgccgctcatactgtgattcatcttttgccggccggtattggcgcaccaatttaccgttatggtgcaaattgattaatacatccaaacgcgccaacgcaatgcgtctaacgacttcatcaatatgaccaaattccgttttttctgttcgcagaaacttgcgccgcgcaggagtattataaaagagatccaatacttcaacagtactgcctactggatgtgctgccggcttcacggtcactgccatatctcgcccttccgcgtaagcttgccaggcttcgtgctgttcttcggtacgggaagttaatgtcagacgtgaaactgaactgatactcgccagcgcctctccacggaatcccatactgataatggcttccaaatcatcaagggtagcaatcttactggtagcatgacgagccaacgctagcgcaagctcctgatggttgatgccacagccattatcacggacacgaataagttttactccaccccgctcaatttcaatatcaatacggttagcaccagcatcaaggctattctccaccaactcttttactactgatgcagggcgttctacgacttcgccagccgcaatttggtttgctaattgaggaggtaagatcttgatagccatatttaacctttacttcttggctgctttaggtgcagcctgcaatggatttgccagaaaatagttacgcaatccccgatgaatagcacttgctagcttatcctgaaaatcattagaacccagtaatgcttcttccgccgagttactgataaatcctgtttccaccaaaattgaaggaatatccggtgaacgtaacacacctaagctggcatgttctggcgagcgtttatgtaataaaccgaccttgcgcaactcactcaaaacctgtactgcaacgttatagcccacccgttgggagtggccgaattgcaaatccagcaccgcctggcttagataaggatcagccccatttgccagagcattacctgcaccacccagtaactccgactgtttctcatgctgttcaagccaattacccaattcactgtttgcacgcttgtttgacagcacccaaacagaagcaccacgcgcactacgattaggagcggcatccgcatgaatagaaatcagcatatttgcgctatgtttacgtgcaacctcagaacgaccagcaacagaaataaaatagtctccgttacgggtcagtacgggtttgaacataggatcattgcgtaacaacacttcaagcttacgcgccacactgatagtcacatttttctctttcaatccacgttgcccaatcgcaccggggtcctgaccaccatgtcctgcatcaatagcgacaactacccgctgaccgcccttagaagttgtttgcaaaacagcctgttttgtcgtccgcaatttactgttagtaagtgatagcttacctgtatcggcttgtgaactctctctaaaaacagacttgccagtaggtaccccagaagcccgtagggtaaaaatcacccgatattcactatccaactgctgcactatagagttgactttaactttattatttagttcaaatacaatgcgttttttttgtcgatcaggtgcctggctggaacggattttccttactaaatcctgctccggtaaattcataggtaaaccaacaattttttctgattgatggatatctaccactaaacgctctggcgaatgcaatgggaaaaaactgtaattagggcgaccaccggaaaaaaccatcgtcactttagactcatttatgctgttactgacgtgaatattggataaagtcgccgcggctgcggttgttaccactaaactgctcatcataataaacaaccagcacattatcataaaactgatctgccatttctttatcatttttgcgactaaaggacacatcatggtcgggtgatcccttataaatatttcaatttatctaacaggctctcaccatatttagacaaagcaataaaatgtgcctgtctcccttcgggctggtaactcaaatgtaattcaatatctgcatccggtaatacaccttctccttgctgaggccattccaccaaacaaatggcatcttgatggaaataatcacgtattcccataaattccagctcttccggatctgccaatcggtaaagatcgaaatggtaaaccgacctcggtgttaaagcataaggctcaaccaaagtataagttgggctttttacatgccctttatgacccagggactgcaaaaaaccacggctaaacgtagtcttaccggcacccaaatcaccatataaataaattacactaccactattacaggcagcagcaaccgcgcttccaagagaaactgtcgcatcttcatctttaagtgataaaacaagttctttcatcgaataatatctgttgttttattaattcatcagctaaaacgataaccctaacacacttctattatcaacatttaacatcttctgctcagtttcattatcaaacccactatttttgggctgaaataaattatgctatactgcaacaccttgcagtataagccgatttccaccatgacaacgcctctcaatcttaacctcttggccgccaagatcaaacaatggggtcattcccttggcttccagcaagttggcatttgcgataccgatttatccgtggaagaaccaaaacttcaggaatggctggataaacagtatcacggggagatggcatggatgaagcgccacggcatgatgcgtgcccgcccaaacgaacttttgccagggacattgagggttattagcgtaagaatgaattacctccctgcaaaagcttcttttgccagcacgctaaatgacgccgaactcggttatatcagccgttatgccttgggaagagattatcacaaactgctgcgccaacgtcttaagaaactcggggagcaaatccaaaattattgccatgacttcgaatatcagggagtccttaattttcgaccttttgttgattcagcccccgtaatggaacgcccactcgccgctaaggctggattaggctgggtcggtaaacactcacttatccttaatagagaagctggttcatggtttttcctcggtgagttgctgattaatcttcctctgcctatagatcctccacaagaagagcaatgtggacgctgtgtcgcctgcatgacaacctgcccaaccggtgcaattatcgccccttatactattgatgcccgccgttgtatttcctacctcacaattgaattggatggcattattcctgaggaatttcgtccactgatgggaaaccgtatttacggttgtgatgattgccagattatctgtccctggaatcgcttttcccaattgacagatgaagatgatttcagccctcgtgtaacattacatacaccaaagttattggatttattcaattggagtgaagagaagttcctacggataacggaaggttctgcaattcgtcgcatcggctatttacgctggttacgcaatattattgttgctttaggaaatgcaccctatcaatacgatatcattctggctctgcaacagagactaggattaaacacaatgctagacgaacatattcattgggctattgaacagcaaatcattcgccgtaaaacgaatactgttagtgtacaaacagcacaacagaaacgacttattagagcgataaccaagggcttgcccagagatgcttaattattagccatctttatagcgtataaaaagattcagataattttcctgtgaataaaataaaaaccccttgttgatcaatgctcaaaaaaagcgcaagtgatcaatgtgatatttcttaacaaaggatcattccgaaaaattatcaataagttacaaaataaatactcattttgtaacattcaaagtcaggaaaattcaaatgcaacagcctgtggataagtctgtgtgataattttaaagcatcaaacttatttaccgggaaaccaacttcctggctgtggataaaaaatagaaatctgcactgcgcagatataacccaaaaatcaaatcaaagtaagcgaatacaaccattgaggaagaaacttagagcgggaagtaaatccttcgaatatcagctaattcattgattcaaaagagattttacccagacctcattgacgaaaggagtgcattatgtactacctcaaaaagtttggcaagcagaagttaaaaaaatatttttgcaattataaggataatactttcttcccccctataaataccacccactgaactcagtacaatcggaatacaaagttggctaccgatgtcgaaaaagacaaagaatctacaaccaaacaatacccctttaggcataaacatcacacaacatcgatcaagccagcgcacagattcagacattcagccaaagccttcgcttgatccgccattattacagtgagattctttttattcgatcaaggaagatttgaacaaccataggaatcaataagcaagcaattttcatgtgcgccaatcatattagatatcgcaccgctattgcatgcaaataacagtaagataactcgctagcaatgaggattgaagaatgaaaagatttaccaaaattgcagtaggttttctagtattaaccacggctcagctctcctttgccgctaccagcatgtggtcacaaacgagccgtgccccaaatgtttatgctgccggctacactaactcaagtttctttaccacgccctcttcggtaccgacaagagcaactattacgacagtatcttggaatatcggtttatatagtaatggtgcgacaactcagactttcagcgtttgttacaccccacgatattcatccaccccatcgctatgcctggatgtctccggtaacctaaatggctctacaaatgcctttatcggccatgatgccaaaggttcctttagaattagcgggattctcgacggaggtacttaccccgtttacccgtcccattacaatatgatcaaagttgattatcagtattaagattaagcaatccgacctgaagcctcatggcctcaggtcattaataggaaagttactttagacaattttttcacgttctaagcacaatatgtgctagcagaaggacgtaacatgctattaaagctgagatcattcactaacaagctccttggaaaccggagagattgccgaactcaccatgcgaaattttttagtcgccaatgcgataaatgctttagcggccggtgacgattgacgttcatcaaacacagccaacccaacatgtcgtttcacttttggattcagcgttttcttgacatagtgaacttcatgagtcagcggcagggatgactcagcaacaatcgttaccgcatccccacgttcaaccgcagccaaggtacttaacaattgagatgttcgataacgaatattaggttgcaaccttgccgataaaaaaagcctggaaaccagttcagccgatcccgcttctgtcaacgcgaatggtccaacacacagatccttcaacgtcactgtatcctgcaatactaaaggatgatctaccggtaacaaagccaccatttggtcttcaagaatcggataagtgtcgaattgctcttccggcaaggtcacaaatcccacatctactcgcctatccataagccattgcacaacctgtctatctggcccctcatcaatatggacctcaatgccggggtaaagcctgcgataatcggccagtaccgttggtaacagccacaaggatgaagtcgggccaaacgatccgattcgcagcgtacctcgtttcatccctcgtgcatccgctgcttcttgcctcatagtttcagccagaccaagaatggcctgagctttttgtagcaagccttctcctatatctgtcagttcaacaactccctgatgccgatgcagaagctctacgccaagctcctgctcaaggactctgatagcatgggaaaccccagactgagagatcttgagctgggccgcagctaaggtaaagcccttccgttcagcaacaacagcaaaaatttcgagctgggttaaagtcattatctccccctttgagtaatcactcatttccgcatgatcatacatctgaataagtatatgcaatgcggatataaaacaataggcgaggcatgctcgccgagcgctcaaccgagtttccaacccataattaattaaaaaaggggattttatgagttaccaatggccttcagatggctcatcttccatatggccggagataaacagcacgttcttatccctccgtggattttcagacgaatttattcccatgaatgacactcagcgaacctacaaaaaactcctgatgggatttgatgcaatcacctcttgcgaaatgaaagagctttataaattcaaaatcacattaactcaaatgaacgagcacgatctctctctccctgagctttgtcttatccataaggcattcagcgcatgggtaaaatttgattacgaaaacgcgagatcgcttctgacccaacatattcgagcatacccatcggatattgtcgcgctcttcttcattcacatgcttgatttctgcactggcaaaacaaccaacctgagatctcttctgctttattgtgacgaacacattccgggcactcactatctctacccatattatctttccataaaatcattcgtcctttgtgaagctcaatgttttgatgatgccttagaggttggttttaaatctgttaagttaatgccggacaacatctatggcattcatgctgtcgcacatgccttgcatgagctaggccgctggaaagaactttgccatttcctgaccaactgcaaagaacattggataaccaacactggaatgggaatgcatgtatactggcatctcgccattgcgtatgagcgatccgatgagatcacgctggcattgcaagcttttgatgaattatatgcactaaaagacaatccatttgctaaacaggatttggacgccgtagaattcttatggcaactcaggctcaaatctgccgacgctaagttccaaccaatatgggagcgtcttgccgtcctttggacaggcagcatcagctcatccacctcttacttccacaaaatacatgcagcactcgctttttctgcaataaatcagtcttttcttatcgagaagctaatcgcggaaagcgatggatttggcatcgaaccagacacacattccacagggatagacgtccttaaagcgatcttactattcacatcgagacactacgaagagtgtttaagcaaactccgtctcagctatgagaaatggccattattgggaggtagccgtgctcaacgtgaaatattagaacagacgatggaatacgccgccttgaaagcctcttccaccctataaatcgcgatattgacaaacatgaaaagcaaccacgcatcaacgcagtcggtcaacaactactcaacctatatcaagctgtctcttgtggctatcatctggggcggaacatttgttgcaggtcgatatatttctgtcgagacaccacctttattatcagcaagtctcagattcattcttgcgggcatgacgctaattatcttcctcgttttatcaggaaaaatgttcgtcaagattaatctatcccaactattgaaaatcattggacttggcctcagcggaatatacacctacaacctgttcttcttttatggtctacatcatacaaccgcatccagagcttcacttatcgtggcgctgaatccagcagtaatggcgattttttcatatctcttttataaagaaaggcaatcaccattgaaaatactgggaattattctttgtctgcttggtgcaatgatcgtgattttcagcaaaacaccacaactgacggtgggagcagagggtaactggttgggtgatacgttgatctttggctgtgttttaagctgggttgcttatagcgtcttctgcaagaatattgtgaaccaaatcggcccgctacataccgttacatactccatcctggcaggcgctatcatgctgacagcaacggccattttcacagggcaaatgagtttatctgcaatacatacattgcccataactgatctctacagcttactttatctcggtgcagtaggctcagcggtagcctacatctggtattacgacggaatccaaagaattggttccactcgctctggcgtatttattgcgcttaaccctttgactgcggtattgctcggcgcagtactattagatgagagattaacattcccaatgttcatcggcggtgctctcgtcatcggaggcatcctgatctgcaataagagatcaaccgataaaaaacttattccaccagaacctaaatctgggatcaatcatatagcaaaagcaaagaattacaggagataagccagaaatttccccctatcgacactttggtacaaaacaaaagcgtcgatcttaatgagacctgatggcaaacctgatttctgaacttaaaaaccatgaatgtaagagacttcaataggcatttgtatatcaaaaatgggcacggagaaatgcaattcatagcctctttctaataagtcaaaaaataataatgaatgaaaacgataaaaaaagccgcattactttcatggtgcggccataatgccattaattattctaaatcattagagaaacagatctggccttacgttgaaacgctcagaaagtgctttaatgtgcgcaatcgtcaatgagcgtgtaccagagaaaatctggctgataagcgacttagaaccgatttcctctttcaggtctgagtaagagaggccgtgttgatccatcaacacccgcagcgccgcaacaccggtaggcatatcatctacagctttattaaatgcggcaaagcgctcattgctgttttcatagtcagcaattttagcggacagaaagtcaatcagcgggttttcatcatcgtgttcgataaggtaatccaccattgccaaagcgtcattataggcatcctcggaagtgctattccccaagaaaggaacagcagctaccagtagctttgtggcttcaagtgcttaggtaggttctgcaatcattctttcatctcccgatactgcttagttaatttgtcatactctgcatgagtggctatatgcttgacgtataggcgtttattaacgaaatttatataggcaatcatcagcatttgcttaattggcaagatgattttataatcaacaaattgactttttatagtctttatttagtcctttttgatgtgagggattctatgcgttattcagaacagatcaaacccattagctacctaaaagccaatgcagctacggtgatgacgacactcgctgagtcccgttcaccgatgattattacacaaaatggcgaggcaaaagcggtgattcaagatattgcctcttatgagcagactcaggaaactatagcgttgttaaagattttagctttaggacaacaacaagttaaagcaggtgaagtcacaccagtaaaggatgtggttcaacgcttaaaaaataaagggaagtccacctgatgccatatcatgtaatgctgactaaaaatgccgaagcagatttagaggacatttacgattacattgtcgaaaatgacagttcagagaaagctgattatgtattggatcagttactgaaaacagcagacagtctggctaactttcctgaaaaaggcaattatcccaaggagttgcaggcgttagggatccgcgacttccgccaaacattttttaaaccttaccgggttatttaccaaatcacaggtaaacaggtggtaatttttgtgattgccgatggtcggcgggatatgcaaaccctgcttacgcaccggttgttaagtgtatctgcatgataagaaagacttggagcgggaaacgagactcgaactcgcgaccccgaccttggcaaggtcgtgctctaccaactgagctattcccgcattactgactggtgatcacctgaaataatatatcaatcccaagaaaccaattgcgaatctaaacttggagcgggaaacgagactcgaactcgcgaccccaaccttggcaaggttgtgctctaccaactgagctattcccgcgtcactgactggctaacaataaccatgaataacatactgattccaaaccaaaatttggagcgggaaacgagactcgaactcgcgaccccgaccttggcaaggtcgtgctctaccaactgagctattcccgcatatcttttagtatgccatccataccttatgaaattcatcatcggtatggggtgcgcattatacgagaaatcgttgcgcccgcaagcccttcaatgcaaaaaaacaaacttttcggcaaaatgacgatttagccatcaaaatagattaattaatcgtcatactgtgcttgcgttatcaagccagttaaaactttctggcttacagttgaataaaatgttcccgataataggctaattcagcaactgattcacggatatcatccagcgcctgatgagtattctgtttcttaagcccagcaaggatttccggcttccagcgacgagctaattctttaagtgtactgacatccagatagcggtaatgaaagtaagcttccaattctggcatatagcggaacaagaaacgccgatcctgactcacactgttaccacaaatgggagaagcacctgccggaacccatttttccaaaaattcaatcgtcgccttctctgcctcacgatcatcaattttacttgctttaacgcgttcaaccagcccactgcccgtatgggtgcgtacattccatttatccatcagagcaagttgttcatcagactgatgaaccgcaatgacaggcccttcatccaggatattcaaatttgcatcggtgacaattgtcgcaatttcaataatgcgatcccgctctggatctaagcccgtcatttctagatctatccagataagattgtgctcactttttgacatgttatatcctagattggagagagagttattattaatggtgtatcatagcgcttttaagcaataacagcgataaattggaacaagtgaggttcggtggctaagcataaactatccaaaggccagcaacggcgggtacgggaaaatcatcagcgcaggctgaaaaaacaggataataagcctgaaatggatgataatcagttaggagaacctcaggaagggctagttatcagccgtttcggccaacatgctgatgtcgaggcagaagacggttctacacaacgttgtaatattcgcagaacaattcgttcattggtaacgggtgatcgggtggtatggcgtccttcgctgcaaacccaagcagatgtaaaagtaaatggtattgttgaagccgttcacgaacggacttccgtacttacgcggcctgactattatgatggtattaaacctatcgccgccaatattgatcagatagtgattgtgtcagccattcttcctgaactgtcactcaatattatcgatcgctacctcgttgcctgtgaaacattgggcattgagcccttgattgtattgaataaaattgatctgttggacgaagaaagccgtgcatgggtcaacgaaatcatgtccacgtaccacaacattggttacagagtattgaaactatcaagccacactggcgaaggtatggaagaattaacgaagatgctcgcaggtcgaatcactatttttgccggtcagtctggtgtgggtaaatcaagtttactcaatacactcttgccagaagatgaggaagagattctggtcaaccaggtttcagatgtttccggtttaggccagcacaccacaacggcatcccgtctttatcatttcccacatggcggtgatgttattgattctcctggtgttcgggagtttggcctatggcatttaacatcggaacaagtcactcagggttttgtcgaattccgtgattatctaggaggttgtaaattccgtgattgtaaacatcgggatgatccagcatgtgcgttacgaaaagcagtggaagataatgaaataaatcaagaacgttttgagaattatcaccgtattctcgatagcatggatcaaattaagccacgcaagacttttacagataacgatagctaactgacatcaaatgaaaggacaggtacaataacccccttttgtctaattttgccaatagaatccaagaggttgacgtgctggataacattaaaatcaggttgcactatttactgcctaaacagggaataactcatctggcaggctggtttgctaacaaaaaagctggctggttgactcaactggcaatcaaggcgtttgcccgtgtttataaagtggatatgaatgaagcgaaatcacctgagttttcagcatacatcacattcaatgagttctttatccgctcattaaaagatgatattcgcccagtcgtcagtaatgaacaccaattagcgctacctgctgatggtactatcagccagttaggcaatatccggacagaccagctccttcaagccaaagggcaccactacacgcttgaagctctactcgccggcaatcatcaattggcagagatattccgtgatgggcagtttgtaacgacttacttatcacctaaagattatcaccgtgtacatatgccttgcgatggattactgaaagagatgatctatgtcccaggtgatctattctctgtcaatccattgactgccgccaatgtgccaaatctgttcgctcgtaatgaaagagtcatctgtctgtttgagactcaatttggtcccatgatacagattctggttggtgcaactatcgtcggcagtatcgaaatggcttggtgtggtatggttacaccaccacgggaaggtattatcaaacgctggacttacccggaagccggtacaactggcgcgatttctttcaagaaaggtgaagaaatggggcgtttcaaactgggttctaccgtcattaacctgtttgcaccaaatcagatacagttagccgggcacttgagcagtggctcaacaacccgcatgggtgaactgttagcccaagctatcatgcttgaagaacccactgacaacataagctaatcccttgctaaggagagccctctatcgtgcgcctgattatcagcttattgcttagcctgctcattattactccggtttctgctgcgattccacttgatgaaaatcagctcaaacaagaactgaaacaaattgaatccagcaaaaacccgcaggatgcagaagttgctcaggcgctgcaaggtgcactcaattggattgccgatactaaatcagctaacgacagaacacaaaagtatcagaccgccattgatgattttcctaaaataactaaagaacttcgtcaaaaattacttactgaaagtgatactccccgcccaattcctgctaaccaacccatagcaagcgttgagcaacagatcattcaggtcagcagtcggttgctagaacaaggggggcaattacagcaagagcaggacaaaggacgggaaatcagtgactctctagtactattaccgcaacaacaatcagaagcacgacgcttgctaactgaagcatcttctcgcctgcaatcattaggaacaccatccaccccattagcagaggctcaatttgccttagctcaagccgaagtcaatgcccacaaagcgacagtcaatgaactcgaaatagctcaactttctgcgaataatcgacaggaaatttcccgtatgcgggttgaactgttcaaaaagcgatatcatcgacttgatcttgaactgcaacaactccgtagccaacttaatgcacaacgccagcaaaaagcagaattagccctggaacataccgagatgctggcggagcaaagtgatcaactaccaaaatttctgcttgatgaattgcaactgaaccggaatttatctcaggaattaaatcagcaagcacaacgaatgaacgtcatcggctcaaagcaacgccaagccgccagtgatattattcaggtccggcaagcattgaataccattcgtgaacaggcacaatggctcggaggctctacaacgctcggagaagcgctccaaactcaacttgcccgtttgcctgacatgtctaaaccacagcaacttgatcggaatattgtcaaattcagggtcgatcgtctgaaatacgaagacatgctggatcagttacaaaaagacacaaaacccgtacagaaaagcaacgttgcgttaactgctgaacaagagcggatttatgattctcttacccgcacccgcaaagaattactcaattcattattatctggttacgacagtgaaatccttgaattgaccaaattgaaagtcgctaccagccagctaaatgatgcactaacagaagtcaaagaggccacacaccgttaccttttctgggtcgcggatgttaaccctgtttcgctcaattacccgatcaatgttgtgcaggatctgactcgtctattatcgctggatactttctctcaattaagcggtgccctgatagtcatgctgaccactcaggatacgcttctatatctgtttggcacgctattcctggttatattcagcatcggttctcttcgccattatcatgcattccttgaacgcgcgagtaaccgtattggcaaagttacccatgatcacttttccctcactttacgtaccgtattctggtcggttgttgtcgcgttacctttgcccatgctctggtcggcaattggctatgggctacaaagcgcttggcagtaccctatggcaacggctatcggttatggcgtcagtgctacgacgcccgttctatggatattcatgctgagtgccactttcgcccatccaaacggattattcattgcccacttccgttggccggaagagcgtgttaaacgggccttacgattctaccagctatctatctttgccattgtaccgttggtcatggcattgataacgtttgaacattacagtgatcgagaatttgcttccacactcggcaggctctgcttcctcatcctgtgcgtctccttaagcctgatcactaacagcttgaaacgggcaaaagtcccgctctatctggataaaaatggctacggtgaaaatgttatcaataccgctctctggtggattttactctctgcaccgatagtcgcagcgctagcttccatactcgggtacttcagcacatcacaagcattgctagggcgtttagaaacttccgttgctatctggttcttcctgctggttatttaccatattatccgtcgttggatgctaattcagcgacgccgtattgcctttgaccgggcaaaacaacggcgggcagaaattctggctcaacgagccaaaggcgaagatgactcgacgggttcaagcagtatcgaaggtgccatcgaagttgaggaacccattattgatctagatgcgatcagcgctcagtcattgggattggtccgttcaattctaactctgcttgccttggtttcactcatttggctctggtcagaacttcattccgctttctcatttctagaaaatatccgactgtgggatgtcaccaccacaataaacaatgtagaaactgttcaacccatcaccgtaggttctgtcttgattgctatcttggtgattattatcaccgctcaactggtacgtaacctacccgcattacttgagttagccttactacagcatttagaacttacacccggtaccggcttcgccattaccacactcaccaaatacaccattactttgattggtggtttagtaggtttctccctgattggtcttgaatggtcaaaattgcaatggcttgtcgctgcgttaggggttggattaggttttggcttacaggaaatcttcgccaacatcgtttctggcctgatgatattgtttgaaaaacccattcgtatcggtgataccgtgactatccgcaacctgaccggtagcatcaccaagatcaatacacgagcaacaaccctgtcagactgggacagaaaagagatcattgttcctaacaaagcctttattaccgagcagtttattaactggtcattatctgacaccatcactcgtgttgtactgacaatccctgcaccggcagaagctagctgtgaagaggttacccaaatcctgttaaccgcggctaaacgcagcactcttatccttgataacccggcacctgaagcctatctggttgatcttcaacatggtattcagatatttgaattacgtatttatgccgcggaaatggggcatcgcatgcctgttcgtcacgaagtccaccagcttattttgcaaggattccgcgaacacggcattactctgccattcccaccatttcaagcgagtatcgatgttattggtcgggatattcgcagtgcgacaacaaatagatcaggccgtaatccaccacgtcaaccgggtagtttgtaaaaagataatgaagcacggagcacccgtacttgaatcaactaaccctatttcaggcagatatggccttttaccgccatcctatgcttgaaataggttttgcgaagcaatcaatgtcgcgccacaagaggttttcattccctccagtgcatatttgtccattagagctgattattctaggcgtcccttccacaatggtttgattaccaccatattttggacaggatacagcatccccaacccgagccgctttcttccctaacacatcaaagcttccatcaccggctaacaccttgccgccatgcgaagtcgaatcaccgaccaaaataatgggacgtgacatatttccctccattaactaatgattaaatattaatttcagcttccaacatctggctatcatgacgccataacttgattaaagaaaacttatctaaataaaactcattgaaataaattacataattatgttaatcaaacacctaaaaaatttacatcattaactgtttgaaacaaaaaattatacatatttaaattatcaaccttgatatccatcagctcaaaatataaatttacattaatatttgatcataaagagagcaaaggtaaatatgaaaaattttgaagatttctatcgggaagcactttcacaaataaagcatgatctgagcaacgcagcgcaagagcatccacaccttgctccatttacctccgaatccggtgaccctgatgttctccgattactggaaggttttgcgcttacaactgccggtattaagcagaaaattgatgatggcttcccagaagtcattaaccctcttctacgaaaagtatggccgatacctttacatccgatcccttcaaccagcattgtccagctagatatgcaaccgggcagcatgactgaaaccacaagcattgccaaaggcagtgaaatttccgccatacagcagaatcaatccattacattcagaaccactcaagatatcagtattgagcctattaccttgatccataaaacgctgacacacagcggagacaaaagcctgatatcactgacctttcaatatcatggcccaactacccactggaagacaggaccagtcacgctttttctcggagaagatcaaaaactggcgtctttattgaccaaatacatagatcagtcgctgaacaacacttatctgaaaacatccctgaaagagcaagaaatgtggctatctattgagatcgctccacgcctgaaagaaaatttggtcctgccgagaccacatgactatttctggccgttgcaggtgttatacgaatacctctatctgccacatgttaatgactttatgtcatttgatttatcggaagaaatcgctgagctccctttgggagaagataagcaatttaccattattctagaatttgactgtaatattcccatcgaggacattacacccgcatttattccccattgcatacccgttattaacctggctccggcaagaacaaaaccgataacatttgaaaagggcaaatcgcgttatgtattagaagcgaatgaaatctttagtattgataacattaaactccaatccgatcctgatggaacatctgaaggatctgctcacagtgttcctcttatcaatagcgcgcaactggccgcctgccattttgccgaacccggtgacaacatattactttttaaccatatacgggaagaatcgccatttggtggcaatcaaattaatctcacgttttatgatcatcaggcaaaacccgtaacagaacaccactatcgcgaattttactgccaatatcacagatatcatacgcaggcacggacattgggcatcggacaaatctgtatacccagcgagcagatacccagccatattcaggccaggaatatcgtggcggcgtcaaaagatcttcctgccgtcgtaaacagtcaccagcattggccgatactatctttgttgtcgattgggccattttttctcagtcatattgaatcagtcagatctctggtcaaacaacttgataccttcgcgcatctggacgccccgcgtagccggcatattcagcgcatggccgatggcctcagcgctatctaccttgagccatactaccattttgacaaaggcattcctgtgagaggccaagccatcacactgcgcatgacaccagaaaattatgaacatgaaggagaaatgtatgcttttgccaaaacactacacaccgctttttccctctgttttgttgaaaccagctttcacagattaaccgttatcaataacggcaccaatgaatgctgggaattttacaatatgcctgggcatcagaagatcatgtaattgaaggaagcattatgaaaaccggactccgcttttcctgcaccatcggcaatctgccgcccatgacttttgcggtagttaattttacattagatgaagcgctttcatcgttatttaccctgtctctaacactagcggcacaccgttcagatattgatacagacaccctgctgctccaaaccgggctgttcaccgttacccgtgacgatattctgcaacgtgaagtgaaaggattagttgaaagtgcggtagttggcaccacaaaccggcatcaaactcaatatcacctgacaatcagaccagaaatgtggctgctgacactcgatcaggacagccgtatttatcaccagctcagtgtccccgatattttacacagcatactgaaacagaagaaactccgggccaatatgcatttgaataacccacactcaacgcgggaatacgtcaccatgaaaagggaatcatcctacgatttctttacccgcctggcggctgaggaggggattttcttctggttcgccgatgacgggctctatctgagtgatagctacctgaacatgagagcgccggatacgttgatttataacccggacgtcaccagcgctgtagaagaaaatgttatctacaaatggtctcttggctcctacatgcgcccggaatctaccgaccaaaaagacagaaattatcacaaccccaattacgctttacagcataacgccacggattttgaagcggagaacggcacgccatttcatattttcgaaagttacggccgttttcagaaagacaaagagggcattccgttgacccaatatcggctggaagctttgcgtgttgacagcaaatcagggcaagcggacagtaattgtattcgattaatgcccggcagaatctttacactaaccaaccacccgattgacgccatgaatgaccgctggcaagtcgtctcttcccaacacatagggtatgtccccgccgttttaggcgataacggaaccggcaccactctgaattcacacacccagttcattccaggccgcaacgattggcgtccgccataccgctataaaccattggccgacggcgatgaaattgcaacggttgtcgggcccggcactgaagaaatttacgttaataaagatggcgcggttcgcgttcactttcactggaaccgttatgatgcgcctgatgatcaggcttcttgctgggtacgggttgcacaagggtggaatggcaacggatttggttttctggcaacaccgcgagtgggtcaggaagtgattatctcctatctcaacggcgatattgaccggcctattattaccggatgtacttacaacggccttaaccgcccgccgctgaatttacccgcggaaaagacgcgcaccacgttcagaaccaaaacgcataaaggtaacggctttaacgaattacgttttgaggacgcaaacggcagtgaagaagtgtttattcatgctcaacgggatatgaatacgcaggttctgaatgatgaaacccataatattgggcataaccggacagatcatattaaacatgatgcccatttacgcattgataatgagtaccgcgtacagacgggaaatgacatttccctatctacggggcaaaaactccatatcaaagcagatgacgccctgttaactcaaagtggcaatgaaattcacctaagttccggtgctaaagtcgtgattgatgccagcagtgaactgaccctacaggccgccgggcacttccttaaaatcgatgctggcggtattaccagcagtgcgagtattaactttggcagtggagcacccggcagcggctcaggttggggtggcaagctaccggataggctggataaactgaaacagacgagtgtcgtacaggtagaaaaagccctgacgacaccgttgaaagaaatctgtctgacctgtctgctgaaagcagaacagaatggcacagcaatggttatcagggggcagtcatgacaccggaattacagaaaaaatggagtgaatacagagaaatgcatcccgaaatgaaatggtatgccttagtcagcggcctacagtatgaacgtcattttgctgaggagattaagtatatcgtcggcacgaataatcccctgttccggcaatacccggatgccaaaattgcgttcgcggggccgtggttgtttgatatggcttatgcgaaatcatgggaagaaaagttatctgcgctggaaaaggttgcaccttcggtgtcctggctacacaccacgctatctttggacaaactaacccgtcaccttgaaaactacctgaatgttgagctggaaacgggggaaacggcattgctgcgtttttacgatccccgcatcttgcatcaaatccgggatattttcagcccagagcaattgtcagcattcactgacggtattcatgagtgggtgtattcttttgataataatgatcatttcgtaaaaggggcctaacgatgataaaactcagcaaggaacaggtcgctaaatttattgatgcggaagatgaggcttatgtgacccagatccgacaacgtattctggctgagcacagtggattagtcgaaaatgaaagcgaacatagcctgcacgaacgattaaagaaggcttatctggacttggttgagatggggttcaaggatgaagcattgatccgctcttacttatatttcgttgcgtttaaccgtgattttcacggctcgccagcaatccaaaatatgttgaacgccggagataacccggaacaacaataccgtgattatttgcgggttatggataatttattgaaaaggagaaattaacatgccattaccacttcttgcgccagcggctcccgctcttttagctgcggctgaatggacactggctgcttgtgcaacaggattagccgccgttggtgtgatggaaagcaccaaagataaagaaggtgaacaagacaaggcaaaagcggatacacaaacaattgcttcgtccagtaccgaatgtgagaaatgtccggcaattggcaacgttacaatggcttgggaaaaaaccacatcgtattcagaaataaccattgcctaccaaacaaaaattgccgggacgatatacaatcctgaattaaacctaattgaaacttggttatgcatggatacaaattttgatggttggaaacctgcacaatgcttatttcttgaagctaaagctaaatatgatcaatttttcaaagatggaatgcctataagttggtggaaaataagtaaaagcggggatagatccatgacgactcaagtagaaaaacagcaagaagtatgcactacattaaatggaaccccaaattctcactggcattttatgcaacctataagctatgcctattatttagagaaattttctatttatcccaacattaaagtatttcacactatttaacatctaagtaaaggtgaaaataaatgactacattatcattaaacatgaaattatatacagattggaaagaaccattaactccaacaatagttattaccgatttatataaaatcacacaacaagtagatatattttttagacgccataaaacttggtatttaccaggagatactcgtcaagaatctttacaacatattgcttttgatcagcaaggagcaacaaaagaagcaataaaagagtttgaagaagattatacagaagaaaatcctataattattaaagggatttgggatggtgaagatgatgaccattcatgttcaatttgttatatgaattatcgtcgagatcggttaggacaaacccaaatagattttcatatatctattgaagaaaatgaatttcagctatcacgattaatcaactttattaattttctgatttctactcataatgcaccttacattatggcagaaaacaatacatatagaataaaaagaaaacacgttttcccagatcgtttaagtgctggctggatgctctatttaccaatagaaatagacccggctttagttccaatggcagaagaaataatatctatttctgataaaaataacaaaaaaggctcattaattattacaacaaaagatatctttgatattgaaaaccaggagcatatcaataaaaccaatgatattgaaatatgtttacgggatttacaaatactaccattgatgacagagttataaatatgacaaacagagccgtaatccgattaaacgatctaaccgatcatggtggtaaagtcattaccgccattgataattacgtgtatcaaggcgtacctgttgccgctaaaggtgatttagtaaactgccctaagtgcaaaggggttttccctattgtagaagggagcaatgacttaaagcatcagggaaaacctattgcattggaaggtatgcaaacagcctgtggcgcaaaactgattgccagtcagaaagattttctcgcttaatgagacgacaatcattttggcctatttaaggcaacactgacgcgctgcgcttgtcttctccattgtaccgggctaatacattaatccggtaaaatagagagccgagaaaaataccgtgattatttgcaagttatggataatttattgaaaaggaaaaattaatatgccattaccacttcttgcgccagcggctcccgctcttttagctgccgctgaatggacactggctgcttgtgcagcgggattagccgccgttggtgtgatggaaagcaccaaagataaagaaggtgaacaagacaaggcaaaagcggatacacaaacaattgcttcgtcccgtaccgaatgtgagaaatgtccggcaattggcaacgttacgatggtttgggaaaagactacatcgtattcagaaataactattgcttatcaaacaaaaattgccgggacaatatacaaccctgaattaaacctaattgaaacttggttatgcatggatacaaattttgatggttggaaacctgcacaatgcttatttcttgaggccaaagctaaatatgatcagttttttaagaatggtgaaccagattggatttttggtgagtttagaaaaacacctaccagcaaaacaggggcagaaagtacaatttggcaagcagaaagacaaaatagggtatgcataggattgaataatattccaaagtctcattggcattttttgcagcctatatcttatgaatatttttctgaaatgtttgttccttttactaacattaaaacatttcatacgccaatgagttgatcaaaagcctataactattgctgaaaatttcaaacaggattaatgattatgagtttaatacatccaagaataaaattgtttcacgaccttaatgagccaataacacctgaattggcgttaagggatgcatatcagataatgcagaaaataaataatattagtagtaacccaagttattggcatttaccaggatatagtttagaggaaatagaggaaaataatgtatttactgatgctggttttactgaatatgctataagccagcttacagaaaattatgataaagatgcaaaatatcttatagctactttatttgacatcccaggtgacattgaacttaaaaatagaattttttatcaaagcagtgatgtaatttacaataatagactaggaaaaacaaatatatccattgatcttaacttagtgaaagaaaaatttaagattcaaactattatagagtttgttaaagctttagcatctactcgtaattctccaatcgttatgactgaaacacgaggatatagattgaaaaaaaagcaagtattcccagaccgaataagtgcaggttggatgctctatttaccaatagaaatagatccgactttagttccaatggcagaagaaataatatctatttctgataaaaataacaaaaaaggctcattgattattacgacaaaagatatttttgatattgaaaatcaagatcatatcaataaagccaatgatattgaaatatgtttacgggatttacaaatactaccattgatgacagagttataaatatgacaaacagagccgtaatccgattaaacgacctaaccgatcatggtggtaaagtcattaccgccattgataattacatgtatcaaggcgtgcctgttgccgctaaaggtgatttagtaaactgccctaagtgcaaagaggttttccctattgtagaaggtagcaatgacttaaagcatcagggaaaacctattgcattggaaggtatgcaaacagcctgtggcgcaaaactgattgccagtcagaaagattttctcgcttaatgagacgacaatcattttggcctatttaaggcaacactgacgcgctgcgcttatcttctccattgtaccgggctaatacattaatccggtaaaatggagagccgagaaaaataccgtgattatttgcgagtcatggatcatttattgaaaaggagaaattgacatgccattaccacttcttgcgccagcggctcctgctcttttagctgctgctgaatggacactagctgcttgtgcaacaggattagccgccgttggtgtgatggaaagcgccaaagataaagaaggtgaacaagacaaggcaaaagcggatacacaaacaattgcttcgtcccgtaccgaatgtgagaaatgtccggcaattggcaacgttacaatggtttgggaaaaaaccacatcgtattcagaaataaccattgcctaccaaacaaaaattgccgggacgatatacaatcctgaattaaacataattgaaacttggttatgcatggatacaaatttcgatggttggaaacctgcacaatgcttatttcttgaggccaaagctaaatatgatcaatttttcaaagatggagaacctaatgacttttataaaaatataaagttaaagggaaaaatgtctggatatgacagtatgattaatcaggctaggaggcagaacttagtgtgcgagacattagataatattccaaaatcccattggcactttctagaaccaatatcttatgaatactttcttacggcattttctatgtttcctaacattacggtatttaacactaaactttaatcattctcacaaaaggagaattaaaaatgtcaatgatcttttcaagaataaaattattccatgacttaaatgaggctttaactcctgaaaatgcattacttgatttatatcaaattacatgcaagataaataagttaacaactagaaaaagtggttggtatttacctggttatactcaagaagagagattaaaaaataatgcatttgatgaaaatggacctactaaatatgctatagaagattttaaagaaacttatgatgaaaactctggatttattgtgaaatcattatctgatggagtagatgagaacaacaacagtattctatatatgggtgaagataaaatccatgttaatcctgttagattaggtaaaactaatatatctataagcatcaatttagataaagataaatttaattttcaagatattattgagcttttaaaaaattcaatatcgattcgaaactctccatttatgttagtagatacaagaggttactcgttaaaacaaaaacaagtttttccagatagggtttacgccggttggatgctctacttaccaattgaaatagatccgactttagttccaatggcggaagaaataatatctatttctgataaaaataacaaaaaaggctcattgattattacgacaaaagatatttttgatattgaaaatcaagaacatatcaataaagccaatgatattgaaatctgcttgcgggatctacaaatattacctctgataacagagatataaatataacaagcaaagcagctatccgattaaaacgacctcatacactgaaccttaagcattaagcctctcgacaataccctccaacgtattgtctttattggattttctttgaggcaacttcaacgcgtttttggagagatatttcagggcccaatccagatggtgttctatttccgacccggcatgatgaataatcgcgcccaatatcggcaacaaccagacatcaacatttttggctgccttgagaaaggagactgaaggcaaaaaccgtctcgccagactgcgccggactatcaacgccagcagacttgcccagatgagtccttccgctatcgctttctgaccggtcgcaaagcctgtccggttggtgtgggattttaattccttgaacagcagttcgacctgccagcgacagcgatagagcgccatgatgtcatctgcggtaaagtcggatggcggcaggttggtgagccaaaaacagaagcgcttttcctgcgcgaaccaacgccggatgacccgaaattcgaatcggccacgccgacaggtgaaatccagtacctcatcgcggttatttttgcggctgatgtccctgagttttttgccgccagtgtcggtaattgtcgcccctgtccattgcgggcactgacaatcaggggattaagcgattggcttccccgcacgataaatgaaccactggacaaggaaagttgttcaaagtacccgaaatccacataaccggcatccgccagcagcaatttattgcgtaaggtatggggagctggtagataagcccgctcagatgccgtgtctgcggtcaccgtcatggcgatgggtgattggctgaacaaagacagggtcatatggcactcaaccgctgccttcaatgggctgaagcggcagggaaaaacccccgctaaatcgggatgaacgttgaatgagccgccatcctgcaagaggatatcgtcaaactgctcaaattttttgggtaagggcggcagaacgttttcaatcaattgaaccatggcgaatgtcaccagtttcttcataaaatcggcgaaggtgcttttacgcaactgattatggaagggtttataggcgacagtgtgtttttcactcaggcacatgccgttaaactgccggtgcaagtcagcgatggaagtgcagtttcctttgctcaacgcggctatcaaactgagaaccagagactgtggcccaatatttctgaaccgctccataaagccacatctgcgggccgttttttcaagaaaagtgtcactgaagaattgcattaactgaggttttgtggagataattgtcatcggctttattctctgatctcggtattttgtttggcgacaattatcagatcataaataaagccttttttctatctaaaataacaggttgccgctaaagatcctgtttatgaagatggcttattaaagccgagtggttttttaggaacatcaggcgcggaactcatcgaggcgcgggcatccttgcctatagtgacgccggatagatttaagcaagctcaaaattcatcaaaattagtgttgcaaaaacgagggtgaccatagatttaacctttcatatggaagaataaaaaaatccgcctgtacttaatatcatacaattccctcgtctttataatccttcttactaagaagaataaccatcaaaaaataatatatagaaggaacacaatggatatctatcaggaaagtatcagatttttaggtaacggtgccgatttcgatgaaaatggattatttcaatgtgagttatcattcgatactaatgaccatggtgaggcgcttttcttaaccatatttaagaatgaaacaaccattaatttacacatatctctgaccagtccagttgaattaccaacgcctcttccagaagcgattgcagtcgcgatcggtgaacacgcgctagaaccttttagaggtggctttggtattggcttaatgcctgatagccgtagattaacgatttataagattatttctctatcaaataagcctcaaaattatgtgcaaaacatctttcagcaactgttagaaaaaatggagcaatggcaccattttattgaacaaacgaataacgcagaaacgatcccagaaaaactacctgtcgggatttttatttaatccctgcagcgaacacccctatttataatatgaggttaatttatgtcaacaattcaaattaatagtcagcacagaggtagtttagacttcgcggatattcaaaatatcaaaaccaatgcgaaagaaggtgatacggttaagtttggctctgtatttggtaaagaataccgcgttactaaaaacagtgatggtgaagttagcctaaaacaaaaagagaatcgcagcttttttaaccgcttctttagcaatacagattcatcgaaaaacagtgatttaaaactgaatctgatgaaccaacagctgcacaaaaaagagaacagcggcaacgttaaggtcttaacattaacctacaaccaggctaaccaaaagatgccggaagagactaagaactacttccagaatctgatccaaaaaggtgattatgatgtggtcttgtttgctgaacaagagtctaaattgcttgctaacgacctagaactcgatggcatgaacctccttagccaaaacaaaatgaaagtaatgaccaaaggtcttggtgaaggtgttagttatacttctatgtctgtttttgctaaagatggcgtcgatattaacgtgaaaaaagagtctgagtatcgtcacggtatcggtggacgaaacatggcattcttcatgggtatcactggtaacaaaggcggggtgaaaaccgctttagagatcaatggccaagctttaaacgtgatttccgcgcacttggattctaacaaagaagtaaagcgtgaattcgaaggaaacaagttgatggaggggatcaaaccgaatgaagaggttctgatcaccggcgatctcaatgaacgtgagaagcgtgttgctgaaggctctgatgtgctgtacgacccaattgcacacgatgatacgcatttagcaaaacatggctttaagttcaaaccactcgatagccatacttacatgcagcttgataagcacactggcaatattaaacagaaagaaggtcgagatcgccctgatttcggtgagctcgataatactggtttaaccaacaaaacgggtaacttacagaaccatgaaaccagtgtgatcactgatggatttgtgaatgtcagtgaccacaaaccagtgcagtctacgtttgaggtaagaagtttctctcaaaaactcatagaaaacgcgatgactcaaaatgctggtgacttcaaaaatgacgcggcgtacctaaagcctggtactgatccagctaacgcgacgtttgacgatgtcacttccgctaaccaggcacgtctgggtttagaaagcttaagtcccaatgaacaagagttcgtaaaagagaacttttcgagttttattatcggtaaagatgcactcttcagtcagttaactagcggctttatggaagagatgggtcaacttcacgcatctgatcttgttaaaaacccagctcaactacaaacgcagcaaattgcattaagtgaaaagtacgaacttctcagtgataaagtgaatgctgaatttaataaacaattcgttgccaacctctaatagcaatctaacaattgctctctgttagatattaaaagcaaagagtggtcagtttttgaaagggcgtttatcccgaaaaaagtatgctaaattgaaaaattggcatactaatcagctcgaacataacgaaggcgattctaccttaatcgggtgatgcctccgatcggttgaagcggtatgatgggtgcttttgagactcagcacttcatagcatccatcaccgttcactgtcctcgttgccactccgaccgcgcatatcgccacggtaagacccctgccggtcacgttcgctatcgttgcccagcctgtccccatgtttttcagctcacctacacctatgaagctcgcaaacctggcgtcaaagagaagattgtcgatatagcgttcaacggctcgggtgtccgtgacaccgctcgtgtcctcaagattggcattaacaccgtcctgcacgccttaaaaaaatcgcaccaaggcaagtaactaccgattggaatgaagattttacgagcagctttgagcgataaaatttctatgaataacatacatcaaacagcaaatcataaccacccgcatagcgggtggtttgctctagccctataagggcatattaccgactgcgcctaaatgacgccctttctcttcgttcaagctaagtgtctttgcttctttggcttaccccttgaaggggtcttcatgctctcgtgtacttaacttatcctgcattaaatctgacttttcttgctctctgatgtattttcggattgtggcttcatttagccctaccgtactcacgtagtatccttctgaccaaaacttcctattgccaaacttgtattttaaattggcgtgcttatcaaatatcattaatgcgcttttaccttttagatatcccataaaacttgaaacacttattttaggtgggatactcaccagtatatggacgtgatctggcatgagatgcccttcgatgatttctactcctttatactgacaaaggtctcgtaaaatctcacctatcctcgaacggatacgggtaaaaatgacttttcgtctgtatttcggcgaaaagacgatgtggtatttgcacagccactttgtatgtgctgagctttgtgctttaattcccataaacacctttccttatttgagttacgtatattagcttgaacatctatatcgtaacggaaaggtgtttttcttggtataacccttgatttccacccgcatagcgggtggttttatgtttaagaagctgacgctacttaaactggctaaagccataataatctgacagcgccaatagcgctgcaattaccgtggataataaattaaacccgatacatttcgcacaaatagtggggaaccgcatcatcagcgtttgagccaatcacttccatatccggcaagatatctttcaaacgctggtgagcatcctgcataatgcagcccttacctgctaccgtcagcatttcaaagtcattcatgccatcaccaaaagcaatacaatcactcagtttataacccatagcttgggctacctgctcaagtgcatgacctttcgaaacaccacccgccataacttccagacaattgcgcaacgagaaacttacattaacgctatcaccccaacgcgctttgattttctcttccaacgcaaccaatagatcatgatcttggcaggtaaaataaactttacatacgtcatcggttttaaagttgtcacgctcaaaaagttgataatgaaacaccgattcctgaaaaaactctttctgctcagggcattcacgattcatataccagtgatcatggcaataataattcgtcagaatatcaacgttatcaaactccattagacacaagtcatgcacaatctcaggatcaacattgtgactgaaaaccagttctcccatagcattgtgcacccgcgcaccattggaagtaatcatgtaggcatcaataccaagaacatctcggatttgcgcaacatctacatgatgacgaccagtagcaaaaataaaatgaatgcctttattggtcagtaaattaagagtttccttggtgtaagaagttaatttgtgatcaggagacagcaaagtgccatctaaatctgaagcaacaatgtgatacatagttatcattcctataattgaatcaattctggtcaaaaaaatcacaaatggcgttgagtgcctggctacgtaatttatctttttcaaacaggatctcatgatgcgccccttgaataatcaaaggtgaacgttctttgatgaaagccctcactttattacgtgattcacaaaaagcccgtaatcggcaattattaacaaccttatcttcactggcttttaaaattatcaatggcgtctcaatttctccggctttttctatcagcatatcgccaatccagatactttcccgcacccaacgatatgtcggtcccccgatatgtaattccggataatccgcgtaataacggaggtaacggctataacgttcataactgtgtgtcagaaggtttatcaaataaggcaacggacgccatttcccagtaaataccgcataatggttgcgcatatccggccgcttttcagcccgatttaccaggaaagttgccaaccaacgtggcataggaaagttaataccaaacataggagcacaaagggctgctgcatcaaatacctggctgtgacgtaataaaaatccccctaatattgccgctcccattgaatgagctaacgcataacaatgagaataatgacgaggaagaatttctctttctattaatatttcaacgtcatcaatataatcatcaaatttttctacatgccctttttgtggatctgcaagtatcctgctggatcgcccctgcccacgatgatcaataataaaaatgtcgtaaccaaggtgataaaaatcaaatgctacttccgagtatttgacataactttcactacggccaggaaagataacaaccgctctatcattttttattgttgtgcaaaaacgaacataacgtatcagtacattatcgacgccgataaattcacactcttccctagcttgccaaaaatctaacagaggcccattggcaaaaacagagaactgcacctcacgattgaaccaactttctttcaacatttctggcgtcataagttgccctctgactatccaaactcctctagatgttcacgaattaaggccataaagacattaccaaaacgttcaagtttccgttgccctaccccgttgattaataacatttcaccctccgtaaccgggcattgctctgccatttcaatcagcgtgacatcgttaaatacaacaaaaggcgggatattttcttcgtcagcaatagatttccgtaatttacgtagcttggcaaatagtttgcgatcataattaccactatacgatttactttgctgactacgcccttttagattctgtattcgtggaacagccagttttagcgaaacttcaccacgcaatatcggacgtgccgcttctgttaattgtaatgcagaataattggcaatgttttgactgataaagcctaaatgaataagctgccgcaatacactcacccagtgttcctgactttgatctttaccaataccataaaccggcaaatgatcatgtctcatatcacggatacgctgattattcgcacctctgagcacttcaacaatatagccgataccaaagcgctgcccaacccggtaaatagaagaaagcgctttttgggcatccaccaagccatcataattttttggtggatcaaggcagatatcacagttaccgcaaggggtttgtttgctttcaccaaaatagttcaataacaccagacggcggcaagtttgcgcttcggcaaaagcccccattgcattgagcttatgtcgctcaatatcctgctgtgtgcccacctctttctcttccagacaacggcgaagccataccatatccgcgggatcataaaacagcaccgcttccgccggcagaccatcacgcccggcacgcccggtctcctgataataggattcgatattacgaggaatattaaaatgaaccacaaaccgaacattgggtttattaattcccataccaaatgccacggttgccaccaccacctgtaaatcatcacgttgaaatgcatcctgcacccgcgcacgttgactgttatccaacccggcatggtatggcgcaacactcaagccacgtttttgtaaacgctctgatatctcttcaactctgctgcggctgttgcagtacacaatgccacttttacctttctgaccgcgaataaatagccacagttgatctaatggtttgtatttttctatcaaggtataacggatattgggacggtcaaaactgctgatatggataagtggattattaagattcagtagtcggacaatatcattgcgagtcgtttcatcagcggtggccgtcaacgcaatgacaggtaatgtcggaaagcgttgcctgagctgccccaatgcccggtattccggccggaaatcatggccccattgtgaaatacagtgggcttcatccacagccaacatggctggttgccattccagaagttgctcaaggaagttatccatcatcaaacgctcaggggcgatatacagcaatttaatcatgccctgacggcaacgccggatcacatcaatctgttgttcacgggcctgagttgaattcaagcaatctgccgcaacgccatttgcccgcagttgatccacctgatctttcattaaagagatcaacggggaaacaaccaaagttaccccttcctgtaccagtgccggaatttggtaacataatgatttaccgccaccagtcggcataatgaccagacagtcacgcccttcaagaatggtatcgataacttgttgctgaccagaacggaattgcaagtaaccaaaggttttccgcaatacctgttctgccagtgatatcgtattaatgacctctgcggtagacacgcttttcctcaaccatattaaaaaatcatagacgccatgcaaaacgcctgagcattatgctatctcactctcgaaataattacagcatgtcattgaacatcatctcggtataaacgcagattttgttaaacgttatagccgctcaaaaattcttccccaattcatcttactcatcccaatgcagcgccataacaccacatttttgcctgctatttaaacaaaactagagtaaatccttacacttacacagttgttaatgataataatttgtattaatgttatcaaaattgaataccccaaaagtcacctgtctaagagaaccggaatgaatacctggaaaaggatgcttatattcgaaaatttcagaattaagcgtaccgatttgtttccagtgtataacgactatgttggatgtgatttttgattatgaatagggattgttatcaccatgagttcactgcatattaactccgataatcacactctgcatctcaacgcagagaactggctctatgccaatcgccatctggtgacaaaaatattacgtgagctatgtcacgaaaaattaattaaccctacctatcatggacaacagcaatattctctgacaataggtgactaccaataccattttcaagcagaaacttatcagctcgatcatattgatattgatgccgcttccgtaaccaaactcagggataatcaatctcagccacttgatgctattcaactgattattgagttgcatccgctgttggaaatcccggaaaaaatgctgccgatttatctcgacgagatatccagtacgctctacggtcacgcttttaaatatcagtacaaccgacttacagcccaagatttagcttatgccgattatcaagtcgttgaaacgacaatgagtgaaggccatccagtctttattgccaataatggccgaattggttttgatgccgatgattatcagcgttatgcacctgaaagcgctagccccgtgactttaatctggattgcggtacataaggataaagctattttctctgcactatccgatctttcataccaacaattaatagaagaagaattggggaaatatctgccagcccaatttgaacgccaccttaatatgttgggattatgcccgtcagattattatctgatgcctctccacccttggcagtggcagcaccgtattgcgatcagctttgcagcagatattgccaataatcatattgtttatcttggagaagggcatgatcgttaccttgctcagcaatctatccgcactttcttcaacattactcaaccgaagaagaactacgttaagaccgccctatccgtgctcaacatgggctttatgcgtgggctcgatccacacagcatggtcacaaccccatcagtcaatgagtggctcagcaacttagtccataatgacagtttcttccaacagaagggttttaccgtattacgggaacgtgctgctctcggttatttcaataactactttgaatcagccattaagaaggacagcccacataagaaaatgttgtcagcactgtggcgcgaaagcccaatgacgctgttgcaggataaccaacgcttgatgacaatggcttcgttgctgcatgtcgattatcaaggtcattccgtcgtcgcagctttggtaaagagttctggtttagatgcagaagagtggatatcacgttatctcgatgcttacctctcgccattactgcgctctttcttcacctatgatctggtatttatgccacatggcgaaaatctgatgttggtattggataataacagcccaacaaacatgttgatgaaagatattggtgaagaaatcgctattttgaatggtgatctccaattgcctgaagagattaatttcctgcacgtcactatcgaagacgatatgaaaattaactatatcttccttgatattttcgattgtttcttccgctacctgattccgctgttgcaaaaagatcttaatctacccgaagagcgtttctggctactggttgcacgctgtgtccataattaccaatcacaacatctgcatcagattgaaaaattccgccagttcgatctgtttaagcgggaatttattcgtacctgtctgaaccgtctgcaaatggcaaacaatcaacagatgatcgacctcgacgatcgcgaaaagaatctcaaattcgccggaaccttagttaacccgctgtacgctttacgccatgaatactcggttattcttcatcaagccgaacagcaataaataaaaatatcaacatagataaataccaaaagatttaatttggggatggaatgaataataagaaagtgatgtatccgtttttgcaaaaggattccatgattaaaaaaacaactcttgcaatgactatacagttagtattaatgggaaatagctatgcaatcgcggaaagtgcacagaataagagcgataaaaccgctgcccaaaatgacaagatactcgtcaccgcttcacgaccagaacatgaaggggtgaccgaagacaccggcatgtacaataccacgtcgatggtcaccgccaccggtctaaacctctcggcgcgtgaaacgccacagaccgtcagtgtcgtgaccaaacaacggatgcttgacgaaaatctggacagtgttaatcgcgtcatcgatagcacaacgggtatgaacgtacgccagtttgatagtgatcgtttcgggtttacttctcgtggcatgtctatcaataacatcctgcgtgatggggttgcgacctactacgacactcgctttaactatggtgacaatcttttggatgctgacctgcttgatcgtatcgaagtggtacgtggagcagccggtttgatggttggcccaggcaatccttcggcagccgttaacctgattcgtaaacgtccaacccgcgatttccgtggtgaattctctgccggagcaggttcttgggataaatggcgcactggccttgatctctctggcccattaaatgacagcggcaacctacgtggacgtttcgttacagcctatcaagcggctaactcttttattgatcgcaataacaacgaaagatacccgttctatggcgttcttgaagcggatttgacagaaaataccttgctgactataggcgtggattatcaacgtaatcacacccgtggcggtatgtttggtggtttgccgatctactttgcaaacggcagcaaaacagactataaacgcagcgacagctatgcacctgattgggctttttcaaaagttcggaccttctctacctttaccagcctgcaacataactttgacaacggctggagtgtaaaaggcacctttacttatgataatagcgctctggaccaaaaagtcctgtgggcaacaagttttcctaaccgtagcaccaatattggtatggtgccaggtaacatgacactcatcgatggcagccgtcgccagaagaactacgatctacaagtgaacggtgactaccggttgtttaaccgtacacatcatgtcagcttcggcttaaaccatcagcaacaggatttccaaaacgattacttcaacgcaacctgtatgcttacacgtccaaatagctgtccaggaataggtgacttcacctctcctggctggcaatatcctgaaccagagtggagtaatacgcgaacttatggctcgaaaggccgtaatgaacagacctcaggttatgcagtcactcagatttctctggcagatccattgaccttgatccttggtggtcgagtaaccagttggcaaacacgtggtgataatttcaatactccacaaaatgccagctacagtgacgaatttgttccttacggtggacttatctacaacattactcaagacttgtcggtttacaccagttataccgaaatattcaacccggaaaaccaacgtgaccgcaataacaaattacttgccccagtgtctggacaaaactatgaagtgggcctaaaaggtgttgccttcgataacagtctcgattattcactggcagtctttgaaatccgtcaagataacctgccattagtggataacaatgccccgagactaccagatctctccattcctcgttatacagtggatggcaccaaaactcgcgggttcgaagcagaaatcagtggtcaactgacagataactggcgtctttatactggttacacgcaattccgggcaacagatcctaatggtgtgcgaatcaatgccaatacgccaaacaggctgtttaagctgtttaccacctacaccttgccaggtgcgatgagcaatctgaccattggtggtggtgttaactggcaggataaaacctggttgaccgttgatgggcctggaaaaacatcaatgcaagcggaacaaaacagctttgctgtggtgaacctgatgagccgttatcaattcacaccggatctctctttgacggttaacctgaataacgtctttgataagacctactacacccagttcggccaatattctcagtattactatggcgcacctcgcaacattgaagcgatcttgcgttataagttctgagtttaaagtcataatgacactgcggacggcaaaccttatgtttctatttatttgaaggaaagcaaacaatgaaattgaagcgttgcaaagggtttgccgtaccgttgatgctgttggtcagcctgttggctggctgtgataagccagccagcacaaacaatgcaccgtcagataagcccggctatcctaaagaaataactaccgccttgggtaccgcggtgattccacatcaaccccaacgtgttgttgccttgggtgcaggagcggaagatatcgtactggatcttggcatcgtccctgtcggtatcgaatcccaccgttggggcggggatgaacagggctatctaccgtggtttaaacaagcgatacaacagcgtggcgagactttgccaactgtgatagagatgtaccctgaattagacattgagaaggttattagtcttaagcctgatctgattgtggcaacccaatcaggcctcacccaagaaatttatgaccatttatcatatttcgccccagtgatcgcttatccatctgccccttggctcacgacaccacaacagcagattgaattaattgctcgtgcgctagataaacagccgcaaggagagcaactcgctactgaactgaatgtcatattgcgcgaatcaggtaataccatcccgcatatcagtggctacactttcgcctatatcaaagcgggtatcagcagtaacatgctatcggtatacgttagaggtgatcctcgtgtcgatactttaatacacctcggtttgacgctactgccatcagtcagcacattagccgatcccttcggcagtttcgccgctaatataggactggaaaatgccgattatcttaatggcgcggatatcttagtaacttggttcaataatgaacaagaacgtaaggcagtggaagcacaaccactgtttcaatctatccgtgccgtacacctgggaggttatatcccactaactgaccaatcattggtcgttgccatgtcttacggtacaccgctcagcttacgctggggtttatcacaatttatgcccgtgctggcagaggcaattaaatcatcatgacaaatcctaaacggcggtttgtactgctacttggcttaggtctcatgatactgctgaccttcatttgtattattgccagcctgagtctgggcgcaaaaatgttaccattatcaactatatggcatcactattggttaggtgacagtggtagctatagcgatctggtcatcaatgcccgcaaaccacgtacgttaattggcatcatggccggcgcagcactcgcgctttccggtgctgtaactcaaggattgctacgtaatccattagccgaaccgggtttactgggcgttaacgccggcgctgctgcggtggtcgtcagtttctctttcatacccatactgaatgaacttccacgtttctggacagcatttattggcgcaagtctagctacattgctgttctacctgctcagtggaggacaacgtaatagcaatccagcacgcatggtattgaccggcgctgccattaacgcctgcctatttgcttttgtgcaaggcattgtattaatgaatgcccatgtattggatagctaccgcttctggaccattggatcgcttagcgcaatgtctctggcagaagcgagttcgctgataccctatctgttatttgccttaatattgaccctttcactcagctcctccctgaatgtgatggtgtttggtgaagacattgccacctcacttggtgccaatgttgcccgcacccgcgtgttgtcgcttattactgcgaccatgctggcggcagtggctaccgctatggcaggccctattgcctttattggcttagcggccccccacttgatgcgggctttagttggcagcgatttccgctggctactaccctattgcctgttcgccgggccttgcctgttgctcacttccgatatactggcacggttggtgatagcccccggggagatcatggtggggattatcaccgcaggaatcggtggaccgttgctctatctggttattaaaacctatcgtggagttaattatgtcgcagattaacctatccagaccggcaaaaattcgaaccttcatgttgggaactgctgtctttcttgtacctccacaacggacccaaagagccatcttattgatattgttactgctctcagtgctgttttatctctctctcgcactgggtaagcaaggtatcgataatccctggctagcaacctcaactccttatcaagaatttattctcatacagctacgtttaccccgcgcattagtggctatcggagcgggcgcaacactggcactctcaggttcactttttcaactgacaacccgtaacgcactcggtagccccgatattatcggcgttaatgccggcgctgctgctggcatagtcgccacactgatcatctggcctggcgtactgccgatccctttaggtgcgctgctaggagccagctttgccgtgctgttggtatacaccggaaacattagtcgctctgggcagatgcagacaaccagaattgtcatctccgggattgctatcgccgccctctgtatggcatttgttaatttcgctatctcgaatgtgcgtcttgagcaagcacagcaactcgcttcgctgctgcacggtagcctcgccagccgaggttggcaagatgttgggttaatttatggaacgtcactgttcatcccctttctactctggttaggacggcaattaaactacgtcaatctgggctatgaagttgctaatacgctcggtgtaccagtacgtatcattcagcttatgagtttgtcactggcggtcatactggcctcaatggcggtactggttgtcgggccagtggcttttatcgcactttctgctccacaaatcgcccgccgcttggtacgggccaaaggcactgcgctgttctgctcagcactggtgggagcattactactgctcgcttccgatttaattactttgctacttcctacttcggcacgtctgccaataggcgttatcaccgcaggggtaggcggtgtctatttgatgtatttgctgtacgctgaattaaggagaacaaagtcatgtcatccgatgtgaattcctcaaccaccacctcacgactaacagcccaagcactttcgctagcatacggcaagaaaacgattgttgagtgtctgaatatttctattcgtgatggtgaattcagcgtcatcattggcccaaatggttgtggaaaatcgacactactacgcgccattagccgaggtataacgccacagcacggtgaaattctgcttgatgggaacaatattcaacattacaaaccgaaaacggtagcacgtgagctatctctgctaacacaaggggcaatcatcaccgaagcgttgaccgtatacgatttggtttcacgtggacgttacgctcatcaatcctttttacgacagtggtcagcagaagatgaacgagcagttaacgacgcgttacatgcggtcgaactccaggagatgtcgcaacagttagtgagtgaactttccggtggtcagcgccaacgcgcctggtttgctatgacattggcacaacaaacacccattgtactgttagatgagccaaccacttatctggacatcactcatcagattgaaatgctcgatctttgccaacgtttacatttacagggaaaaacgttggtgctggtactgcacgatattaacctggcactacgttacgcttcacatttaattatgatgaagaatggcaaaatttacgccgaaggtgtgccagaagagattatcaacgaacagagtatcgccgatgtgtttggtctcccttgccgtattatttgcgatccagaatcaggtaagccattgattattccaaaatataatcccatctgaatcgtgaatgagcggcttatgatgctgtattgacaagcaattataggtggccaaaagatttaccacttgataatgacaatgataataataataattatcataattatatttacaatgattagtcatatgtaagatactacaatcaggtagtaggaacatgtaaacagggagttgatggtgtcaaatacaaacgattcggttacccctttaaccaccgtggtaattgaagatatcatccagttatttgaacaaacgtttagccattttactgccaccatgagagtaaatgcagacaatatccctgctactagcatgagttttcctcaatggtcagatacaagagaatttccggtattaattcaacgctatcaggatgaatactacggtgacaatgatataaaacctaaccaaaaagcgctgtattctttatgggctcaatggtattttggtttggttattcccccgatgatattaatgttgctggaatatccacaagcagtggatactcattacaatctttttcggcttgaattccatgacagtggcagaccagatattgtttactatcatttaacctggctaaatgaatcacctttatcactacttcatcgtcattattctctgttggatcgccatattattcctgtatgtgaaaagatcgaatcatatcaggggataaatggacggcttctatggaataatatcggttatattatgcattggtatcttgctgagttcagcacaagaataaatagcaagtcatatcaagaaattataaatggtctttttatggaaccacaattacctaatggtagagataaccccctttaccgtactgttattttacggcataacaatatgcaacgtcgcagttgttgtcagagaaataaactacctggcgtcggtaattgccatgattgccctttggaatctaaggtagaaagcaaacactaacattctattctataatttttaattcttatctgcttaggtagaaatatattattttgatttaatcgcgctattattcaacagttataccctatggatttcaaaatggatcgcgacggcaagggagcgaatccccgggagcatataccctacggatttcaagatgcatcacgacggcaagggagtgaatccccgggagcataggtaactatgtgaccggggtgagcgagtgcagccaacaaagaggcaacttgaaagataacgggtatatttaatctaaccaaatactacacataataaaatcaatgatgttgggcaataaccaaatcacaacctatatatgaaataacaaggacatataatgtacggagacgctctgctattagacaattcactcacacaagatagtcatataacggacgaagatttttccagatatttcttaaatatgcatagtgctggagactatcttgatgacgcttataatgtcattaccagaataaagaaaatattacagcaggtggataagcctttcagtgggatattacccaatgagttatccccactattttctaaagtgaatttagatcttccactcacctctttaaaccaagctttagatgagttacagcaactttatattaaagatgctgtttattttcatcatccaaagtatgtggcgcatcttaattgtccattagtattacccgccgttctggctgaaaccattattggagcgattaattcttcactggatacttgggatcaaagcgctggcgggacactaatagagcaaaaagttctcgactggacacgagataaaatggcattaggtacaaatgccgatggtatctttactagtggcggcacccaatcaaatctgatggcaatgctacttgcgcgggatcatttttgtcaccagcgcaatcctgaacataaaaatcagctacatggtctgccagcagattttcataaactgcgtatttttacctcgacagtcagccatttcagtacacaaaaagccgccgctatcctgggtttggggtacaacgctgttgtatctgttcctcacgacagtgagttccgtatggaccctcaagcattggaacaaagcattaaccaatgcatcgaacagggcaacattccttttgccattgttgctacgacgggtaccacagatttcggcagtattgacccacttcatcctatcgcggctatcgccaagcaatatagtatctggctacatgtggatgcggcatacggatgcggtttactggtttcacctcgtcgcgcttatctactggaaggcattaatttagcggattctgtcacggtggattaccataagtcatttttccagccagtcagttgcagtgctttcttcgtcaaaaataagaagcacttatcccatttgacttatcatgccgaatatttaaatccactcagtgcctcacaagagggtacacccaatctggtcaataaaagtatccagacaactcgtcgttttgatgcattgaaaatgtggctgacattacgaattatgggtgcaaaacgactcggacaagcttttgataaagtggtcgatactgctcaggatgcctatcgattaatggcacagaatccctattttgaacttattcattatccagaattaagtactttggttttccgttttattcctaaacaaaaattacctgatgcggatattgatgccatcaatgcggccattcgtaaggcactattccgtgaaggtaataccgttattgcgggtaccaaagtcaatggcagacaatatctgaaattcactttcctcaacccggcaacaagccaacaacatctacaagaaattgtgcatagcatcgtaatgcacggaaacgattttctggcaacacataataacaactaatgagattaatattattcaccaggagaaattatgataactcgcccttatgattttattgccattggaataggtccttttaatctcggactggcttgtttaactcagccattaaaagatgttcatagcctgttcattgatcaaaaaccgggctttgattggcatccgggaatgatgctagaaaattccaccatgcagaccccttttatgtcagatctggtgaccttagcatctcccactcatccacttagcttccttaattacatcaagcagaaagggagaatatactctttttatatccgggaaagttttttcctgatgcgtaaggaatataaccaatattgtcagtgggcggcagaacagttatctaatttacgctttaacacacgcgttgacagtatcagctatgatgaagacgcttcgctatatacactacattgttcagatacgttaactgggcagcaacaccaatttgtttgtaaaaaattggtattgggtaccggacctgcaccttatattccaaagtgttgccaaccgttctctgaacggatggtgacatctggtgattatttaaataacaaagcgaccttgcaacaaaaacgatctattactgttctgggtagtggacaaagtgccgcagagattttctacgatttgctcagtgatattgataaattcgattatcaacttaattggctgacccgttcgccacgttttttcccgctggaatataccaagctgacactagaaatgacgtcaccagaatatatagattatttctatagtctcccgggcgacaagcgtgatgcattaaatttgtcccacaagcagctttataaaggtatcaatagttcattaatcaacgatattttcgatttaatgtacaccaaacgattaaatggcaagttaaacgtcaacttatataccaatagtgaattacgacaagttagccatgctaataatggccgcgacctaacattggcgttattccaacacgagcaagagcaatcattttctctcgacaccgaaggagtcgttctggcaaccggctatcagtatcaaatcccgacttttattgaaggcatacatcaccttatccattgggatgaaaaaggacgttatggtgtacagcgtaattacagtatcgatcagaacaataccattttcatacagaacgtagaattacatacccacggtttcgtcacgccggatctgggaatggcctgttatcgcaactcttgtttgatttatgaaattaccggtattgaacattatccgattgagaaaagtatcgctttccagcagttcagcgttgacaccgaaggagcatgctaatgtccgtctttaatcctacgctgtttgaaaaatccttgcctgaaataggtacctttacattacgtccactggatctagaacgggatattcccatattaactgactgggttaaccgggattacgcccattattggggaatgataaataataccaaacaacaagtatgggaattttatcaggacttagaatcccgccacccgggcagtgtatttattggaatctatcgggagcaacctgcttttctattagagtgttatcgtgcacaagatgatctgattggaaaatattatccagcacacccagatgatatgggaatgcatattctggttgcaccaccgcaagcaaaaataaggcatttcacctggggaattttccaaaccatcatggcctttctgtttagtgatcctactgtggctcgtattgtggttgagcccgatatacgtaatgagaaaattcacaaacttaatctgcgggccggttttgtttatcagaaggcattggtattaccaaataaaacagccaagttagccttttgcaccagagaacagcatcagattgcgttacagcgggaacatcacgcgacaacaccaacccacttaggttcattgatgacaaatgccatgcacttgcaaccagcggtctggcagaaagttaatcgtctgcacttgtgtaaagctattgctgaattttcacacgaatgtttactcgtgcctcaacagttaactgaaaaagcagatagtgatggatatcaccattaccgtttggacagttaccgtttgaatagtgctgaccatctggtcagctatacttttcgggcacggcgtatggcactggatcactggctgattgatgccgattcgttacagaaaaatgccaacggagaagaaaaagcactcgattccttgctattcattattgagttcaaacaacaacttggcatcagcgatgtcgtaatgactacctatctggaagaaattaccagtactctctatagcagtgcttttaagcataacagaatcggtatcagtgcaatggatctcgtgaatactgattttcaggcgctggaaggggagatgatggaaggacacccctccttcgtcgccaacaatggccggattggttttgatattggtgatttccagaactttagtcccgaagcggcctctgctatacatttagtatggctggccgcacataagagcaaggcacactttgcttgcatcgagcaactcaattatcaacagttgctggaacaagaactaggcaccaccacaatggctgaatttgatcagcggttgatcgcgcttaaccttaatccaaaggattacttcctgatgcctgttcacccctggcaatggcagaacaaactggcatcggtgtttgcgcctgatattgctaatcagaaattggtctaccttggtattggtgctgatacctatcaggcacaacagtcaatccgcaccctattcaatcgcagtcaccctcagcgatattatgtaaaaatggcgttgtctattctcaatatgggattcatgcgcggtttatcaccttattacatggcgacgacaccgggcattaacgactggttatttgatttggtaacacaagatcccatcctgcaacgttatcgttttaaaattttacgagaagtcgccagtgttggcttcaaaaacagctattacgagcaagcaatcagtagtgatacgccttataaaaaaatgatggcggcactatggcgagaaaacccactgcaactcattgaacctgggcaacaagtgatgactatggctgcgttactgcacagtgatcagcaagggaatgccctattgcccgcattaatttccgcatccggcctgcctactcaggaatggttacgtcgctatttagagagttatcttgcgccactgttacactgtttgtacgcttatgatctaatgtttatgccacacggcgaaaacatcattctggtattggaaaaccatattccacagcacatcttcatgaaagatttagcggaagagattctggtcatgaatcccgacgccgatttaccggaaaaagcgagtcgagtcaaagtagacatgccagaagatatgaaaacactcactatcttatctgatgtatttgacggtatattccgatatctggctgcaatactggatgaacagggtgactattcacaggatcttttctggcaggctgtagcagagtgtattttaagctatcagcacaaccatcctgaattgagtgagcaatttgtacgttatgagctgtttacaccggagattaaacgctgctgtctaaatcgtctgcaaatagcgaataaccgtcagatgcttgatttagctgatccggctcaaagtttacagtttgctgataacctgattaacccaattgccaaatttggtcattcgtaacaatgagcatggaaaacggtgcctcatcagtaatatagtgactattttatataaggcggtgctgctacagtaccgccttctttatttacatatacacataatttcagtagattaaattccagcaccaatattattttccatttcaacttacctatactgatgttattcagattattgccaagcattccttaaagctggcaagattagcaataaaagcacaacattaacaagtcattaactatataaagtcatattgataacacatacctttatttagatttaggaataaaattaaatgtctacaacgctattaaccttggaagaagcccggcaagtgattggtcatgcttttgttcacaatatgccttttaaccaattattaggacttgaactgattcggtttgaacaagattacgtagaaatacaattccgtaatcaaagtaaattagtaggtaatatcgcacaaaaaattttacatggtggtgtaattgcctcagtgcttgacgtatgtggtggattggtctgtatcggtaacgccttgacccgtctggtacccgcatcattagaagaattagaaaaacgattatccataatgggaacgattgatttacgggtggattatctacgccccggtcgtggtgaattattcaccgccaccagtagcattatccgcaatggcaacaaagtttccgtcgccagagcagaactacataatgagcagagagcccatatcgccagtgtaacggcgacctatctggtaggatgacaatataattttaatcgcttgcgtaatattcagcccggtgacatattattttcacgttaacgggctaaaaactcatgacactctttccacctttattaacatcaggacaatatgaacaagccacaaactaccaaaggagtactgtacgccttcggtgcctgttttatctggggaatcgcaccaatttattttaaacatatccagcaagtacctgctgacgaaatcctgacccatcgtattatttggtcatttttctttatgttgctactgctaacattgactcgtcactggtcacaggtagtcaaagtttttcatcaacctaaaaaagtgctattactggcagtgacggccactgtcgttgcctgtaactggctgatttacatctgggcggtaaatcacggccatatgctggaagccagcctgggttatttcattagtccactggttaatgttttgtttggtatgctgtttttgagtgagcgtttccgccgcatgcaatgggcggcggttattctggccttcaccggcgtgttaatccaattatggcaatttggttctataccggttattggattaagtttggctgttactttcgccctgtatgccctgctgcgaaagaagatgaatgttgatgctcaaacaggcatgacgattgaaacactgtggttactgccggttgccgccatttacctatttggttttgccaacagcccaaccagtgatttaactgctaacccaatgacactgaatctatggctgattgctgcgggtattatcactactgtaccattgctgttatacacagaagccgctgctcacctgcgcctatccacactagggttctttcagtatgtcggcccaacgctgatgttcctgctagcaactttggtttatggtgaacaaataggcattgaccgtctgattactttcggctttatctgggctgcattagtgctgtttacattggatgcagtgtatacacagcgtagatcgcagagatagcaaaacaatgaaaataaccatcagattagccggtacaaccgaacaactcgcccttgaagctctgcaattacgtgcatctcttatgtgggaagaagatagggaattactactagcaaatccccatatgatagaactgccgatagaatatattacagcaggatatgtttatattgcggaacaagctaatgtaatcttgggattttgtgttgtattaccgctatctgatggaaatgcagaacttgatggaatatttattgaaccgggcttttggcatcaaggtattggcaagcaattggtgcaaatcacattgaatgatcttcatatataccctatggatttcaagatgcatcgcggcggcaagggagcgaatccccgggagcataggtaactatgtgaccggggtgagtgagtgcagccaacaaagaggcaacttgaaagatgacgggtataaaaggcaaagtctcattgcaggtgctagctaatcctccgcaagcagaagggttttatattgcccttggctttaaacactttggaaaagaatatactcaattaggaacagcgattcgtatgattaagtacatcctgtaaaataagctaattctattttatatattaatgcctttctcgttacatctactttatctttaataatcaaatacttttttcaaaaaatatttttatttaattcatcctgctttcaaatttaatataaaactgtagaattaaggttgataatatttcaattaaacaaattaaaacttatattaaagatagaaaacaataataaaaacttcttttaaaacgaaaattactccaagttatatattcaatcatagattatataaatcatatagaactagcatttaagcattttataataatgtcaaggttgtttccattcaataatcaatattttaaataataataataaaacctaatgccgcacaaaaagatgattaaactattaatgtactgtttttatgtctctattatagccgccataataaaactattacggcggtcatatatacccgtcatctttcaagttgcttctttgttggctgcactcactcaccccggtcacatcgttatctatgctcccggggattcgttcccttgccgccgcgatgcatcttgaaatccatagggtatattaaagccaattcttccgcttaaaatagagatacggtgcaagaccggcagcaatcattaaaccaattgcgcccggataaccaaatgtccagtgtaactccggcataaactcaaagttcataccataactggaagccaccagcgttggcggcaggaataccacagagacaaccgagaagattttgataattctgctctgctcaatattgataaaacccattgccgcctgcatcaagaaattaactttctgaaacagagattcattatgtggcaacagcgattcaatatcccgcaagatttcacgggcctgctctagttgagcccccggcaaacgggcccgtcgcaccaagaagttaagcgcacgctgagtatccataagacataagcgaaccttccagctaatatcttcctgttcagcaagactggacaaggcaatatcaaactcatcaccctgtttcccttccataatgacccggctcagggattccaacacgctgtaaatattttcgataacatcagccaactgttcgatcttggtttcaaacagatccatcagcacttcataagcattaccatcaactaatgtctgattacgagcacgcatacgatacaatcgaaacgcagggagctcccgctctcgcaacgtatagagacgaccatcacgaatagtaaatgcaactgttgcgttgccagcatggtcttccgcgtcttcaaagtagaaaaatgagtggacgtgtatcccgtcttcatcttcaaaaaaacgcgccgacgcctcaatgtcatccagttccggtcgggttgccagaatttggcccaattcattttgaacttgcagtctgtcttgctctgccggttcaaccaaatctacccataaggaatcagataacttttctccctcttcaaactcaagacggagcaggcgattattctctaacttaaatgcgctcagcatgtatcataagtctcctttactccctacgtgatcgtaaggcgcgaatgttacgcttagaagaaaaagcctgtcaacattcaacctggatattattttcagaccatttcaagtctggcataagcagcaaccagccacttaatcccttctccttgaaacgcgatttgcaatcggctatgttcaccacttccctccatattgacaatggttccttcaccaaatttaggatgacgaacacgttgcccaagagcataaccgctatcattggcgctaattggtgtacctaaccgactatgactaaccggacgagatactgtcgcacgtaaccgaacttcttcaatacattctgacggcagttccccaataaaacgagatggccgatgataaacctctttgccatataaacgacgactttcggcataagtgatggtcagcttttccattgcacgtgtcagacccacataagccaagcgacgctcctcttccaaacgtccaccttcttcaatcgacatctgacttgggaacatgccttcttccataccaacaataaatacctgtgggaattccagtcccttcgccgaatgtaatgtcatcagttgcaccgaatcctgataggcatcggcctgcccttctcccgattccagcgcagcatgggaaagaaacgcctgcaatggcgtgaaattttcatcctcatcctgataactaaactggcgagtcgccgtgacaagttcttcaaggttttcaatacgcgcctgcgctttttcacctttttcctgctgatacattgctcgcaggccagaatcacggataatcctgtcagtctgaacatgcaatggcatatcttcagtttctgtcgataatgcgtcaattagttcaataaaacgctgtaaggaagcagcggcacgcccagccaacactttctcttgcagcaatatctgacaacaatcccacaacgtttgctgccgttcacgcgccgcctggcgcacaatatctaacgttctgtcaccaataccacgggtaggcgtattcaccacacgttcaaacgccgcgtcatcatgacgattggcaatcaaacgcaggtaagccagtgcatctttaatttcctgacgttcaaagaatcgttgaccaccataaatacggtatggcattgatgcctgtaacagcgcctcttccagtacacgggactgcgcgttgctgcggtaaagtatggcacagtttttcagggcaccaccattttcaagccagttttttatccggctgaccacataacgggcttcatccagttcattaaatgcacaataaagggagatgggctcaccctctaccccatcagtccacaaatttttacccagacgatcactgttattggcaatcagtgtattggcaactttcagaatattactggtggaacggtaattctgctccaaacggatagtttcagcaccgggaaaatctttcaggaaacgctgaatattctcaacttgagccccacgccaaccataaatagattgatcatcatccccaacaatcatcactttgcctgtttctcctgccaacagatggatccaagcatattgaatactgttagtgtcctgaaactcatccactagaatattagtaaagcggccacggtaatgttgcaggatctgaggtttattcagccacaactcatgagctcgcagtaaaagctcagcaaaatccactagcccggcccgatcacaagcctcctggtaagcctgataaattttctgccatgtcgcctcaacaggattgccataactttcaatatgctgtggccgcaatccttcatcttttttaccattgatgtaccacatgccttgacgagctggccattgtttatcatccagattcatcgctttgataatgcgtttaagcaggcgattttgatcttcactgtcaagaatctgaaaatcctgtggcaaattagcatccagatgatgggctcgtaataaacgatgagccaaaccgtgaaacgtaccaatccacattccaccttgactggtaccgatcaagttttcaatccgatgacgcatctccgcagccgctttattggtgaaggtcacagccataacagaaaatggcgaagccttctccaccgatagcaaccaagcaattcggtgtactagaacccgggttttaccactccccgcgccagctaataccaacatattagtccgcggagcagctacagcttcccgttgtttgtcattcagactttcgagcagataggagacgtccatagttaccatcaattgattagacagcacccagaggttgctgtgtttttatacagaataatttcttgattatatcaatgctgtcaaagaagccaaatcgtaaatctcaatgtgaggcagtaggcggctttccatcgtctgcaataattttttattcttagtattcatccagcaagcttgcataccactacccagcgctcctgccacatcagtattcaagtcatcaccaatatgtaagatttgcccaagcgctaaacccagacgatccgcggccaaacagtacatatcgctgcaaggttttgcgcgtccatcagggccagcttgcagcacaaatttaaaataaggggcaagaccacaggcggctggttctgcattgccattagtaatggctaccagtggcatttgttcagcaagtgccgccagagttttatgtgttgattcagggatatcaattcgattacgccaaagtgtgaaatgcgccatgacatcatctgccccccgatcagcgtcttcacggctaaaaccgtaatggcaaaacatcaactttgaggagtaccagcgccataaagtcatgtcatgataaatttcaggatgctgctcaagtgtcaattcacggaaagcacatagatcctgatgattaaggtggctgaacctaggatcatactgccgtacaaagttcagtacttcctcttctgccttatccatgactggatgattatcatacagcgtatcatccagatcaaatgtcatcgctaacactggcgcaagaggccggtaaaaacgcattacgatttcccccgtttggctctgggatgggcgacatcatacacttttgtcaaatgctggaaatctaaatgagtatagatttgtgtggaggataggctggcatgacccagtaattcctgaactgcgcgcaaatcaccactggattccagaatatgagtggcaaaagagtgacgcaatttatgaggatgaatatgactgctcattccctggcgtattccccactgcgcaaatcgtttttgtacattacgggttgatatccgccgcccacgctttgagacaaaaacagcattatcctccggctcgaatagctcccgcatcgccaaccaacgattaagccattcaaccgcggtatgtcccaaaggcaccttccgctctttactgcctttacctgaaacccatacttccccactttcaagatccagatgctggcaatcaagacccaccaactccgacaaacgtaatccagcaccatacatcacttccaacatcgtccggtcacgcaccgataatggatcattaaaattgatattcagcagttggttcacttcatccacatcgatatttttcggcaaatgacgcttggttcccggcgtgctgacggttttactcggattaacggaaatttctccttgaattacctgccaatcaagaaaactgcgcaaggaagataaacgcaacgccaagttagctgattgcaaaccagcccgacgactacgtgttaccaacattctcactttcgcgggatcaagatcttgccattggctgacacccatttctaaaaccatctcagccaatgtagcaagatggcgacgataatgggtgatagtcacgggacttaatcgacgctctaccctgaggtagcgcaaaaatgcctcaatcggctccagtaactggtcaatttcctgcatcatatgcgtttaatccaacgagacaatatatccggcaataacttagccagatgctcaagcatgtcagttcccatgccttcttgataatgttgatgattccgactgttaaatatcaccatacccagttcgcccctcgttcccaatagagagacggcaaccgaaccgacctgccgaacttgcggcaacaacaatagaatttccggcccatttagcataccgagatagtggtttttattaccaaaacgctgaatacggattggttcaaaagcattgcgagaaagcgctaaatcaggcgcatcaagtggtgcaccaatatgccatttatcactgaaaagacggatactggcactatttagtcccatattcttagcccataaacttaaccgactaagcatatcttgcaaactctctgccgcaaccaaattaacaagtaatttaagcaactgctcaaacagttgttcgttcactctcgcctgttccatgagcagagttatatcttcttccagataagcaatacgcgttctctggcggctcatataccattcaaccaaagaaatcgtttctctcaccgggtgaggaacccgcatctgttcaacgacacatgcattacggataaagaaattggggttttccaataaataatccacaacagtctgatcatcaagtatgtcattgatgcttaactgctcttcttttttctccatctccgatgccccgcagctcaaaacagaatcgattacagatgaattgtgccatcataaacgtgcatcgccggtcccgtcatatagagcggttttcccggcccatcccaacagataaacagtgaacctcccggcaaatctacccgaacatggttgtcgagcaattgctgctgaatacctactgctaccgctgcacaagcaccactgccacaagcttgggtttccccaacaccacgttcataaacccgtaagcgaatatgaccacggtttaaaatttgcatgaaaccaatattcgcccgttcaggaaatctttcgtggctttccaaagctggccccaaaatgtctacttcggccgtttccacatctggcacttgaatcacacaatgaggattccccatagagacaacaccacaaagaacagttctctctgctacccgtaaaatataggttttttccgcccttaacgcacgaaatggcacatgatgcggctcaaattcaggctcccccatattaacgcaaacctgatcatcattggtgatactcaacaccatccgtcccgattgcgtgctgactttaatatcacgcttattaattaatcccttaaggcggacaaaacgggcaaaacaacgcgctccattgccacattgtgcaacttcactgccgtcagcattaaaaatacgatagtgaaaatccatatccggatcataaggtgcttcaacaattaataattgatcaaagcccacaccggtatgcctatctgccaaacgacagatcagctctggtgagaaataaacattttgggtcacagcatcaacgaccataaagtcattacccagaccatgcattttggagaactgcatatcatgctccaccgtaaaccgtagcgactaactatcggcttatctcgcttatttctgagaggtactatccacttgctgcccttgctgctcagtattcgcgggaatctgagatgcagttgttgccttctcggtcgatggttgttctggaggaaaatagagaggacctttcagtccacagccggaaagtacaaataaggttatgatagccagaaatccacgtaattttttcttcattgcattaatgcctgtaattcatacgtcaatattctctataatcgcagttagacctcgaaaagcaaataggaaatgaagatgaacgacagtgaatttcaccagttagctgaccaactgatactttatatcgaagggcagttagataattatgatggcaatgctgatatcgactgtgaaaccaatggcggtgtcatgaccctgagctttgataatgacagcaaaattattatcaatcgccaggaacctttccatcaaatctggctggcaacaaaaggcggtggttatcattttgactacaaagaaggtcagtggatttgtgaccgcagcggggacaattttttaaccatgctagcatacgccatcaccgaacaaagtggcgaacagttcagtttcccataattgaacctaccccgcatcgcggggtaaatcagtaatgtgacacagaacgataaagttctggctgctcttcattttccccatcatgagccacacacaaatgtgaaaaagatgatccactaaatggaatcacctgaatctggcctttcatttgcacaatctgataaaactgtggcaagttaaagttgataaaacttgatccataggtaaaccgatcatgagatgaagaataaaaccgactgacgtcgcgtaccaattcttccttacttccctcgcaatgagaataaatttctacccggttggtttcatccagaatataaatattaaaactttgattatcttgcgtattttcgaagaaaaattgaataataccctcactggcaaagccatcaaccaccgcgggtaaatgtgtctctttggtattaattttcaccggcaacccatgcaatttgttattagagattgccccatagaattccacggcattttccaatttctgcacagatacgttaagacgttcaaagaacagcccccaagtctggccggcaatacgtaatgctttaaaacgacctgggtcctgacgattgctggataaacgtaattcaatacattcagataccagttgctggatccgagttcgaataagccctcgtaaatgttcgctgtaacagaacacttcaaccgccgctggcggcgcagcatcttgatgcattttgcccagtatggtcttcaacgcttccagcacagattgcccaccactaaagtgtaaggtcctcacttcattccatgaattacgataaagtaagtcaatgctttccaccaaacactgttgcgattcaccaaaactgaatacatcaagcttacggaaatcaaaatgtacaacctgattggagaactcagcggtcggatctttctccagattgacaattattgccaaatgacgaatttcacacgggctatagagtgctttcggtgtcggtgatggcaggcggataggaaaatgagtagaaatatcattaatcaattcatgcagcttcagctcatcacattgagtttcgccatgatgaatatggatacacgatttttctgttaacaagccgttaaagtaggtccacgacaccagtttattgagataacgattatattccagaggttgatgaccaatgatcgatccaatagccggagcctgattgtagagataccaaccgctacggtttgcacgcccttgaggaacataaataaatgttaaatttttctctgatagatctggcgaaatttgcggattaaccagcgttactttccctggcaatgcttcaaatgcagcataaagtttacgcgtcagcacaccaatatcctgtggactggcactgacactcagattattacggcgggcaaaacggataagattacgatagctctgcatcatggtatcgagcagttcattatgcgcatcacgaacctgttcaattttccataagttgcggttatccaaaattttcaaccgctctggatcccacttccactcatagatcagttgggtcaaaacctggcgtcgccagccaatgcagcctttatcatcttgatttagagagagtttttcacaaacttttaaataaaaacatcgacgtattagatctaaacgggtcgtatcattaatttcaatcagataacgggtaacacgctcaagcatcatgctgtatgcgtcaaggccaaaggaaactatttcacctgcatgtaggcgctgtttcatctccattgccagtaacttaccattgggatattcccaagaatacgcttccagtaacaagctttttaatacggctttataaggggaatcgatacttttgtagagttgccataagctagcaccaaagtactcttcagcagatagctcacccaatccaccgagatcaagccactcatttggcgtcagaacaccttgcgcataaagcgataaaacatattcatcataatggcgttcttcttctacaggcaccatttcccataacaaacgcttacccgccatacgtacagcggtacgataaaattcatcaagtaacagaatatgctgagtagagccgcaatcctcaccaccgaggctaccactcgcattgtggcgaaagcggttttcatcaataagaaaaaaattgacttcaataccaagcgctgccgcccactgctcaataagcgtacacttacgttgcagcaaaaggcgctcatcattatcaagccatgactgatgacatacccagatatccaaatcagaacaaccgctctgcccgattgatgaagtactgcccattgagtaaataccggtaataggaagttcaccattggcaggctgttctatgaagtgatctaatttattttctaaatcattaagataagatttttgtgcttcatcatgcacgaaaaaacatacgccatagggaacattaccgttaatgtaacctggcatcatcgaatgatgatagtgcaataatactggcagtaaactgtatacctgtttaaattccgcactcatggcggtagaggcgcgttctaacctgagttggtttatcgcatccagtctctgcttcagtgtttcgatataaaggtacaagacgtctcgcccgattgagttccagtgcccagataaatcccccgtttccggctgttatagctctatggaattatttagaatgatttttaccaatttattaccggaaacgtgatcaatttaacaccttgtcgataaaccgtaaagtcagtaaagcaattgaattcgatgtcttatcgtacgaaaaatcaaataatacattgttatatatagaaataatcaaaaaacccataccatttataccctcattatatgaaagaaattttctctgcccattttttcaagttaatgtgcgtaatatcttgttatcatcaaccctacagaaatgactccgttggctatattttaattaatgattttttccattcgggattctttaattacagaaataatttactggaaaagttaattcataattaaatcaatttactttcatcaatatcaaaataatttaaaaaattaaaatttattttatgctttaacataaccggcatctcttcttctcagctcctaactggaaaaaaaacagccgaagtgttaaaacgagtgttatgttttttcatttattgacggctgaaaagcctgagaaatacaaccagctatgtcaactaaaaccatccgtatcgcaacccgccaaagccctttagctatgtggcaagcgctgtatgttcagcaaaaactgcaacaatgtcacccagatctggaagttcaactggttccaatggtaacccagggcgatgtcattctggacacgcctctggcaaaaatcggaggaaaagggctgtttgtcaaagagttagagttagctctacttgaaggccgagccgatatcgccgtccattcaatgaaagacgtcccgatctcttttcctgaggggctaggtctggtcactatttgtgaacgtgatgatcctcgtgatgctttcgtctctgtgaaatatcactctctggatgaattgccaacaggcagcatcgttggcacatcaagtttacgccgccagtgtcaactccgtgaattacgtcctgatctgattgtccgtgaccttcggggcaatgttggaacccgcctgaacaagttggataatggtcactatgatgcaatcatccttgccgtcgcaggattgaaaaggttaaaactgcatgagcgtatccgtacgccgttgacggcagaacaatcattacctgccgttggtcaaggcgcggtaggaattgaatgccgcctagacgaccaacaaacacaaactctgttagcaccattaaaccactatgatacagaagtttgtgttcttgccgaacgtgcgatgaatacccgactggaaggaggctgccaagtaccaataggtagctatgctatctggcaggacgggaaaatctggttacgggcattagttggcgcacctgatggtagcgttattattcgcggtgagagaacagctttaccaaaagatgcctgccaggcaggggttgaattggcagaagagttgttggaacggggagcacgggaaattctaacccaagtttatcgaggaaatccctccacatgagtattctggtgactcgccctgctcctgccggagaggaactagtcagaaggttacaggctgcgggaaaaacagctttcagcgcacctttaatcaatattcacccaggttcagagctgccacagctagctgagaagcttaaccctctaaatacccgtgatatggtatttctattgtcaaaaaatgcagtttattatgcaaacaatcagttaaataaaattaatctgtcatggcccgacaagctgatttattatgctatcggcagatcaaccgctctggcttttcatcaactaacaggtatgaatgttatctggtcatcagagggtgagaccagcgaaatcttgctaaaactaccatcgctacatcaggttgaaaataaacaagctttgctgctcagaggaaatggcgggcgtgaacttattgcccggacgctgacagaaagaggtgccacagttgactattgtgaatgttatttccgccagcccgtagactacccggcagcagaattcagtgcccactggcaaaagtatggagtacaaactttagttgtaaccagtggcgaaatactgcaactgttatataacttaatacccgaaagtgatcgaaacaggtggttattgcattgccgcctgattgtggtaagcgaacgtcttgcacatgccgcccgaaatttgggctggcaggatgttaaagttgcaaaaagtgcagataacgacgccttaattcaggcactagaataaactgacatgggatgcccactatgacggagcaaaaacagtcctccgagacagttgaacaaacaaaaactacggttgaaaactcgcaacagctcgaaaccgcgcctcaaaagcaagaacgttctggcacgctaaaaaacataattgctattgcaatcatgctggcaatcggtggcggtctttattattacggacagcaacaaagccatttactgagtacagagaaccacgagctacgccaacaactggaatcattgaaacaacaacaatcacaggataaacagcatattgaagcgctgtttaaagaacaatcacagactttaagccatttttccgcacaaaatgagcaactgggtcatagtctacaagagttacaggccaaaatctctgcgttatccagttctgatgtaaaaagctggctactagcacaagctgattttctggtcaaaatggcaggccggaaattatggaatgatcaagatatagtcaccgccgctgctctgctgaaaaatgcagatgccagtctctctgaaatgaatgatccaagcctgattgaaatccgtcgtgcaattacacaagacatcagtacattatctgccattagtcagattgattttgacggcattatcctgcgagttaatcagctttctaaccaagtagataacctgcgtctggctgacaatacaaccgatggttcgccaatggacgaagataatgatgaattaaccggtacattatctgaatggcgccagaatctgagcaaaagctggaagagtttcatggataatttcattaccatccgtcgccgggataccgcagcagagccattactggcaccaaatcaagatatctatctacgagaaaatatccgagcccgtctgttgattgccgcccaagcaataccccgtcatcaaggtgaagtttttaaacaatcattagaaacagtttcaacttgggttagagcttactttgatatcaatgatcccaataccaaagcattcctggaagaaattgattcattaagccagcagcctgtttccataactgcgccagaccacctttcaagccagcctttactggaaaaactgatgcaaacccgggttcgcagcttactttcccaatcttctgaaactaatcaggagggttaagttatgctgaaagttctattactgtttgtggtactcattgttggtattgtgctcggtccgataattgctggccatcagggatatgtgctgattcaaactgacaattacaacattgaaaccagtgttaccggcctgttcattatatttgttcttttacaactggtactctgcctctttggttggtgctaccgcagagttatacgcacaggctcacgtacccgtggctggttccttggacgcaaacgcagccgtgcccatgcccaaacaaaagcagcgttgctcaaactggcagaaggcgatttcaaacaagttgagcaattactgacccgtaatgctgatcatgcggaacaacctgtagtcaactacttactggcggctgaagcagcccaacaacgcggagatgaatttcgtaccaatcagtatctggaacgtgcagcagaagtcgcagacaataatcagttgcctgtggatattacccgtgtacgtattcaactcactcaaggtgaaattcatgcagcccgtcatggtgtagataagctactaaatcaagcttcacgccatccagaagtcttacgcctggctgaacaagcctatatgaagtcaggagcttaccagtcactgattgatatactgccggtaatggaaaaaatccatctacatgatgagttacaaattcacaaattgcgccagcaagcctatatcggtctgatgaatcagtacatggcagaacaaggcagcgaaggcttaaaacgttggtggcatgatcaaagccgaaaaattcgccatgatgtggctttacaagttgcaatatctgaacatttaattgaatgtgatgaccatgaaactgcacaaaagatcatcttggaaagtttaaaacgtcaatacgacgaacgtttactcttattgatccctcgcttaaaaagcgaagatccaaagccgatacaaaacgcattggaccatcagttaaaacaacatggttcgacccctctgttaaacagtacacttggacaagttgctttgcgccacggagaatgggaaaaagcagtaaaagactttaaaactgcattagcccaacgtcctgatgcacatgattatgcttggttagccgatgcattggacaaactacgtaaaccagaagaggccgcacaagttcgtcgcgagggattagtactcactttaaagcgtgaaagtaatgtcgtgaagagtgatctcgttaatagtaatagtgctgtaatgtcgtgatcgctcatccattattagcaagtcttcatgccgatgattaaaaatgccccgcacggggcatttttctaaccatattttttggcaaaatcttcatcggaagtgcaaagataaataataaattcaataaatgcgataagtgcagggataaatgtccagcaaaataacagatataaaatccccataccgattttgctcagataaaatttatgagcgccaaaggaaccaagaaaaaatgccaacagtgcagcaacaatgcggcttttactaccagaagaataagcccttatccttcattccgcacctaattcaggaataaaccgctttatattgtgcacctaataaactcaaaagctcatggtggtaagattgcattcctgtcaccattttatgttcttgaaattcaaaggtgctgatcccttcaaaggccagaaatacccaacgcgcggtgggggattgtgtcggtttgttcttcatatcggggaaaaacggcacattttgtttcaattcatggcgaattttatgttccagcgccgcataaaccatgagacaacatgtcatcaccattaacagcgcttctatccgctccggttttttcaggaaaatggcagacgtcaggaattccggacttttcaggaagcgaaaaccccgctccaccttttgttgtgccttataattagccagtaacgccgccatatcaagccgtccttcatcccgttcattggtcgctaaaataaacctcccgacccgcaatctggcctgcttcaccttgtctaaccgggtataagcctgaccggctaattgataatgaaccgatttggggggttgatgcttgccgggtttcccgcgccccgcatacgcggtaatcgcctgaatttccggcgaggcgatgccgataaactggcattgagactcaaaatcatgcagtgcctgtaaggcatcctcccggcaggcaaagggctttttgcccagtttgtcgaactgtttagactcgttttctgtttccctgagtgtgtttttccggaaagtctggttttcacgtttttctgccgccgtactgttcaccagtaaccaacgctgaggaacgccgccatatgatgacgtcacccagcagcctgaatagccctcactgatggggctgaattgctccgctgtcacgttcaggagagactgtttagcttccttgatcgtcaggggaacacgcgtaataaatcgttgtttttgctgatgaagcgaagcgatcgcggcttcagtataaagggcggcatcggccacaaagtagcggctgttttgtgctgctttcaggcattgaatatgggttttgatcgtctgggcaaaggctttggcatcattcgtattcccgctcatagcctgcatatagacagggatacctgcctgattttcgcaaatcagttcaaggacaacctggttcagttcaggccggtgatcccggctataacccggcaccagtgcaatgcgttttgtgtcatctcccaacgcgctgtcatagtcaccatcgacatgaaaactcgtgatatccaaatgaacggaatcgggatttaaccctaatttatcaactacttgctcagcaagcacctgataaacttccgacacccccgcttcatataaggcatccagtgttcggccgagcacatcatcattaaggtgttcagcttcaatgtcagcgccaattaaacgcgcaatcggcttatgttgaaaaaagccggaaaacatgtgcaatgtccggctgtgaaaccccagcccgttaaggatcatcgccagaaaagcgtcgccgtgagagacggtatgcgatgaatattttgggataatggcatcaatcatgcggggtaaaccggcttcatgacaaaaagcggcgataaggccaagatgatcgagacgtttaatggcaggtataggtgtggacatattcgctttccggcaaataaaagtaatagatcaaaattggcgattaccgtcaaccccaccgatgtcatcaatacaaaaaacctgtgtaagatcacattatttttaaatcagaaatacggtgcggaatgacggccttatcatcgcaccacaatgtgggcacgattgtgcggattcatgtaacattcggctacaaccagggcatcccatcatttttgacatcaatattccccttaagataagtttagaaatgaaataactaaattaattttacagtaaaaaactacctatcatattttcagttctgtttatattagacagtaatacctaaacagtatataaacctaccaaatatatctcttagaaataaaaaaacacctaccttaaaaataaagataggtgtacaaatacaatcaggtctacagacggatagtgcctcactcaacgttgagtccggtcggcgatgaaaagagggttatatcttactcatctgtgacatggacaataggcaccgataatcggctctgcatcatccctgggtttatgaagcatatgcaatcataagaaataggatgagcatctacgtttataataatgcatttagtgtgccaacttttattcaaatgaaagctgcctcgcttcatcagctatttctctatttattacaacaacaaatcgaatcatcacaaaatccatctcatgcactgtctcttatttgagacaaaacataaggtatttattattctcattataattcaatttgttataagtctcttatttgagacagctagtatatcgattgtcgtcaaaatacaaaaaataaaaaattatcatataaaacaaatagttattttaaaaaaataatccactaaatttgaatcaacagagcacaacttgaaggtatatggattaggaaagggaacaaaaagccaaggagataaaaagggataaaacgtaaaaagccctgcattgcagggttcttttggaatttggtcggcgagagaggattcgaacctccgacccactggtcccaaaccagttgcgctaccaagctgcgctactcgccgaaattttctactcttcgatctctaattcttttctcttttttatggtgcgaaaggggggacttgaacccccacgtccgtaaggacactaacacctgaagctagcgcgtctaccaattccgccaccctcgcgtgtcacaaaaaagatggggtggctaatgggactcgaacccacgacaactggaatcacaatccagggctctaccaactgagctatagccaccataacagctatttactgctaaatacttaacttaccaacagcgtaatacatcaccgcagctcttgcacgcaaataatggcgcgcccgacaggattcgaacctgagacctctgcctccggagggcagcgctctatccagctgagctacgggcgcttaacgccgtttcgggtggggatagtacggatttaatgatatactgtccagtgcttttttaaagaaatgatgcgtttgattacaccttgctcatttcgtagataaagccagctcttaactttcctacttatctactaccatgacagtaaatcaatctatacccgtcatctttcaagttgcttctttgttggctgcactcgctcaccccggtcacatagtttgctatgctcccggggattcactcccttgccgccgcgatgcatcttgaaatccataaggtatatcaggcttttggttttttaccgttaaaaagcttcaccaaccaataaatcagcgacactatcaacaaaaatcccccacctaccagcaatgaaaaacgggtatccgggttaattgccatccctaccaacacacaacataaaaatgccaatgtcaggtaatttacataggggaacaggatagatttaaaactatgttgtttcagtgcttgttgatgatactgacgaaaacgcaattggctcatcagaataacaaaccacggtaccattcctggtagcacactggcactgtaaacataaacaaaaaccgcctgcggatttgggatcaaataattcaaactagagcccacaatcaaacacaagatagtgatagcaataccaattaccggtaccccattctttgacaatttagtcaatgatgaaggtagctgacggttttgcgccagcgcataaagcatccgcccaccactgtacataccgctgttacagccggaaagcgcggccgtcaataccacaaagttaatcacggctgccgctgaggtgatccccactttggtaaatgtcatgacaaacgggctgccctgtgcacccacttctgtccatggaaataatgtcactacaatgaaaatcgcacccacgtagaaaatcaggatacgccagagaatattgttaatcgcttttttcaatgtcacctgagggttcttcgcttcccccgcagtgataccaaccagctccaccccctgataagatgcaaccacaatacagagcgcaaacagaaacccttgccaatcacccgcaaagaaaccaccatgcacagtcagattatccaatccaataggctgccattgattaccaataccgaaaaatatcaatcccaagccaatcaggatcatgacaataattgtggtcaccttaatcatggcaaaccaaaattccagctcaccataaagacgtaccgccgcaaggttcgccaaagcgaccaacgccaccgcaattaatgctgatacccactgaggaagttcagggaaccagaactcagcataaacaccaatagccgttatttctgatatccctaccgccacccacataaaccaatagccccaagcggtgaggcatccccagtatgggctgagatatttatgtccaaaagaggcgaaagaacccgtgacaggttcaagaaacagcatttctcccatcgatcgcataatgaaaaaaacaaaaattccggcaataatgtaagccagcaaaacggaaggaccagcccatttcagtgtgctggccgagcccataaacagaccgacaccaattgtgccgcctagtgcgatcagctctatatgacgggcttctaaaccccgttgcaagctatgttgttgatctgccataaattccctgtccattgttatatgttgtaatgtgcaataataaaaacatacaagactgatgttgatcagccataaaaaggtcagggatcaaaacatgtttttccactgagtggaataaaaaattatccaataactaactataaatagtgaaaatctggcaggatcaaactgttagataaatattgtggaataaattcattgtatcgcctgacgaaagtatcgcctgacgaaaattcacacgacaggcaaaaagcgagtttacagacgaccactgtaataatatccaataaatttcaataacttaaattggcgacgaatacggcttggttgtgataacaggcgataaagccattcaagccccaaattctgccatgcttttggcgcacgtttcacatggccggtaaatacgtcataagtaccgccaacgcccatatacaacgcattcgaatgaatttttcgacagtcacgcataaaaatctcctgtttaggcgatcccattgcaactgtcacaatcaccgcaccgctggcatgaatccgttcaaaaacagcattacgttcttctggcgtgaaataaccgttctggctgccaacaatattgacgttccactgagcccgcagtttgctttcagtctgtttcaatatctctggtttacctccaaccagaaaaataggtgtgccttctttaccggcacgctccatgatagcttcccataaatcagcacccgctacacgagaaacttcagtgtcagggtatttacggcgaatagcacgtacaatactgataccatcagcatacagatattctgcgtcactcagcagtgtacttaaagctgtatcttcctctgccgtcagaactttttccgcattaatcgccaccatagtacccgtctttacctgttcgcgttgaaaaatatggtcaagaaagtgcgccatatcgcggaagccccaaatattcagaccacgaatactgtatttaggaatattgtttagctccattttctttcctcacattgcagcggacatttttgtgataccactcggttgccagtcagatacattctaataagccctgcactctcaaatagccaatacaacaacttagcaattaccagacataagccaaaaataatacagaaaaataccactcgggaaacaaatgaatccacgccttcacgagctaacacaatcatgttgaagatcgcgccaaagcaaaatgcctgcaagatagcggccttataacgattagtctcctgttttcctaattcataaatccagtcaaaccacttaattatcaatccaacaacaatcgcaccaaccggaataaacagcacgcctcccatcacaaccagagagcctatcagagtcggagaaattgccagaccagagtggttatccagtacttcccaagtaaaataattcgcagaattcaacacagcatcaggacgtcctggccaaagccaacttggaataaagacatagaaatcacggataataggtgccaacccctgaaaatcaattttgtcgtagttattcagcagtaatgcaaaattttcccacggggaaaaagtatccctcgtaaggtagagaaaagtataaaacgcctctgcgccgctgacatccaaactatagcgtttgagtgccaaccaaaacatgccaacaatccctattgcgcccgccgttaccaacatccacaaggttatccagccacgcacaatgccaataaacagaaacaacgcgaacgcaatgataatattagcccgtgttccgccaacaacgacataagtcagtatcccaaaagcaaccgtactaatcagaaaaaacagccagcgtaactgggtcggcttcaagaaataaaccaccaacatggcaggaataaagaagtaaaagaaccgtttcagggcaacaccggaaacctgactggaaaaaatttgactgtatgactgtaatttaaacagtagaaaaccgttttgcataaagaacagccccactgtcaccaccgcaactgatgccagtagtaaccatgtaaagttagtttctacccggttcatggtgaataccggtgctttaggctgcatagatggctttcttagccgtgttttataactgacgtaataaataccataaaagcaggtcgaagccagtagagcgtgtagtaaggcgtccacaggtaccacttcaacatcaaattggaaaaccaacaaacatgtcagtggaaaaccaaaatagaatgtcagcaaataaagcaatgagaagaatatattaaaattaaagcgtacacgccggaattcctgataagtcaacgtcaggatgaaaaccagtgatattaaataaacaacaaataatccgccaaactgcgttaaagtcattgctgctctcccgccgcttttgccaacgcctgccgccagccatcaataaagttcgggctaaaaaaagctatcacatttctatccaaggagagcatctgccgttgtgcttctgcaatcagttggctatctaaaggattaccggcgaaaaataccggcacctgttgttctattaaatctcgccaaaaaagattctgacgactaagtacaaatggcacaccaaattgtatcaacagacaaattgttccaatcccctgctggcgattaaacatgaaataccctaaatcacaacggcgcaataatgccagataatcatcaaacgccatattttgcttaataatgttcaaattttctggccggaacaatgataaagcagcttgttctacctgattaatataaacctgattgttttcaggataacccattgggataatgattcgcaccttatcgccaaactgcttatgaattactttcaatgccgtaatatggcggttcgatcgatcaccagaattccccaacaaaattgtcatcttgccatcttcaacaggtactctttctgcaattgtcaaagcaggttccattctggttggaaaatagagcaatgatgttggtacgtttggatgatgttgagaataaaaatagagatctccacgaaccgcaaacacatgccctacccgacgctgcgccaaacggcgcaagaaatagaatagacggaattttaactgctgggagtcttcatacagatcagctccccaagcatgccaccaaaactgatgacgtttgatttttcctgacaacagcgccaaccacaaactcacattaaattgaccatgaaaaaagaaccggcaatctctatctgaacacgcttgagcaataaccgcctgagccagagattttttactgtcgaagaatgccatatctaatgccgggcaatcatccaataaagcgcgattcttcgtcaccaccataaacttcggtttggctaaaaaaccaatttcttgtactaagacgtcattaaaaaagcgcagtactgttcgattgtgatgtgggatatcagatcccaaaacgtgaataagggttgtcatgctcgcctacgataaataagaaatgcaccacaacaaagggtgaaataaataatgtaagttgccatataggcttgtgctgcacctaacgctccatttacaggaataagccagtgggcaaaaccagtaagcaataaaaactggctaacttccgtcaacacataaaaacgcaacgcagccttggcaatcaccagataaccaaaaacataagcgcctaccttcaagacatcacccaccaactgccaggcaaatagatcacgcatagcagtaaatttgtcagaaaacagtaaccaaatggcaaaatcacgcagcagccatacagtaaaacttgcaatagccaccgcaggcaaaacaaatttcagcgccttaattatctcatttgatatttcattcttaccctgcaatcgtgaaagcgtaggcaacagataaacagtaaaagatgctgtgataaattgcaggtaagcatcggaaatactgcttacaccttgccagatacccacatcgcgccaactataatgcgctgccagcagatttcgcatcataatgtaggcaaccggtaaggtaatagaagtcagcaaagccataagggtaaacttgccaagctggccagccagtactttatcccacatgggcttaaagcttgaaattgataccgctttgagacgccaaaccatcaatcccgcaggaaatatgattaatgctggcactaaagccaaacccgccaaagcgccttcatacccaccaagaacaaaacagagataataggccatcacgccaatcacgctaccaaaaataatcgccagcgcattcctctgtgcatctcggtatcctttcaaaatagccaaaaaatagttggcaaaagcaatccccatttgaataaaggcgagtgcctgcacaactgactcataatcttgatggccgaataatcccgtactgatagacccgctaaacagcaaaaaaatcaccgccaacagcgtggaaaacccaaggataatggcagaagatgttcccaataccgcacgcaatctttctggctgctgctgatactcagcaacatatttcgtcacaccattaaaaataccggcaccagccaataccccaagcacagtaataagctgacggaaattacccgcctgcccaaccccgctggggccaaaagcaaccgccagtaatttaacgattaaaagccctacaccgatttttatcagtgtagagcccgcagtccatattgatgctttagccaacgacatatcaggcgaagtattcccgaatatgtttgatgacaatctgctgttcagcgtctgttatgttgtaaaacatcggcaagcgcactagacgatcactttcacaagtagtaaaacaatcttccccatgaaaacggccaaatttttcaccaccggggctggtgtgcagagaaacataatggaatactgttagtacacctgcgtccttcatatagctattgaatgctgagcgttcttcaacatctttcagcttgatatagaacatgtgagcattatgctccagctcttccggtatgaccggcaatgtcaggagaccagcatcaaccagcggttttaatgcttgataataggtattccacaaggcaagacgacgctcattgattttctcagcctcttccaattgtgcccacaaataagcagcctgaagttccgacataagataactcgaaccgatatcgcgccaagtatatttatcaacttgaccacggaaaaactgactacgattagtccctttttcacggacaatttccgcacgagaaatcaatgattgatcattgataagtgctgcaccaccttcaccaccagaggagtagtttttggtttcgtggaaactgtagcaaccaatgtgtccgatagttcccaatgcacgccctttataagtagacattactccctgtgcagcatcttccacgacaaacagattatatttctctgccaaggccataatggtatccatttcacaggctacaccggcataatgcactggaacaatcacgcgtgttttagctgtaattgctgcttcgattttggtttcatcaatattcatggtatctggacggatatccacaaatacaacagttgctccacgcagtacaaacgcgttagaactggaaacgaaagtgaaactcggcataataacttcatcaccgggttggatattcagcaaaatagccgccatttccagtgcagcggtacaggatggtgtcaatagaactttcgggcaattgaaatgttgttccatccactcttcacaacgcttggtgaaaccaccatccccgcaaagcttaccgctttccatggcttgcttcatgtaatctaattcagtgccaactactggtggtttgttaaatggaatcatttcatcccctatataaccaatacgcggtgctttcaacaaacgcaccactgcgtgtataaaggcgcaaagcagcaatgttgctggtttgtgtcgcaatccttaactgatgtatttggtggtgctgacaccactgctgcgccgccaacattaattttgagccaatcccacagccaatatttcctgggaatacggctagcaaacctatacgagcctctcctgcgcctatatcccgtaaggtaacaaaccctgcgggttgctcattatctccgtttaccagtaaacactgatgatcaaatgtccctaataccgctttttcaacccaagtcgcgtaaaaacgaccactatcctgtggttgataccacggggttcggaaacgactcaaaggaaatacgttggaagccacctccttcaacatcgggatatctcgcctctcagccaaaagtaggttactctcaggattgtctttagcattttcagcattttctatgccaatcattaaggaaaggtctacttccccttctactaacgaaaagcccaacgcggataatccatcaataagatccaatcgctgcgcaggtactttagcctgcactaaagcatactgatctaactgagatgaggttagcagaccggcatcaggtgtgaaatcaaggcgagcggtggacaacccaaaatagtggctatcccactctaatggttcaatattggcgcgcacggacatggagcaaatccagcagatattggccatagccagtttttgacaaggattttactgtttctcttaactgtgcatcatccagccaaccattacgccaggcgatctcttcaagacaagcgattttaaaaccttgacgcttctctacggtctgcacaaaagtgctggcttcaatcaggctgtcatgagtgccagtatccaaccaggcaaaaccacgccctaacaactcaatgtttagttcaccacgttccaaatacatctggttaatactggtaatctctagttcacccctggcagaaggcttgacctgcttagcaaaatctaccacttgattatcgtagaaatagagacccgttaccgcccagttggattttggcttttctggtttttcttcaatggaaagaacgcggaacacgtcatcaaattccaccaccccaaaccgttcaggatccatcacttgataaccaaaaacagtcgcccctttgccacgagaaacaacattcttcagttttgggctaaatccttgtccaaagtagatattgtctcccaataccaaacagcaaggcccgccgttaatgaactcctcaccaatcaaaaatgcctgagctaaaccatccggtgatggctgttctttatagctcaagtgaataccaaatctgttaccatcacctaacagccggcggaaagaaggtaaatcttctggcgtagagataattagaatatcacgtatccctgctagcatgagtactgacaaaggatagtaaatcatcggcttatcataaattggcagtagttgtttggaaacaccttgtgttatcggatgcaaccgagttcccgatccacctgccagaatgatccctttcatatttactgcccccatcgtcattcagtttttacctaatccaaggcgttcaccggcataagaaccatcttgaaccttacgccaccagttttcattttccaaataccattgaactgttttacgaatacctgattcaaatgtctcttgtggtctccagcctagctcacgctcaactttcgccgcatcaatggcatagcgcatatcatggcctgggcgatccgcaacataagtaatcaagtctcgataataagcaatccccacgggtttctcaggacaaaattcttccagaagttcacaaatcgcacaaaccacatcaatatttttgcgttcattatgacctccaatattgtaggttttgcccggttcagcttctgtcacaaccaaatagagcgctctggcgtggtcttccacatacaaccaatcgcgaatttgtttcccttcaccatataccggtaaagattttcctgctaatgcatttaagatcatcagtgggatcagtttttccgggaaatggtaaggaccatagttatttgaacaattagtgataatgaccggtaaaccataagtccggtgccatgctcttaccaaatgatcgctggacgctttagacgccgaatatgggctacttggcgcataaggtgttgtttcggtaaagaagccctcctcaccatgtaaatcaccatacacttcatctgttgaaatgtggtgaaaccggaaaacagcttgcttctcttcattgagtttctgccagaaagcacgtgcagcttccaacaaagtataagtacccacaatgttggtttcgataaatgccgtagggccatcaatagagcgatccacatggctttctgccgccaaatgcatcacacaatccggctgatattgttcaaagacccgatccagcgctccacgttgacagatatcaacctgttcaaacgcataacgagggctatccgcaaccggggcaagagacgccagattaccggcataagtcaggctatcaactacaaccacgctgtcttctgtattattaatgatatgccgcacaaccgcggagccaataaaacctgcaccacctgtgattagaatacgtctcaacgccagactccttttgtatccacaatccacttctgtttaatttcatgactgtttacagctttaaactgattatgatctaccagcatcaacagaatatctgcttcttccagcgctttttccagattaactaattgagttatttccttcaaaggtgcagataattcatgaatatgaggttctacagccaacgtttcacctgtatgccattgtgcaatcataccggtgatatgtgccgctggactctcacgcaaatcgtcaatatttggtttaaatgccaacccaaaacaggcaattttcacttcgcttgcacgttttccactttcagccaaacaatccgcaacagccgcttttacttgattcacaacccacaatggtttgtcatcattaatcatacgtgctgtatgaataagacgtgattgtttcgggttttgagaaacaatgaaccacggatcaacagcaatacaatgaccacccacgccagggcctggttggagaatatttacacgcgggtggcgatttgccaaactgatcagttcccacacgttgataccttgatcagcacaaatcagagaaagttcgttggcaaatgcaatgtttacatctcggaaactgttttctgtcagcttacacatttcagcagtccttgaattagtgacaacacattcaccttcaaggaaaattttatacaactcgctagctctggccgaagattttaatgtcataccgccaacaacgcggtcattcttaattaattcaaccataacttgtcctggcaacacacgttcaggacagtaagcgatatcaatatcggactcttctccaacctgttgtgggaaagttaaatcaggacgcgctgcggccagccattctgccatctgctccgtcgcgcctactggtgaggtagattccagaataaccagatcaccttttttcagcaccggcgccacagattcggctgcggaacggacatacgtcatatccggctcatgatcgcctttaaaaggcgtcggaaccgctatcagaaaagcatctgcgggtaacggggcaatcactgccttcaggtaaccaccttctacggcaacttttaccactttgtctagatccggttctacaatatgaattgcaccacggttgatggtttctaccgcatgctgattaacatccacgccaatgactttcttattacgggatgcaaacgctgctgccgttggcaagccaatataaccaagaccaataacagaaatagtttcaaagctcacagtttcaaagctcatagtgtcacctgatttttttcaaagcgtcgagaatacgttgacaggcatcgccatccccgtaaggattgtgagcgcggctcattcgctgataggcagcatcgtctgtcaacaatcgagtcacctcttccacgatagtttttgtttctgtcccaaccaaacgtactgttccagcatcaaccgcctctgaccgttcagtagtattacgcattaccaataccggctttcctaaagaaggcgcttcttcctgaataccaccggaatctgtcaggatcatataggcatggttcattagataaacaaatggcaaataatcctggggcttaatgagaataacgttatcaatatcatgcaaaatgcgctttactggctcactgacattcgggtttagatgaaccggatagactacttgcacatctggatgagcgcgggctatctgtgccaaagcttcacaaattcgctcaaacccaccaccaaaactttcacgacgatgccccgtcaccagaatcatttttttattagtatcaataaacgggtaatgcttcgctagcttactccgcatagcctcatcattcattattcgatcgcgtacccacagcaacgcatcaattactgtatttccggtaacaaaaacccgattatctgcaatggattctttcaataaattattgtgggaattttccgtcggagcgaaatgatacattgccagatgccctgcaatcttacggtttgcctcttccggccaaggggaataaagatcacccgttcttaatccagcttcaatgtgaccaacagggatacgttgatagaacgctgccaaactggttgccattgttgttgtcgtatctccgtgaaccaatacaacatcaggtttaaattctgctaaaacaggtttcaatcctgccaaaatacgacaggtaatatccgttagatcttgccctgatttcataatattgagatcaaaatcgggagtgatctcaaaaaggtgtaacacctgatccaacatttcccgatgttgggcggtgacacatactttcgcttcgaaggcttcatcccttgccaacgcgtgtactaacggagccatcttgatagcctccggccgagtaccaaacacagtcaacactttcacagtgactctcttatagtcagtaacttgcagattttcctgcaaacaatactcttaatgctatttactcctgctgctggagttgcagaagagatccctcagaagcagttatccctaataattatctgattacttacgtgagcatctaaccaatgccacgccggctcccactaaagcgccaactgcaccccacatgatcatcaaaaacattctgcgagggctgtctctggtaacaggctcctctggtgttctcaaatagcggtaagcctggaattgatcctgtaacgtcgggtgaacattccatgctgctaacattgcaatattccggtcatagtccacatcatacttaggccctattgcttccaaagtctcaagttgagcctgtaacaacggcgcccctaacataaacatttttgaatcgggcaactgatccaccggtgtatccgtttgattgcgccgaatcccttgtttttccgcaattttcagggactgttgtaatacattcatttcgcggctataaaccgctttagcgaccatttcttgacgcttaaccaatgcatccatagattgggcacgggtaatccatgcaccttttacttcatcatttaaatgagtactggcacgactattggcaaaagcaatgtactggcgcaggagttgatttgcttgtccagaagactcagcggtcagtttaatgctgtcattcagcacttttttatcatcatgaggaataaactgaatattattgactaattcatctaataaggccgcatcagctctggcatcgccttcctgctgctgcttgtaataatcagatttcaaccagaattcacggcgagtatcatatgcggcaacctgagtgatgaactccttataggcttcttctgaaatagacggtaactgagtttccaatgaaatattaatgtgagtatccagattgcgcaaaaactgctgctgagagtaataacttcccaactgattagtcgtaggcagatcagtgattgcggtggcactccatttttgttgcatcagataagatgctcctagcgccgcggttgcgaaaattattgccagtacaatgatccatacctttccatgccatagcgcactgcacaaagctctgatatccagctcatgctccagagcttgtttatcctgaatagatttcgtttctgattttatcactgcacagaacctctgctgataatagatgcttaatggttagctgaacggcgcatacgacgcttttgccgtttaatgaaacgagctaccttccatacacgcttgaggcaatagccatacaacacaaatgcaagcaagaacagtgccaacattatccactcaggcacaaattccagccattctccagtaatgccgacagcggctaataaagtggctgcaacagtgattaaaataaaagcctgacgtgatgagaatccagaccgcataactaggtggtgaatatgttgcctgtcaggagaaaatgggctcattcccttccgtaaccggcggtacataatagcaaccatatccattaatggaatggcaacaatccacaacgcagtaactggattaacagggcgctcattcccctgagtagattcaatgagcaaccagataatggtaaaaccaatcagtgtactgcccgcatcccccataaacactttgaaacgttggcttaataaaccaagattaagaacaatataagggagaatggcagcaataaatgcaaaacaccataatgctagtgccgtattaccactttgatacagtaagatccccaaagcaccgaaggagacacaagataatccgcctaataatccatctatcccatcaaccatattaaatgcattgatagcagcccagacagcaaatagtgtcacaacataactaaacggtccaagtgtcatgtcccaagggccaaaagcataaccaagactatctaacttcaggccagcaaaatacatcatcgcaataccaaccagagcttggatggttgcccggaccttaacgctgatatcaaaacggtcatccaatgcaccgacaaataccaatacaccagcacaaaccaaatataaccacttgtgaggaataaattcttttgtgataacaaaagcaaaacagatgccaacaaatattgatattcctccaaccagaggcactaacccctgatgacacttacgataattgggcttatcaacaaggccaactttctttgctattttgcgagccataaacaaaaacgcaaaagaaaacagaaaaacataaaaaatttcaatattcatgctgagaatattcacgatgataactctctgtaaaaagtaaacacaccctggtcatttatcaaccgaaagcatatgattttctagccagaatctaccctcacgagcgccttagcttacgaaaacactgcttatatgaaaaaattaatggcccttatgctcttacatcattcttttaatatttatttcaaatatacccgtcatctttcaagttgcctctttgttggctgcactcacccaccccggtcacatagtttgctatgctcccggggattcgctcccttgccgtcgcgatgcatcttgaaatccataaggtatatatagcagcatatacagcctgcaaaatacatgccatatatagctataacagcgcggtgaatacaaaaaacgccacgaaactgtggcgctaattaaaatgatcatgaactgagttaaaaactatgaacgtttcatcatgtcaaagaaatcgtcgttcgttttgctcatagccagtttgttgataaggaattccatcgcatcaatttcgcccatcggatgaataattttgcgcagaatccacattttctgtagctcttcagaggtggtgagtagttcttctttacgtgtaccagaacggttgtaatcaatagctgggaaaacacgtttttcagcaattttacgggagagatgcagctccatgttaccagtgcctttgaactcttcgtaaatcacttcatccatcttagaacccgtatccaccaacgcagtcgcaataatggtcaggcttccgccctcttccacattacgcgcagccccgaagaaacgtttcggacgatgtaacgcgttagcatccacaccaccagtcaataccttaccggatgcgggaacaacagtattataggcacgtgctaagcgagtaatagagtcaagcagaataatcacatcttttttgtgttcaaccagacgttttgctttctcaataaccatctctgccacctgaacgtgacgagaagcgggttcatcaaaagtagaagcaataacctcaccttttaccaggcgttgcatttcagtgacttcttctggacgttcatcaatcagaagtaccatcaatacacaatctggatgattgtgagctatgttagcggcaatattttgcagcaacatcgttttacccgcttttggtggcgcgacgatcagaccacgttgtccacggccaatcggtgcagccagatccagaacacgggcagtcagatcctcagtggaaccattaccacgttccatacgcaggcggctattagcatgcagcggggttaagttttcaaaaagaattttactgcgggcattttctggtttgtcaaaattaacttcgttaaccttcaacagggcaaaatagcgttcaccttctttaggtggacgaattttacctgaaattgtgtcaccggtgcggaggttaaaacgacggatttggctgggagaaacgtagatatcatcggggccggcaaggtaggagctgtctgctgaacggaggaatccaaagccatcctgcaatatctccaacacgccatcaccgaagatatcttccccacttttcgcatgctgcttaaggatagagaagataatatcttgtttacgcatacgggctagattttccagccccatattttcgccaagtgtaatcagttcagataccggcgtattctttaattcggtaagattcataatggtgggttcttaaactcggggtatatctcgaactatgaacgtgaatagtatggcagcgtcatcgatcggtgcctgtttattttgtacaaaaacaaatcagacctttaatacattatgcatataaaaaggtaataatttgaagtactaagattgagctcaaataagactgacaggctgtcaaaaacgctgttgagataatgctgaaacattactgatttcgataaaaactatctcaacgtaacgagctatacgccagattattcccgtataacccattggatattttagactatccagagataacagacttatcagacactacagattattcagtatgcaacatacttctaacatgatgtatgtgatacaagcagtggcgctaacttatcacgcttctttacggacgtctagcggtcaatgaaataaataataatatacgctaaacgcccggcattaatgtgagctcacttcaatcagagattagcatccaaaaattctttcaattgagtttttgacagtgctcccacttttgtagcagcaacctgaccatctttaaacagcaacagtgtaggaataccacggataccatacttaggagcagttgccgggttgtcatcaatgttcaatttagtaatagtcagtttgcctgaatattctggggcaatttcatctaaaataggtgcaatcattttacatggtccacaccaggcagcccaaaaatcgacaagaactggacctgctgcgttaagaacgtcagtatcaaagctagcgtcactcaaatgaataattttgtcgctcattttttactccaaagaataattttttaccatgctagtgtaacattactgatataaggttgcctttatttcagcggatacactttcgtaagacaatggttaactgatattctaccacactatgagtaaaacacacttgacagaaaagaagttttccgacttcgccttgcaccccaaggttatagaagctcttgataataagggcttttctaattgtacaccgatacaagcactgacattgcctttcactgtcgaaggtcgtgatgtcgcggggcaagcgcaaaccggtacggggaagacgctagcatttttagcgtctgcttttcattatttactaactcatcccgcagcggaggagcgtcaaaccaatcagccaagagcgctgattatggctcctacccgcgagctcgctgtacagatttactctgacgcagaagatctggcacaggcaacaggtctaaagatgggtcttgcctacggcggtgatggttacgacaagcagctgaaaatactggaatccggagttgacatccttatcggcactaccggacgtctaatcgactataccaaacaggggcacattaatctgaatgcggtccaagttgtggttcttgatgaagctgatcgcatgtacgatctcggttttatcaaagatatccgctggctattccgtcggatgccaccagtaaacgaacgcatgaacctactgttttctgccacactctcttaccgagtccgagaactggcatttgagcaaatgaatcatgcagagtatatcgaggtagaaccgttacagaaaacaggacaccgcatccgcgaagagctgttttatccttctaatgaagaaaagatgcgcctgcttcaaacgttgttggaagaagagtggcctgatcgatgcattattttcgccaatacaaaacatcgttgtgaagatatctgggcgcatctggctgctgacggacatcgagttgggttactaaccggtgatgtagcacaaaaaaaacggttacgcattctggaagaattcagcaacggcaatattgatattctggttgcaactgatgtcgcagcccgtgggttgcacattcctttagtcactcatgtttttaattatgacttaccagacgactgcgaggattatgttcaccgcattggccgtactggtcgtgcaggtgaaagtggtcattcgatcagcctggcctgtgaagaatatgcactaaacctgccagcgattgaagattatattcaacactctatcccggtcagcaaatataacagtcaagccttgctgaaagatttaccggcacctaaacgccgataccgttcgcgttcaggaaatcatcagcgccgtaacaatttgtcgcatcgtaataatacaccacgtaataaccgtaaacgttcaggctgaaaatgatgctgagttcttcttcgctctatgcggctatcgacctgggttcaaacagttttcatatgctggttgtgcgtgaagtatccggcagtatgcaaatactggcacgaatcaaacgtaaagtcaggctggccgccggattagataaaaataaccgcttatctcaacaggcaatggagagaggttggcaatgtctcaggattttttctgaacgcttacaagatataccaccatcacaaatccgcgttgttgctacagcaactttacgtatcgctgaaaattcagacgaatttgtgggaaaagcatcagaaatccttgattgcccggttaaagtaatcagtggcgaagatgaagctcggcttatttatcaaggcgttgcccatacaactggcggccctgaaaaacgtctggttgtagatattggtggtgcaagtacagaactggttacggggaatggggcaaaagcctctcagttatccagcctaagtatgggttgtgttacctggcttgaaggctactttaatgaccgtagcctgacggaagaaaatttcgccagagccgaagctgccgcacatgaaacgttgaaactcattgccccaaaactgatcgaacaaggctggcagatttgtgtaggcgcttccggtaccgttcaggctctgcaagaaatcatgattgctcagggtatggatgaactgatcactttgccgaaacttcaagagctcaaacataaagcgattgaatgcggtaagctggaagagctggaaatagaaggattgacgctggaacgggctttagttttcccaagtggccttgctatcctgatagcgattttccaggcattaaatattgaaagtatgatccttgcgggcggcgccttacgggaaggtcttgtttacggcatgctggatttaccaatagaaccagatattcgtaccagaacactacgtaatatacagcgacgttttcagctagacgttgaacagtctcaacgggtcaaacaattggctgaacacttcctacaacaggttgctaaaccttgggaacttgatagccgatgtcatgaattattacaaagtgcctgtttgatacatgaaattggcctaagtattgatttccatcaagctccatcacatgcagcctatctgatcaattatctcgctctccccggctatacgcctgcacagaaaaaactcttagccacattgctaaagaaccagagcggccctattgatttgttttcctttaatcaacaaaacgccttacctctgatacaagctcaacgtttatgtcgtctgttgcggttagctatcatcttcgccaaccgtcgtcgaaatgacacgctccctgctctacgtttaaaagtgagtgatgaagcgttaacaataacgttacctcatggctggctaatgcaacaccctctgagggcagagtctttacagcaggaaattcagtggcaaaaccatgctcaatggtcacttgttttaggcgagcaggatgctcaaacctgaataaaatcactttccctgtatctctgtgatacagggaatctccaacatatttatgacttatttttttgtccaagccctaaacgcgatttgatatccgcaatacgcgattgccctttttgcattctttcttcggcagtcactatttttttatcttgtggccaatgtaagtcatcctgtggcaactcatgcaaaaaacggcttggttctggacggattaactcgccatattgacgacgttctttacataaagtaaagaataactcccgttgagctcgggtgatccctacataagccaatcgtcgctcttcatcaatattttcttcatcaatactgctctgatgaggcaacagcccttcttccatgccaaccagaaatacatagggaaactctaaccctttggaagcatgtaaagtcatcaattgcacctgatcaaactcctcaccatcttcgtctcgctccagcatatcccgtaatgtgaaacgcgcgaccacctgagataaagtcattgcttcgttcagttcatcaccttccagcatttcactcatccaagtgaataactgattaatatttttcatccgcatttcagccgctttcggactcggtgatgtttcgtacagccagctttcataatccataccatgaagtagatcacgcaccgctagcaaaggatctcgttcaacctgacgagttatctcatccatccagtgaataaaacgctgtaatgccgccaaaccgcggccagttagactttgttccaaaccgagatcgaaactagcctgatagagacttttattgcgctgattcgcccactcacccagtttttgaatggtagcagcaccaatttcacgtcttggcgtattgacaattcttaggaatgcgctgtcatcttcgggattagtcagcacccgcagataagctagcaagtccttaatttcagggcgggcaaagaaagaagtaccaccagaaatccggtaaggaatgcggttttgcatcagcatcttttcaaacacgcgggattgatgatttcctcggtagagaatagcgtaatctttatattgggtcttattgataaagtgatgtgccatcagctccccaataaccctttccgcctcatgctcttcattattagctgtaatcactttcaatggatcaccataccccagttcagaaaaaagccgtttttcaaacacgtgagggttattggcgatcaaaatattagctgctttcagaatacagccagaggaacgatagttttgttctaatttgatcacattaagcttagggaaatcctctttcagtaacaccaaattttgtggtcttgcaccgcgccatgaatagatcgactggtcatcatcacccaccaccgtaaaacgagccctttgccccaccaacaatttaaccagttgatattgactggtattagtgtcctgatattcatctaccaacagataacgaatacggttttgccaacgctccctgacttcttcatcacgctgcattagcaaagtcggtttggtaatcaaatcgtcaaaatccaatacattacagctcgccagatgtaaatcataacggcgataacattcagcaaactggtgctcctgagcagaacggaccaatgccaaaacttgctgtggagaaagcagatcatttttccaatttgaaatggtggagatcagtttttgtaatagatctttatcttcctccagtaaatcggctgttaaatctttcaacaaagccatctggtcctgatcatcaaataacgagaaattgcttttcattcctaacgttttgtattcgcgcttaatgatttccaaccccaaagtgtggaaagtcgaaatcatcaaccccttagcctctttgcgccccagagtttgtgctacacgctctttcatttcccgtgcggctttattagtaaacgtcacagcggcgatatggcgaggctgatagccacaagtacggataagatgagcaattttattggtgatcactctagttttaccagaacccgcccccgccaggaccagacaaggaccggtaacaaattcgacagcttgttgttggctaggatttaatcgcatggtatttaataagttatgtcaaagcagtactttaagagatggaattgtagcagaaaggggagaaaggaaacgccgttttctttatgaaggaaaaacactctattagttggtaaatcgcgacttatcccccaaaactttagcaaacggtctcagaaccatattcattagattcaaagagggaggatttctcccccttatctttatcaatatcaaccaccaactgcaatacgtttcatatctgtcatgtaaccacgtaatacgcggccaacaacttcaattgggtggtgacgaatagcctcgtttacatcgcgcaactgggcgttatcaataccgttatctacaacgggcttacctaaatcacccgcctgtagcgaacccataaacttctctttcaacagtgggaccgcaacatgagagaacaaatagttaccatattctgctgtgtcagaaataacgacattcatttcgtacagacgtttacgagagatagtattcgcaatcagcggtaattcatgcagagactcataataggcagattcagcaataataccggtatcaaccataatttcgaatgccagttcaacccccgctttcaccatagcaaccattaaaacgccgtgatcaaaatattcctgttcactgattttgccatcatattcaggtgaattctcaaacgaagtgttaccggtttcctcacgccaacctaatagtttcttatcatcattggcccagtcagccatcataccggaggaaaattcaccagaaatgatatcatccatatgtttctggaacagcggcgtcatcatttctttcaactgctcagacagcgcatacgctcgcagttttgccgggttagacagacggtccatcatcagggtgataccaccttgtttcagggcttctgtgatggtttcccagccaaactggatcaattttcctgcataacccggctcagcaccatctgccaccagtttgtcataacacagcagtgaaccagcctgtaacataccgcacagaatagtttgctcacccatcaggtcggatttcacttcagccacgaaagaagattccagaacaccagcgcgatgcgcgcccgttgccgcggcccatgccttagcgattgccataccttcacctttcggatcgttttccgggtgaactgcgatcaaagtaggcacaccaaaaccccgtttatattcttcacgcacttcggtgccaggacacttaggcgctaccatcaccaccgtgatgtctttacggatttgttcaccgacttcaacaatatttaagccgtgagaataacccagtgcagcgccttctttcatcaacggttgaactgcgctaacaacagaagagtgttgcttatctggtgtcaggttaatcaccaaatcagcctgcggtattaactcttcataagtaccgacttgaaaaccattttccgttgctttacgccatgaagcgcgtttttcttcaatggcctctttacgcagggcataagcgatatccagaccggagtcacgcatattcaggccctgattcagcccctgcgctccgcaaccgacgataaccacttttttaccttttaaatatcctgtctcatcaacaaactcttcccgcgccataaaacgacatttacctaactgcgccaactgctgacgcaaattcagcgtattaaaataattagccattagtgactccgtatcatgttgtgctcagcaatgaagtgctgcgactattttttagatttcctcaccctgtgaggtgtttatatattttcaatatatgacatgaaagccattgcttaaattgatatattaacaatactatattgcattttatgcaacacagactattggacaggagaaggagaatgggctatggatatacgtgatctcaaactgtttctacatctggctgaaagctgccattttggccacacagcaaaagcaatgcatgtcagtccatccacattatcccgccaaattcagcgtattgaagatattttgggacatccattatttttacgagataatcgcaccgtaaaactgacctttgccggcgagcaatttaaacaatttgcccaacagacactgttacaatatcagcaactaaagcattccttgaatcaacaaagcccatctctaagtggtgagttacgtctgttttgttcggtcaccgcggcctacagtcacttaccacagatcctagaccgttttcgtgcagaacatcctatggttgaaattaaactcaccacaggtgatgccgcagatgcggtcaataagatacagtctaatgatgccgatttaggcatcgccggtaagccggaaaaactaccagataatgtcagcttcaccaaaatgggtgaagtcccactggtactgattgcgccttccctcccttgcgctgtacgagcacttgtaatgcaaaagtcccctgactggaataacattcccttcattttgccggaacacggcccatcacgtaagcgcattgagcactggttccgtcaccataaaattaccaacccatcaatttacgctaccgtgtccggtcatgaagccattgtttctatggttgcattgggttgtggagtagcattaattcccaatgtcgttgtagaaaacagccctgaaccggtacgcagtcgcatatctttattggacaatatttctttagtagagccgtttgaattaggtatgtgcgtacagagaagacggcttaatgaacccttgattaaagcgttttggggattgttataacaaactgcgttaacaggtctttttattcattacaagcctgatgtaacctattttcggtattatgccaacatacttataatttatgtggcctaattcacaaagaacataaaaatataaccattttgttctcatgataatatgtttaatataagttataaccaatcaaaataattatatgaaaatattggctcctcattaaatttttggtcattaattatgtcgctaaagaaaatacttttaattatatcaagtggatagtagctatttaacgttgagttattcagatattgttaagattggctagcaaaaatcgaatattccaccagcgataaacagagtggaaaataattctccatgccatgtcataacaatatttcccaatagtgaaattattttttcccagatactataggaggtaacgtcataataattatttaatagtattcctatgatatagtaactaataataattatttaatcagttaatataatttaattaaaaaataacaccaaagatttataataattatataaaacaattaattaaaatacacacaacaatttaataaaggacaccatcatgttacacaaaatagacaaatcaccgtattttattaaattctataaattccatctacaagatctcgttttctcttataatatgcaaacagaatggcatcatcatccttgcatccaattaagtgtatcaccacataattcactcatgaggattgatactgaaaatgaatcgaggcaagcacatggattcattatttcttctaatattaaacataaattacactcggaagggcaactctgttttaatctactgatagatctagccaacccattatgtcatttattactacatcagatgagaggctcagatataatatatttaaatcaagaatcatctggtttgatagcaaactattttactaattgtttacaatcagaaacctctccagatattttcatcttaaataaccttttaggtaaaatagaagattgccattgttatcaagataaacgaatcataaaagcagcctctcttattactgaattaccggttaaatgtatatcctctcgtgaaatatcaaatcaactctatttatccgaaagtcgattcttgcatctctttagagaaaaaatgggaactaatttccgcagctatctattatggaaacgcctgcatcatgctattgatgagatacattcatcagattcactgactttattagcttgtaatagcggattttccgatggcgcacacttcagtcgtacctgtatgacgctatatggattaaggccctctgaattaaaacatgccagtaagaacagaattcaacaagcacaacaaaaatatttcaatttatcatcaacattaacaggtctaaattttacaaagaaaaatatctgggttatgaataaatagtatttttgataaattacctaaaataaataatttatatttataaccattattatcaaaatcaatatgttagagattctgtatcattttattcctaatagaacatttactatattatgcactcttaatgcctatcccaataggcgtaattgttgcaggcagtttgaacacggacagcgcggaaaaaccggagcgtacacgtagtacgtgaggattttgagcactgcccaggttcaaaatgacaaataaaatagccctatgggataggcagttagtaatgatacagaattcagaacaacaccataaaaacactacccaataaaccctcaatccacgacaaataaaatatacagagtaaaatatcactattctgtattaatcattcattttaatggtacatgctctttcagataattttctacccatttagcgacccgacaagtgtctttataagcccctaacatcaattcagaaccacggctactcaaccatttccgcccaacgataaataacccaggataaggggttttcccaccttctgcatgaccatttttacaaacgaatccattagcatccgcagcaccgggaagcgttaaccatgccgtatcatctttataccccaaacaccagataaccgtatccacctcatattgattgccggacgaatcacataatttattgtcttttatatcaactaacctattcgctatttttatatccaaaacagctaatcgatggtttttcagatcaccacaagggataggattacgccgccgcataattttcccgactaaactgtaataattggcaaataacagaccgcttttacttaaccaccaaaagatatctttgcccaatattctattaggtaagagaggacgggaggaaccacaaaataatgtcaccttcgcagttgctgccaaatctttagcaatctgacgaccactcgcaccatcaccaacgacagcaactcggctgcccgttttaatttgcttaggttcccgatattgatctgctgtaatttgttgtatatcggtagaaaaccgctcagcaagcgccggaatatcaactaattgattagcccctgttgcattaaccaaacaaggtgcatgaaatacttttccatcttttgttttaacacgatagccatctgtatcgtgcttcacctcaaccacttcggtttgagtatgtatcgcaaggttatgatgtgaagcatagcgctcaaggtaatcagcgacttcatttttatctggataaccttctttaattccagggaacggtaagccatgaagttgagtcataccgcgtgaagtgaataatagcatattatctggacgcctgcgccacacatcaccaatacgtgcctcccgctctaatatgcagacattaatattcttagccgcaagggtagcagctaaacttaacccggcttgaccggcacccacaattaagcaatccattttcatcatgcgtactcgttttttaatttggcatttatttatattttatttctatcattatcccaatcttaggacaatgaaaaaatttacaaaagaacattcaatagatcaaaaaacaacgaacttcacaaaaatataaaagacaattaaaaaatttacttgaattaactggtcatattcgcactaaagtgaatattttgaataaatcagctatttttagcataattttaacaatattgacaaatccatataatgatcaaagtaataatatagccaatttattcaataaaaataaattattaatgactatcatttttgcctacgtaacttatgctttatcgctataacttataataagcaaagattaatttatctactctttaccctaccggagatgaaaaaatggaaaatatcaaaaatatatatgacggtataaaatctcgtggcggaaatccgttgaagtggctaatagccgatgtcgaccttctctataagttgtctaaagaagaacaacaggaattaaaaacctgtttgcttaaggacgcttttaatttccattatcataataacccttactataaagatatttgtgaaaaacaaggtattaaaccagaagatatccagaactataatgatttggttcgcatcccactcatacccgttgcaacttataaatcagccgaaagtcaccgtttattaagcaaaccattatctgaaatcgaacatgaaatgcgctcaacgggtaccagtggaattcctagcgtttatcgtcgttgccacgatacgatggatcatacagtattggctgtctattccaattatcgcagtatgttcaaagtatctggcggtgccggcctatgcttatgcccgtcaacagaagatattccagaaatggcactggtcaaaatctttaatttcctgacgggtttattagatacccgacgctatatgattaatcaggaccacttctccccagaagatgctttgaatcaattaatccagtggaaaggcaaattcacccggcatttaattggccctccattcatgatccatcgttttattacgttcctaaaagagaataataccaagctcactttagatcgcgatagcatggtaattactatgggcggctggaaacgttttaccggggatatgatctcccgcagcgaattgaatgcagatatcgaagaatggatgggcattccagcttcccggaatcgtgatatgtatggtctggttgaagcaaacgtccttgccatcgaagatgaatataaccataagcatgttcctccttatattcatttctccgtccgtgatcctaacgatttaacacgtgaattacctgatggcgaaaccggacaattagtgatcttagatccactctctgtttccactcccggcatgttactgacagaagatttggtctacttgcgtaccgatcctaataaatcctggcgtaattctcagcgaattcagtttgttatgcgtaccgctgctgctaaagagtttggttgctgtgcggtcaaccttgagagaaaaatgtcagacgatgaaagtacctcagctacacccgcagtataaatagcaaggtggaattatgtttaacaacatcattattgacaacttttgcaatcctgattgccaggggacgttatccgcccccaccattaaactggcattaggtaaccctgtatgtggtgacaaggttgatatcgacctgacattagataaccaagggcgggtaaataatgcctgttttcgtgcatggggatgtaccgcctccctggcaatgtctaaccagttttgtcgccatgctaaaggtaagactctcgaagaattgaatgcattatcgcctgaaggcatagatgcattattaggtgagttagaacccgcacagcaacactgccttgatatgctgcataagctatttgagcagctaaagggaaaaatatgacaagtctatatttcgactacaacgccacaacaccgctaagtgttaaagcacagttggcgattaaagacgcaatgtctgtttttgctaatccatctagccactacagcttaagtagcatggcgaaaaagttgctcactgacgctagaatatcgatggctgcattgatgggcacagtcccagagcaaatcctgtttacatcagggggaaccgaaagtaataaccaagccttatccagcttgttagcaacactttccggttcggatctgtctgctcatcatgttattagctcttccattgagcatccgtctgttctggcaccgttactctggtatcagcaacgcggacttcagctaacactgatcaaccccgataatcaaggacggataagtgtacaaagtatccaggaaaacttgcagccacaaacccgtctgatcaccttaatggcgattaacaacgaaaccggcgtgatccagccctatgaagcggtcgcctctttagcaaaagaggccggtgtttatctgcatatcgatgcagtacaggctattggtaaacggccttttagctgtgacacactttccggtgtaacgaccatatctttctccggccataagtttaacggcccgaaaggtattggcgggctttaccatgcaccaggtattcaattaaatcccttgctacatggtggagggcaagaacaaggagtacgcagcggcactgagaacaccttaggacttgctggactggcggcggcagctaaagaatcactgaacagcttgcaaggacgcttcaatacttacaaaacgctcagaacaaccttgctatctcggttagatcaacatcatgttaactacctaattaatggtaataccaatccagcgtttcaggcaccttggactctcaatttaagtttctcgggtattcgtgctgaatcgctagccagcaggctagatttacgtcacggcatctctttatccttaggatcagcctgtagcaataacaaatcaacccaacgttctcacgttctggctgctatgggattacccgatgatcgtattgatagtgcggtacgcatcagcttcggatatgccacaagccaagatgatattgagatattggctaacgccatcaaacaagaaacgtataacttacttaaaatttcagggaaatctttaatcacccaggaataatagaaaaatttaaatttttaggggacattaatatgaaactgtttgaattacttcaatctcaaattactgaattaaccgatatcgaaccagaagatattactctcgacactctacttgatgatattcatttagtgagtctggatttcgtttctattcaggttgcgttaaaaagagaaatgggaattcaactgaatttcgataagttccagcgggataatacgacaacaatcggtgactttgtcaattacgttagtgaattagcaaaataatcatcacgaatacactgggatgttagctgtctatgacaatatcacaacacagctaacattcatttttatgatgcttttatctaccaatcctattatttggttgtgttaaaaaataaagcatgtcaccaggaaatgaattttggagataatgtttcatgaatattcaaacaggctatcaccgcgttgccgtcacaggctatggttctatctgttcgcttgggcaaaatacccaagaaatttgggatgcaatcctaaattatcgtgtaggctacaaaaaggaagaacacccagacgcttctgttgtagctaaatttttcggtaatatccctttctcgcctgatgtatcacggttttccaaaaagttattaaagaacctgcccaaattcagcaaacttgggctgattgcggcggatgaagcaatcaagatggcatttggtaacgataaaaccgctcttgacgaaaattattcgccttttgaacgcggcgtcatttttggcactggctggggtggagaagatgcaaccgttgaaaacagccattcctatgctgatcaaggcattgcttcaccgatgaccaatattatgtctatgcacagcgtaggaacagccgcaatttcaatgaactggaacttacggggatatcaaaataccccggttgcagcttgtgcaaccggcagtatggcgataggtgatgcgtttgaacttatccgcagtggacgcactaaaatgatgctggcagggggtggtgaaagcatcagagatccattcattgtctggagtatcgacattcttggagcattgagtaaagaacaggaatctgtcgaaaaggcttgctgcccattcagtaaagatcgtagtggttttgttatgtcggagggtgccgcaatattatgccttgaagactatgattgcgctgttgccaggggagctaaaatactggcggaagtgattggctatggcaataactctgatgcgtcagatatgaccgccccggccccagattgcaaaggacgggtcatggcaattcagatggcgctggaacaggccaaactctccacctcagatattcactatattaatgctcatgggacatcaaccccattaaacgacattaacgaaaccgatgttctaaaaatgagcctgggcgagcacgcttatcgtattcctatttccagtacaaaatcctatacaggccatcttattgccggagcaggagcaattgaatccattttctgtctcaaagcgatagagacagcaacgattcccgcaacgatgcacttgaataaccctgatccgctatgcgatctggattatgtccccaatatccaccgaactcaccaacttattgacaccgctttaaatgttaactacggattcggtggcacaaactgtgcacttattttcaggaaggccgatagatgaacgttcaatttagcaaaaaagatctcagtcaatgggctaaattctctggagactacaatcctatccattttgatgaaaaaatcgcaagagaagttgggttaggtggtattgcagtacacggcatgctggccatgatcccgctcaaaagcggatacgattatctgtcacaactaaatcgggaaatgggcagacagtggcacgttaatttacgcaatcccgtacctctggatgcctgctattgcgtcaaaactaagcacactaaccggaatgggaaaacgacctttaatctgcaagacgaaacaaccaacctgaaacctctgattggtcactatagttgtttcgatttttcacaaaaaactagctttcccgaaaaaccacgttgccaagttcccatacaagagacaataaaaaaatccatcgaatttaaacataccttcccggaagtcaatgaattctggatctttcttgatgctctgatgttttatctttttatgcagcaaagtgccaaaactgcactagcaacagaatttaaaacctattttggcaaacaagaacatgatgaaacatgcctcaaagatctcattgttttgcatgttatgcacaccgtgagtttctctccagcgctgcttaatcgccaaatcccagatgaaatgccaaatatcgaatatacgatcgtaccaaaagatacattcgacgttgatggttcgttatacggtacgctggaaatcccgatctggctgaatggcgaaatctctttagttgttgagatgagtctgatgggaacaacaaaaagaaagcagattgccaactaaaatctgatgaatgcggtattggcagacggatggcataaatttagaggaatcacttaatgaatatcagcaccccttgggtttttatttcaggtggatcacgtggtatcggcaaaggcatagtaaaaatgctagcagctcaaaactatcacgtggtttttacctataaatccagcataaatgaagcacaaatattgtgtcatgacattgaacagcaaggttatcgctgtgagggctatcaatgtgacgtctcaaacgcgaaagaagtcacaacattgtcagcagaacttatctcacaatatggcgctccttatgccatcatcaataacgccggaattacacaagatgcattgctgataaatatgaaagaagaagagtggcataatgtcatttccaccaatctttcttctatctatttagtgaatcactcatttctccctgaaatgattactgctggagaaggctgcattatccatatgagctcagtcactgcatttaaagctaactcagggcaagttaactacgctgccaccaaagccgccatgatcggtattacccgctcattagctgttgaagttggccgatttaatgtccgggtcaataccgttgcgccaggcttgattgacactgaaatgctggctcatatccccgcgccacataggaaaaaactgttatctaacatcccactgggccgcttgggttcagtagaagatattgctctgacagtcaatttcctactcagccctggaggacgctacattaccgggcaaacattcgttattgatggaggaatgaccgcttgagtcagttaaacaattaacatcaatggattcgtagccctatcctgtggtcatttgtacccagataaatattctgggtactgacacaaaataccgttaatcattgccagataaacaatccagcctatctggtaaatgttaataacgataataaacaattttaatattaaatcatgctcttggcgttaagtgctaaatattagcaattttcattttatcagatgagaagggcttgaccttgtagtcgactccaaggtgtttaatcaaatataggcacattaattaagacgaatttacttttaatcactgtgataggagagaacacatgaccggagaaatacaatcacctccgcttaatgagaaaaagtcaaaacgtaagttagcactgatcctcgcaactctcttatttgcttttgtcgggttgggttacttcacctattggcttatttcattacgtcattatcaagcgactgatgatgcttacgttgtgggtaatcaggtacaagtgatggcccagatcaccggtagcgtaaccgccatttatgccgataataccgacttcgttcaacaaggcgatattttgctacgtttagactctattgatgcggaacatgcttttgagcgagcgaaaaataccttggctaataatgtcaggcaaactcaccaaaccattattgataatgaaaaactattggctaacattgatctcaaacaaacggcattacaacaggctcaagacgatttaaaacgacgtgaacatttgggactcacaggtgctatcgccaaagaaaatctgattcattcccgcaatagcgtacaaatggcaaaatctgagctgaatgttgcccgacaacaatattatgccaataaagcactagttatagacaccccattagatcaacaacctgcgattaaactggccgcttcccagctccgcgatgcatggttaaccttacagcgcacccagattgtcgcgccggtaacaggctacgtttcacgccgcagtgttcaagtaggctcacaaataaaaagtggtgctccactgatggttatcgtacccgctgaccaactttgggtcgaagctaacttcaaagaagttcaacttgccaatgtgcgtattggtcaacccgtaaccctgattagcgatttctatggtagtgatgtcacttataagggccggatcgttggtcttgatatgggaactggcagtgcattttctttattgccggcacaaaacgccaccggtaactggatcaaagtagttcaacgtttacccgttcgtgttgaactagaagcacaacaacttattgctcatcctttacgcatcggtttatccatgcacgccgcggttgatacccgaaatcagggtggtctggtgcttgctgacacgcctcgtaatggcattgtttatgaaaccaacgttttaacttacaacaccgtagaaattgatcggctaattaacgaaatcattcaagttaataccagtcaaaataagtgaggttaacatgctaaaagagccattatcaggagccaaacttggctggctaaccctggctttagcattagccgcttttttacaaatattggacctgaccattgctaacgttgcaatatcaacaattgctggagatctgggttcatcagtatcacaaggaacctgggttattacctcatttgctgttgctaacgcgatctctatcccattaactggctggttagcaaagcggttcggggaagtccgggttttcttaatttcaatgatcttatttgtgatcacttcctggttatgtggtattgctaatagcttggaaatgttgattatttcccgcgtcctgcaaggtatctcagccgggccaattatgcccctttctcaaagtttgctactcaacaactatcctccgctaaaacgcaatatggcattggctctgtggtcaatgactatcgttatcgctccagtttgtggtccgatactcggcggttggatcagcgacaactaccattgggggtggatctttctcatcaacgttccggttggctttgccgccattgctatcacctggatgctgttaaaagatcgggaaactgaaataacggcgaggtcaattgatatcgtaggactaattttattggtcatcggtgttggttgttttcagctattgcttgatagaggaaaagagcttgattggttcaactcaacagaaattattgcattagccattatcgcagttattgccataactttcctgatcatctgggaattcaccgatgatgatccgatcattgatttatcactatttaaatcacgcaattttactatcggtactttatgtatcagtttggctttcctactccatataggcactctggttttgcagcctcaactattgcaaatggtatttggttatacggccacttgggcaggattggtaatggctccattagggatagtgccaataatgctcgttccactcattggtcgttttagttcaaaaattgatatgcgttatttagttatgtttagctttatcatttttgcactctgtttcttttggagaactcatacctttgagctatcaatggatttttccactgctgcctggccacaatttattcagggctttgctatcgcctgtttaattatgccactaacagccattatattatctgatgttgaacccgctaaaatcgcttctgcgggcagtttatttaactttttacgcacgctggcaacatccgtgggtacttccattaccacgaccatgtggtcccgtcgcgaagctgtccatcatgtccagttaactgaatcgataactccccataatcctattgcccaacaagcctatgagaaaatggaacaattagggatgacacacgctcaagccagtcactctctggcacgtgaaatcactaatcagggattgattattgctgctaacgagatttattggctatttggctttatttttctgatcttgctgatcttgatctggctggcaaaacccaccgtcggagaaaagaaataacactatgataaataaaaaaataagcttaaaaaccaaactatcgataaataaccaaagaacccatttagccccctttccaatgaaacctaatcaaaatagcaccttatcaaggcgctattttgtcgttttatagaacatgttttttcatcaccaaaactaccgatcaatctccggctgttttaaatgtttttggcacatcaaaaagaatttaaacgcaggggtatccgtctcatcatgatacgcatagcctaatgcatcaagatgacgcttaaaacgcacttccgctctgacatttcaaatgcggctaacacccgacccatatctgtaccataattgcgattatggaataacgtaatattccagtgagttcccaaagtttggaggaactttagcaaagcccccggtgattcaggaaattcaaaactaaataagcgctctttcaatggcttagatggacgaccgccgatcatatagcgaacatgtaatttcgccatctcatcatcagagagatcggcaacctgatatcctgcggtacgcaattcctcgataatttcccgtcgttctacctcaccacgactcaggcgaacaccaacgaaaagacaagcctgatcaggatctgcatccgtataacgataattaaactctgttaccacccgatcgcccaatttctggcaaaaactcaggaaactccctttctgttcaggaatagtcactgccagcaatgcttcccgctgctcgcccaattcacaacgctcagagacataacgtaacccgtggaagcttacgttagcgccagaaagaatatgtgccagtcgctcacctctaagctgatgctgctgaacatactttttcaatccagcaagtgccaatgcaccggatggctcagcaatcgcacgcacatcctcaaacagatcttttaccgcggcacaaatagcatcactgtctaccgtgataacatcatctacatattgctgacacaaacgaaatgtttcatcaccgatacgcttaaccgcaacaccttcagcaaacaaaccaactcgtggtaaatctaccggatgtccagcctccattgctgctttcaggcaagctgaatcttccgcttccaccccaataattttaatttctggcatcagttgcttaatcaacacagcaacgccagcaatcaacccccccccaccgacaggtacaaagattcgatccagacgcacatcctgttgcaaaagttccatcgccagtgttgcctgacctgcgattacagcaggatgatcaaacggaggaacaaaggtatagccctcctgttgtgccatttctatcgctttagctttagcctcatcaaaattagcaccatacaacagagccttaccaccgaaactccggaccgcatcgactttaatatccgcagtagtaaccggcataacaatcaaagagttaattcccaaacgattggcagaaagtgcaaccccctgagcatggttaccggctgacgcggtaatcactcctcggtttttttgttcctcagtcaaactcgcaatcatggcatacgcaccacggagcttgaaactgtgaacaggttgccgatcttcccgctttaccaaaatagtatttcccaagcgggcagaaattttctccatttcctgcaaaggagtcacctgagcaacttcataaacaggcgcgcttaatgctgctttcaaatactctgcaccatttggtgaggaagttaagggaagacatgcagccatacgattatccccctaacttagatttatcacggacagcacctttatccgcactggtcgccaatgaagcataagctctcaaggcaagcgatacctgacgttcacgggctttcggcgtccacgatttatcaccgcgggcaaattccacttctttacgggtagcaagtatcctttcatctacatcaagtcgaattttccgcagtggaatatcaatatcaataatatcgccatcttgaaccaaaccgattagcccaccattagccgcttcgggagaaacatggccgatcgacaaacccgaggtaccaccagagaaacggccatcggtaatcaatgcacagcttttgcctagccccacagattttagataagtcgtcggatacaacatttcctgcatgcctggcccaccttttggcccttcataacgaatgaccaccacatcaccagcaacgacttttccacccaagatcgcatcaaccgcatcttcctgactttcgtaaactttggctggcccacggaacgtcagactgccctcatcaaccccggcggtttttacaatacaaccatctatagccaaattaccaaatagaacagcaagaccaccatcccgactataggcatgttcaatgtcgcgaatacacccttctacacggtcagtatccaacgaaggccaacgacaatcttgtgaaaatgcctgagtagtacggatacccgcagggcctgccgaatacatttccttcactgactcatctaccgtctgcatcacatcgtattgattaagcgtttgtaacaaatccagacccaaaacatttttaacctgacgattcaacaaacccgctctatccagctcacctaaaataccgatcacaccaccagcacggtgaacatcttccatatggtatttttgtgtacttggtgcaactttacatagatgagggatctgacgagacaaacgatcaatatccgccatagtgaaatcaacttccccttcctgcgccgcagccagtaagtgaagcacagtattcgttgatccccccattgcaatatccaacatcatcgcattttcaaatgcggctttcgttgcaatactacgcggcagagcactgtcatcattttgttcataataacgcttagtcaactcaacaatgcgcttgcctgcattcagaaacagcgccttacgatctgcatgagtagccagtaatgagccattccccggttgcgacaaacccagtgcctctgtaaggcaattcatagagttagcagtaaacatgcctgagcaggaaccacaagttgggcaagctgagcgctcaatctgattgctatcttcatcactgaccttcgggttcgcgccttggatcatggcatcgatcagatccaatttaataatctgatctgacaatttagttttacctgcctccatagggccaccggaaacaaaaatcgccggaatgttcagacgtagtgctgccatcagcattcctggggtaattttgtcacaattggaaatacacaccatagcgtccgcacaatgtgcattcaccatatattcaacagaatcagcgatcaattcacgtgacggcagagaatagagcataccaccatgccccattgcgataccgtcatccaccgctatcgtattgaactcttttgcaacaccgcctgatgcttcaatctgttccgcaaccagtttacctaagtcccgcaaatgaacatgccctggaacaaactgagtaaatgagttaactactgcaataatcggtttaccgaaatctgcatcggtcatccctgtcgcgcgccataaagcgcgagctcctgccatattgcggccatgagtcgtagtggcagaacggtacttaggcattatcttcactcccgtgttatcaaaacaggcggggaacgaaccgcccgttaaattatttatatacccgtcatctttcaagttgcctctttgttggctgcactcactcaccccggtcacatagttctctatgctcccggggattcgctcccttgccgtcgcgatccctcttgaaatccattgggtatagttctattaaggattgactggatctaaccagccccatttatcatctgtcgtgccatcaaacaagccaaagaaagcttgttgaatttttttggtaataggtccacatctaccgataccaacctgaatatcatcaacactacgaacgggtgtgatttcagccgctgtgccagacataaaaacttcatcagccaggtacaatgattcgcgcgacaatacctgctcacgcacttccagccctaaatctttcgccagtttaataatggcatcacgagtaattcctggtaatgcagcagaggtaaatggtggggtaaataatatgccatcttttacttcaaatagattttcacccgcaccctcagagatataaccagaaacatccagtgcaataccttcctgatacccacgacgacgagcttcactaccgactaaaagcgaagacaggtagttaccaccggctttagccgcagttggcattgtgtttggtgccgcacgattccatgaagaaaccatcgcatcaattccttgatccaatgcgccttctcccaaataagctccccacggaaaggcggcaataatgacatcagttttataaccagcaggtggattaacccccatgccaacatcaccgataaagaccaatggacgtatataagcactgactaaattatttttacgaagagttgcccgacacgcctccattaattcatcgacactctggttcaacggcatacgataaatctttgcagagtcatgtaaacgctgcatatgctcacgatggcgaaaaaccactggccctttatgagagtcatagcagcgaattccctcaaaaacagatgtgccgtaatgtaaagcatgggacattacgtgaactttagcatctgcccaaggaaccatctcaccattgaaccaaatgtaatcggattgcttcgtcattctctcattcctttatttctacgttatgcacgtatgagttgtgatttttgttgcaggatcttgacgccagcgacatccactaatttagtcagttgtgaagacaacaaattaaccggtttttggctggcaacaattaattcgatattaacattatcgccatccattgtttgatccatattcatggaacagatctgaaatccacgatgacgcgttacccgtaagatgcgctctaatatttcaggacggaaacgagcatggattgcaagttgatgctgcatcataatgatttctccaacatagtttcattgcttgcaccgggaggaactaacggccaaacgttctctaattcctcaatagatacctgtaataaataggggcccttactgctgaataatgcattcagcgcttcatcaatctgtgatttatccgtgatatgttgccccggaatatcaaaagctttcgctaatgtgacaaaatcggggttatctgttaatgtcgtttcgctatatcgcttatcaaaaaacaactcctgccattgccgcaccattcccaatcgctggttatccaacaataaaatttttacgggtaattgcttgcgtttaattgtccccagttcttggacattcatcatgaaagaaccatctccagagacacaaatcaccatatcttccggtcgagcaatctgagcaccaattgcagcagggataccaaatcccatcgagcccaatccactagatgtaatgaaattttcaggcccatcaaacgtcatatgctgagctgtccacatttgatgttgtccaacatcggtagtaataaccgtattaaatgttttacgatctgaaacctgcttcaataaccaaggcgcatagatactctctccctgatggtcataacaccaaggatattcagctttcagatacttaacttcctgttgccagggcataattgacaatggctgttgcaaacggggcaataataccttcacatcccccagcaacgacacatgagcctgacgtaatttacccaactctgccggatcgatatccagatgaatgatttttgcacacggagcaaaagtattaagtttgccagtcacacgatcatcaaaacgagcacctacagcaatcaacaaatcacatgactgaacggcaagattggccgctttcgaaccatgcatcccaagcattcccagataacatggatgttctgaatcggcagcccccaagcctttcaacgtagaagcaaccggcatacctgtttccacaacaaaatctcgcagaacagaaactgcttgagacatccctactccaccaccgacatacaacactggctttgtcgcagccgcaaccattttccgggcttgttctaattcactttccgagcagggctccttttgttcaacgggtaccaaatgtggtacaaaattcccctctttcaactgaatatctttaggaatatcaatcaaaactgggccaggtcgaccactagtggcaatagaaaaggcttccgccataatttgaggtaaatcttccagtgagtccactaagaaactgtgtttggtacaagcaagggagagacctaaaacatcgacttcttggaaggcatcagttccaatcaattcagaaccaacctgaccagtgatagcaacaataggaacagaatctaacaatgcatcggctaatccagtgattaagtttgttgctcccggtcccgatgtagcgatacaaactcccggcttaccactggctctcgcatagccgattgcagccatagctgccccctgttcatgccgacaaagcaaatgctccacaccaccatcgtacaaagcatcataaaccggcatgatcgtaccaccagggtagccaaaaaccttatcaatcccctgcgttcgtaatgcctttacaacccactgcgccccattcatttttcatatcccctgtgtttaccctgtgagacaagattttgttctgttgtatgtttccgtctctaccggattttgcttgtcgaaaaaaaacccccgcgcctttcggtgcgggggtcttcgagagatttggctgttcttctaagcctttcttcgtccaagtgcagccccgctcggtgggataataatcaccaccacgctgacaataattaggctaatcactaggacaaatgtgttcataatcttggtcatttaattcgtttgtttaatctatatttaagagttatcacgttcttcatagcttgacaacatttattttgttttattactcgatataaaaaaataccttttattttcaattaaatacttgtcatacggattatttgttcagtaaatagatcgatttaagtgataaaaactaactgattagatataaacaaaacaacacattaatagataacataaaaaacaaatcatccgactataatcaaaaataaagagcttattattaatcacttaggtgacaaaaacttctcattaaaaataaagcatagtgatataacatacgaaattcatccactgtaaaaatatataaatttgaatttaaattaaattcaaccaataaaaaatcaatctaaaaacacaacctaaataataacaacatctcaaaacaagaatataaagataatagacacaatgatttaatcactaaagcataaaaaattatgccattaaaatcaacaaaatagaataaaaataatttaatttaaatttcaaaataaaaattttatagttgcttcgaaaaatatttatcagagccgcttcgcaaaaaaataatagaaaactatttatcatctaatttcagtccatcatatatacccaatggatttcaagatggatcgcgacggcaagggagagaatccccgggagcatagataacaatgtgactggggtgagcgagtgcagccaacaaagaggcaacttgaaagataacgggtatacactttcttactaaggagaataggatggccctcgctgttatttataccagagcgactataggtattcatgcccctattgttactgttgaagcgcatattagtaatggtttacctggattaaccttagttggtttgcctgaaacagccgtaaaagaagcaagagatcgtgtcagaagcgcattgatcaacagcgggtttacctatccgcctaaaagaatcaccgtcaatcttgcacccgcagatcttcccaaagaaggcggccgttatgatttgccgatcgctatcgctattctagccgcttcagaacaaatacctaccaataaactaagtcattacgaatttcttggtgaactcgctctatccgggggtttacggaaagttaacggcgcaattccagccgcactcagcgcaggaaaagcaggaagacaacttattctaccaacagaaaacgcaatggagctggcaattttatctcagaatgaaacgttaatgacagaacacctcttacatatctgccactttcttcagggagaacaacaactgctgacagcaccaatccaacatgaatccttaacagaaccatcacaaccggatcttcaggatattattggccaggaacaagcaaaacgcgccctagaaatcacagcagcaggcggacataatcttttgctacttggcccaccagggacaggaaaaacaatgttggcaagccggctatgtagtctattaccaccattaacaaacaaagaggcccttgaggttgccgccatcaatagcctgatggatacctacctttcacctcaacaatggcatacacgcccatttagagcgcctcatcacagttcttcaatggcagctctggtcggcggcggtgggctcccaaaacctggtgaaatttcacttgctcacaacggcgtgctatttctagatgaactacctgaatttgaacgcagagtccttgatgctctcagagaaccgctggaatcaggggaaatcattatctcccgagccagagcaaaagtttgttttcctgcccaagttcaattgatagcagcaatgaatcctagccctacaggctatcatcagggcattaacaatcgaagtagtcctcagcaaatacttcgatacctagcgaaactttctggtcctttcttagatcgtttcgatctctcaattgaagttcccttgttacccattggaacattgagtagctctgttagaccaagcgaaagcagcaaagatgtaagattaagagtactggcggcgcgagaaatacaactgaaacgttgtggaaaaattaatgctcatctgaatagtaaagagacagaggcattttgtaagctcaaacctaacgacgctgtatttctagaacaaactctaataaagctagggctttcaatccgagcatggcaccgaattctgaaaacatcccggacacttgccgacttagaagaaaaaaaagagatagaaaaaccacatatcatggaagccttaagctatcgcagtatggacaggttattaatacaattacaaaaacaatcaggttagcaatgaaaaaggggcaaagcccctatattcataacttgtgataatattaatcatcagtgtcggtatagtcatcagaagcatcgatctggggcttaccgcctgaaagagtatgaaaacgctttggacgcctaatccttgcaagatatttggtccagactttttcttctattgtcacaggctgccgctcaccccggcaaacagcaacaaacagctcttctacttctgtttgaggctcgcgtttaccaagatctaactcattgaacgcataaccatggcgctctagtaattgcgcctctttaatggtgaaatcgccatggcgggagaacccgcgagggtaatttttgttatcaaaaaaacgattagtcgtgatgaagctttcggccatctgacacactcctaattctagtactgttactatcatgctaattatggcgcggagtattagataggcctggcgttctgtaaaacaaaaaatttaaatcttaacgataaatattattggagatatatgtggacactgaattactgaaaaccttcttggaagtcagtaaaactcgtcactttgggagagcagccgaatcactgtacctgacgcaatcagcagttagctttcgcatacgccaactagaaaatcaattaggtactcatcttttcactcgccatcgcaataacatccgtcttacagcagcgggagagcgccttattccctatgcagaatcactgatgagcacctggcaattggctaaaaaagagataatgcatgcttctcaacatactgaattaacaattggtgccactgcatcactatgggaatcatatttaacttcctggttacaagacttctataaaaaacatcaggaattaagattggaatcccgagtttctacacggcaatcccttgttaagcagcttcattcacgtgagttagatctgttgattactaccgaaccgcccaaaatggatgagttccaaagcctattattaggaaatattcgcttgaagttattaacaacagaagaaaatctgaaataccaaattaaaaattacatcaaactagaatggggagctgatttccatcatcaggaacaacggattttaaaaagtgatcagttacccaccatcacaaccacttcagcacatatagcccgccaactgctcaatagcgtaagaggagccgccttcttaccaatacactggcaaaatgaatatccagagctggtctcttatccaaatactgaactaattgaacgcccattatatgccatatggctacaaaaaaatgatcagcaagcattcattcaacagctattaaaaatacctatcatacatacttctacaagaggttaagaagcatccatgtaaatcatttaagaaaatagtaagggagaaagaaatttcaaatagagcatacggtgggattacttttgctatcttcccacatatagctccctatttaccaagtaatccctacgtatagtataagctgaatcagacgtagtgtttccaccttatcgttttaggtatcctttccttcaaaccgagcttttcttaagaaaaaaactttcacaatcaaaatattagttaagatccattcatacatatcctctagacacttagttcagaaggactttaactagtatgaaaattgccaaaaagtctaaaaagttatctataagaattcactttgacaatagataattagaaagaaaggttttattgctataagatcgaataacattgagaactgaaaaatgtgtaacaacatcaatgaaatgatgaattcaaatcaatggcaacattagctttacgaaccagacaatatttgcgaacaaattttccaagtgagatcatttctggagaaaaggctcgcataaggggatttttaatgtaacggcaaatccgtttttcttacaaagttccattaagaaaaaggcgctgaccaaaaagccagcgccttatcaataatctaatccaagtagcatatatggatcaccaatactataaactaccttagttgccacttagcttataactggcaggggcggagagactcgaactcccaacacccggttttggagaccggtgctctaccaattgaactacgcccctaaattaaggtggcggtgcggacggggctcgaacccgcgacccccggcgtgacaggccggtattctaaccaactgaactaccgcaccaccgaattctctttgatttatatcgctgttacgacataaaacttaaatatcaagcttggcagcttacaaacggctttcctgccgtttgctcttcgggccgccgcccctcgcgacgttcaaatccgttcccgacggagttgtcctactcgctaccactggggtgttgtattgcttttctatcgccatacaacacaaaattaaagcctggcagtgtcctactctcacatggggagaccccacactaccatcggcgctacggcgtttcactgctgagttcggcatggggtcaggtgggaccaccgcgctatcgccgccaggcatattcggttttcttccggccgttgtcgctcttctgccacaaccacccgaatcaatctctgaacaagctgaaaagtcatctctctgctgtcaaccggcttctgccggctgccctctgaacaccaaaacaccttcggtgttgtaaggttaagcctctcggttcattagtactggtcagctcaatgcatcgctgcacttacacacccagcctatccacgtcttcgtcttaaacgttccttccgtgacctcagtcaggggaagactcatctcaaggcaagtttcccgcttagatgctttcagcggttatctctcccgcacttagctaccgggctatgccattggcatgacaacccgtacaccagcggtgcgtccactccggtcctctcgtactaggagcagcccctttcaatcttcctgcgcccacggcagatagggaccgaactgtctcacgacgttctaaacccagctcgcgtaccactttaaatggcgaacagccatacccttgggacctacttcagccccaggatgtgatgagccgacatcgaggtgccaaacaccgccgtcgatatgaactcttgggcggtatcagcctgttatccccggagtaccttttatccgttgagcgatggcccttccattcagaaccaccggatcactaagacctactttcgtacctgctcgaaccgtcactctcgcagttaagctggcttatgcctttgcactaacctcacgatgtccgaccgtgattagccaaccttcgtgctcctccgttaccctttgggaggagaccgccccagtcaaactacccgccagacactgtccccggcccggtttacgggcccaggtgagaacatcgaacattcaagggtggtatttcaaggatggctccatgcagactggcgtccgcacttctcagcctcccacctatcctacacatcaaggctccatgttcagtgtcaagctatagtaaaggttcacggggtctttccgtcttgccgcggggacactgcatcttcacagcgagttcaatttcactgagtctcgggtggagacagcctggccatcattacgccattcgtgcaggtcggaacttacccgacaaggaatttcgctaccttaggaccgttatagttacggccgccgtttactggggcttctgtcaagagcctcgccttgcggctaaccccatcaattaaccttccagcaccgggcaggcgtcacaccgtatacgtccacttacgtgtttgcacagtgctgtgtttttaataaacagttgcagccagctggtctctgcgactggcttcagctccggaggcaaaccccttcacctaccgccagcgtgccttctcccgaagttacggcaccattttgcctagttccttcacccgagttctctcaagcgcctgagtattctctacctgaccacctgtgtcggtttggggtacgattcaatatgacctgaggcttagaggcttttcctggaagccgggcatcaaccacttcaccgccgtaacggctcgtcatcacgcctcagtgttcacagaagagcggatttacctgctcctcccacctacacgcttaaaccgggacaaccgtcgcccggatggcctagccttctccgtccccccttcgcagtcacattcagtacaggaatattaacctgtttcccatcagctacgcctctcggcctcaccttaggggtcgactcaccctgccccgattaacgttggacaggaacccttggtcttccggcgagcgggtttttcacccgctttatcgttacttatgtcagcattcgcacttctgatacctccagcaggcctcacagctccaccttctccggcttacagaacgctcccctacccaataacacttgcgtgtcactgccgcagcttcggtgcatggtttagccccgttacatcttccgcgcaggccgactcgaccagtgagctattacgctttctttcaatgatggctgcttctaagccaacatcctggctgtctgggccttcccacatcgtttcccacttaaccatgacttcgggaccttagctggcggtctgggttgtttccctcttcacgacggacgttagcacccgccgtgtgtctcccgtgataccattcttcggtattcgcagtttgcatcgggttggtaagccgggatggccccctagccgaaacagtgctctacccccgaagatgaattcacgaggcgctacctaaatagctttcggggagaaccagctatctcccggtttgattggcctttcacccccagccacaggtcatccgctaatttttcaacattagtcggttcggtcctccagttagtgttacccaaccttcaacctgcccatggctagctcaccgggtttcgggtctataccctgcaactctttcgcccagttaagactcggtttccctgcggctcccctatccggttaaccttgctacagaatataagtcgctgacccattatacaaaaggtacgcagtcaccctgattaatcacggctcccactgcttgtacgtacacggtttcaggttctctttcactcccctcgccggggttcttttcgcctttccctcacggtactggttcactatcggtcagtcaggagtatttagccttggaggatggtccccccaccttcagacaggatttctcgtgtcccgccttactcatcgaactcacagccataccatcttcgagtacggggctgtcaccctctctcgccggcctttccagaccgttcctctgatgctatcgctgatgcaggttctgggctcctccccgttcgctcgccgctactgggggaatctcggttgatttcttttcctcggggtactgagatgtttcagttcccccggttcgcctcattaacctatgaattcagttaatgatagtgcaacgcattgcactgggtttccccattcggacatcgccggctctgtcgcttcatatcagctcaccgacgcttttcgcagattagcacgtccttcatcgcctctgactgcctaggcatccaccgtgtacgcttagtcgcttaacctcacaacccgaaactgtctcggactgttcagcttgagagacacctcaacaatacctcggcgatattattgagtatttcaatttttcagcttgttccagattgttaaagagcatctatcgctaaacagattcacctaaatccgcttaaagataacctgacaacgcctttcacccgtcatcccgcaatatggcgtcccctaggggattcgaacccctgttaccgccgtgaaagggcggtgtcctaggcctctagacgaaggggacccgctggtcagcttcgcagactcatttgcactctattttcatcagacaatctgtgtgagcactgcactcaacctctctcaggtaaggaggtgatccaaccgcaggttcccctacggttaccttgttacgacttcaccccagtcatgagccacaaagtggtcagcgcccccctttcggttaagctaccgacttcttttgcaacccactcccatggtgtgacgggcggtgtgtacaaggcccgggaacgtattcaccgtagcatgctgatctacgattactagcgattccgacttcatggagtcgagttgcagactccaatccggactacgacagactttgtgtgttccgcttgctctcgcgaggtcgcttcactttgtatccgccattgtagcacgtgtgtagccctactcgtaagggccatgatgacttgacgtcatccccaccttcctccggtttatcaccggcagtctcctttgagttcccaccttcacgtgctggcaacaaaggataagggttgcgctcgttgcgggacttaacccaacatttcacaacacgagctgacgacagccatgcagcacctgtctctcagttccctaaggcacttcgctgtctccagcaaattctgaggatgtcaagagtaggtaaggttcttcgcgttgcatcgaattaaaccacatgctccaccgcttgtgcgggcccccgtcaattcatttgagttttaaccttgcggccgtactccccaggcggtcgatttaacgcgttagcttcggaagccaccgttcaagaccgcaacctccaaatcgacatcgtttacagcgtggactaccagggtatctaatcctgtttgctccccacgctttcgcacctgagcgtcagtcttcgtccagggggccgccttcgccaccggtattcctccacatctctacgcatttcaccgctacacatggaattctacccccctctacgagactccagtcaaccagtcttagatgccattcccaggttgagcccggggatttcacatctaacttaattgaccgcctgcgtgcgctttacgcccagtcattccgattaacgcttgcaccctccgtattaccgcggctgctggcacggagttagccggtgcttcttctgcgggtaacgtcaaagtccagccctcttcaggctaaacccttcctccccgctgaaagtactttacaacccgaaggccttcttcatacacgcggcatggctgcatcaggcttgcgcccattgtgcaatattccccactgctgcctcccgtaggagtctgggccgtgtctcagtcccagtgtggctggtcatcctctcagaccagctagagatcgtcgcctaggtaggccattaccctacctaccagctaatcccatctgggttcatccgacggcgtgaggccctttcaggtcccccactttggtctcgcgacattatgcggtattagccaccgtttccagtggttatcccccgccctcgggcagatccccagacattactcacccgtccgccgctcgtcagcaaaagtgcaggcactttcctgttaccgctcgacttgcatgtgttaggcctgccgccagcgttcaatctgagccatgatcaaactcttcaatttaaatcaaagtttgatgctcaaagaattcctgactaattatttcgtaatgaattaactgttgttcactcttcaagactttaaaacgtatttttttgtgatacggtcttgtgagtgcccacacagattgtctgattaattgttaaagagcaggctgacataaaaaataacattctcgttcagccgggctgcgtatactacgctgttcgcccgcagagtcaagcactgattatcgctttctctgcccgacctcacaatgtttatcagcgttgtgtcggtcagtggtggcgcattatagggagctcagatttttatacaatactttttttcacatttaccaccaacaggcgaattcttgttctttttgggtgaaatttcaaccacaatagccctgttcaacaagtttctttcattgcatactggtattttcctcactaaaatcttatttaaagtaaatatccattttttcatcagaggtatacatgtccgaaacgttacgcagttaccttgatattcagcccaaagttggtcagaacgttatgctagattcatctagtgtaatcattggtgatgttagacttgctgatgatgtcagtatatggcctttagttgtcatccgtggggacgttaattatgtatctattggtgcacgtactaacattcaagatggctctatattacatgtgacacacaaaacaacagacaatcctgatggttttcccttgattgtgggggatgatgtcactattgggcataaagttatacttcatggctgcactatcggtaatcaagtacttatcggtatgggctccatcctacttgatggttcagtgattgaagataacgttattattggtgcaggcagcctagtagccccaggtaagatattagaaagtgggtacctttatattggtagtcctgcccgccaggccagaaaactaaaacctgaagaattaaaagggctatgttattcggcaagccattacgttagcttgaaaaataactatttgcaggaaggtaatatgtaacgtcccaaatgatcatcatcctcgttattaattactaattcgaattcttcttctatatcccaacgattttgtcgaaaaagacttagtggatgatgatcttccgccccataacggtataaaagctccttggcacttataacacattgaaccaataatccatttaccagtgcgggaaaaatgactatctgctcttgctcgctccactcttctctatcaggaaattggatagattgattcacgaacgtaactcctgttccaatgttagtaacacaggtgaaatttcaggcaatacaccatgccataatttaaatgaatgagcagcttgccccactaacatccccagcccatccgcataacgagaaacaccatgcttcctagcaaaggaaataaagggcgtcaaattagcctggtaaaacatatcataacagacacaattctcattaaatatgaatggagatatagtaggaatctcaccattaataccagatgcagtcgcattgataatgagatcaaactcaggactattaagtactttcatctcagcaggccgaatactgcctattgccgaaaaattattagcaacctgtatagcgcgactaaacgtgcggtttgtaattgtaattttacaaccaaattctaataatggaaataaaacacctctggcagctccaccagctccaatgattaaaatatgctgcccttgagtaataaactcaagtcgcatcaagtctgttaataaccctataccatccgtgttatcaccaagcaattgattattattaagtaatttcaaagtattaactgcaccgctgagtcttgcccgttcagtcaactcatttgctcgaataaatgcctgctctttaaatggcacagtaatattgactcctatacctccctgtttaagaaatgtatccaatgcctcttgaaatttacttatcggcaccagaattttcccataacgatgctcaatacctgtctgtctagcaaataactgatggatacgcggagatttactatgcgcaacaggattaccaaagacagcaaattgatccatatttatctccccttacccttgacgataaagctcaccagttaaagcatcccgaatttctgaagggtttttccgacctccaacatctccgtttaatataggaagcttatctccaaactgttgtctaacttcttctgctgttctgcatggttcaaggccattcaaatttgcactggtcgacaccaacggtttcccataaaaagtacataactgtttcaccaaaggatgatcactaactctgacagccaaggtagcgaattgccctgtcaaccacttaggtgcactaaatttggcaggaatcacccaggttacaggccctggccaacaagcaaacatagcttttttttgttcttctgttagaagtttatcatcaagatacggttgtaattgttcataattatctgcgataagaatcaaccctttctgccaaggacgtttctttaatataagcagttcatttactgctttttcactatcaggatcacatccaagtccaaaaacagcttcagtcggataggcaatcactttttctgcttttaatgctgttaatacactctcaaatgcaggtgatgcttcattgctcattttattactctgcttaatttatttgccgttttccacacaacttactagcacaaaataactttacaccttgtgatgtacgtttttccactagcaacgaataagaacaaaactcacatttacccgcaattggcttattatttaatacaaactggcaattagggtaacggttacacgcatggaaaatttttccgaaacgtgatttcctttggagtagttgtccttgtttacattgcggacaggctattaacgtctcatccggtttatcaattagttctgtatgttcgcattcaggataacgactacagccaatgaacatgccataacgtccttggcacaaaatcaaattgactccacacgcgggacatagctgcccttcaagttcttttaccacatgcccatcacgttgcccttttaatggacgaatatattgacatgatggataaccagaacatccaagaaatgggccatggataccattacgcataaccaacgcagaaccacattcagggcaatattcagtttcattggtggagaaaggaaccatttttgccatactattttcactcaaaaactcattctcatatgacgttgcacaggactctaaaaattcagtcaatttaattcacacgcacataaccaccagcaaccacagtcaccttacccagtaattccagctcaaggagctttgtcatgacctcagttataggtaatgaagaacgctgagcaataatatcaacaggcgttacttcagcgcctacgttaactagcacatcagtaaatggcaactcagtttgctcaaactgcggttttacttcttcctccgttctttccatattcaaccattgtaatgaactgtaaacatgttccacaatatccattgcatttgtagctaagtatgcaccttgttttattaaccagtgattgccttcgctcactgaatttcccaaaagccctggtaatgcaaatacatcccttccttgttcaagggcacaacgagcagtaattaacgaaccactattttgacctgcctctacaacaatcactgctgagcttaatccactgataattctatttcttctaggaaaattttttgcgcgtggcggagtatccggaaaaaattcagaaacaagagcaccattctcctcaatttgctttgctaataatccgtgtctatgaggataaatctgtccaagcccactacctaatacagctactgttttacctccactatccaatgcagctcggtgacaaataccatcaataccgatagctaaaccactagcaataactaactcatatccaaccagttcacttgcaaaaattcttccccatctctcaccataataacttgctgtcctgctccctaccatcgccacctgcttctttaaaagaatatctggttttcctgccacaaaaagcacaagcggaggggtatgtatctgctttaatagaggtggatacgaagggtgagaatatgtcaataaatggtgctctggctgttccagccacttaaggcatgaagctagtaaggttttatttactttagtaaattgcagacattgttctggcgataatccactatctttcaacacagtgagataacgactcccggaatataacaatttttctgcaacatttgctgctctctctgttgccaaatgagaaatcatcttcattcgcaaccatacttccatagcttccatgttgtcatcctggctaagattgacggacaaaactaaactgctcaattagcaatcgatactgtcaatctaaacgggaaatgtctagaatagacatagaacaccattaacattttggatgcagatctaaacatatatgtcagtattacaagtattacattacccagacgagcggcttcgcactattgcaacgcctgttgaaacagttgatgcagagattcgacgtatcattgatgatatgtttgaaactatgtatgcagaagaaggtatcggtttggcagcaacacaagttgatattcatcagcgtattgttgttattgacgtatcagaaacacgtaatgagcgtctcgttctgatcaacccagaattactggaaaaaagtggtgaaactgggatcgaagagggctgtttgtctattcctgaacaacgagcactggtgccacgagccgaaaaagtcaaaatcaaagccctagattacaatggtcgaccatttgaattacaagctgatgacttacttgcaatttgtattcagcatgagatggaccacttaattggtaaactttttgtggattacttatctccactgaaacgccaacgtatacgccagaaagtagaaaaactggataaacaaaaagcccgaaccaagtaaattatattaatacaggaaataaacgtgtctgattctttacgtattgtttttgccggaacacctgattttgcagcacgccatctagaggctttgttaatgtctcagcatgaggtggttggcgttctaactcgaccagataaaccggcaggaagaggtaaaaaactaacacccagtcctgtaaaagtactggcagaggaacgtaatatcaccgtttttcagccagctactttacgctcagaagaaaaccaacaatgggttctaaaacaacaacctgatgttctcatcgttgttgcctatggattgatccttcccaaagttgttttaaatattccagaattaggttgcctaaacgtacatggttccctactaccacgttggcgaggtgcagcacccattcaacgctcactttgggctggtgatacagaaactggcgtaacaataatgcaaatggatataggtcttgatactggcgacatgctatataaagcaagatgccctattacacctgaggataccagtgccagtttatacgaaaaactggccaatattgggccagatgcgttactcaaaacattatcattaataacatcaggtaaaagtcaacctgaaactcaaaacgaaaatttagttacctacgctgaaaaactaagcaaagaagaagcccgcataaattgggaactatctgcaacccaccttgaacgttgtattcgcgcatttaatccctggcccatgagctttttcgaaatggaaggacaacctattaaagtttggaaagcagaagccattgaagaacaaacttcggtagagccaggaactgtactaaaagcagacaaagaaggtatttatattgctaccgctgatggaattctgaacattacacagttacaacctgccggtaaaaaagcaatgtcagcagcaaatctacttaattctaaacgtgaatggtttactccaggtaataaaatcaactgaatactattttatgctgtaatctctctcacaaactttctcttaatgctggcttttgtcagctcttttaattatgaaaaacacatataatctgcgaagtatcaccgcaaaagcaatcaatcaagttctggatcaaggacagtctctcagtacagtcttacccaaactgcaacaaaatataactgataaagacaaacccttgttacaggaattatctttcggagtgttacgcgtattaccacagctagagtggataataggtcaactaatggtaaaaccattaaaaggtaaacaacgtattcttcattacctgcttatggttgggatataccaacttgcctatactcgtattccagcccatgccgcacttgctgaaacagtaaacggagccgtaactctgaagcattctcaattaaaagggttaattaatggcgttcttcgccaatttcagagacaacagctacagttaatggaatgtacgcaaaataattccagccaccacttacacccagaatggctattaactcgaatccaaaaagcctatccacaacaatggcaacaacttattaatgctaataataaaaaaccccctatgtggttacgagttaatcgtatataccatagtcgggatgaatatctcactcttcttcgtaaatcaggaattgatgcggaaccagcgcccaaatcaccttctgctatccgcataatttccccttgccctgtaacaatattacctggatttgacaaaggttgggtcactgtccaagatttatccgcacaagagtgtgtcgagttactaaaacccataaatggagagaaaattctcgatctttgtgcagcaccaggagggaaaacaacatatatcctcgaaatagcaccagaatctcaagtagtagcggtagatattgatgagcaaagaatcaaacgagtaaaagaaaatctcaaacgccttaactgccacgctacagtaaaaaccggtgatggacgccaccctgaacattgggcagagaaccagcaattcgaccgcattcttttggatgcaccgtgttcagcaacaggagtaatccgtcgccatcctgatatcaagtggttacgccgcgaggaagatattgctcaattagttcaattacaatctgaaattcttgatgcaatttggccatacttaaagaaaagcggaacgttagtatatgcaacctgttctattctaccagatgaaaattgtcagcaaatcagctcgtttttaaaacgccactcagatgcaaaactcgcgggaacagagacaaatgattgtctaggaaaacaaataatacctgagttaaatggtggtgatggtttcttttacgctcgattaactaaacggtaatatatctctacgatttatagagataattatttgtttgcaataagttagagaatactatgaaaataattattcttggtgcaggtcaagttggcggtacattagctgaaaatctggtaggtgaaaataacgatatcaccatagtcgatactgatcccaaccgtctacaccaactacaggataaattcgatctcagagtagtcaatggtcatggttcttaccccagagtattaagagaagctggtgctgaagatgctgatatgttagttgctgtaactaattctgacgaaactaacatgatcgcatgtcaaattgcttattccttatttaacaccccaaataaagttgcgcgaatacgcgcagcagaatatattcgtgaagcagataaactttttctgcccaatgatattcctattgattatcttatttcaccagaacaacttgttatagattatatttataaactaattcaatatcctggcgccttacaagtcgttaactttgccgaaggccgagtaagtattgttgcagtaaaagcttattatggaggctcacttgtagggaatgcactttcctcacttcgtgaacacatgccgcatattaataccagagttgcagcaatattccgtcaggatcgaccaataagacctcaaggttctacaattattgaagccggtgacgaagttttctttgtagctgcatcacaacatattcgtgctgtaatgagtgagcttcaacgtttagaaaaaccctacaaacgtattatgattgtaggtggcggtaatgtgggagcaggcctcgcactacgtctagaaaaagattacagggttaaattaattgaacgaaatcagcaaagagctatagaactagccgaattattacatgacaccattgttttctatggggatgcctccgatcaagagttattagctgaagaacatatagaacaagttgatgtatttattgctctaaccaacgatgacgaggcaaatatcatgtctgcaatgcttgccaaacgcatgggtgccaaaaaagccatagttctcattcaacgtagtgcatatgtcgatttagtacaaggtggtgtcattgatattgcaatctctccacaacaagcgacgatttccgctctgttaggtcatgttcgcaaagcagatattgtaagcgtttcctcattacgtcgtggagtggccgaagctatcgaagcgattgctcatggggatgaaaatacgtcaaaggttgttggtcgaactgtaggtgatattaaattaccaccaggcactacaattagtgcaatagctcgcggtaacgaagtccttattgctagtgattacagtgttatcgaacaaggagatcatgtaattatgtttattacagataagaaatttgtccccgaagtagagaaactattccagccaagcccttttttcctttaaaagccaaagaaatcattatgcatcagtcatataattagaacacaataactaatacaacttggtatgttttaattaaaagggtgtgatgaaacttttaaatcagtttatgaatttactatgaaagataattttgccaatttagctgctgacgtcagtatcgatatgattttaaaagaacaccttaccatcattcactatttttctacacaataaaactaataaacagatcatttagtaaaaggagattgaagttatatcaaatactcccaattaccgaaacaaaattattattagaagttcgtagattactgaaaagtaggaaatagacctattaaactaaaagaccagtagtaaagaatctaatgaccccttaccactggtctcccagctacttgctttgctatgtttttctttcctctggtaacttccttttccttttttatttttttcaactcgttgtttaaatagcggatcacgtaatagagcttctagagcattatcctttattacacctttcttatggtgatatgtaatcatcacatacctctatcatattaatttatctaccagcatagtaattgtactctctgagttttcaataataaagaaaaattacttatttcttattcaaagcaccttgttctaaagtttcaagaatagaacagtaaatacttatatgagaactgccacaacaagcatcacttagcatcttaagtgaatcacgcatttttcgcatttcaagaagtttttcctccacttccattaacctagaatctacaatttgctttgactcttcacaagtatgatgggctggatctacacgaatagacaataattctgtaatagcttccaatgtaaaccctaattgcttagcatagcgtataaaccgaaggcgctgtagatcttgctctgtataaagtctataccctccttcagtacggttctgatgttccatcattccttgtttttcatagaaacgcacagtatcaggagttacattcgctaatttagccagttgaccaatacgatacatctttatatctcctacaatagataacattgtttgagatatcagcatagcaggatgaaaaaaaataagttagagattcatatatgcaagcgtaaaaaaaccgggataaacccggttcttttatatgcccctacagattactccgcagtcgcaacttctgtttgaggctcagtagcacggtcaacaagctcgatgtatgccatcggagcattgtcaccagcacggaagccacacttaagaatacgagtgtagccacctgcgcggctcgcaaaacgcgggcccagctcattaaacagttttgccacgatttcgttgtcacgagtacgggcgaatgccagacgacgattagctacgctgtcgatcttggcaagagtaatcagcggctcaacgacgcgacgcagttctttcgctttaggcagagtcgtcttgatgatttcatgacggaccaaagaacctgccatattacggaacatagcttggcgatggctgctgttgcggttcaattgacgaccactcttacgatggcgcatgaccttatccttctcagtaaaaccttaacctgtgatctagttattcatcagcaatacttgctggtggccagttttctaagcgcatgcccagagataagccacgtgaagccagtacgtctttgatctctgtaagagattttttacccaggttaggtgtcttaagcaactcaacctcggtacgctgtaccaaatcaccgatgtagtggatagcttctgccttaagacagttagcagagcggacagtcaattccagatcgtcaacagggcgcagcaggatcggatcaaactctggcttctcctcttttacttctggctgacgtacatcacgtaaatcaacaaaagcttccagctgttcagccaaaatagtagctgcacggcgaatcgcctcttcaggatcgattgtaccgttagtttccatctcgataaccaacttgtccaaatcggtacgttgttctacacgcgctgcttcaacattgtaggcaatacgctctactgggctataacaagcgtctactaacaaacgaccaatagggcgctcatcttcttccgaatgaatccgggcagaagccggcacataacctcgaccacgctgaactttaatgcgcatgcttatagaagcagtttcgtcagtcaggtggcagattacatgttgcggcttgacgatttcgacatctccgtcgtggataatgtcggctgcagtcacagggccaatgccagacttattcaaggtaagaataacttcatcttttccctgaactcttaccgccagccctttcaggttgaggagaatctccaggatatcttcctgtacaccttctttggtgctgtactcatgcagtacaccatcaatctcaacctcagtcaccgcacaacccggcatagacgaaagcagaatacggcgcagtgcgttaccaagagtatggccaaagccacgctctaatggctcaagggtcaccttggcgtgcgtcgaactgacttgctcgatatcaaccaggcgcggttttagaaactctgtcacagaaccctgcattgtgtcctctctttggtgctaagctttacttagagtaaagctcgacgatcaggtgttcgttgatgtcagcagacagatcggcacgttctggaatacgtttgaacacaccttccatcttcacagcatcaacctccaaccaagttggtttctcacgctgctcagccagctctaaagccgccttgatacgagactgctttttcgatttttcgcgaacgctgactacgtcattcggggatacctgataagaagcgatgttaacaacgcggccattcaccatgatagccttatggcttaccatttggcgtgattcagcacgagtcgccccgaaacccatacggtaaacaacgttgtccagacgaccttccagcaaactcagcaggttttcacctgtgttgcctttcagacgagttgcttctttataatagttacggaattgacgttctagaacaccgtaaatacgacgaactttttgtttctcacgtaactgcacaccgtagtcagacagacgcggtttacgtgcgccatgctgcccaggtgcttgttctaatttacacttggtgtcaatcgcgcgaacgccagacttcaggaatagatctgtaccctcgcgacggctcagcttgagcttaggacccaaatatcttgccattttctttctccaatcgaacctaaaaaagtaaacgctattaaacgcgacgttttttaggtggacgacaaccgttatgagggatcggagtcacatcagtaatgttagtaatgcggaaacctgccgcatttaacgctcgaatagttgactcgcggccaggaccaggtcctttaaccataacttccaggttcttaattccgtattctttcactgcttcggcacagcgctctgctgcaacctgagctgcaaacggagtagatttacgagaaccacggaaaccggaaccaccagcagttgcccaacccaaggcgttaccctggcggtcagtaatggtcacgatggtgttgttgaaagaagcatggatatgagccacaccgtcagagacttgctttcttacacgcttacgtgcacgaataggtgcttttgccattatacaataccccgattatttcttgatcggcttacgtggacccttacgggtacgtgcgttggtcttagtacgctggccgcgaacaggtagaccacgacggtgacgtaaaccacgataagtaccaagatccatcagacgtttgatgctcagggttacttcacgacgcaaatcgccttctacaacgtatttggcaacttcgtcacgcagcttatcaatttgctcttcagacagctcgctgatcttaacatgctcagcaatacccgccgcagcacaaatggcttgggagcgagttttgccaattccgtagatcgatgttaaagcgatcacggtatgcttctgatcaggaatgttaatgcctgctatacgggccactatgcactcctaaattatttatttaccgcaacaccattctgaaaagcccgttttcaggatactcaaacagtgttactgtgatataaaaaagattggctggctaatttagccagctcaaaccgactttgcaagaaaaatatgctattttattagccttggcgttgtttatgcttaggctctgcactacaaatcacgcgaacgataccgttacgcttaacgattttacagttgcgacataatttcttgacggaagcacgaactttcatttttactctccgtaacttctcaagcaaaccaattaacggttataacctttaagatttgccttcttcaatgcggactcatactgacttgacatcatcagagtttgcacttgagccataaagtccatgatgactacaactacaataagtagcgaagtaccgccaaaataaaatggcaccttcatcgcgtcacgcatgaactccgggattaagcagataaaagtaatatacatcgcaccaactaaagttaggcgtgtcattaccttatcaatgtacttggctgtttgctctcccggacgaattcctggtacaaatgcaccggacttcttcaggttatctgctgtttctctcgggttgaaaaccaacgcggtatagaaaaaacagaagaagatgattgcagacgcgtagagtaacacataaagcggttgcccaggctgcaagtacattgaaatagtagtcagccagttccaaccagttcctcccccaaaccaggaagctatggtaccagggaacagaataatgctggaagcaaaaatagcagggataaccccagccatattcactttcaacggtaaatgtgtactctgtgcagcataaactcggcgaccttgctgacgttttgcatagttaacaacgatacgtcgttggccacgctccatgaaaacaacgaagaaagtcactgcaaacactaacactgcaaccaacagcaacaggaggaagtgcagatcgccttgccgagcttgctcaatggtatggccaatggccggcggcaaacccgcaacgataccagcaaagattatgatagagataccgtttccaataccacgctcagtaatctgctcacccaaccacattaggaacatagtcccagtaactaggctcacaacagccgtgaagtagaaagcaaaccctggattgatcaccagcccttgcattcctggcatattcggcaaaccagtagcaataccgattgactggaatatagccagcactaaagtaccatagcgagtatactggctaatcttacgacgaccagcttccccttccttcttaatctctgccaacgttggatgaaccaccgtcaacaactgaataataatagacgcagaaatatacggcattatccccagtgcaaagatagaagcacgacttaaagcaccaccagagaacatgttaaacatttcaatgatggtgcccctttgctgttcgagcaatttggcaagcacagtggcatcaataccagggataggaataaaagaaccaatacggaaaacaattaacgcgccaataacaaacaacagcctacgtttcagctcgcccagtccacctttagcactttggaaatctaatcctggttgtttagccatctgttacttattcctcaattttaccgccagcagcttcaattgcagcatgagcgcccttagtaacacgaaggccacgcacagttactgcacgattgatttcgccagaaagaataactttcgcaaattcaatttgagtgccaacaatgttagctgctttcaatgcattcagatcgataatatcgccttcaacggcagcaaaatcagacaaacgaacttctgctgtaaccatcgccttacgtgaagtaaagccaaattttggcaaacgacggtacaaaggcatctgaccaccttcaaaaccgcgacggacgccaccgccagaacgagatttctgacccttgtgaccacggccaccggttttacccaggccagaaccaataccacgacctacacgtttaggcgcatgcttggaaccatcagccggagacagagtatttaagcgcatctgttactcctcaactttaaccatataggaaaccaagttgatcataccacgtatagcaggagtatcttcacgctctactgtatgaccgatacggcgcagacctaaaccaaccaaagttgccttatgtttaggcagacggccgattgaactgcgaatctgtgttactttaatagtcttagccatggccattaccccagaatttcttcgacggatttaccacgcttagctgcgaccatttctggagacttcatgctgtctaaagcatccagagttgcacgaaccacattaatagggttagtggaaccataggttttagccagtacgttacgaacaccagccacctccaaaacagcacgcatagcaccgcctgcgatgataccagtaccttcgtgagcaggctgcatgaacacacgggaaccagtgtgtgcaccttttactgggtgatacaaagtgccgctgttcagtgcgacggttttcatattgcgacgggctttttccatcgctttctggattgctgccggaacttcgcgtgctttgccgtagccaaaaccaacgcgaccattaccatcacctacaacagttagtgcggtaaagctgaaaatccggccaccttttacggttttagatacgcgatttaccgcaatcagcttttcctgcagttcgccagcttgtttttcgatgtgagccatcttacacctctaccttagaactgaaggccagcttcacgggcagcatctgccagtgcctggactcgaccatgatattggaaaccagagcggtcaaaggatacatctttaatacctttttccaatgcacgttcagcaattgccttgccaactgctgctgctgcttctttatttccagtgtatttcagttgttcattgatagctttttctgtagtagaagctgccaccaaagtttcagaaccgtttggtgcgataacctgcgcataaatatggcgaggggtacgatgtaccaccaggcgagttgcacccagttcctggagcttgcggcgtgcgcgggtcgcacgacggatacgagctgctttcttatccatagtgttaccttacttcttcttagcctctttgatacgcacgacttcgtcggcgtaacgaacacccttacctttataaggctcaggacgacgataggcacgcagttctgccgcaacctgaccgattacctgtttatcagcaccctttagtacgatttcagtttgtgacggacattctgcagtaatgcctgctggtagttcgtggtcaactggatgtgagaagcccagagacatgttgataacattgcctttgactgctgcacgataaccaacacctaccagttgaagtttcttagtgaagccttcggtaacaccgataaccatagcattcatcaaagaacgagttgtacccgcctgtgcccaaccatcaacataaccatcgcgtggagcgaaggtcagttgattatctgcatgcttaacttcaactgcgctgtggattgtacgactcaactcgccgtttttacccttaatcgaaataacctgaccgtcgagttttacctctacgtcggtaggaataacgacgggtgcttttgcaacacgagacattctttcctcccgaattaagctacgtagcagagaatctcgccaccaagaccagcttggcgagctgcacgatcagtcattacacctttagaggtagaaacaacagcgatacccaaaccagccataacttgtggcagctcatcttttttcttatagatgcgcagacttggtcgacttacacgctgaatactttctacaacagccttgccctggaagtatttcagtactaattccagctctggcttggtgtcgccttcaattttataatcttcaatataaccttcttccttcagcaccttggcaattgccactttcagcttggaggaaggcatggtgaccgcaactttattcgcggcctgaccgttacggatacgggtcagcatatccgcgatgggatcttgcatgctcatctgtctttactcccgtgattcaattggtgacaattaccagctagcctttttaaggcccggaatttcaccgcgcatggcggcttcacggactttaatacggctcaacccaaacttccgcaaaaacgcatgcggacgaccagtttggcggcagcggttacgctgacgagaggggctggaatcacgtggcagtgtttgcagcttaagaacagcattccaacgctcttcatcagatgcattcacatcagaaatgacagctttcaattctacacgtttagtgaagaatttttcagctaatttcgcacgttttacatcacgtgctttcattgattgcttagccatgaataccctgccttacttgcggaacgggaagttaaaagcagccaacagtgcgcggccttcatcatcagatttcgcagttgtggtgatagtaatatccagaccacgaacacgatccactttatcgtaatcgatttcagggaagatgatttgctcacgtacacccatgctgtaattgccacgaccatcaaatgacttagcagacaaaccacggaagtcacgaatacgaggtacagcaatagaaatcaggcgctcaagaaactcccacatacgttcaccacgcagggtcactttacagccgattggatagccctgacggattttgaagcctgcaactgatttgcgcgctttggtgatcaatggtttttgaccagagattgctgccagatccgctgctgcattatccagcagtttcttatcagcaattgcttcaccaacacccatgttcagggtgatcttctcgacccgagggacttgcatgacagaattgtagccaaactgagtcatcagtttttggactacctcgtctttgtagtaatcatgcagtttcgccatcgtattactccaaattacttgatagtttcgctgttagatttaaagaaacgaattttttttccgtcttcaaatctaaaacctacacggtcagccttaccggttgccgcattgaagatcgcaacgtttgaaacctgaattgcagcttctttttcaacgatgccacctggctggttcagagccggaacaggcttctgatgctttttaaccaagttgataccttcaacaatgactttcccagtagaaagaacctgttttactttaccgcgcttacctttatcttttccagtcaacacgataacttcgtcatcacgacggattttcgctgccattgtccgctccttagagtacttctggtgccagggagataattttcatgaacttttcattacgaagttcacgagttaccggcccaaaaatacgcgtaccgataacttgctcacttgtgttgtttaacaacacgcaagcattgccatcgaagcgaatgacagaaccgtcagggcgacgaacacccttcctggtgcgcaccactaccgctttcaggacatcaccttttttcactttaccacgaggaattgcttccttgatggtgacttttatgatgtcgccgacgtgtgcatagcgacggtgcgagccacccagaaccttgatacacattacgcgacgtgcaccggagttgtcggccacgttcagcatagtctgttcttggatcattttagtgctccgctaaatgtcaactactactgagcccacttcactactataatttaatatgaagaggccgttcagataccccatatcatgagggcgcggcattataacaccacatctcagatatagatagaaaaaataaacggcccatagcctgagccgtttactctattcgagccagcttacagaatcgctttctctacaacgcgaactaaagtccaagatttagttttggacagtggacgggtttcgcggatttccaccacatcaccaatgccacattcattgttctcgtcatgtacatgcagtttagtcgtacgtttgatgaatttaccatacagagggtgtttcaccttacgctcaatagcaacaacaatagatttctccattttgtcacttacaacacgaccttgcaaagtacgaattttatcggtcattacgcacccgccttctcagtcaataaagtcttaacgcgtgcgatattatgacgcacttgtttcaacagatgagactgttgtagctggccacttgcagcctgcatgcgcaggttaaattgttcacgcagcaaattcagcagctcagttttcagctcttcaacgcttttttcgcgcagctcttgtgctttcattacatcaccgtcttagttacaaaggtggtcttgataggcagtttcgctgctgccagcttgaatgcttcacgagccagctcttcaggcacaccgtccatttcataaaggactttaccaggctggatcaaggcaacccaatattctacgttacctttacctttacccatacgcacttcgagtggcttttcagttataggtttgtctgggaatacacgtatccagattttaccttgacgtttaattgcacgggtcatagcacgacgtgccgcttcaatctgacgtgccgtcagacggccacggcccacagctttcagaccgaaagtgccgaagctaacatccgcacctgctgccaggccacggttacggcctttgtgcattttacggaatttcgtacgctttggttgtaacatcagcgactctccttacttgcggcctttgcgctgctgctttttaggttgtgcagccggtttttccgcctgttcaacagcagccataccacccaagatctcacctttgaagatccataccttaacgccgagtacaccataagtggtgtgcgcttctgaagtgttgtagtcgatatctgcacgcagtgtgtgcaacggtacacgaccttcacgataccattcaggacgcgcgatttcagcaccgcctaaacggccactaacttccactttaatgcctttagcgccttgacgcatcgcattctggactgcacgcttcatagcacgacggaacataatacgacgttccaactgtgaagtaatactgtcagcaaccagtttcgcgtccagttcaggcttacgtacttcagagatattaatttgcgcaggaacaccagcgatttccgctacagttttacgcagtttttctacgtcttcacctttcttaccgattacgatacctgggcgagcagtgtgaatagttacacgaatacttttagcaggacgttcaataacaatgcgtgaaatagacgcttttgccagttctttcttcaagtactggcgaactttaaaatcgctgtctaggttgtcagcgaattctttagtattcgcataccaagtagagttccaaggtttgacaatacccaggcgaataccattaggatgtactttctgacccattgctagtctccagagtctcagcgatcggacacaaccacagtaatgtggctgctgcgcttcaggatgcgatctgcacgaccttttgcacgaggcataatacgcttcatggtcgggccttcgtctacgaaaatcttcgtgaccttcagatcatcaatgtcagcaccatcgttgtgttctgcattagcaatagcagactcaagtactttcttcactaaaccagcagctttcttattggtataggtcagagtttccagagcttgcgacactttcttaccgcgaatcaggtcagctacaaggcgaaccttctgagcagaagaacgagcgtggcgatgtttagcgatagtttccatctcttcctcctaccttagcgctttttagcctttttatcggccgcatggccgcgataagtacgggtcggcgcgaattcacctagtttatgaccaaccatttcgtcggaaacaaaaactggtacatgctgacgaccattatggacagcgatggtcaaaccgatcatgttaggaaagatcgttgaacgacgggaccaagtcttaataggctttttgtctccgctttccaccgctttctctaccttcttcagcaagtgcaggtcaataaatggacctttcttgagagaacgtggcatggtttatcctctaattattttttagtacggcgacgtacgatgaactgatcagtacgtttattactacgggtcttcttacctttagtttgaacaccccaaggagttacaggatgtttaccaaagttacgaccttcaccaccaccatgtgggtgatctaccgggttcatcgccgtaccacgaacggtaggacgaatgccacgccagcgacttgcaccagctttacccagaacacgtagcatgtgttctgcattaccaacctcacctaaagtggcgcggcagtcagacagaactttacgcatttcaccagaacgcagacgcaaagttacataagaaccatcacgggcaacgatctgaacgtatgcaccagcggaacgagccaactgaccacccttccccggtttcatttctacgttatgtacggtagaaccaacagggatattgcgcattggcaatgcgttaccagttttgatagatgcgtcaacaccagattggatctgatcaccagctttcagccctttaggtgcaaggatataacgacgttcaccatctttatacaaaaccaaggcgatatttgctgaacgatttggatcatattccaaacgctcaactacagcagggataccatctttattacgtttaaagtcaatcaaacgatagtgctgcttgtggccaccaccaatgtgacgagtggtaatacggccattgttgttacgaccaccggttttgctgcttttttccagcaatggagcataaggtttacccttatgcagctcagggttaaccactttaacaacgtggcgacggcccggagacgtaggtttacatttaacaattgccattgttctttactcctccgacttactctgcaccaccgatgaagtccatattctggccttccttcagtgtgacgtaagcttttttccagtcgctacgacgaccaatacgctgaccgtggcgtttagttttgccttttaccagcaaagtgttaacaccttcaacttcgacttcaaacagtttctgcacagcagctttgatttctgctttagtcgcgtctttcgcaactttgagaacgatggcgttgcttttctccatcgctgtagaagctttttcagatacgtgcggtgcgcgcagtactttcagcagacgttcttcacggatcatgccagcatctcctcaacttgcttcacagcatcagcagtcataaccactttatcgaaggcgatcaagctaactggatcaataccagctacatcacgaacatcaaccttgtacaggttgcgagctgctaagaacaaattctcatcaacttcattagtgataatcagcacatcttccagagccatctctttcagtttctgaaccagaagcttggttttaggcgcttctacagaaaacttctcgacaacgatcaaacgatcttgacgtaccaattcagacaggatgctttttaaagcaccacggtacattttcttattaactttttgactgtggtcctgtggcttagctgcaaaagttacgccaccagagcgccaaattgggctcttaatagaaccagaacgtgcacggccagtgcctttctgacgccatggttttttacctgaaccagaaacttcagcacgggttttctgagcacgagtaccttgacgtgcaccagctgcgtaagcaacaactacttgatgcacaagcgcttcattgaaatcacgcccgaaggtagtttcggaaacagtcagcgcgccttgcgcgtctttcattaccaattccattcctatctcctcgacgttacgccttgacagccggttttacgatcaggttgccaccagttgagcctggaacagcacctttgaccagcagcaggttgcgctcagcgtcaacacgtactacatccaggctttgaacagttacgcgttcattacccagttggcctgccattttcttgcctttaaataccttgcccggagtttggttctgaccgatagaacccggaacacgatgagacaaagagttaccgtggctagcatcttgggtacggaagttccagcgcttaacagtaccagcaaaacctttacctttagatgtaccagtaacgtcgactttcttaacgtcagcgaaaatctcaacgctaatgctttgacctacagcatattcttcgccttcagacaggcggaattcacgcaggatacggccagcttcaacgccagctttagcgaaatgacccgcttcaggtttatttacacggctagcttttttgctaccagtagtaacctgaattgcacgataaccatcgttatctagctctttaacctgagtaacacggttatcttcaatttcgataacagttacagggatcgaaacgccatcttcagtgaagatacgagtcatacccacttttttaccgactaaaccaatcattgtttcaacctctcaatcgttcaatgacctgattaacccaggctgatctgcacgtctacaccggcagccagatccagacgcatcagagcatcaacggttttctcggttggctcaacgatgtcaaccagacgcttatgagtgcgaatttcgtactgatcacgcgcatctttattaacatgcggagaaattagaacggtaaaacgctctttacgagtcggcagcgggatcggaccacgaacctgcgcaccagtacgcttagcggtctcgacaatttccgcagttgattgatcgatcaaacgatgatcaaatgctttcaggcgaatacggattctttggttctgcatgagaccagagctccaactattttataaacataaatgattactcctcaatcccatttcgattgatgggagagtgcaatcgttcaatatataacccccatatcggggatattttaaatgggcagcaaacaaatactgctcacttactggctaacaaaccagacttacacgtaagtaagaccgcatattatacgcaaatcaattaacaaagcaagacacagatgaagatctgtccagagtaaaattagaggggcataaaacaagatgccctaacttaacagatagggcatttttccgtaactataactattctccttcaagaatctgtgattgagtgtaattttgaatccccatacgttcaattaattcaaattgagtttccaaccaatcaatatgcttttcttcttcatctagaatatcaatcattaaatcacggctaacatagtcatgaatcgaatcagcataagcaatcgcttctttcaaatctttagctccttgcaattcgagctgcaagtcagatttgagcatttcttcgatatcttctccgatgttaagttttcctagatcctgcaaattaggaatcccttcaagaaaaaggatacgttcaatgtacctatcggcgtgcttcatttcatcgatagattcatgatattccttatcattaaggcgagtaagaccccagtttttgaacattcgggcgtgcagaaaatactgattaattgcaacaagctcatttccaagaagtttgttcaaatgagcaatcatttttttatcacctttcatagactattcctccgcttccagtacttaaagtgtagtacctattcagcagagtagtagtaaacttacttcttttttatcaagcaacgttatctatcttgggtaactgtgcaatctcctcattaattagctctctagcttggcgtatgcatttgccacaatcacggcctacaggcacaatacattttagttctttaatagagtgaatatgatgttgacgcaccgcattacgtattgttttgtcactcaccgcattacataggcagacatacataaataacactctctggtacacattatagcgcatattaaataataatgagtctcatttcaataatcattcgcattttaattttctgattcaggttcctccaaatattcttttagccttgtcaaatagagggagttctctcatttctataacactttggctaggaaggcttttatctctatcagggactttcttaaacttattccatcctaagactatctcctacatcaacaatttgttccagaactgatagctagacagaacaacctacttaagatattacgggatatagaattcacatacttagttgcacgaaaacgagcatgctatgccgtaatcttttcgggagtatcctctctttctgttagagcataccaacagagacagaacaagcatgggttagatattactacctgtatgtaaaagaaaatatgacttatctaagtctgaaaacaaatacttatttggaaaaatcgcgagttatcaccaacgtattctatagatgaatgatgtatataactctgagaatatcctaataaaacaaccaaataacgccttcaggaacaagcggccaaaatcaaaaagttaaaacacgaagagataacccaacggtgtggttcatgcagagaatttaaggaaggatgatatcaattaaaatactcactaacagacacctgatgtagcacaccaggcatctgttctaaaacaagccagaaggcaaacctattctagagttaggtacttaatcattagctattaagcgataactttagcaacaacaccagcacctactgtacggccaccttcacggatagcgaagcgcagaccctggtccattgcgattggggcaatcagggtaactttcatctgaatgttatcacctggcatcaccatttccacgccttctggcagttcaatggtaccggtcacgtcagttgtacggaagtagaactgtggacggtagcctttgaagaatggcgtatgacggccaccttcgtctttgctcagaatataaacttctgattcgaaagtggtgtgtggcttgattgaacccggtttcgccagtacctgaccacgttcgatttcgtcacgcttggtaccacgcagcagaacaccgacgttctcacctgcacggccttcgtccagcagtttgcggaacatttctacgccagtacaagtggttttagtcgtgtctttgatacccacgatttcaacttcttcacccactttaacgataccgcgctctacacgaccggtaactacagtaccacggcctgaaatagagaatacgtcttcgattggcagcaggaatggctggtcaatagcacgctctggctctggaatgtagctatccagggcctctgccagttcgatgattttggcttcccactctgcatcaccttccagcgctttcagagcagaaccacggatgactggcgtgtcgtcgcctgggaaatcgtactgagacagcagctcacgcacttccatctcaaccagttccagcagctcttcgtcgtctaccatgtcacatttgttcaggaacacgatgatgtaaggaacgcctacctgacggcctaacaggatgtgctcacgcgtctgtggcattggaccgtcagtcgcggcaactaccaggattgcgccgtccatctgagccgcaccggtgatcatgtttttcacgtagtcggcgtggcctgggcagtcaacgtgcgcatagtggcggcttggagtatcgtattctacgtgagaagtagagatggtgataccacgcgctttttcttctggtgcgttatcgatttggtcgaatgcacgagcattaccaccgtaggttttagccagtacagtagtaatagcagcagtcagggtagttttaccgtggtcaacgtggccgatagtaccaacgttaacgtgcggttttgtacgttcaaacttttctttagacattagattgtccctctaagacacggaatcggtggttccaccacatcaaccaagcaattgctcgttgaatatcgcttacaggaataaaatcgggagacaaggacattaaggaagtggtgctgataggcagattcgaactgccggcctcacccttaccaagggtgtgctctaccaactgagctatatcagcacatcttggagcgggcagcgggaatcgaacccgcatcatcagcttggaaggctgaggtaatagccattatacgatgcccgcattgaactcggctacctgactttaatcagctgtatgttgatctcaatatactttgcttccagttaagcactaaaagaataccaagattaaatctgattctttggtggtgggggaaggattcgaaccttcgaagtctgtgacggcagatttacagtctgctccctttggccgctcgggaaccccacctttccaaatttttaatggtgccggcaccaagaatcgaactcgggacctactgattacaagtcagttgctctaccaactgagctatgccggcatcaagtgctgcgcattctaggcagtgtgaacgctctatgcaacaaaaaaattgctttccttgatcattcggttgcaaaataaccaatttcattcgattagctgtttttttcaattgatttagcttaaacaataaacaccgaattacctaccaactaaggaacctatcacaagtgctcgataaaacttgataagccacttcatcttgaatcatttaaattcccatcatgataagcaaacagctgaagctaacattaagtaaaacaactcaattttttacaattctgcatttcttacaaaaaaaacctctaaaaatataaaaaagcctacgcctgccgctcatcagtcgatatcatgcgatttattttttgtcgggtacaggttgtttattacaacttgccaaacctgcacaaacaggcagatgttggtttatgaataaaaaagaaccttttttggctactccatatttgcaattcaatcgtgaacaatgggcaaccttacgtgattcagttccactgacattaacaaaagaagaattaattgatttaaaaggaattaatgaagaaatttctttagaagaagttgttgagatttaccttcctttatctcgcttactcaatttttatattagttcaaatttacgtcgtcaagcagtgctggaacaatttttaggtactgatggacaaaaagtcccttatgtcataggaattgctggcagtgttgctgttggtaaaagcactactgcacgtctattacaagctctgctgagtcgttggcctgaacacagaagcgtagaattaattactacagatggttttctacattctaacagcgtgctgaatgaacgtggactgatgaaaaagaaagggttcccacagtcatatgatatgcatagcttagtgaaatttgtatctgatattaaatcgggctctaaacaagtatccgcaccagtatactctcatcttacctatgatatcgtaccaaatgagcaaaaattcattaaacaaccagacattttgattctagagggtttgaatgtattacaaagcggtatggattatccccatgatccacaccatgtatttgtctctgattttgtcgacttttctatctacgtcgatgcaccagaaaaattactcaaaagttggtatatcagtcgtttcttaaaattccgccaaggtgccttttccgatccagattcttatttccacagttactccaaactatcagaagaagaagccataaatactgcatccgatatctggcaagagatcaatggactgaatttgcgacaaaatattttaccaactcgagaacgcgcaagcctaatcatgacaaaaggtactaatcacactattgaaagcgtaaggctacgtaagtaaagatagtctccgaacccggaagacatttctcttccggtcatttttaacaacctcttaaagaaatctccccgccaatatatggggttatgacaccattctgatcaagtaacaaagcaccttgctgattaatacccctagctataccatacacttcctgactaccaataattaatttcaccggcctatccataaaattatctaactcaaaccaccgagaaacaaatgaagacaagcctttattttcaaactgaattagagctttccttagatcaagtattatttctacagccaatttattacgatcaacttgaattcctgcctgcaacaaattaatccattgctgattaataggttcttcgtccttatgatccatcgaaatatttatacccgcacctattacaacctgagcagcatcaccagtctttcctattagttcaactaaaattcccgctaatttcttatcatcaagatataaatcatttggccattttaccctaattctaccagcgccaaatcgatgcaatacttcagcaataacaatgccaacaaccaaactcaatccaattgcagcagcaggtccttgttcaaggcgccaatacatagataaataaagatttttaccaaagggcgaaacccatttccttccacgccgccctctgccagcatactggtactctgcaacacaagcatcccctgatttcaattcagataaacgttccaacaaatactgattagtcgaatcaataactggcaaaacagttatacgatcctgaggtaagtattgcaaaatagtagactcatcaagtaactgcataggtgccataaggctataccccttaccaagagttgtttctagctcaattccccactcacgaattgtctgtatatgtttattaattccagccctactcatccctaaatattgtcccaactgttgaccggaatgaacttcaccgtcagacaaaatcttaatcaactgtaatggcacggttatatctttcatgaaatacattccacagcatcaatttcgcctttagaaccaataaaacgaacctcaggttcaagtaatacaccaaacttacttatcacttgccggcgaatgtaagcagccaataaaactacatccttacctgtagcattttcctgatttatcagtactagagcttgtctaagatgcacagatgcacctccaatgcgataaccttttaaattacaacgttcaatgagccaagctgccgctaatttaaacatcccattcgtgtaagaatattgggggctatcagggtaattttctttgatttttgccgcaacttccgcactgacaattgggtttttgaagaaactgcccgcgtttcctgttattgcaggatcaggtaatttactggtgcgcattgcacatactgaatcaaaaatctgctgaggagttacattatctttcgatagcctagttaaattaccgtagttcaatattggctgccaattcttcttcaacaataatcctacagaaataatagaatgatttgctttatatttatgcttgaaaatactatcacgatatctaaactgacattcaccaacactaagacgcgtttgttccccagtttctagattaagaacatctacatattcacacacatctctaaattcaataccatatgcaccaatattttgaattggtgctgcgccagagcaaccaggaattaaagccagattctctaatccatagatttgatttttaagagaatgacagactaattcgtgccaattttctcccgcccctacatgtaaatgccatgattcatctgtctcccgctgttgaatccccataattctattcagaatcacagttccttcaaaatttgtagtaaataagacattactacctccaccaagcagtaatacaggttgtttttcgcttttggctttttgccataaagctaataaggactcggcagattcagctatatctaaacgtttagcataggctgataacccaaaggtattaaactctttaagagaaagcattcactcaacactcaataaagctatttaataagtagtttatcagctataggcgtggaaaacagttggaaaactaagttagttctttgttaaatgcaaaaaggccacccagaagggtggcctttttgtttcaaaataaagtctggcagttccctactctcacatggggagaccccacactaccatcggcgctacggcgtttcactgctgagttcggcatggggtcaggtgggaccaccgcgctatcgccgccagacaaattctttattcgttatcatggtgctgatacccagattcgaactggggacctcacccttaccaagggtgtgctctaccaactgagccatatcagcaatagttgcccaaactcactgttggcgcaaaaaattaaagcctggcagtgtcctactctcacatggggagaccccacactaccatcggcgctacggcgtttcactgctgagttcggcatggggtcaggtgggaccaccgcgctatcgccgccaggcatattcggttttcttccggccgttgtcgctcttctgccacaaccacccgaatcaatctctgaacaagctgaaaagtcatctctctgctgtcaaccggcttctgccggctgccctctgaacaccaaaacaccttcggtgttgtaaggttaagcctctcggttcattagtactggtcagctcaatgcatcgctgcacttacacacccagcctatccacgtcttcgtcttaaacgttccttccgtgacctcagtcaggggaagactcatctcaaggcaagtttcccgcttagatgctttcagcggttatctctcccgcacttagctaccgggctatgccattggcatgacaacccgtacaccagcggtgcgtccactccggtcctctcgtactaggagcagcccctttcaatcttcctgcgcccacggcagatagggaccgaactgtctcacgacgttctaaacccagctcgcgtaccactttaaatggcgaacagccatacccttgggacctacttcagccccaggatgtgatgagccgacatcgaggtgccaaacaccgccgtcgatatgaactcttgggcggtatcagcctgttatccccggagtaccttttatccgttgagcgatggcccttccattcagaaccaccggatcactaagacctactttcgtacctgctcgaaccgtcactctcgcagttaagctggcttatgcctttgcactaacctcacgatgtccgaccgtgattagccaaccttcgtgctcctccgttaccctttgggaggagaccgccccagtcaaactacccgccagacactgtccccggcccggtttacgggcccaggtgagaacatcgaacattcaagggtggtatttcaaggatggctccatgcagactggcgtccgcacttctcagcctcccacctatcctacacatcaaggctccatgttcagtgtcaagctatagtaaaggttcacggggtctttccgtcttgccgcggggacactgcatcttcacagcgagttcaatttcactgagtctcgggtggagacagcctggccatcattacgccattcgtgcaggtcggaacttacccgacaaggaatttcgctaccttaggaccgttatagttacggccgccgtttactggggcttctgtcaagagcctcgccttgcggctaaccccatcaattaaccttccagcaccgggcaggcgtcacaccgtatacgtccacttacgtgtttgcacagtgctgtgtttttaataaacagttgcagccagctggtctctgcgactggcttcagctccggaggcaaaccccttcacctaccgccagcgtgccttctcccgaagttacggcaccattttgcctagttccttcacccgagttctctcaagcgcctgagtattctctacctgaccacctgtgtcggtttggggtacgattcaatatgacctgaggcttagaggcttttcctggaagccgggcatcaaccacttcaccgccgtaacggctcgtcatcacgcctcagtgttcacagaagagcggatttacctgctcctcccacctacacgcttaaaccgggacaaccgtcgcccggatggcctagccttctccgtccccccttcgcagtcacattcagtacaggaatattaacctgtttcccatcagctacgcctctcggcctcaccttaggggtcgactcaccctgccccgattaacgttggacaggaacccttggtcttccggcgagcgggtttttcacccgctttatcgttacttatgtcagcattcgcacttctgatacctccagcaggcctcacagctccaccttctccggcttacagaacgctcccctacccaataacacttgcgtgtcactgccgcagcttcggtgcatggtttagccccgttacatcttccgcgcaggccgactcgaccagtgagctattacgctttctttcaatgatggctgcttctaagccaacatcctggctgtctgggccttcccacatcgtttcccacttaaccatgacttcgggaccttagctggcggtctgggttgtttccctcttcacgacggacgttagcacccgccgtgtgtctcccgtgataccattcttcggtattcgcagtttgcatcgggttggtaagccgggatggccccctagccgaaacagtgctctacccccgaagatgaattcacgaggcgctacctaaatagctttcggggagaaccagctatctcccggtttgattggcctttcacccccagccacaggtcatccgctaatttttcaacattagtcggttcggtcctccagttagtgttacccaaccttcaacctgcccatggctagctcaccgggtttcgggtctataccctgcaactctttcgcccagttaagactcggtttccctgcggctcccctatccggttaaccttgctacagaatataagtcgctgacccattatacaaaaggtacgcagtcaccctgattaatcacggctcccactgcttgtacgtacacggtttcaggttctctttcactcccctcgccggggttcttttcgcctttccctcacggtactggttcactatcggtcagtcaggagtatttagccttggaggatggtccccccaccttcagacaggatttctcgtgtcccgccttactcatcgaactcacagccataccatcttcgagtacggggctgtcaccctctctcgccggcctttccagaccgttcctctgatgctatcgctgatgcaggttctgggctcctccccgttcgctcgccgctactgggggaatctcggttgatttcttttcctcggggtactgagatgtttcagttcccccggttcgcctcattaacctatgaattcagttaatgatagtgcaacgcattgcactgggtttccccattcggacatcgccggctctgtcgcttcatatcagctcaccgacgcttttcgcagattagcacgtccttcatcgcctctgactgcctaggcatccaccgtgtacgcttagtcgcttaacctcacaacccgaaactgtctcggactgttcagcttgagagacacctcaacaatacctcggcgatattattgagtatttcaatttttcagcttgttccagattgttaaagagcatctatcgctaaacagattcacctaaatccgcttaaagataacctgacaacgcctttcacccgtcatcccgcaatatggcgtcccctaggggattcgaacccctgttaccgccgtgaaagggcggtgtcctaggcctctagacgaaggggacccgctggtcagcttcgcagactcatttgcactctattttcatcagacaatctgtgtgagcactgcactcaacctctctcaggtaaggaggtgatccaaccgcaggttcccctacggttaccttgttacgacttcaccccagtcatgagccacaaagtggtcagcgcccccctttcggttaagctaccgacttcttttgcaacccactcccatggtgtgacgggcggtgtgtacaaggcccgggaacgtattcaccgtagcatgctgatctacgattactagcgattccgacttcatggagtcgagttgcagactccaatccggactacgacagactttgtgtgttccgcttgctctcgcgaggtcgcttcactttgtatccgccattgtagcacgtgtgtagccctactcgtaagggccatgatgacttgacgtcatccccaccttcctccggtttatcaccggcagtctcctttgagttcccaccttcacgtgctggcaacaaaggataagggttgcgctcgttgcgggacttaacccaacatttcacaacacgagctgacgacagccatgcagcacctgtctctcagttccctaaggcacttcgctgtctccagcaaattctgaggatgtcaagagtaggtaaggttcttcgcgttgcatcgaattaaaccacatgctccaccgcttgtgcgggcccccgtcaattcatttgagttttaaccttgcggccgtactccccaggcggtcgatttaacgcgttagcttcggaagccaccgttcaagaccgcaacctccaaatcgacatcgtttacagcgtggactaccagggtatctaatcctgtttgctccccacgctttcgcacctgagcgtcagtcttcgtccagggggccgccttcgccaccggtattcctccacatctctacgcatttcaccgctacacatggaattctacccccctctacgagactccagtcaaccagtcttagatgccattcccaggttgagcccggggatttcacatctaacttaattgaccgcctgcgtgcgctttacgcccagtcattccgattaacgcttgcaccctccgtattaccgcggctgctggcacggagttagccggtgcttcttctgcgggtaacgtcaaagtccagccctcttcaggctaaacccttcctccccgctgaaagtactttacaacccgaaggccttcttcatacacgcggcatggctgcatcaggcttgcgcccattgtgcaatattccccactgctgcctcccgtaggagtctgggccgtgtctcagtcccagtgtggctggtcatcctctcagaccagctagagatcgtcgcctaggtaggccattaccctacctaccagctaatcccatctgggttcatccgacggcgtgaggccctttcaggtcccccactttggtctcgcgacattatgcggtattagccaccgtttccagtggttatcccccgccctcgggcagatccccagacattactcacccgtccgccgctcgtcagcaaaagtgcaggcactttcctgttaccgctcgacttgcatgtgttaggcctgccgccagcgttcaatctgagccatgatcaaactcttcaatttaaatcaaagtttgatgctcaaagaattcctgactaattatttcgtaatgaattaactgttgttcactcttcaagactttaaaacgtatttttttgtgatacggtcttgtgagtgcccacacagattgtctgattaattgttaaagagcaggctgacataaaaaataacattctcgttcagccgggctgcgtatactacgctgttcgcccgcagagtcaagcactgattatcgctttctctgcccgacctcacaatgtttatcagcgttgtgtcggtcagtggtggcgcattatagggcgttctttgacgctggcaataattattttgaaaaaagttaacgaccgatgattattccatcaaatttaacttaagttatcaatttttctagttttgaaaatccatactcctgcaaaacggggattaatgcatcagtatcagtattcactttcatacagtaagcaagactatctgctgaagtgcaaacaagattattctgatgtttaaccaaccaagccgttcttcgagcaatagcaacaccagaatcaattaaacgcgtgccatcaggtaatatctgaactaattcttctgctaataatggaaaatgggtacaacccaataccactgtatcaggtggttttttcattccaagccacggtttcagtatcttttttaaaatatcgggagagaccttaccaccatgcagtttaatttcagctaattctactaattcagcagaacctatagattcaatcctgcaacctgtcgcaaacttttcgataagttcttttgtataggaacgattaactgttgctctagtcgccaataatccaacgacaccattacgagttaactttgcagcaggttttatcgctggaaccacaccaacaaccggaaagctgaaccgctcacgcagagctggcaagctgactgtactagcagtgttacatgcaataaccactattgtcagagggtgtttttgctgaatagcaccaacaatttgaacgactcgttcaacaataaactcttccgatttttcaccataagggaatgcttcgttatcaaaaacatatatataatggagatctggtaataattgtcggatctcttggtaaatagataagccgcctaccccagaatcaaacactaaaactgttgggcgtgcggctttatttaaatcagaagttatagctcccagtgaggtagtattcacgtcctggaatgcgatagccataaactgtctcgtaatctttatcaagcaggttggctattctagcacgaattgtcagataagaagtgactggatatgaaactgttaaatcccaaaagctgacgccacctaatttcacacgcttagccggggatgtactgaaatccttgtcataacgccgccctagatattgataagttaacccccaatcaaaatcatataactgccagtcaagttgatatttcacttgctgcttcgcacgacgaactaaaatttcattagtttcactattacgggggtcaatatactgtattgtcaattgatgctgaaacatgccagtgtctattaagccagtccactcaacacctttaattttcgctttaccaatattgtagtagcggctattcgcataatcgatcaattgctcaatctcattgcgatatacagtcatacgccaagttagctggccagtgacgccttcgataccgccttcccattgtttactttcttccggtttcaaatcatgattaccaccaaaaccgtacatctggctgagcgttggagccttaaatgccgtaccataagaggctatcaagcgataatctttaataaactcccaacctaaactggcttgccatgttgtattccagccagcttctgaatgtttatctgaacgaattgcaccttctaaaataaaatctttcagttgttgctgtgctgtcagatacattcctgtattacgtaccgttttactcttcggaatataactggttccagcttctatcgattgtttttggaaatccacaccggtactgactatgccctgatatagctgaaaagtattcccccattgcaagttatattgttcagaatcattaaggctagcagacttatcatagcgtccatattgaggatcaaagttatagtcttttgtatgactataacttgtaattaactgggatgagtagatcccttggttaaatctgactcccatgtcatagtggcgactataaagttcacgagtatccggtctggcatatggataactccaattaatatccgcatcataagatgttctattgttatagccataagctcgaacaaatccactgacttgctcattaaatttttgatcgactcctaaccaaagcattttgctcatgaagccgtcacgatcaggttgtctaaaaccaccggtattaccatcagcaacaacatcgtatcctttggtataagtatagttagctgctgctgtcagaactgtattttcagctagcgtttgttgagttgcaccatcataagtttgatagccatgtgagccgatacctacattaaggctggttcctagcttctctctggtagtgatgatattaataacaccaccaatagcatcagaaccataaacagcggagcgtggtccacggatatactcaattttctgaaccaatgatacaggtatttggcttaaatcagaggagccactgatgcccgcttgattcaaacgtattccatccatcagtactaatacatgactagcatgagtaccacgtataaacaaagagcttaattgtccaatccctccatgccgcgcaatatcaacaccgggtaaacgacgcaaaatatcggctacactatttgactgccaacgatcaatttcatctcgtgttacaacagtataaggagccaatatgcttgatatcggctgtttaaaacgactcgccgtcacaaccaatgaatcctgcgactccaccgcagcagaagcttgattccagccagaaatcaccataattgaaacagtggataataataaccgctttttatttatcatgagagaaaacatcccacaatttattgttagaaggacacgctacgatgaagcgttgagcctattcataatagtaagcatagacaggatcgtgtatgagtaataagaaaactggacattctttgctctttccctacaattttgcacgaaaatttttcttactacagatataagagaacaaacataatgcaaaatctcctgccaacggaaagctatgaacagcaactgacggagaaagtcagccgtttaaaaaacatgatggcacctttccagcccccgaggccagaggttttccgctcaccgctatctcattacagaatgcgagcagaatttcgaatctggcatgagcaggatgatttgtaccatattatgttcgatcaacagacgaaacaacgtattcgccttgttcaattccctgtcgccagtaagttaatcaacaaaatgatggtagtattaattgactccattagatctgaacagatcttgtgtcataagctatttcaaattgattatctgtctacttgcagtaataaaatccttgtttctctgctttatcacaaaaaattgggggaagaatggacacaacaagcattaagactgcgtgaagcgttaagacataaagggtttgacgttgagttaattggcagagccgctaaaaccaaaatcacattggatcatgattatattgatgaggttttacctgtcgcaggccgaaaaatgatttatcgccaggtggaaaacagcttcacccaaccaaatgctagcgtcaatattcatatgcttgaatgggcaattaatattaccaaagattcaaaaggtgatttacttgagctctattgtggtaatggcaatttctctctggcactagctcaaaattttgaacgagtattggcaacagaaattgccaagccatccgttgcggccgctcaatacaacattacagccaatggtattgataatgtacaaattatccgaatgtcagcagaggaattcacccaagcaatgaatggtgaacgcgaatttaatcgccttcagggaataaatttaaaaagctatcaatgtgaaactatctttgtcgatccaccacgtagcggccttgatgaaaaaacacttgagatggtccgggcatatccacggattctttatatttcctgtaacccggaaaccctttgccataatctggagacattaacccaaacgcataaaattagccatctggctctgtttgatcagtttccttatactcatcatatggaatgcggcgtgcttctggaaaaattaaactgatacttgacaaacatataaagcaaaaacgccggcagatagatctctccggcgtttttcatcaattaatgacaattttctgtaattgcctggtttttacgaatttttacctttctgtaaatccaaaataccagtacggtacccattactgcgggcagaaaattagagccaatttcagggtattcaaccctgataatcgcactataactaaataatcctaagaggaaacaggcgacaaccaacttaggcatcccatctggcattgagtaattcaaatagcgctgatggatacaataaactgataaaatcaatgttatcaatgggaaaactgaaaaagaaacaactgagctaaaaactgctgaaaatgttccattcgttgctaatccgacaataaaagcgagtaacaatgtacttttgtcctggcgatattgttccatcatttcgttctcctccttcatagttatttaagtttagggttcggtgggttcatttctttgcgatacccaatatatgcacctttagcatcatccgtagctgcaagactaaacgtcttctaacgctgtcttttctccaaatcaatatccagtgcttctgcacctgcactgaatactattgttaccattgcctctgcctgcacttcagtaaaatgcctcggcatacagctttcctgttctaaatagtctgccagctcagcaataaaatgttggatttcccgtgcgacagcggcacgaaattcagcagaagtccctgaacgttcacgtaataataatcggaatgcatttgggttattaccgataaattccataaaagttgaaacagacgtgcggatgacactgccacctttagcaatacgttgccgggcttgcctcattaactgacgtaacatcaaaccactttcatccaccatagtgagcccaagctcatcaacatcgcggaaatgacgataaaatgaagtgggtgcaatacctgcttcacgggcgacttcacgcaagctaaggctggtaaaactcctttcggcactcaactggctgaaagccgcttcaatcagtgaacgacgagttttttctttctgtttcgctctgatgccgataatgttactcacacgaatcctgactctttatctgaactacatgttaggaaatataccaaattttaatacgtttgccgtaatgatatgcttatcatgtcatttataatgatccatgtcattttatcagcgcattttcttattagatattaagatgataaaggtgactacgcgtagtcagaaaatcattaaaggagcatttcccctttgctaattcgatcgttagataattatttattttccaaaaacttcatggtatcagcataacgggtaaaactatgttcaattcaccctaaacgatgacataaactccttatgatgattgggttattaagtcaaccaatgttaatatagcgttgtaattttgtgtaaaaacaggtctttcctctatgcaacatattcattttgacgccattgtcattggttctggtcccggtggagaaggagcagcaatgggattggtgaaacagggtaaaagcgttgctgttattgaacgctataataatgtcggcggtggttgtactcattggggtaccatcccgtctaaagccctccgccacgccgtcagtcgtattattgaatttaaccaaaatcctctgtacagtgataattcccgcgttcttcgctcttcatttgctgaaatcctgcgccgtgctgaaatggtaattaatcagcaaactagaatgcgtcaaggattttacgaacgtaatgggtgtcgtatgttttccggagaagcaacattcattgatgaccaccgggtgagtgtgcgctatgctgacgataaccacgatattttaagcgcagataagattattatcgcaactggttctcgcccatattgtccgccagatgtcgatttcactcactcccgtatttataacagcgattccattctgaaactggatcatgagccacggcatgtcattatttacggtgccggagtgattggttgcgaatatgcttcaatcttccgtggattaggcgtaaaagttgatttgattaacactcgtaatcacttactcgccttccttgatcaagagatgtcagatgcactttcttaccatttctggaatagcggtatagtgatccgccacaatgaagaatattctaaaattgaaggtgttgatgatggtgttatcgttcaccttaaatccggtaaaaaagtcaaagctgactgtctgctttatgctaatggtcgaacaggtaatacggatactttagggctaaaaaacgttggtctagaagcagatagccgcggtttactgaaagttaataagatctatcaaaccagcaacgaaaatatctacgctgtaggagatgttatcggctatccaagcttggcctcagctgcttatgatcaaggccgaattgccgcccaagcgatgacgaaaggaaacgccgaagttcatctgattgaagatatcccaacgggtatctataccattcctgaaattagctctgtaggtaaaaccgaacagcaattaacagcaatgaaagtgccttatgaagttggacgcgcacaatttaaacatcttgcacgcgcacaaattgcggggatgaacgtaggaagcctgaaaatactgttccacagagaaacaaaagagattcttggcattcattgtttcggggaacgtgcggctgaaattattcatatcggccaggcaattatggaacagaaaggtgaaagtaatactatcgaatatttcgtcaatactactttcaactatccaactatggctgaagcctaccgtgtcgcggctttaaacggccttaaccggctattttgattgcccgtaataagtgcccattttagctctaatagcctctgcaagttgctcatagcgaccacgcagaggtgaaccaggacgataaatcaaaacaacagaccgcttaggttcagggctgttacactccagatagcagacgccatcacgttttttctcttgtggcactgccaaatcaggcaataaggttattccactaccggcagcaaccatattacgcagggtttccaaactggttgcacgaaaatgggtatcttccttcgcaccagcctgaaaacagaaccccattgcctgatcacgcaagcaatgaccatcttctagcatcaacaatttttcacctgccaattcatccatagcgatttttttacgctccgcccaaggatggtcatcatagatagctagtttcatgggttcttcaaacaatggcacttcaatgaaatctcttgtctccttaaccattgccagaatcgcacagtccaatttgccactatccaactgggctaacagactttgagtctgggcttcatacagatacatttccaacttaggaaacaaactatgaagcctagggataatatgaggcaacagatatggaccaactgtcgggatcaagccaatatgcagaggaccagacatattttccccttgaagtgatgccatttcctgcaaaatcctcacctcacggagaactgttctggcttgttctactaataacatcccttgctgcgtaaacaaaactttacggctggtgcgctctaataacatgacccccagattatcctcaagcttacgaatttgcccgcttaacgtaggctggctaacgtggcaagaatcagcagcatggcgaaagtgccgatgctccgcaagcgccacaagatattccagatcgcggatattcattcccacctcaacatatttaatataaatgatagaaactaccaatagataattatatcaatgtgaggaaaagactatcagataatccttaaaaacttatatataaagatctcacttattttacaggggatatacccgtcatctttcaagttgcctctttgttggctgcactcgctcaccccggtcacatagttacctatgctcccggggattcactcccttgccgtcgcgatgcatcttgaaatccataggggatagattaatccccactgctgacgatgactaacttaattttagcctctgtttagcctctacaatcgctttcataacttgttttggcgatacgccaccttttgcaaggcgtttgtccaagcaagattgcagagacaaaatatcatatacatcttcaataattgcactgctgaacttctgcaactctgtcaatggcaacgcttccagagccttaccctgagtaagcgccatcatcacaatttccccaacaatatggtgggcttcacggaatggaaccccttttgcaaccaaatagtcagctaattcagtcgcgttagcataaccctgtttagctgcttctgcgcaacgtgaacgcctgacctgaataccgtctaacaccaacgcagccatatgcaaacaatccagccaaatgtccagcgcatcaaacaacccttctttatcctcctgcatatctttattataagccagcggcagacctttcaaggtcatcatcataccggttaatgccccctgcactcggccacatttaccacggattaactccagtgcatccgggtttttcttctgtggcatcagagaagaaccggaagtgactcgatctgacagttcaataaatcctgcttcaccgctattaaagaaaatgagatcttccgcaaaacgggaaagatggatcatactaatgctggcattagatagcagttccaatacatggtcacgatctgaaacactatctaggctgttacgcgtcgctgaagcaaaacctagccatgatgctagttgttcgcggtcaatatcataagcggttccagccaatgcaccgcacccaagcgggctagtattcagccgttttaaagtatcctgtaaccgattttcatcacggaccaacatttctacatatgccaagcaccagtgagcaaatgtaataggctgcgctctttgcagatgggtataacccggcatcaccgtatcctgattcttctctgcggtgatcaccaatacctgttgtaattccacaattgcctgatggagatgtgaaatgtattctttacaccaaagtttaagatctgttgccacctgatcgttacggctacgaccagtgtgaagcttcttacccagcccaccaactttactgatcaactgcccttctacccaactatggatatcttctgcatcactttgcaagatggcttgtgggttagcctgaacctcattcagcaattcatttaatgccagctccaatctttgttgttcttcaacggtcaacacaccaaccgttatcaacgctttcgaccatgcaactgaaccggtaatatcctgttccgctaaccggtaatcaaagcgaagtgaatcgttaaattgtttgaaccgttgatctgctttctgactgaaacgcccgccccagagtgccatatttttgttcctgattatctgatgtctgagtgattgattacctttcataaacagcaatttcattcgcaacatggagataatagactcgaaaaatcaaatacaaggatgaattcacgatctggtcattacctccataactacgaacgatgaaattactctttactatttaatgcccgaatgcgcgaagggagagaatacagacggataaatcctgctgcatggctgtgatcgtaaacctcatcttcaccaaacgttgcaaacgcttcagaataaaggctatttgttgatcttttctggatcgctgttacctgccctttatagagtttcagtactacttcaccgctgacatccgcagccaacgtctcagccgctgcctgaatagatcgacgtagcggggcaaaccaacgtccgtcataaacgacataagacatttctagcccaagctgctgacgccatttaaagctatcgcggtccagaaccagttgttcaacaccacgcaacgcagccatcatgatggttcctcccggtgtttcataacaaccacgagatttcattcccaccagccggttttccacgatatcgatacgaccgataccatgttttactcccagaatattcagcgcttcaaggcattgatatggagacattactttgccgttgaccccaacaacctcgcctttctcaatcatgacactaaccaattcagcttcatctggtgcctcttctggatcgactgtccacacccaacaatctttattggatgcattccaagtgctttccagtacgccaccttcggtagagatatgccacgcattctcatcacggctgtaaattttctccaatgttgcagtggttggaatatctcgtgctttcagataatccagcaacgcttcacgggaacgtaaatcccactctctccacggtgcaactacttttagctgaggggctaatgccgtataagtgctttcaaaccgaacctgatcgttacccttacctgttgcaccatgagcaagtgcatctgctcctactttcagtgccaattcaacctgtgctttagcaataatggggcgtgccattgaagtgcccaacaaatagctaccttcatacagagcaccggttttcagtaccggataaacataatctttaatgaattcctcacgcagatccacaacgtgacattctgacgcgccagaacgcaaagctttctgctccacgccttccaaatcttcacggctttgccccacatcagcaacaaacgcaacaacttcacagttgccataatgctccttcagccaaggaataatggcagaagtatccagaccaccagaataggcaagaacgatttttttgatatctttagtatgcatgaagttaccctttgaaattccgttgttatttatcagcaaagctttgccgaaaattaatcaaacttaatttaagccagaatacgagtaccgacgggaacaccgttaaatagatcggtcagttgatctgcatgacgccaactggcgatatctaccggacgatctaatgtcctggctgcatctagagcggcattcaccttcacaatcataccgtcagtaatgatgccatgagcaataagctgttctgctttctcaacatttatgtcagggattttctgccctttaccatccaaaataccgctaacatcagagagcaataccaaatcagcacctagcgtctgagctatcgccgttgctgcttgatcggcattcacattcatcagctcccctttatccgttaccccaatcgagctgataatgggcatataacccgcatccaataacgttttcagcaacttagcatcgcccggcatcgcttttcccacatgccccaactcttcactcagttgggaaaccgtgaccacattaccatctcctaaatataatccaactgatgcaagttgatatttagtcgcccacgacaacaaggtcttattggcgataccagccaatgcgccggtgataatcccaatctgatcagcgggtgttactcgtaatccttgttccttcactatcggtagctgcaacttctccatcagctcatccaccagatatccccccccatgaacaacaaccaactggcgttcatgtgtttgccgatattcctgcaatgcagtaaacacacgttccaatgcttcttcattgtccagtaacacgccacctaactttatgactaaaggttccatctgctctactccttcacgtcaataattaaagtaatgcctgagtttcttcaaacccaaaacgtatattcatacactgaactgcctgagctgccgcgcccttcaaaagattatcctcagtacctacaacaatcagatggtcaccctgtacaacaaaaccaatatcacagaacggtaacccaacaacggatttcaatgctggtactcctttgctgtaaagccttaccaatggcttatctttgtatgcttgacgatacacctcatctatctgttctgcggtaacacccggcttcaacttacaggtaattgtggcaagaataccccgggcgaaattgccaagatgtggagtaaaaaccactctggttcccagatgttcctcaatctccggttgatgacgatgggtaaatattccataaggttgcaaactgatttcgcagaaactgttggtcatactggctttccggcctgctccacttacaccactagtcgcattaatcaccggccaatagctgatatccagcaaactattttccaacagcggtttcaggcagagttgagaaactgttgggtaacatcccggtacagcaactaattgggcctgtttgatgttttcagcctgccattcggcaagtccatatactgcttgtgctaaccattcagtatgcttatgtttgaatccgtagtattgttgataaatctgagcattttgtacgcggtaggcaccggagagatcaaatacagtgcaacctgctgccagaaatagcggcgcaatgtcatgactaacttcatgggcggtggcaaggaaaaccacatcaatccctttagcagcattaataatatcagtcagcggttgcagcggtagatcaacaatgcctttatactgtggatgtaaatctgagaagcatttatctgcatcaacgctctgagcagaaaccatgagcctaatcagattcatatgcggatgacgatgcagatatgctgccagttctgctccggtgtaaccacttgcaccaacaaccagcgtattcaacataggatatcgttaccttgtgctcagtatttaaacgggataatgtatttttattcaaaaaaaatgcatgaatattgatactatcatgaataaaggctgtcaacagtgaatattaaattacctccatttattgagctatttcggcaattaatcgcgactccatctatcagtgccaccgatatcagtattgaccaaagtaacgagtctctcatcaacctactggcaagttggttgaaagaaattggtttcgaaattgagatacagcccgtccccgaaaccctcggaaaatacaatctactagctacattgggacgtggcccaggtggattactattgtgtggacacactgataccgtacccttcgacgaaggtctctggacgaaagatcctttcaccctgacagagcgcgataacaaactgtacggtttaggtacagcagacatgaaaggctttttcgcctttattattgatgcgttgcgggacattgatgtcagcaaaataacccgtccgctgtacattctggcaaccgcagatgaagagacgacaatggcgggagcccgctattttgccgcaagtaccactatccgcccagatttcgctattattggtgaacccacttcattgcatcctatctgtgcacacaaaggacatttatcaaacgctatccgcattgttggccaatccgggcactccagtgatccagatcgtggtataaatgccattgacttgatgcacgaatctattggtcacctgattgaactacgcaatacattaaaagagcattacaacaacccggcgtttaccattccatacccaaccatgaacttcggctatattcatggaggtgacgcagtaaaccgtatttgtgcccattgtgaattacatatggatattcgcccattaccgggactaacgctacaggatctgaacggactgctaaatgaagcgctagaaccaatgaagcaacgttggcctggccgcttaactatcgatgaattacattcccctattcccggttatgaatgtccaaccgatcacaaaatggttgacgtgattgaaaaactgctagggcgcaaagctgaaacggtcaattactgtaccgaagcacccttcattcagaaagtatgcccaactttagtccttggcccgggctctattgaacaagcacatcaaccggatgagttcattgatatgtcatttattggacctaccagaaagataatttcccagttaatagatcatttttgtctaagcaataattaatcgttttactcgtcccccaaaagtcagggggactcaagcatcataacaatcaacaaaagtactcctcccaagcattctgatacataagcaatacttatagagtatgacctgccattaaattttagaaatttcgcccaaactgattattttctgatatgaatatgagggcttagggtcaatgcaacactgtggcgccacaaaaaataacttcccgccacttaaataaaatttttctacagaaacagaatcaacattctgccagcaataaaggctaagagtcacatgaaccaacaatattctgcaatgcgtagtaatgtcagcatgctaggtaagctgctcggagacacgatcaaagaagctttaggagaagatattctcgataaagttgagactatccgcaaattatccaaatcatcccgcgcaggtaatgaagcacaccgccagcagctattatctacattgcaaaacctatctaataatgaactgttaccagttgcccgtgctttcaatcaatttctcaacctgacaaacgtcgcagaacaatatcacagtatctccccgcatggtgaagctgccagcaaccccgttgcgttagcgaaattattcactcgcttaaaagaaaaaaatttcaataatggcgatctgaaaaaagcggtaaatgaactgtctattgaactggttctcaccgctcacccaactgaaatcgctcgtcgtacattgatccataaactggtagccgttaacacctgtctatcgcaactcgatcacgatgatctagcggattatgagcgtaacaacattatgcgccgtctgcgccagttagttgcccagtcatggcataccgatgaaatccgcaaaatccgtcctaccccaattgatgaagcgaaatgggggtttgctatggtggaaaacagcttgtgggagggtgtaccagcattcctgcgtgaattcaatgaacaactggaagagtcaattgattacagcctgccagttgaagcggtacctgtccgctttacttcttggatgggcggcgaccgggacggtaacccgaatgtcaccgctgaagtcactcgtcatgtattactgcttagccgctggaaagcagccgatctattcctaaaagatattcaggttctggtttctgagctctccatgtctgaatgcacaccagaagttcgtaaactagctgggggtgatgaaattctggaaccttaccgagaaattgctaaaaaattgcggacacaactcagcaatacattgacctatttggagaagcaactgaaaggagagcaagttctgccaccaactgatttgctggtggataacgaacagctttggcaaccactttacgcctgttatcagtcactaaaaacctgcgggatggaaatcattgccaacggtcaattattagatatcttacgccgtatccgttgtttcggcttatcgctggtacgcatcgatgtacgtcaagaaagcactcgccatacaactgccatttctgaactgacgcaatacctggaattaggtgactacgccagttggtcagaagaagaaaaacaggctttcctactgtatgaattacactccaaacgtccattgattccacacaactggcagccgagcgctgaaacgcaagaagttttcgcaacctgtaaagtgattgccgagtcaccgcaagacgctatcgccgcttacgttatctcaatggctaaagcaccttctgacgtattagcagttcacttgctactgaaagaagccggttgtccgttcactttacccgttgccccattgttcgaaacccttgatgacctgaataatgctgaaaatatcattcagcaattaatgaatattcaatggtatcgcgaactgattcatgacaaacagatggtgatgattggttattctgactcagcaaaagatgccggagtgatggctgcggcatgggcacaataccgagcacaggatgccttgatcaatgtttgtgaaaaagagggtattacgctgaccttattccatggtcgcggcggtactatcggccgtggcggggcgccagcacatgcagcgctgctttcccaaccaccgggaagcctgaaaggtggcctacgtgtgaccgagcaaggcgaaatgatccgctttaaattcggtctgccacaggtcactatcagtagcttagccttgtatgccagtgcgattctggaagcaaacctcctaccaccaccggaacctaaaccagaatggcatcaggtgatggataccctatctgatgtttcctgtaagatgtatcgcgattatgtgcgtgaacagcccgattttgtaccttatttccgcgcggcaacaccagaacaggaattagccaaactgcctttaggttctcgcccagccaaacgtcatccggcgggtggtgtggaaagtttacgcgctatcccgtggattttcgcctggacacaaaatcgtctaatgttaccagcctggttaggtgcaggtgccgcgctacaacaagttgtaaatgatgggaaacaggatgtactagcagaaatgtgccgtgattggccttttttcaccactcggattggtatgttggaaatggtcttcgccaaagctgatttgtggttggcagaatattatgatcatcgtctggtagataagaacttatggccgctaggtcagaaactgcgcaagcaactctccgcggatattaagacggtattagccatttccaaagatgaacacctaatggcagatttaccgtggattgcagaatcaatcgccctgcgtaatgtttacactgatccattaaacgtcctacaggtagaactattactccgttcccgtcaacagcaatattctgatccacaggttgaacaagcgttgatggtcaccattgccggtatcgcagcaggaatgcgaaatacaggttagtcgcagtcagacaggagacaatctccgcacgacggtagtaacactattgagcacagtaccggtatcttttttctccagacaaccccgtacaacatgtgctcaatagacaacgaaaaagaagccatttttcaccagacgaagcctaatttaagaaaaatcccttatcacttatccaaccctttttccgcagtaaaataagcacggaagcaataacccccgcaaaaatttcgatcattacataaataaaatttaataatgtgattttctctcacttccctagaattgtgcttttccatttctaagaggattcagtcgtgaagaaaaataaacttgccatattgctatctcttgcttccttgtttggcgttaatgcctatgcccaaacagagcaaccgaaggaggtccctactgctcaaaatgccctggcagctcaacctcagctactgcctaaccctgagagtcctattcgggctgaagaagataaaaagctcgacattaaatctggggtagcttacgcccctgcacctccgctaaccaatatgtgggtctatgccgttggctcaacgaattgcggatgggaatacacttccaacttgccggtgacaaactgcaatcatggaggacagcagctccgcgccgccgttctggaagttggctacggctataactcctttgcttggatgaacggcggcgcactgccatactcgctgtactcttctacacctgtttgcatcacaaacgggtactacaattggccatgtgctgcgggccaaattgtggttggtttccttaaggaatacagcctcgatggctaccagaacggtatcttcagctaccagaacacttccgctaattggcctcgaaataccatgtcaacgcagattagcattctttgatctactgctgaaacccgcttaagagtctgtaaagggcgggaaaccgcccttgttcatttttacgaatagatatcgacgccgatggtttagcctcgtaattaagtaattatattaaattaacttaaaagtttacttctgtgaatttttcacaaattatttccgttaggctccctctgtagaagtgcctgtacccagtaataaagtcattaatcaacgaatgcacaaaataatatcgctcgtggcttacaataatacacctgattaatctcttaaagcttcttaaggtttttcgcctaaactttatgccacgaactcccttgaatacttaacggcggccattcttggctttcagtgataggtgccgtagccgtaaggtccctagcttgctgtaacatccgctcgaccaagttggtcaacagctcagcatccagcctctccaaccattcacggctccagagcagagtctctccctcaccactacggctcagttgcaatgatggccaatcggccaatgtagccaacgaacaaggttcgacatcacctagtggaataaacaaagttaccaactcatcgcgttggcggatatgcaaactaaaagggccgagaggtagatcgagcccttccgcatgcagagattcttcggtctgcccaaggcgtcggcacagttccgataataaggcattaaacatggttactctttatggttgtcaaacacagattcagtcggcggccacaggttagcgatcggtggattactcggcgtgccttgcaacctaccacctatggtcgcagcccaaggatcgatgacgtgtgcttgcttaccccaagtttcgggtttgctgagttcactgttgggatcgcgaccgaccactacaaagcagtgggtctggctatgccccttggcaccacgatgagcgactacctcaatgcgctgctggttatcttgattgtgcttcatcagctcggctgccgcggagtaggcaaaagtcgtgcagcaaccagcttgggcttgagcgacacaggcggcaatagatttcagttggttaagactgacgtttcctcgtttagcggcaatagccgccatattggacatatcattggcctgtttgttagcagccttgcgactctgactgcccccaaatgaatccaatctctcttcaacctgccgacgatgagagctgtgctttccgacgaatgtaagtccatcagtacatgcataagtttccatcttctgtaaggctggcatagcctgctttaacatggcctgagggctagtcgtcgtcacctttggctggagggtacgcaccacagcgccttgttctgccagagcctgtttaagctcggcaaggcgggtactacgagccgccacctctttagggtggtggctctcccaatgctggatagcatcctgcacccgttgggcctgcgcactgttgggagcactctgcaactggcgcaattcggtgatcaaatgcttgagatccgagctctggaagtgcagagggccacgtcggacagactgttcgaacaagcggttaccctgttcaagtaggggagaagctgctgcgtgctgaggaacttgcgtttggctaagcagcgtatggccgctaatggatgaaattggcataactttttccaacataaattgaattaattaaggtcatcttagtatttttcctaccctacttatgtaaaaaagtgacccgatttttatctgttttaggtgtcagaagagaaggattatctggggataggtgcctgggattattgaagcataacagttcatactggacgaaggcttatggcggactttacttattaaaccaagataatctaacaatgacagtccaggattttcaggcattcacaaccgctttgaatgacgctttcactcccaatactgctttacaaaatgcaataaatgctgcgcgcaaggtgaaacgtgtttgaagagcaattccttgatccaagctaccatcaacacaaggctttcacttctggagtaaacgagcttgacgattaccttcaacgctttgccgtccaacaaagcaaaaatggaattacattatccagccaccgataattcggtactccatacttattaagcaaataagcaaataagcaaataagcaaataagcaaataagcaaataagcaaataagcaaataagcaaataagcaaataagcaaataagcaaataagcaaataagcaaataagcaaataagcaaataagcaaataagcaaataagcaaataagcaaataagtaaataagtaaataagtaaataagtaaataagtaaataagtaaataagtaaataagtaaataagtaaataagtaaataagtaaataagtaaataagtaaataagtaaataagtaaataagtaaataagtaaataagtaaataagtaaataagtaaataagtaaataagtaaataagtaaataagtaaataagtaaataagtaaataagtaaataagtaaataagtaaataagtaaataagtaaataagtaaataagtaaataagtaaataagtaaataagtaaataagtaaataagtaaataagtaaataagtaaataagtaaataagtaaataagtaaataagtaaataagtaaataagtaaataagtaaatatacccaagaaacttcaagatgcagtttttagcacctgaaaatggtcgttaattctagacatcagcgagtccgctatatccggtagcgttgtggtgaaaaatttgaagacgttgtctcgaaattcatgtttatccgcaaaataacggttatttcgaacctgttcattcatgaccttccataatcgctctattgggtttaaatttgggctatagggaggaaggtaatgtaactcaatattgctaacataagcccactccttaacaagatgagctttgttgtaacccgccccatccacaataagatgaattttttgatgatagtcaggataagactttcttatttcattgaaaaaacagcaaatattgtagtcattgatggtttgatattcctggaacaccgtacgaccaatggcattcaggttgagcgcgcccaatatattcaggcgagtccggcttcctgttgttttgactgtttttttctcgccttttcgcatccagccataaccgagtttggtgccttgagtcgggtgaacagcatcaagaaaaaggatgggttcgtctttcgctgtgactttaagattctcataatattcaataaattgtcgctgtttttctgcgtcgaatttatgagggacgccacaaggttttttataagaaaaaccctgacggtgtagccatttattcatgccgggaatgctaaaggtaatattccagagctgagcaacataggccacgatttcatgggtgtgatggaaaagatgttgagataagtgattgattaaaaaatcagtttgttcttgagaaagcaaactatcagaccccccattatcagatttaagtttaccttgattaaggtaatcgctgatatgacggttaacggtcatttcatgaagacgcagggcctgagcgatcatcactgaactccagccttcagaggccagcaggaccgctttaatgcgatcacactccctcatatcacggcaggtgtatggagatgttcaagttcggctttttgttcatcggtaatgaatattttcatagcgaggataatgatctccatttcggataaaatcaagcatcttcaatgattacgggtataagtaaataagtaaataagtaaataagtaaataagtaaataagtaaataagtaaataagtaaataagtaaataagtaaataagtaaataagtaaataagtaaataagtaaataagtaaataagtaaataagtaaataagtaaataagtaaataagtaaataagtaaataagtaaatataaaccaaaaaccatataaattaaacttaaataatatagaaacctaaagttaatttaaaatttaccttctataaatatctcataaattgcttctataccctatggatttcaagatgcatcgcggcggcaagggaacgaatccccgggagcatagacaactatgtgaccggggtgagtgagtgcagccaacaaagaagcaacttgaaagataacgggtatatacccaagaaacttcaagatgcagtttttagcacctgaaaatggtcgttaattctagacatcagcgagtccgctatatccggtagcgttgtggtgaaaaatttgaatactttgtctcgaaattcatgttcatccgcgaaataacggttatttcgaacctgttcattcatgaccttccataatcgctctatcgggtttaaatttgggctgtatggcggaaggtaatgtcactcaatattgctaacataagcccactccttcacaagatgagctttgttgtaacccgccccatccacaataagatgaattttttgatggtagtcaggataagactttcttatttcattgaaaaaacggcaaatgctgtcatcattgatggtttgatattcttggaacaccgtacgaccaatggcattcaggttgagcgcgcccaatatattcaggcgagtccggcttcctgttgttttgactgtttttttctcaccttttcgcatccagccataactgatatggcggtcaacagtggtctgatggagtcgcaatgcctgggctatcatcatagaactctacccttcagaaaccagaaggatagcttttatattctgtctcgtacttgaccatcgcgagtggtgtcgtgaagacgttcaagtttgattttttgttctgatgtaataaatattttcatagcgaggataatgatctccatttcggataaaatcaagcatcttcaatgattacgggtatatattaaataatttaattaataacaaagttttatttattactatccttaccccccattcaactctataaaataaatatcaacaacatattaatcctaattatccaacgagataataaaaatttaagctttataaagatacaacagataaaaaaacatgctctcaccaaggcatatccttagtaagagccaaagattaaggacgaacacccaaagtatgacaaattgcatagctcagttctgcgcggtttaaggtataaaaatgaaaatccttcacaccttcgcggcttaaaatcttcaccatatccattgcgatagaagcaccaactaaatttgcgctttcaggatcatcatccagcccatcaaacattctggtcatccaacttggaatacgcacattagtcattacagcaaaacgtttaagctgacggaaattggataccggcaaaattcccggtacgatttccacatcaatcccggcagtcacacagcggtcacgaaaacgcaggtaactttccacatcgaagaagaattgggtaatagcacggttcgcacccgcatcaattttccgtttcaggctaatcagatcagcctgagaactttttgcttcaggatgaacttcagggtaagccgcaacggaaatatcaaaatccgcttctttcttaagtaactcaaccagatcagacccatacattttgggtttttcactgttttccggtaaatcaccccgtaaagccacaatatggcgaataccatttttccaataatcacgggcgatttcgcacaattcatcacggctggcatcaatacaggtaaggtgcggagccgcttcaaggccagtttgctcttttattcccttgattatgctatgggtacgatcacgctcgccagagttagcaccataagtaacggaaacaaatttaggcttgagggtgctcaggcggttaatggatttccacagggttttttccatctcggctgtgcgcggtggaaagaattcaaatgaaacacggatctgtccttccagttcagccagattctgattcagcgcctctcgctgatttgcgtgaaaaaaactcatatcctgcacctcgttaacaagcggaataatttcccatatcaataatttgccagttacttttatttacacatctaaacacctatacgtttagacgtccaaaataagatgaaggatcggcattttttagtcaacaacaaatttgagttaaatcggtgaggaatattcaccatgaatcggaaaaaaattcatcaatgaatctttggctttgtttatatcggcttagtggatcgatagctaaggcagcaatgaggaaagatgccctgctcaggacatcccccctctcgttacctcaaatatcaagcgaaggaaatcacatctgatttagtcagtggaggttcgaaagcttaaagcagttgtgacaaacggttaagatcagactgaatcgctccggctgtcacgtcacggcctgcccccggcccacggatcactaacggattatcacgataccaacggctctcaatcgcaaacacgttgtcgcacggtagcaaagacgccaatggatgatcaggacgtaccgcctcaacacccacctttgccttaccgttcgcattaaaacgggcaacataacgcagcaccatgcccatttcctgcgccgcggctaatcgctgtaccatctgctcattgatagcaccgctattatcaaagaattgttcaatagagcctgattctgcttctttcggcaccagtgactcaacacgcacttgctctggctcaatctcataccctgcttcacgggcaaggataatcaatttacgcatcacatcctgaccagacaaatcaatacgcggatcaggttctgtcaatccctgttgccacgcctgttcgactaaatcactaaatggtactgaaccatcaaattgcagaaacagccaagataatgtgccggagaaaatgccactaatggacaaaatggtatcaccactctcccgtaagtccctcacggtatgattgataggtaagccagcgccaactgttgcattgtaaaaccaatggcgacctgttttggcaaatgcatcacgaataaaacgataatcgcggctactggaagcacccgcaattttattggcactgataacatggaaaccatagctggcaaaatcgctgtaacatcgagcgagttcttcacttgccgtcacatccagaatcaccaaatcgtcataaggatgtgctcgcatccagagaaataattcatcaacatcatattctgtcgcttcgtcatcaaaaaaagctaacgctcgactagcatcaatcccttgatagtcgagtaaactccggcgactatccgccacaccggccagaacaaattcaaaatcactgcgagccgaaatgtttttctgctcacgagcgaataactccaaccaacgagagccaatatttcctttaccaaacaaaatcagaccaatccgcttttcagcacggaacaaactctgatgcaatccctgaatcacatgttcagtctgattagtccgcaacacagcgacaaggctgatgccatcctccgcatgccagataaattctaccggctgatctttaagttgctgataaaaacggtggcaatgtaatgggttcttgcatacaccagcgccaaccagtgccaccagcgccaaaccttctctaagggaaagtttccccggaagcgtagcatcttccagcacactcagtgcactattcaccacttcggaggtgtaacagagctgaatcaaattacagtctagatggatgcctgtcgccaatgggcgaatttgttctcgctttaacaacagatcaatatctttgtatgtctgtttaaaattatgatgagcggccacatgcaactcaatcaggcaaacatcatcgtgactagtaacaatttttgcgccagttccagaagccaaaactctttcaatacgcgttgatccttgctccggctggtaactgcaacgtaatagcaaatcaatatcactaaaggaaacaggctgtaaggtacgagcatgcaacacgggtgcggcaagacgagcaagctcgctggcttcatccaaacgtaatagtggtaacaaacaggcatctttgacttttctcggatcagcactgtaaacaccagcaacatcactccagatggttacccgcctcgcccctgccaaagccccaacctgagttgcagagtagtcactgccatttcgccccaataacactgtttctccatcatgattactggagataaaaccggtcaccaccagtcgtttatttagattttgtgttagcaactgatttagcaatggttgggaaagggtaacatcaatttgcggctgagccgcccgttccgcgcgtaaaaactggcgggcatccacccaagcgctaggaataccctgagcttcaagcacagccgacatcaaacgcgcagaccagatctctccgtgccccaccacttctgcataagtcacatcactaactggtttatccagtaatgcacttagcttttcaagatcggcaataaaacgcttcaccaactcttcagcaacagtctcaggtagcaaacctctaatcagatcctgctgataacggcgcagaacctgctgtacctgatgagcagaaatacggtcgctctggctaagtttaagccaattaattaactggttagtcgtgctgcctgccgcggataccaccattaaatcaccgggttggctgtaattagccataatcttggctacccgttgataacatttcacatccgcgagactacttccaccaaacttatgtaattggcggtcattttccgccgttgcaactaccagtgcacccatggtcactcctttactactgcctgaaatgcattttccaaatcagcgattaaatcctgactatcttcaatacccacagaaacacgcaatagtgaatccgtaatccccgcttccgcccttgcctgtgctgacattccagcgtgagtcatggtagccgtatgagaaattaaggtttccacaccgcccagtgattccgccaaagtaaataacttcaactcagacagaaaacggcgtatcgcctgttcaccaccatcgaactcaaagcttatcattgcgccaaaaccaaattgttgcttacaagcaatttcatgcccaggatgatctttcaaagcaggataaaaaagttttttcactaacggttgctgttgaagataattgacgagttccaatgcattcttttgctgtaacaggacccgtggcgataaagtgcgcatgccacgcaacagcaggtagctatcaaacgccgcaccggttacaccaatattattcgcccaccaagcgagctccgttgcaacctcttcatcctttgcaataatagctccggcaatcacatcagaatgtccattaagatatttagtacaggaatgcacaaccagatctgcccccaacgccaaaggcttctgtagtacaggactcaggaaagtgttatcaacaatgactgtcgcacctacctcatgggaaagctggcatatatgagcaatatcgacaatacgcaataaaggattactgggtgtttcaatcaataccaactttggttttttggacaagacttgctttaatgcctgttcatcactctgatcgacaaaggccacttcataagcaccgcgtttagtctggctgtcaaataaacggtaactgccaccataacagtcatgaggcgcaaccaacagatcgccaggttgaaggaaaaccatgcataacaggtgaatagctgacattccactgctggtcatgatagcacccgctcccccctccagctcagctaatgcctgttgcaccatatcgcggcccggattactcctgcgggaataatcatgtgtccttggctgattaaaatcagtaaagttatatgtgctggaaagatatataggcggaacaacacaaccatactgttcatcattattcagcccattgcgaactgctattgttgccggcttgcgtgtcatatcagctaccactatctgtcataaattaagtcagagaagaatatccgctaccaaagtagacgtcaacacatctagacatctaaacctctttacggttagattagacaatgggataattattcatcataactaatgctgctttatttattagtagccattagtttatcgcatatactataactgtataattgataaggaaatcacgataaaatggcaatatgtcacaacgaaagctggtgctgttatctggcttaattttatgattttacgactatttaaggtaccccatggctgagtggaacggtgaatatgtcagcccttatgctgaacatggcaaaaaaagcgaacaagtgaagaaaatcacagtctcaattccgttgaaagtgttgagaatcctcactgatgaacgcactcgtcgccaggtcaataacctgcgtcatgcaactaatagtgaattgttgtgtgaagcattcctgcatgcatttactgggcagccgctgcccgatgatgctgatttacgtaaagagcgtaatgatgaaatcccagaggaagccaaaaaaatcatgcgggaattaggtattgatcctgatacttgggaatattgatagtagcgaaaaaactcctgtaaaaattcaggggttttttatatggctacaatgcaaaacgcccgatgtaaaacaccgggcgttagtatcagttggcctgttattacagacaggcgcaattctgcaattacttgctgacacctggaacgttgaaacgtttcttgaagcgatcaacacgaccaccagtagcaacatcacgttgtttacccgtatagaatgggtggcattggccgcatacgtccaggttcagagcgtgaccagcggtagatctgacttgtattacactaccgcaagagcaggttgcagtaatttcttcatatttaggatgaataccttttttcatgggataacctctgttaaggccgtgtcgctatccagccctgttgccgccagacaccacacgtcgtgttgataaaatgagtttggtatcttccgtaccaaaggcggcggatcatacagaatatctacctatctcgcaatgaaatccgtatattgtctatgataccctatagccaatttttactttatttattgatcgttcggaataattttatggctgttgttcaggttgctttacctgtccctcttacccgctcttttgactatctgctacccgcagagagtcaattacccgttgtaggagtgcgggtaatcgtcccttttggcaaacgtaaagcgattggtatcgtcactgggataactgaccacagtgatattccgatagaacaactgaaaaccatagaatccattctcgatactcactccttatttccagaaaatctttggcaattattgctctgggcatccgactattaccattaccccatcggtgaagtcctgttccatgcattaccggtgctgcttcgtcagggaaaacccgcggaatcaactccactatggcaatggcaagtcacgccaacaggcgctgaattaccgctggcgcaactgaaacgctcgccaaaacagcagcaagtactggcaaccctgcgccgtaaagcaatatatcgccatcagattacagaactggaactgagcgaaagtgctttccaatcgctcaaaaagaagtcacttatcggtttataccctgtgcaacctgaatctgagaactggcaaaatcacttccaaatcaccggcgaacgcctgaaattgaataccgaacaagccacagcagttggtgctatccgtgcagaagaccagcaattctctccctggttactggcgggcatcaccggatcaggtaaaacagaagtttatctcagtgtgttggaaaatattctggaacaaggtaaacaagcgctgatacttgtaccggaaattggcctgacaccacagaccatccgtcgcttccgtgaacgtttcaacgcaccggttgatgttcttcattcagccctgaatgacagtgaacgtctcgctgtatggctacgagcgcgacaaggtgagaacgcaattgtcatcggtacacgctcagccctatttacccctttcgcctgccttggcattatcattattgatgaagaacatgacagctcttataagcaacaggagggctggcgttatcatgcccgcgatttagcggtattcagagcaaaaaaagagaatatcccagtgataatgggctctgcgactccagcactggaaacactttacaatgtgcaacaaggcaaataccgcccgctaacattgtccaaacgggcaggttatgctcagccagcgactcagcatctgttggacttaaaaggcttaccactcaaaatcgggttatctcaaccactaataaaacgtattgaagaacatctacaagccaataatcaggtcatacttttccttaaccgccgcggttactcacctgccctactctgccatgaatgtggctggattgcagaatgccaacgctgtgaccattattacacgctgcatcaataccatcgccagttacgttgccatcattgtgatagcctgcgccccgttccccgtcagtgcccgcaatgcggttctactcatcttcaacctgttggccttggcacagaacagcttgaagacggtatttcagccctattccctaatgtacccgttacccgcattgacagggataccaccagccgcaaaggaacactagaacaacaactggctgacattcatgccggaaatgcccgtatactgattggcacccaaatgctggcaaaaggtcaccattttcctgatgtcacactggtcgcgttactcgatgttgatggtgccttgttttcagcagattttcgggcagcagaacgtttcgcacaactttatacacaggtttctggtcgggctggtcgggctggtaaacgaggagaagtggttcttcagactcatcatcctgaccatccattactgcaaattttgctcaataaaggctacgatgctttcgctattcaagctatggatgaacgcaaaagtgtatttttgccgccatttaccagccatattatcttgcggtcagaagatcacgataatcagcaagcacctgcttttttacaacaactacgcctactttttgaacaccaccctttgcgagatgataacttatggatcatgggcccggttcctgcattacagtcaaaaagaagtggtcgttatcgttggcaactattaattcaacatccatccagaactgttttacaaaaaatcatggcactggtttatccacagataacagccttaccgcaaacccgaaaagtgaaatggaatatcgatgttgatccaacagacagttagtaattaatcgcctctattttaaaacacataacctgagcagattaaacatactcttatttactatttaaaaaatcacacccgacaatccgtaatcaatgaaaaattactcactaatttgcgagccatatcgaataaatgatttatatcacacttttttacaaactaaggaataaatgaatttgccaaactgtttagaatgatctcttaataacattgtcataaccttaaaccgcatgtcgttactttccttaaagtcactgacggtttcccggcaaccagaaaatgacaatcatttaactaatcagtcaggaaatgaggagtgagttttggagcagaaaaagaatggcacctccgcaacaatgaaagatgtcgctgaagtggctggcgtttctaccgcaacagtatcgagaacactcatgaatccagaaaaggtttcttcccagacccgacaaaaagtggaacaagctgtactggctgtgggttattatccaaataatttatcccgtaatcttaaacgcggtgagtcaaaaactattttagtgatagtgccaaatatcagcgatccctttttcactgatgtgatttgcggcattgaggagacagcggaacaacatggctatctggttttaatcggtgattgccaacatcagcaaaaacaggaacacgcgtttctcaacctgattgccaccaaacaaattgatggtctgttactactgggttcgaatatcccgtttgatgccagcaaagaagaacaaaaaaacctgccaccaatggtaatggcaaacgaattttcaccagagctagagctgccgactattcacattgataacctgaccgcggcattcaatgcgactcattatctacaaacattggggcataaacgcattgcctgcctctccggcccggaaaatataccgatttgccgctatcgccgtcagggatatatccaagcattgcgtcgctctggtgggacaattcgtgaagattatattgtccaaggtaactttacccatgaaagcggggcaaagctgactgaacagttgctctctctgctggatcctcctacagccatcttctgccacagcgatgtcatggcgattggcgtaatgtggcaggctaaaagaatgggcttaaaaataccggaagatttatcaatcattggttttgataacttaagtctcgccatgtacagcgatccgccgttgacaaccgttggacagcccagttatcaaattggtcacaaggccatgttactgttgctagatcaaatccagggtcacacaacttctggcgggtctcagttactggaatcggaattaattattcggcaaagcacctgttcgcctaaaagctagtcaaataaccgcaggttaagtaacatatcgtttattttcttttacttaaattactcagcgaattagacagtggcacaacgagattatgtgagtcgcgggcgttcaaacacccgccgtaaaaataccgataagaaaaaataccaagcccaagggctgccaaaagcaacgctggccgtcgcggtagccttagtcgctatctttattggtggcctttactttattacccacaataaacagaaaagcgaaccagaaatactgccaaaacattctcaacaaaacaatgggttaccgccaaaaccagaagaacgctggcgctatatcaaagaattggaaaatcgccccgttggcgttgagacaccacgtgatccctcatccggggggcaaatcaattcacaaacccagttgaccgccgagcaacggcagttacttgaacaaatgcaggcggatatgcgccaaccgacgacttcgctgccagaagtgccatacaatggcgttcaagtgccgcgttcacaagtaatcatcaagccatcagcggagacacaaaaaccgctggaagcaagaccacaaccccagcctcaacaaacgttaccacaacaaccaatgcagactcagccagttcagccacaaactctaccaccggctgaaaccagtaaacctaagcccgtagaaaaggcacagcgtatgattttacaatgtggttcattccgcaatatggatcaagctgaatcagtacgtgccaatctggcatttgcgggtattgaaagccagatcacaacgggagacggctggcatcgtgttgttcttggtccctacagtaaaaacaccgcagaaaaaatgcgggaacgtctgaaaggcgctggcgtatcaggttgcattctccgtgttacagggggttgaaaaatgataattctcccccatctatactgctaacaccgtgcacacggtattttcgatagccgtataccctgtcgaaagtaccgtgcgtcacatttatctatttttgtaaccaagggcttactcgtgactacaatcgtaagtgttcgccgtaatggccaagtcgtaatcggtggtgatggacaggcaacgatgggtaataccgtcatgaaaggcaatgtccgtaaagttcgccgcctctataatgacaaagtaatcgcgggttttgccggcggtacagcagacgcttttactctgtttgaactgtttgaacgtaaacttgaaatgcaccaagggcatctgaccaaagcagcggttgaacttgctaaagactggcgcactgatcgcatgttacgcaaactggaagctctgctggcagtcgcagatgaaaatacctccctaatcattacaggtaacggcgatgtcattcagccagaaaatgacctaattgccattggttccggtggcccattcgcccaatctgccgcacgggcaatgctggagaataccgatctcggcgccagacaaattgcagagaaagcgttaaccattgccggtgatatctgcatttataccaaccataatcacaacttcgaagaacttccttcaaaagcgtaagggtagatagtatgtctgaaatgactccacgcgaaattgtcagcgaacttgacaaacacattattggtcaggataaagcgaaacgcgctgtagctatcgcactccgtaaccgctggcgtcgtatgcagctagatgaaacgctgcgctacgaagtaacgcctaaaaatatcctaatgattggcccgactggggtaggtaaaaccgaaatcgcccgtcgcctggcaaaactggcaaatgcgccgtttatcaaagtcgaagcgaccaaattcaccgaagttggctatgttggtaaagaagtcgactctatcatccgtgatctgaccgatgccgcggttaaaatggtccgcctgcaatccatcgaacaaaaccgttatcgagcagaagaactggcagaagagcgtattctggatgtcttgatcccaccagcaaaaaataactggggacaaacggagacacaagttgagccatcagccgcacgccaggcattccgtaagaaactacgtgaaggtcaacttgatgataaagaaatcgaaattgatgttgctaccacacctgtgggcgtcgagatcatggcacctccgggtatggaagagatgacaaatcagttgcaatctatgttccagaaccttgccggtcagaaacacaaatctcgtaagctaaaaatcaaagatgctttcaagctactgatcgaagaagaagcctctaaactggttaacccggaagaattaaaacaacaggctattgattccgttgaacaacacggcattgtcttcattgatgaaatcgacaaaatctgcaaacgaggtcagacttcaggccctgatgtttcccgtgaaggtgttcagcgtgacctgttaccattggtggaaggttgtacggtatccactaaacacggcatggtaaaaacagaccacatcctgtttatcgcctcaggtgcattccaggttgccagtccttccgatctgatccctgaattacaagggcgtctgccgatccgagtggagttacaggcactcactacaaaagattttgagcgtattctgactgaaccgagtgcatccctgacggaacagtacaaagcattgatggaaacggaaggtatgatcatcagtttcacggatgatggcattagcaaaattgcagaatccgcatggcaggtaaatgaatcaaccgaaaatatcggggcccgtcgcctacatactgtgcttgagcggctgatagaagatatctctttcgaagccagcgaacgtcgtggtcaatcagttgatattgatgccgactatgttaaaaagcatctagatgaattggttgcagatgaagatctgagccgctttatcctataatcggtatatacgatttctgatccgctataattaatgatgggaggcttgcctcccattcgttttttataagcctacaggagtaagtgaacgcagaaatgaactcatcaacttctatcagtcaaactcaagcatggctggaaagtttgcgtcctaaaacgctaccactcgcccttgctgccattattactggctcagcccttgctgcctggacagggcatttcaagctaccggttgccttactggctctattaacagcagccatattgcaaatcctgtccaatctcgccaatgattacggtgatgttatcaaaggcagtgatactgaaaagcgtatcgggccactacgtggtatgcaaaaaggcattattaccccctcacagatgaaaaaagcgctgaagattattgtcctgctaacttgcctgtctggtagcgccttgattgctgttgcctgtgaagaacctagcgatatattcggttttttggcacttggcctgctagcaattattgccgcaattacctatacagtcggtgcaaaaccttatggctatatgggacttggcgatatttcagtactgattttctttggctggttaagtgttgccggtacttattatcttcaagcaggtttttttgactcagttgtcatactcccggcgacagcctgtggtcttctctctgctgctgttttaaatatcaataacctgcgtgatattgaagatgacagacggcatggcaaaaacaccctagctgtccgtctcggccctaaaaaagcccgttattatcacggatgtttaataattacagcaatactctgcttggtattattcaccatacaaaacccgtctggctggtcaagctggttgttcctgctcgctctgccttggttgttcaaacatatgtggtatgtacttaatgaacccacaccagagggaatgcggccaatgctgggacagatggttaaggcggcattattgactaatattctattttcagttggtcttatttttaattagacagtatttgcgctgtttttccgaaggtgttgtaacttaatcattctgggtacctgttaacaatatcaatttaataattgatgattttgctaacattggcctgaaagggatatacttaccgttccataccttaaccagacgtaaatcctatgaaatatgatacttccgagctttgtgacatctatcaagaagaagtaaatgtggtagagcctatgttctccaattttggcgggcgtacttcatttggtggtcaaatcatcacggttaaatgctttgaagacaacgggctactttacgacctgcttgaagacaacggtcatggacgcattttactggtagatggtggtggttctgtacgccaagcattaattaacgctgagctggcacaactcgctgtgcaaaatggatgggagggcattgttgtttacggtgctgtacgtcaggttgaccaattagcagagttcgacctcggcattcaagctatagccgctattccggctggctgtcgtgatgaaggaaccggcgcaagcgatatccgggtgaattttggtggtgtcaccttcttctctggcgattatttgtatgccgataacaccggtatcattttgtctgaagaaccgttggaacttgatgacaacgaagaagatgagatcatctgatgatataaaactaagggcgatttttcagatcgcccttcttttgtctgctggaaatttcaattactgaacatcttccattttgcctaacaaggcacgcaaacgttcttgccatacttgttgctcttgttttaattgctcattttcatgagccagagactcacggccgctggttgcattctgaatttcctgagacaaagatcgatttttttcttttaattcttcaatttccatttgtagcagggtaatagtatcaatcgcctgctgaaccttggcttccagcttttcaaaaacttcaaatgacattctcggttcccccttgtaagcaattgtctgattgtatgtagccaaagcgcccctgtctagcaacatccccaacacatgaaaaataactaccaaataaaaagctcaatagtgtctcacactttaatttttagcaaaatagcggataaatgcggattcgctcattttgttgacacaacacacacatttcaatttcgctatttctcgtttccgcgcattaacgataaatttacataatccccttttcaatttctgaaaggtgacaataataattacgcctctaaaatcttctttgtaggatagaacatatgagccaaaccactagcacgacattaaccggacaatgtatctctgagtttcttggtaccgcactattggttttccttggagtaggctgtgttgccgcagcacgtattgccggcgcacaattaggcttatgggaaatcagtattatttggggtatgagcgttgcgttggctgtttatctcaccgcaggtgtttccggtgctcaccttaacccggcagtgacgattgccctatggttgtttgcccgctttgatggcaaaaaggttatccctttcattattgcccaaatgattggtggcttcatcgctgccgctctcatttacatgatgtactacagcgtattccttgattacgaacaggtacacaatatcgttcgtggtacgccagaaagcctgtttaccgcaggtgtattctctacttacccaatggcgtcactgtccatttctcaggcttttatgatagaagttatcattgccgccattctgctctgtttgattctgtcgctgactgacgatggcaatggtattccccgcggtcctctggccccgttactgattggtattgtgattgccgttatcggcggtgcatttggcccattaaccggtttcgcgctgaacccagcccgtgactttggtcccaaattaattgcttatctggccggttggggagatattgccctgacgggtgggcgtgaaatcccttactgtctggttactctgaccgcccccattatcggcggtattgtgggagcatttggctaccgcaaacttattggtcgcaatttaccatctgatgttcacaagactgaagatcagaagaaaaagaaagcctaaagtagagcattaccagaacaggttattatcatgacaacagaaaatatgattgagaaaaagtatattgtcgcccttgatcagggaaccaccagttcccgagcaataattcttgatcacgacgccaatattatctcaatttcccaaagagagtttacgcaaatttatcctaaaccgggttgggtagaacacgatccaatggaaatctgggcaacccaaagctcaacgctggtagaagtattggcgaaagcggatattagttctgatcagattgccggtattggtattaccaaccaacgtgaaacaacgattatttgggaaaaagagaccggtaaacctatctacaatgccatcgtttggcaatgtcgccgtaccgcggacgcgtgtactaaactaaaacaaaaagagggattggaagaatatattcgccagaatacagggctggtagtagacccttatttctccggcaccaaagtaaaatggatcttagataacgtcgcaggtgcccgtgaacgggctgaaaaaggtgagctcctattcggtactgtggatacttggctggtatggaaaatgactcaaggccgagtccacgttaccgatttcacaaacgcctcccgaacgatgctgttcaatattcacaatctggagtgggatcagcatattcttgatgaattacaaatccctcgttccctactgcctagcgttcattcatcttctgagatttatggtcagaccaacatcggcggtaaaggcggcactcggatccctatctcaggtatcgcaggtgatcaacaagctgctctatatggtcaactttgtgtccaaccgggtatggcgaaaaacacctacgggacaggctgtttcctgctgatgaacacgggtacagatgccgtacgctccaatcacggcctactgacaaccattgcctgtggtcctcgcggcgaagtgaactatgcgcttgaaggtgcggttttcgttggtggtgcctctattcagtggttgcgtgatgaactgaaacttattgcagatgcggctgactccgaatattttgccactaaagttaaaaatagtaacggcgtgtatgtggtccctgcttttaccggccttggtgccccctattgggacccctacgcccgagggtcaattttcggcctaacccgcggtaccaacagtaatcacatcattcgtgcgacgctggaatctatcgcctatcagacccgtgatgtactggatgctatgcaagctgatgcaggcacccggctgcaagcactacgggtagatggcggagccgttgccaataacttcctgatgcaattccaatcagatattcttggcacccgggtagaacgccctgtggtgcgtgaaagcacagcattgggcgcagcattcctcgcaggattggcagttggctactggaaagacctggatgaagtgaaaagtaaagccaccattgagaaagaattccgtccgggtattgaaaccaccgagcgtaattacaaatacaatggctggaaaaaagcagttgcccgtgcgcaggattgggaagataaaggctaacgcattctaatataaagaaagggtgaaattaccaccctttctttactatacccaatggatttcaagatgcatcgcgacggcaagggagcgaatctccgggagcatagataatgatgtgaccggggtgagtgagtgcagccaacaaagcaagatcaaaactgacgtaaagaacatcagcattcctgtaccaaagaaaaaaatagtgcacaattttatttttagaaaaaattacagtcaattacgccatatctggcaacaaatatgtacatataaaccaagcattaataaactaatggttaatttttctatgacacagaatcgataatggtatttatctctataggactaaaatagcgacgtaaaaacgaactgttcggagatttctttcgggataggagataagttccaatggcaaactgggttacaggaaaagttacacaagttattcactggacgaataccttattcagcatcaggatacatgcaccggttgaaaaatttactgcgggccagtttgcaaaactggcgatggaaatagatgatgaacgggtacaacgggcctactcttatgttaatgccccgatagataataatcttgaattctacttagtgacggttcctgaaggcaaactcagcccacaattagcagctctgcaaccgggtgatgatctcttagtaacagaacaagccgcaggcttttttattcttgatgaaatacctgattgtgaaacattatggatgctttcaacagggaccgccattggcccttatctgtcaatcctccagcaaggagatcatctggatagattcaaaaacatcgtattggtgcatgccgtcagactaacacaagatttaagctatctgcccttaatgcagcaattagttgaacgtctcaatggcaagttacgaattcagactatcgtcagccgtgaacaaaacctcggctcattgactggccgtatcccgacattgatcgagaatggcgaacttgagtccgctgtcggacttacgatgagcagtgacaacagccatattatgttatgtggtaaccctcaaatggtgaaagatacccagcaactgctaaaagagcagcgtggaatggcaaaacacttacgccgcaaaccggggcatatcaccagtgaacaatattggtaatttcaatcatctttgacagaaataaaatccactttctctgtcgcctcaccaaatcggtttggcccatccgtaccacggaatacaccgcaatcaagcaccatcattacaatgatcaatgtggggataaaacggccgatcccccattgccagaacggagccaggccaccccagtcaacagcaaccaacaaccctgccagtaataaaagcagcgaccaacctccccgcttatttcgatcatgcagacgcttaaccatcattgccgctacgggatacatcaccaagacaagtgcaaaaacagcatagtgcatggtcaaagaactcataccctgaatagtcaagataacaaacatcaaggccaggcaaacaccaatgccaatccagaattcacgccgcccaattcgtcctttgaatgaaaaaccccattgttgtaatgtcatctattcttttccaatcgtgtattctgttttccagcgcagtttaacctaagcgagcggcaacatgaaaatggacgttaataaatttctagccataatattagcggcaagcagtgtcggtttgccattggtagccaatgctgataaatccacaaccacagaacccacagtacaagcgacctatcttctgcctaatgccccctctttcgatgaaactatcccgcgatttcgcgaaaaatataatcgctgcaacccgacattgccactacgcgaatatcgggtaatcataagtaaaaacatttatccgccactgacacgagctgccagcaaaatcaatgaaaaactctattcttccgccgtacttgagcgaggaagcgaaaaaatcaaaagcctgcaactgacattactaccatcagaaaataccgctgaaactcagcaaaaccaaatgctggcagagcagtacatgaccgccctaatgcgccactttaacccaacgctttcacaggaacaaagcaaagagaatattgataacttactcataaacagcaaaaaatcgccattttacagccacaacatcggcgctattcgctatattgtagtaaatagtagtgaaaaaacgcttactttcgctattgaaccgattaagctatggttatttgaacccgataactaatcaaacttagcaataaaaaaaagctattgttggcaatgatcactatactgtggagcgccgaactaccgaatcaatcttaagaatgaatttcattcaactcactacttaaacattctctgattggaggaaaaaacatgcgacatccattagttatgggtaactggaaattgaatggcagcacccatatggttaacgaactcatcactggcctgcgtcaagaattaagcagtgttaccggctgtgacgtcgctatcgcgccaccagcgctttatctctctcaggctaaacaagcactggctggcagccgcattgctctaggtgcacaggacgttgacgttaacctgtctggtgcatttaccggtgaaacttccgccacaatgttgaaagacattggcgcagaatacattattatcggccactctgaacgccgtacttaccaccaagaaagtgacgaattcattgcgaaaaaatttgccattcttaaacaacaaggtctaatccctgttttgtgcatcggcgaaactgaacaggaaaatgaagccggccaaactgaaagtgtatgtgcaaggcaaattgatgcagttctgaacacattgggagtagcagccttccaaggtgcggtcatcgcttacgaacctgtttgggcaattggtacaggcaaatcagcaacaccggcacaagctcaagctgtgcataaattcatccgtgatcatattgcgcagaaagatgcagcaatcgcacaacaaatcattatccagtacggtggctctgtgaacgcagataatgccgctgagctattctctcagccagacattgacggtgcattagtcggcggtgcatctctaaaagctaacgctttcgctgttatcgtaaaagccgcagccgctgcgaaaaaagcctaattcatatttcaacgataattgaccgccgtacatctacggcggttactcatttttatcgctgaataatctcatcgaacacaccgccagtcgcaaaatgcactttttgagcttcaccccaaccgccgaatatcttatcgacagtaaataattccaacgcaggaaaagaagagcggtacttatcggcaaccactttatcacgtggtcgataatagtttttagccgctatctcctgcccaacgggtgagtaaaggtattgcagatattctgttgctaactcacggctatgacgtttatcaacaaccttatcaacaacagaaaccgtcggctcagccagaattgaaagactaggtgtcacaatttcaaatttatctttatcaagcgcattaatcgctaataatgcctcattctcccaggcaattaatacatcaccgatgccacgctcgacaaaagtgctggtcgctcctcttgcgccagaatcgagcacttcaacattctggtaaagggctttaacaaatgctttcgctttgtcctgttcctgattgttatgaatcaacccataaccccatgcagccagataattccagcgtgcaccgcccgatgtttttggattaggtgtcacaacagatactcctggacgaactaaatctgaccagtctttaatttgctttggattacctttccgcactaaaaaaacaatagttgaagtatagggagcagaattctctggcaaacgcttaatccatgctttcgctatccggccacgttccgcaatggcatccacatcataggccaaagccagtgtcaccacatccgcctcaaggccgttgataacagaagttgcctgtttacccgaaccaccatgagattgccggattatcactttatcccctgtcttctgctgccaataatcgctaaaagcccgattatactgctgatataactcacgggttggatcataggaaacattaagaagttgaagatcttttgcccagacgctgctattggtaatcaatagtaacgccaatgccacacgccatctgactttcatttgaatctctccacaagctgttttaactgttatgaaattcaaggctgacagaaagcgttatcactcagaaataattaaaagcatttatttatatgtgaaaggaatatctaaagataaattacagcctccaacgaggctgcaacagatttagatttgccagtattgacgtgatcaatacaactttttcgcggtttccaaccaatcctgtttaaacacacgtttcatattttgcactgcatcaatgatgtcatgatgaacaagtttctcgttctgaataccaacacaacgaccaccataaccttccaacagtaattgaatggaatatgcccccatacgggaagccagaatacgatcataggcaactggggaaccaccacgctgaacatggcctaagactgtggcacgggtttcatgatgcgtctctttttcgatatgtttcgcaagttcataaacatcacaaacatgttcggtaattgcaacgatggcgtggcgtttgcctttatcgatacccgctttaatttcagctacgagctcatcacaactaaatgagacttccggtaaaacaataaactcacaaccgcctgcaatagcggctgacaaagtgagatcaccacaataacgtcccattacttcaacaatggaaatacgtttgtgggaagtcgaggtatcacgcagacggtcaatcgcttcaaccacagtttccagcgcagtgaaatagccgatggtatagtcggtacccgccacatcattatcaatagtgcccggcaggccaatgcaggggaaacccgcttctgtcagttttttcgcgccaagataggaaccgtcaccgccgataacgaccagagcatcaagaccattttttctcatgttctcaatagcgacagtacgaaccttctcatccctgaactcagggaaacgggctgaacctagaaaagtaccaccacggttaatcatgtcggatacactaaaacggtcaagtttcttcatacggttttcatacaagccaagatagccatcataaataccgaaaacttccaacccttcggttaatcccgcacgaaccacaccacgaatagctgcattcatacccggcgcatcaccgccactcgttaagacaccgattcttttgatctcattgctcatgatgacctctgacttgtagatgtaattaattgcaaacccgctaacggcggactccgtatgcgatcactttgcctgagaaatctgcctttttaacctgttaccatccgacgtactgaaacaatcaagctgaattgattcaacttttcatataatacggtaaaaaccaagtctgtattaacaataagtcccttttttgagatcaagttagctaaaaaaccatttaatatccccgctcacactggacaaggggttacgttttagatcggtaatactcgccactgtatttgttaagatttgatatgccatacaccacctcatacaattatataattcaacattagatcatttaagagcacccttaaatgatcttttatttaatctttatgtataaaaataacgtgtcagatggaaaaagactggggcggcaaaacataacgaatcgatcctatctaacatgccaccatgaccttcaatcatttcaccgaaatctttaatgccactatcacgttttatcgccgacatacacaagccaccaataaagcccatcagcgtaatcgctaatgacatcaaacctgcctcccacggagaaaatggcgttacccaataaagtgacattcctaataacactgaaaccaaaatgccaccaacaaaaccttcaactgttttattcggactcaatttaggcacaataggatgtttaccaaataatttaccaaacacatattgcaagacatctgacatctgcaccacaatcattaaaaacaacaataattcgacattctccccttcataaccaggaatatctaacatcaataaagcgggggcatggctaatacagaatacagcaactaacattccccactgtattttagctgtccgttccagaaagttcgttgtatcccctgctaatgcaatacgagcaggtaaaaacaggaacacataaacaggaatgaaaatagaaaacacgccataccactcaataccaacggcaatgtattgcaatggcatgaaaataaagaaacaccagaacatcgcctcatggtcacttcgtcgtgttggtgtcaaagtgaaaaattcccgtaaagcgaaaaatgacatactcgcaaataataacactgaaccaattggcccaataatcaccgacaacacacaaataatacacatcccccaccagccacggatgcgggcattcagattatcgattgtcgcattactgttatccattgaatatttggaggagagtattgcaccaacaatactggcaataattaacggcacgaacattccccccaacaacaggattagtttattattaagcatagtcataatattaacgcctccaatgcctgacgagctctctgtaaaaagtcagctttttcctcttttgcacctaacttttccaaaggttgcccaaatgttgccgagcaaataacaggaacaacaagtgccgagccttttggcaaaaccttgtttaaattttccagataaactggaataagctcaatatcaggatatttcttcgctaaataatatagcccccctttaaacttattaatttgctccccactccctcgcgttccttccgggaacaaaattaaagattcgcctcgttttaatacatcctccattggtgtcagggtatttccctttaaacaatcttctcctttacgatcaataagcacagcccgaaaaactttattaataaaatatctgcgcagataagttttactccaataatcacgcgcagcaactggatgcacccgagaacgtaacacccgaggaaacccagcccaaataactaacccatccagatgactgctatgattagcataataaattcgggaaactaccgatggcttacacccaatccaacgaattctcactcctgttaacaaacggcaaagcccagacagaaacgaacccatacctttacttaccagtgtcacttcttgtggtttattcattacaagcatccttctcctgtaattcattcaatatgactctggttcgccgaatacatgtccagagacaacccaacgtgataacgactaataccgccaataaaagatactggctccataactgaggtaaaaaagcggcaacaattgaactaacggtaattaatgccatccgatgctgtttcgccatcggccccaggaaacgctgaggtaaaccacaagtcccacctaacaagcgaatataagcagtcaaaacagcgaataatgcagcaatacagccaagagaaatcgcaaatggaaaaagtgttaaaccataccccaccccaatcagaataaaagaatcagcaatacgatcaggaagatcattaaaaacagtaccggcagccgtcttcaatcccccttcaacagcaaccatgccatccaataaattacacattagtcggccttgaataagcaaggcaccaataatcaataaaattgaagtcaaccaaaaagactcgactaaaaaacacacggcaaaacacacgccagcgaatacagcaaaaacaacgctggcaacagatatgccatttggtgtcgcccctttatattgcaaccacttagccatcttactggcccacacggcattgcgtgttttgatcggacgccgatcttttacctcgttaccagacataccttttccctttttgagcacaaatgaacaatcaaatctacttaagttaaatgaaataagataaacaggattggttagaataacaacaataaaaaaacctgccgataggaggagcgagaaacggaggtgacatcaatctctccttgttgattaatttgaaataacagaatttatttcaacaagtgcccactcattgaccactagaaggcagagggaaagacagagatagcgttcgttttcacaacacaacactatgtaataaaaggatttatttaaaggaatgctcaactttttgggtatagttcaattgggacttatcaattcagagcgtcataaaaaatcttaatcaaaattaactatcactacaacaagtacactaatctcccgatcttacaactgcctttaaattgcattacatacaaaattacctcttgatctatattaccctaaaggctaatatttgctgtgaaatgggagattaaccatgatagaaatttttttccatccatccgcaaactctgaaatagatggattatcagaagaattacaaggtaagttttatgcgttgatagacactttatctgataaaccgcatgatttacgagaaccacactgcaaactacttgaaaaaagaaacaaaatttttgaattaagaacaagtaacggagacaacatagcacggggtacatggtgctacggggaagaaaagaacactatttacatgcttagtttctttattaaaaaatcacaaaaaacagacgtaagagacaaacaaacagctataaatagaaaaaaagacatgattaaaatgcataaaagagaggatctaagatgagtaaagtaatgactttccgcgaaaaattggaagcaaagaaaagagagaaaaaccctgaatttatcaaagcatttgaagaaacaaaacagactttagacctacatattcaactgcaagaggaaatgagatcatggagagaacaggcggggttaacaagtgcacaagtagccgaaagaatgggagttaagcctcccacaatttcaagacttgaaaaaaacgcagatagggcaagcattgagagaattttaaaatatgctagcgtttgtggaataaaagaaatcaaacttactattgcatcgtaaaaagccacctctaaatgaggtaatgctgctcagttaaggtttgaactactacatgggtgaacagcttgaccggttcgtacagcacatgattgaaagtggccgttatggaaatgccagtgaagttatacgttcggcgctgcgtttgctggagcaacaagaagcttacgccctttgcgggagaaattttttaacaaagccctcatggggaataatcatacaaaatacgcggtctgatgccgagctgaccttgtgccgcaagcagcgcctgcattcccgtttttttgccctcgtcggtaacgccgccaatgatattcgacgtggtttctgcttcagttttcccctgagccacacgcacaacaacagtcacgggtttggactggtcggcaatcgctcgcagagcatggaacaatgtgcccgttttaccggccttactactggcagtcagaacatcggttaacaagactggcatgtttaaggaaaaaggtttggtgtcagcatcatccgctgtgcagactagcccgacaatagcggtgctgacagtggtaatagtgcgcgtgccctcgttgatttcctgcacgcagacaccatgatgataatcttgtgccatagcgaaagactcccgtaatgatgatttcgccatggtgatcactgtgacaataaaattcagttgattgggtaagtatcagggatagcacaaagtggaggatataaaaagagtattagagatgttcatccttgagtaatcaaaagactcatgccgcgcacgataaatgaagcgacaattcttgtaactttgcacagaattgtataaaattttatacaatcaggtaaggaaggaaaactatgacgaaaatcaggagcggtacagggaaagaaattgcctggattggctcttcttattgaagatttgttagccttccctacagatgcacgtaaagacgcaggctatcagcttcatagaatacagcatggaatagatcctgaagattggaaacccttttctgacatcggttctggcgtaaaagaaatacggctaagagacaatacaggtatttatcgtattatgtatgttgctaaattcgatgaagctatttatgtattgcatagttttcagaaaaaaactcaacaaacgagtaaacatgataaggatatcgctaaagtacgatacaacgcagttatccagcaacggagaaatatcaaatgaccactaaaattgacactgaaattcgtagggtaactccagccggacataatatattttctgagttaggttttactgagcaagaggctcagcaacttcatgcaacctctttacgagaaatagaaaatacattgcaaatcaaagaacagctaatggaagaaattactttatggattgcagataaaaaaatgaaacaaactgaagtagcaacggtgttgcacatttctcgtccaagagtatctgacgttgtgaataaaaaggtaaataaattcaccattgacgcattagttaatatgttaacccgtataggaaaacctgttcaaattacggtaggctaagacccacatataaaggtgttagagcaattcaaaacaagaggcacctagaatgggtgcctcttggcatttcacaagattcaacctttcggttcaatacctcgttcccgtagttctttacgcaaaatccgcttgatccatgttacaagagaaaaatcaccgtctctacacgcttgttcttctaattgctcgcgaaatttttctggaaggcgcatctgatattgtggcgagcatccacactcaaaaactttcgtatactttctaaccccttcatacttttttatgtttttgttttacaaagaaatacgttgtaaatgactgaaaaaaagttctaaaaagggcctgaaagacaggatggtgtttgcttttaaagcataacatattgtaataaaaggatttattaaaataagtgtccagaccttgaccacatcgacataagccccgattttttcggggcttcagaacgttggtaatgcggcctgatttactgcatacttgatgtattaactattaatacattggtgagatatgagaaaaattactactgtcagtatgggtgaacagcttgaccggttcgtacagcacatgattgaaagtggccgttatggaaatgccagtgaagttatacgttcggcgctgcgtttgctggagcaacaagaagcttacgatgagattgtacgcaaggcggttattactggcttggaaagtggggaaagctcgctgaccctacgggatatagcggaacaacggaaacacagacatcatgtataagctcacggatcaggctgctgaagattttgctgggatttatgattatacatttttgcagttcggtgaaactcaggctgaccattatacggaggcactggaagcattttttgacacactagctgagatgccacatatagggagggaatacccatctgtcccaggtgtcatgctggttgagtttcaccgtcacacggttttctatactatccgggataccgatattctgattgcgagtatccttcatcaacagatgaatcacccccgttattttcaacgaagtttgtcagcgatctgaaatcccctcatactatgtatgaggggttataagccctttgcgggagaaatttttaacaaagccctcacggggaataatcatactctagttgataaaatccaaaagtcaactttcagatttaccgataagatttgatgcgccgatgattttgattgttgcacgttgtatcttttcaatatcttcacacgtcaaatattgctgaaatcgttcatagctaaaataacgtgctcaagcaccaaaaatattcgtttttagtaactgatattcatgtcacttcaccttgccaaaaaatttatacccgtcatctttcaagctgcctctttgttggctgcactcactcaccccggtcacatagttatctatgctcccggggattcgctcccttgccgtcgcgatgcaacttgaaatccatagggtatatacacaagccatctttgtataaatcaaccagatcaaataaaacatatagcaactaaatctttaattatcattaaaataggtagctgccgggtagttacgataactgccaacttttctctacaccaaccataagaacaaaaacattcgtttgtacaattccattcttctaaccgtatagatccgtggtttatccattgcaaaaagctattgccaaatctcctcaaatggcaatgagttaaacaaccattgcctgcaaaattttttgagatttggggttaaggcccttggttatttattgttggcgttgcatggcgtgtaacaacggcgtatagtgttacgcatggtgtaacaaggacgggagcaaatgattaagtcatttaaacacaaagagctgaaacaactttttgaaaaaggagttatttcaggcatcccggcgcaggatgctgtccgaatcaatgaccgcttacaggccatcgacacggctagcatgattagaagatttaaatattcatgcctacaagttacaccccttgaaaggggatcgggctgacatatggtcaattactgtcagagctaactggcgcatcacattcgaatttaaaaatggtgatgcttacattttaaacctagaggattatcactaatgatacaggctattgtttctcatccgggcgttatggtatccaacatgctggaggatttaggggttggcgttcgccagtttgctaaaaacatcggcgtaactccagcgacggtttcccgctttctttcgggcaaaacggcgttaaccccggcacttgccatccgactgtctgctgcgctggggagtaatccggcgttttggatgcgcttacagacgaactacgacttgcgccaactggaagatgagatcgacacgtcagggatcattctatacggcgacaatgacaaaacgccgcagctcacttcaaagcattaagcaatagtaataaagctaacaaatgtggaggccagtgtagcccgcatttgttggcagttatcgcagctacccgataaccccaaatttgaaaaatacacactctggctaatgacgggaaagattgccccagaatctgggcaaattagcccaactctctcccctgatggtgtagacatcaaaacgtcacaccactcagaccggaaaactggctaacgctacatgaggaattaaaagctgctatgtctcagcacgggtgccagatggggagaagcatcaaccttaaaaagcgcccaagtaaagagttaccgagtgacatttttaaaaaccaaaaatggcaagcaaagggctattccgatatcaaaagagttagaaaaggaaatcaaacagaagtcaggggaattatttgacgttgattacgaaagctttcgtacaaagttaaaatcaataaaacctgatttaccagaaggacaagcaacgcacgttctacgccacacattcgcgagtcattttgtgatgaaaggtggaaacattgttgcactgcaacaaatactcggtcatgccaatatacaacaaactatggcgtatgctcatctggcacccgactatttgcaatttgcaatcatgttaaacccactgaatggcggcatggaaatttagcaatcataagcaaccgtagcactcaaaagtgtccacacttgaaaatttccacgctacttacagttgcttgtaaaaattttatctggttgattttaaagtgaattaatcttagccagataaaaaaatcccgccataaggcgggggaaaagacaaggatggtgtctacatacaactcataacatattgaaaataaatatactttttctatcatcgtccacccaatgtccatattgacgacaaagccccttaaacggggctttcaccacaaattactttcataagaaatacttaattaaaagttaaccatcaccttaacagatctatcaatcccacatactgtaggctttttcatttatcaaggccgaacaggaaagtatcctcgataagtcactattgcagtatctgttatcgctggggtggttgagtagacctcaaaaccccaaacagcaataaaaacaagttttgtcactgtccgacgttatctattttattgaagttctcgctcaagcagctgaactatgaattggttctttgagactgcgtgtgatattgccgccgcagtcaagcgagcttccagccagccaggataacgaagagtaaaagattttagcttgtcctcttctttgaatgggttaattccctcttcctcgcacgtttctatatattcagccagtgagatttgtccctctttttcaagcccgtcaatactgtttgatacgaaatcacaatatccggtgacatccagaaacttgccgcgaaaggccccaatttctgcttcgtaggtaacagaagcgggatggccgtcgatagtcataatgttgttgcttttaatcatgttcgacccctattacattttcgaaccactcacgaaggccatttactgcgcctttatccattacgttaccaggatgaggttgatgagtctgatagactgagcccatgaggataaacttccggcgtgatccgttgccgttcttgatcttcccccctagtttgttaatcagggtttggcgagagtgtcacagtatgaaaatggaactcatcagccaacctttgaaacaatgtgtgcgttctccaagatattaaaaggccgtgtaatttttctaaataccaaaaatggagatcaacgcattgttcccatttctgacaaattagagaaagaaattcgtggtaaaaagaaaatgggcaagctgttcaatgttgactacataaatttctgtaagatcttacatgtagtaaagcccgacttacctaaaggacaagcaactcatgtcctcaggcacacttttgccagccacttcatgatgaatggagggaatataattgcattacaacagatattagggcacgccagcataatccaaacaatggtctatgcacaccttgccccggactatctgcaacatgccattacattaaaccctcttaagggtgggatagaagtagaataaagctagagagtgtggcgagcgtccaccaagcgtccacactcaaaaactttcgtatactttctaaccccttcatacttttttatgttgttgttttacaaagaaatgtgttgtaagtgactgaaaaaaaaggccctaaaaagggcctgaaagacagggatggtgtctatggcaaggaaaaattctcgtttgctactactttgctactactttgctactacatttgctgctatgggtattacaaatcagttcggtaactgagacatacgctgccgataatgttgttccaattgtgcttgttgctcaggcgtcaacagttggtacatctggtgatggatacgtgccatttctacctgatgctccacattacatctgatcatcctttcaatcagagcctttactgccacgccatcaaaatccttcgcagtgaccagcttacgcatctcttctcgctctgtgggactcattgacatcgatgaacgcggttgatgtttctgccctaccaaatcacgcatctgttgacgctgctgctcagttaaagtgataccgttaaacatatggtcattatcaccaatatcgttattattacgataatgataacttcctacatttttatattcacaaggtgcacaattaccaggtaccgtagcagcgtgcattgtacttgctgttccagctaaagatgccgtcgagctaagaacaaacattgacgctaaaactaacgctgctatgttacgcattaaacaactcctcgtttccccgaacgatgctattaggttcaatgtggacaactatacttactcggctgcaaactagcgtcagaggcttgtaaaagaacgtaaagtcgtggaatagcaaagtttgttatcgtatttttgctcttggaggaagtaatcaatgcataaaatcctattagttgatgatgaccgtgaactgacatcactattaaaagaattacttgaaatggaaggatttaacgttgttatcgctcatgacggagagcaggcattaaaattccttgacgattcgatcgacttattactacttgatattatgatgccgcgtaaaaatggcattacgacgttaaaggagcttcgtctacaccatcaaacgccagttattatgctgacagcgcgaggaagtgatttggatcgtgttctggggctagaattaggggcagatgactatcttgccaaaccatttaatgatcgtgagctagtggcacgtatacgtgctattcttcgccgctcaaactggagtgaacaacagcaaacagacaatggcccacccacgcttcaggtcgataacctacaattgaaccctggccgacaggaagccaactttgctaatcaaattctcgatttaaccggtaccgaatttactttgctctatctattagctcaacatttaggtcaagttgtctcccgtgaacatttgagccaagaagtattaggtaagcgactcacgccatttgaccgcgcaattgatatgcatatttctaacctacgccgtaaattacctgagcgggaagatgggctcccttggtttaagaccttacgtggccgaggatatttaatggtttctgcgacatgataaacagtttgacggcacgcatcttcgcaattttctggtttactctggcattagtcctaatgttggtattaatggtgccgaaactggattccagacaattgacctctctgctggaaaatgaataccggcagggagtcatgctggaacaacatatcgaagctgaattagctcaagatcccgctaacgatttactttggtggcgtcgtttatttcgcgcggttgaaaaatgggcccctccgggtcagcgcctaatactggtcaccagcgaagggcgcgttattggcgcacaaagaagtgaaatgcaagttgtccgtaactttattggacaatcagataacgcagatcatcctaaaaagaaaaaatatggccgctctgaaatgctagggcccttttccattcgagatggagaagatcattatcaactttatttagttcgtcccgcgaatagcccacaatcggattttattaatctgatgtttgaccggccactattattattaactgctaccatgttaatcagtgcgccactcctattatggctggcatggagtttggctaagcctgcccgtaaattaaaaaatgccgcagacgatgttgctaaaggtaacttacgccaacatccagaactggaagccggcccacaagaatttctggccgccggtaacagcttcaaccagatgatcagtgtattggaaagaatggttatcgcacaacaacggttaatttccgatatctcccatgaactacgcacgcctctcacccgcttacagcttgcaacagcattacttcgccgccgtcatggtgaaaataaagagctagaaagaatagagacagaagcccaacggctagacagcatgattaacgatctgttagtactctcccgcagtcagcataaaaatgaactgttgagagaaaacattaaaatgacagatttatggaacgatattcttgacaatgctcgcttcgaagctgaacagatggataaaacccttgaagcaaccttaccaccgagttcttgggcaatttactgcaacccattagcacttggcagtgcttttgaaaatatcgtgcgtaatgccttacgctactcccaccaccatattgcggtcgcatttcacgccgataatcaagggatcactattaccgttgatgatgacggcccgggcgtcaacccggaagaccgtgaacacatattccgccctttctaccgtacagacgaagcccgcgatcgggaatccggcggcactggccttggcttagccattgttgaaaccgcgattaaccaacaccgcggttgggttcgtgctgaagacagcccactcggcggcttacgcttggttatttggctaccacttcatggccggtaatacagatttctgctaagcttattctacaaattcattaaacaaataaattttatttatacttgacccggcgagtctgacggtttaacctcccctgttattcattaaaaaaccttatattttattgcttttttattacagcagacaaaagcattgaaaaatcaaaacagtagataaaattataacattctatggagttctgggagccaataacctagtgcggtagctttgttattaccttatttattatttcagcaatatatcttacacaacctatttaaaaagcttgttaaattttcacctgccaaataaaacttatggaaatagatagcaccctattaaaaaccaaatgtaatttattttcataagttttatttttaagtcatcatcttaaaaggcaaaatatgtcctcactcaacattctcaccgagaaatttgataataaaaccgccaccattgccattgttggcctgggttatgttggcttaccgctcatgctcagatataacgatattggttttaaagtgatgggtttcgatatcgataaagaaaaaacagataaactcaatcaaggtcaaagttacattgaacatattccctccgccaaaatcagtcacgcgataaagaccggttttgaagccacgacggatttcaccaacatcgcgcaatgcgatgccattattctttgcgtcccaacgccgttaaataaataccgtgaacctgatattagtttcgtgattaacaccaccgacagggtaaaaccgtatttaagggccgggcaagtcctctccttagaaagtacaacttatccgggcaccaccgaagaagagttactcccccgggttgaagaaagcgggttaaccgtcggtgaagatatctttctggtctattcacctgaacgagaagacccgggtaaccccgatttcgaaacccgcaccattcctaaagtcataggcggccacacagaaaactgcttaaaagcggggatcgccgtttatcaacacgcgattgatcaggttgttccggtcagctcaaccaaagcggcagagatgacaaaactgctggagaatatccatcgggcggtcaatatcggcttagtcaacgaaatgaaactggttgccgataaaatgggcattgatattcacgaagtgattagagccgcagcaaccaaacctttcggctttgttccctattatcccggccccggattaggcgggcactgtattcccattgatcctttctatttaacctggaaagcccgagaatatggtatcaatacccgctttattgaactctccggtgaagtcaattcctccatgcccgattatgtggtcactaaaaccgtattagccctgaacaaagcgaataaatccattaatggcagccacatattaatcctcggcatcgcctataaaaagaatgtggatgatatgcgagaaagcccctcagtacatattatggaaaaattaagcgaattaggggccaatattgaatatgccgatccgcatgtcccggtctttccgaagatgcgggaacatcattttaatttaatcagccagcccatcacggaaaatagtctcaaaaccttcgactgcgttattttagccaccgatcacgacaaatttgattatgaattaattatcaatcacgccaaattagttgtcgatactcgtggcaaatactctcccaatcacaaaaacattatcaaagcttaacttaggataagattatgctgagcactatcaacgacagaaagataaaatttgctttagtcggttgtggacggatcgctaaaaatcatttcaattctctggaagtacatcaagaagcagccgaattagtcgccgtctgtgataacgatcaagaagcattaaacgcagcagtagaaaaaaccggcgtcccgggtttcagcgacttcaatacaatgttggataacatcaccgcggatatcattatcctgaccactccctctggccttcatccagcacaggcgatgacctgctttgataaaggctttcacgtcgtcaccgaaaagccaatggcaacccggctggctgagggggaaaacatggtcaaagcggcagataaagccggaaaacacctgtttgtcgtcaaacaaaaccgcttaaatgccaccttacaattgctgaaacgggcggtcagtgaaaaacggtttggcaaaatccacctggtccacctgaatgttttctggacccgtccccaggcttattacgatcaagccgcctggcggggcacctgggaatttgatggcggtgccttcatgaatcaggcgagccactatgttgatttaattgaatggctaatcggcccggtcaaagatgttcaggccatgacatcaacccacttagatatcgaaacagaagataccggggtactcaatatccgctggcgggatggcacattaggctcaatggctgtcaccatgtgcacttatccgcaaaatctcgaaggttccatcaccatcttgggggaaaaaggcacggtcagagtggggggtttagccgtcaatgaaatccaggaatggcatttcgctgacgaaaaagagtatgaccaacaagtcaaaaccgccaattacgaaaccacttctgtttatggctttggccatccgctttattacaaaaatgtcattgaggtgatgaaaggcgaagcccaacccatcactgatggccgggaaggcttaaaatccttagagctgcttatcgccgcctacctgtcagccagagataacaaaaccatttctttgcctttaacctattaaatcaatggaaccggtctcatgtcagcagaacacataatgatacatcccagtgccatcgttgatgaaggggctcaaatcggcaaaaacagccgtatctggcatttcacccacgtctgctcaggtgctcaaattggcgaaggctgttctctgggccaaaatgtctttattggcaatcaagtcactatcggcaatcactgcaaaatacaaaataatgtttctgtttatgacaatgttcatctggaagatggggtattttgtggcccaagcatggtgttcaccaatgtttataatccgcgttcattgattgaaagaaaaagtgaatatcaaaacacctgggtaaaaaaaggcgccaccttaggtgccaactgtaccattgtttgtggcaccaccattggcgcttatgcttttattggtgccggcgcggtggtgaataaagatgttcctgattatgccctgatggtgggtgtgccggctaaacacattggctggatgagtgaatttggtgaacaattagatttaccgctacacggacaagccaccgccacctgtcctcacactcagcatatttatcaactcaataaccatattgtcgtgcgaattaaataatcaaggataaaggcatgcaatttaccgatctggcagcacagcaacttaaaattaaagataaaattgacgcgaatatccagaaagtcctcgcacatggaaaatatattttagggcctgaagtcgacgaattagaagcaaagctgattgcctacaccggcgcgccatattgcattacctgcgccaatggcaccgatgccttgcaaattgccttaatggcgattggcattaaacccggcgacgaagtgattaccgccggctttacctacattgccaccgctgaaaccgttgcgctactgggcggggttccagtttatgttgacgtcaaacccaccacgtataacttagatccaacgcaactcgaagcggcgattaccccaaaaaccaaagcgatcattccggtttccttatttggtcaatgtgccgattttgacgaaattaatgccatcgcagcaaaacataacctgatcgtaatagaagacgcggcccaaagttttggcgcgacttataaaggcaaacgttcctgtaacttaacgaccatctcatgtaccagtttcttccctagcaaaccgttgggatgttacggcgatggcggcgctattttcacccgtgatgaagaactggcgaaaattattcgtcaaattgcccgtcatggacaagaccgacgataccaccatatccggatcggaattaatagccgcttagataccctgcaagcagctatcctgttacccaaactggagatattcgatgaagaaatggcattacgtcagcaggtggcagaaaactacaataacgcattgaacggcatcggtatcacgaccacgccctatattgagccacacaatctttcggcctatgcgcaatatactctccgcattaaaaaccgtgatgaattacaacgcagattaaaagaacagggtattcccaccgccattcattacccgatcccgctaaataaacaacccgcggtggccagcaatattgctctgcctataggagacgaaatcgcacaagaagtcattagcttgccgatgcatccttatttatccatagatataattaataaaattgccagttcaatttaaaatccatgaatcataaattattgaggaatatatctggcttattactctcatcattattcagccagatattattattactatcaacacccgtattaacaagactattttcaccggaagaattaggtatttacgcttcattttcatcgcttttaagtgtttttgccgtaggtgcttgtcttcgatatgaattttcaataagttcatcagggaaaagtcgtgaaattaactcattagtcacattatcttgcattattccaataaccattagcctaatcgttatcactgtttttgcaatatctaacacaccagaaaaaataattataggaaactatatatactatatcccgctaggtattatcacttatggattttatcgagcagtgagtttcaatagtataagagaaaaacaataccatgcactctctatcactaaaataacgcaaaccgttgccatgattagcacccaaatcattggcggcattgcccatttaggcgcaagcagtctcatcttaggccaaatattaggccaatcattaggtgttctatttttaagtaaaagatccaaatatcgtttaattatcagcaaacatgaacttagaaaaataagactactggctaagaaatattatcgatttcccgtttatgattttcctgcggcttcaattaacacattgagtaatgaactgccccaattatttatcatgtccacctatgggctaaaatcggcaggattttatttaattgcatccagaatatcaggagccccaattacactattatcccaaaccgtttcatctatattacaaggatatttaaaagacacgcttatatcacctttcttaaagataaaaaaaacattttattgcctaacactgattgctattttatttgctatagtgacatacttcacgggcatacccatcataacctttatcttcggtgaagagtggcgagaatcaggtaaatatctattatgcttaataccacacttatgcgggcaaataatatactcatcgttatcggtatatttatcaatttatgaacatcagaaaagcaatttatttattcagacaacatcgattatattaagattaatcgccctccttactggatatctattaggcgatatttaccttaccctattattattttcactcacaagttttgttctctatatgacaagtacggcttatattttaaaattatctttcatgcgtcaataaggttaacatgaagaaaatcataataaaaataattccctatatcattatcgtgatgattgtcagctatacattcaataaatatgcttatgagctagatgaattcaatggcaatgtgagaaacttagtcatgaaagggaaattcacgcaacgcgaatttaatagcaatggctttcctttatctcactcacctcatattccagagccattcttatccccattttatgttgttcactatggcctgatatactcttctttaggcttaaatcaagataacgccaatatattatggcgaaccgattcatccttacccggatggaatgtaccgccacctcaattcaatcaaaacgaattgattgctaattttaaattttcagccgattggttattaaataatataaaatcatttcatggtgaaagtcattacttatatgattttgattggtcatataaaggctacaaaaataataaactctctgccccctggtggtctggactaaccgatgcctatgccattattctcttattaagagcttatgaccattttgacgatgataaatatctactcacgtcgaaacgactataccaatcatcactcgcacctatccataaaggcggcagtttaacaacattagataatatgccttggattgaagagtacgttgatcctcaagccaattcagaccaattggcttttgtattaaacggcatgatctattctacttatggtattgagtcatttgaaacttatttaaatacagatgaaaacaccagaatatccgataaattatatcaatcaatcagccataatatatttaagttcgacataaaaaatgaatggtccagctatgatttaattggcaacccaagcaatattaaatatcacaaaatacatactcttcttttaaaagatctgatagctagaaatcaaaattttaaaaataaagaaataatagatttatataataattggaataaatccgccgctaatagcggatattattacataaaacatggccctacgagttgggcatactatcaatttatcactatgtatttcctgtctatcttagtattatcattcatttacttctttatccgcaaaaatgcaaaataatattaaaataatcctgaaaatatttatctatcaggttattatctacctgaattcaatacttatattagatacattccatgaggtaagaggctataatattaccccacaaggttacttaagtattattttctgttggatatcatttttaccactcattttactcaacaaccaaaaaaatcccgtgatggtttttttatggttaatctatatcacttacattataccggtatcaattatattcccactgattaattcagcttctgtctattcaatcattttcgtctgcacaataaacatattatttttctcatctatattattctttcggataatagatagaataacaataccgaaactaaaaatcccgtgggatttatataaaatactgataataggatgtggtattattgtcctcttattcgtcattagcaatcctggattaagtttaataccccctaatatatttaaagtttattccgtgagacagcactttaaagacaacacaccgctactcacgatgtacatcatcaccaatgggggatatgttatctcgccattgctattactagcttcactctatattagaggtccgataaaatatctgctcattacaataagtattttgatttcctatttaatctacagctcctcaggattaaaaagcatcgcattcatgaatctcgcggttatcattctatacttctatataaaaggaacaaaatcgataagtaactcggtgataaatatcatcctctatttattcctgaccgccgggatattatatttaattttcgatttttatgacccactgatccattggctacgcagagtattcttcacaccgacattaaatacctattatttttatgattatatctacaacaacaatagtgaatttacgacagaagcgccgcaaatagtttctcaaatctattatggcacctcaggttcggctaatactggctttattggagacggtatcgccagatacggtacactgggtttaataataaacttttttatatttaatatattaatctttgcaatgaacctgagctcaaaaaaggttccatttgaactttcaacgacactctatttacccttcgtatacacaatatcaaactcagcgattacagcactactactgacctatgggctgctggcattaagcatattattatttttattcccaacgaaaactaacaaaatacccttatgaaaatcacacatatgacctcggtacatccacgtttcgacacccgtattttcctaaaagaatgttctgccttacaaaaagaacatgaggtctcacttattgttgcagatggtaaaggtaatgaagtcaagaataacattgctatcattgatgtcggtatattgcccggtcgattaaatagaatttttaaaacaaccgataaagtttataaaaaagcattagaattagacgccgacttatatcattttcatgatccagaactcatccctatcgggctaaaactgaaaaggaaaggtaaaatagtcatttttgattcccatgaagatgtccctaaacaaatttttagcaaaccttacttaaataaatttacccgggttattatctctaaactattcgccctctacgagaagtattctacacctaaatttgatggcattattacagccacaccctcaataagagacaaattcttaaaactcaataacaacaccatagatattaataactatcctatattaggtgagttgcataataaacatgccaactggcatgaaaaagaaaaacaagtctgctatgtcggcggtatttccgacattagaggtatagccgaaatggttgagtccctctctcacctcacaacaaatacaacaatgaaactcgcgggcaatttttcagatacagaactcgagaacaaaataaaaaatatgaaaaattggcacaaaatagatgcactgggatttttaaatcgcatagaaaccaaagagcttttatctaaatctattgcaggtattgttctatatcacccacttcccaatcatatcgatgcccaacccaataaaatattcgaatatatgagtgcgggtatcccggtcatcgcttcaaatttcacattatggaaagatatagttgtaaaaaaccattgtggcatttgtgttgacccattaaaccctaagcaaatagctgatgcaatagattacctatcaaataaccctgatatagcagaagaaatgggtaacaatgggcttctggcagtcaatgaaaaatacaattgggatattgaacaaaataaactaaccaaattttatcaacacattggacgttaatcgatatgaaaaaaatcatcaccgtattaggtgccagaccacaattcattaaagcaagcccagtctctcgcgctttaaaaaataataacaaatttaaagaaattatcattcataccggtcaacattttgatactaatatgtctgatgtcttcttcaatgatttagccattcccaaaccggattacacactcaatattcacggtggttcacacggtgacatgacaggtagaatgctcatcgaaattgaaaaagtactcatcacagaaaaaccggatgccgtcatggtatatggcgacacaaactcgactttagctggtgcattagccgcatctaaattacatattccgattatccatgttgaagccggtttacgtagctttaatatgcagatgccagaagagataaacagaatattaaccgataatgtgagttcaattcttttctgtccaacagacactgccatcaataacctacaaaaagaaggcttcggttcaaagcccgttaatatcaaacaagtcggtgatgtgatggaagacgccgctttatattttagccaaatggcgaaaaaacctgatgggctggatgcgataccaaactttatattaaccacgctccatcgtgctgaaaataccgataatcaggaacgtctaactgaaatagtaaacgccttaaataatatacataaaagaactgctattgttgttatgccaattcacccaagaactaaaaaaatgttagcacaatacgacttacatttagatgttcatttaattgagccagtaggatatttagagatgatctggctactcaaaaacaccgccctgattattaccgatagcggtggactgcaaaaagaggcttttttcttcaagaaaccttgtgtgactgtgagggatcaaactgaatgggtagaattaattgccgcgggcgtaaacaaactctcggaggctgacagtaacaaaataacccaagccgttcatgacatgattggaattgacatggactcgattcaatccatgtatggtggtggtatcgctgcgacaagaattgctgacgaactagaaaaatcactatgaatatcgtctatataaaccactatgccggctcaccggatcttgggatggaatttcgtccatatcatttaggacaagaatggattaaatcgggacataatattaccctacttgcagcctcttattctcatgtacggaccaaacaacccaaactgatagagaataaaaaaaccaccgaaaatattaacggattagaatatatctggtatccaaccccgagttataatggaaatggattatccagagtcaaaaatattttctcttttttacggcaaatttggcttgatagccataacttagtcaaaaaatatcgacctgatgttgttattgcttcaagtacatatccaatggatatctggattgccaaacgtcttgccaaaaaagccaatgccaaactggtttttgaactgcatgatttatggccgctttcacccatagaattaggtggaatgtcacctaaacatccatttattcaattatgccaacttgctgaaaacacagcttataaacatgctgatgtggttatttccatgcttcctaaagtacaagaacatacgaaagcacatggattagatctcaataaactacatattatccctaatggcgtggttataaaggattggataaatcaacttactccattaaaccgttcactagaaaaacttattataactgaaaaaaataaagggcataaaattgtatgctatagcggtgcccatggccgcccaaatgcgctagaaaaactactcaaaacggcttcactgcttcatgataaaccgataaccttcttattagtcggcacgggccttgaaaaagataacttaataaaggagtctcaatcactgagaacaaataacgttatattctttgatccgatccccaaaactcaaatcccaacactactcaataaaattgacattgcctatatagggttacaaaagcaatcattattcagatttggcatcagccccaataaactcattgattacatgatggcgggcaaacccattttatgtgcgattgatgccggtaatgatcctgtttctgacgtgaattgcggtatcaccgttaaatcaggcaagccagaagagattgctcgggccttattaaaactcagtgaattatcaactgacgaattaaaccaaatggggaaaaaaggtaaaatttacgctttagaaaatcacgcttattccgtattagcagacaatttcatcaaggccatcatcaatcatgaataataaattccttccttttgcattacctgaaattggacaatccgaaattgatgaaatcattgacttacttaaaacagtgatggataaccacccgacctaaaaccagaagatttaaataaaacataggaattaataactatcattacactctaaataaagtgactattcaaccatgataaatatatcagttatttgccctatattaaatgaagaaaaatatataaaagggtgtattgaatcactgctaaaacaagattaccctaccgggcaattagagattatttttatagatggttgtagttcagatagtactttaaaagtaattcagagttatactgaaaaatatgagttcataaaattactatataaccctgcaaaacatgttcctactgctctgaatattggtataaaaaactcattaggggaatatatagccagaatcgatgctcactccagctatcccagtagctacttatccaaactatataacttatcaaaaaaacttgatgctgataatataggtgggattgttaatacaaaaccatgtaattctacaaccatttcccacaatattgcatatgccttaagtagtcgctttggaatgggtaattcctattttcgaattggcattaataatataaaaaaagttgatacagtacctttcggctttttcaaaagaacactattcgataaaatagggctatttgatgaagatttaattagaaaccaagatgatgagtttaacaacagaattataaagcatggaggtaatatatacctttccccagatattattattgattattaccccagagattcaattaaaaaaatctgttctatgttctaccaatacggtttatttaaaccattagtcaatgccaaattgaaaaaaataacatcattctggcaattaataccaccaatttttgtcttagggttaatcctaggattaatcctctcattcactagctcaatatttttatatctatatataggttgtatttttatctatttcttcttaactttactggtatcaataagagcccatttaaaaaataaaaaaaactatattttcttaccattaatatttctgtacatacatttatcttatggatcagggtatctcattggaataatgaaaattatattcaataagaaattccacgtaaaaaacaaaagataaggattatatcatgaactcttcttttctccctttcgcactcccagaaatcagccaagaagaaattgatgaagtcattgactcacttaaaacaggctggataaccaccggacctaaaaccagaagatttgaacaagattttgcgcaatatttaggttccgatgttgaagccatagcggtaaattcagccacggcagggttgcatttagcattagaagccattggtattcagccgggtgatgaagtcatcgttccgacctatacctttacggcaaccgcagaagttgtccgttatttgggagctcaccctatttttgttgattctttacctgacagcctgaatattgacccaatagcaatagaaaaagccataaccgccaaaactaaagcaattatgccggtacactttgcaggtttatcctgtgatatggatgccattattgcaatagctaaaaaattcaatctacgaatcattgaagatgccgcccattcatttccgactttatataagggaaagaaaattggcacgctagataccgatgtcaccgtattcagcttttacgcgaataaaaccatgacgacagcggaaggtggcatgctagtctccagacatccagatatcataaaaagagcaaaaataatgcgcctccacggcattagcaaagacgcctttgatcgatatcaatctaaaatacctgcctggtattatgaagtgattgaaccaggctataaatataacatgcccgatatttgtgcatctatcggcatccatcaattacagaaaatagacactttccacaagaaaagagaggcaatggctaaactctatgatgatgaattaaaagatctaccgattatcttacccactaaacctcaagaatctaatagccaacacgcctggcatctatataccattagattaaatgatcaagtcaaaatatccagagatgactttattataaaaatggcagaaaaaaatatcggctgctctgtccattttattccactacacaaacaacccatctggaaaaatacctattctcttaacgaaaacaacttcccagtcgcagaagaaaactttaaaagaattgtatccatccctttatatacaaaaatgaccaaagaagaccaaatatacgttatcaaaacaattaaagagatcttggcataaatgatgacatattatttagctataaaaaggctttttgattttacttcttctctcattggaatcatcctactattccctattttaatcacgattgctatctggataaaaatcgattcgaaaggacctatttttttccgacaaaaacgagtaggccaatataatcaagatttttatattcataaatttaggagcatgacgacgggatcagagcaaaaaggacaactcactattggtcatgatctccgtattacccactctggaaaatttatacgcaaatataaaattgatgaattagctcaactgattgacgttgtccgaggaaaaatgagcttagtcgggccaagaccggaagtaccacaatttatggacaaatacccggatgatgtcagaaacaaaatattatcggtaaaacccggcatcacagatttggcttctatagaaatgatcgatgaaaaccagatattaagccaatatcaagatcctcatcaagcctatatcgatattattatgccgataaaagccaagtactacttagaatacatagataaaaagtcatttttctatgacctgaagattattttcaaaacaatttacaaagtagtttttaggtaattaaccattatgaacaagagaatatttttcaaccaagacagattaattaaaaccatcgtccttctgattgtagatatatttatcattattatttcatactggctgagcatgtggctacgccttgatagagaagtgcccatttacagtttacagcattggttaaccattatattcaccatacctttcacgctatttattttcttaagaattggcttttatagatcgatattaaaatatgtcaacatgagtatattgaaatgggccattattggttcatttctatctactctactattgactgcaatttccttataccaacaagcctttttacccagaactgtaccgattatctacttctcttttctggttatctcactctgcggtacaagatttatctatagaacgctacgtaatttactaaaatataaaggtgctccggttatcatatacggagcaggagaatctggccggcaactgttacccatattaagagaacatagagaattcaacccgattgcttttgttgatgacaatgctaaattacacaatttatctattcatggagtttatgtcttctcttcagagaagataaccatcttagtagaaaaatataatataaagaaaatattattagccatacccagtgcatcaatatctaatagaaaaaaaatactagaaagactccaaaaagaacattgtgaaatcctcaccattccaagtttcaatgatctggttgaaggcaaagcgcaaataaactcactgaagcgcgtttccattaacgatctgttaggaagagaacaagttgatccactacaaagtctactcagtaaaaacatcaaaaacaaaaatgtgcttattaccggtgccggtggttcaatcggatcagaattatgcaggcaaatcattactcaatctccctctcagatagtcctatttgaattaaccgaatattgtctctattcaatagaaaaagagttacaaaagataaactcagatagagatttgaatataacgattactgcaattttaggagatataaaagattcagaaaagatagctagaataatcaataaatttaacattaacaccatataccacgcagcggcatataaacatgttccactggtagaaatgaataccatagagggcattaataacaatatctttggcaccctctcactggctcaagcagcaattaaccaaaaagttgaaaaatttgtattaatctctaccgacaaagccgtccgcccgacgaataccatgggcgcaacaaaaagatttgccgagcttatactacaagcttttgctaaagagcacagttatacaaaattctcaatggttcgctttggcaacgtccttggctcatccggttccgttgtccccctattcgaaaaacagataaaaagtggtggaccgataaccctcactcacaaagacattacccgttacttcatgacaatcccagaagcggctcaattagtcatccaggcaggagcactgggcaataatggcgacgtctttgttctggatatgggagaatcagtaaaaatttatgatctcgcccggaaaatgatccatctttccggcctgacagtgaaagatgaaaccaatcctcatggtgatatcgaaatcaaaattaccggattaagacccggtgaaaaactttatgaagaactcttaattggtgataacgtctctggcactaatcacccaagaatcatgacagccaatgaagtttttctgacctgggataaattaaacccattattaaatgacttaaaaacatcttgtgaaaattacgattttgaaaatattaggcagatcctgattaatgctcctattgattttcatcctaaagattatatttacgatcttttaaaataatacttacaaatacactcatgtcatgaaactggctgaaaatcatattaccgacattagccttctagacaaataataatcctatgaaatttttaacacacgagaaattaaaaatcaaataattcgaaaattaaaataacaagctaacaaaaacctcattattagatataccctatggatttcaagatggatcgcggcggcaagggagcgaatccccgggagcataggtaactatgtgaccggggtgagcgaatgcagccaacaaagaggcaacttgaaagatgacgggtatatatcatatgcattatacttccttcatttcctccttaaacaaaggagaatgattaaacatctggaaattataaagctagcctcttagcacgagtctataaatttatgaaacagtacccaaatggctatattcatcaaccgtaaagtaacagccaatgcctacggactctcctctggtgtcttctgggggctaagtggcgtacttttcgcattattactaaaaaacaccgcactttcctgttgtttcttcattcccatcatactcgcattcctaaatgatacgatttcatgcggatatatgtttatatatcttgtagtgaaaggaaaataccgagcgatacgccttatccccaaaaacaagaaaaatggcataattgtattggcggctatatttggtggcccaatgggcatgtcttgttatatcttagctattcaatacattggcattagctacacagcaactatttcagcaacctacccggctattggcgcactcatttcttttttcctacttaaagatcgcattcaccttatcggcatattgggattaatattggccgttgtatgtactatgatactcggttattcagcatcaactcagacaacatctggctggataggctttttctttgcttttatatgcgcactaggctggagttccgaagttgttatcagctcttacggcatgaacaaagatatacctgctgatattgcttatttcatcaggcaattatcatcctctgtgggctatttaatcatgatcatattattcattcactcctttcctggagttacacatattttttcaaatatagaattatactccttattatttttcacctctctggtcgccacactatcgtacctcttctactacaaagcaatctgcatgcttcaacctatccgtgcgatgagtttaaacatcacctatgctatctgggcagtcatctttgcttatttgctggtagatgaacccatttctataaaactaatactcctatgcgtaggcgtctctgccggttcattgctaactgccgtaaatccacttaatatcaaaaaattgattctgacgcttaaatgagtgtgattctattcacaacaagtttaaattcgttttacggctatagttaaagaaaactactaaaactctactgagcatcaataatatattaccaaatatccccgaacctacgctaaccactctccccctcttctctgaccttttagataaccatcactactgaatttacctataccgctaaagattacagattgcagaattaggaatatcgttacctcaccaatcacaatgctaaataaacataaagtcacaattaagctttactaccagatggatatcacggcaatactgccacatcctgaggcgaatggaacataaggaaacctgttgaaaaacaaagcacatagtacgttgttggtaagagctaaccgccattccgtgagcagcaatacagatttcagctaactctattctaccaattagttaaacaagtagtttgttaaacttgacccagaagagtttacagtctaatctccccccaactagttacaaaatcttatcccccattactttttgttaagacagacaaaagtattggaaaatcagtgcaatagataagatttccgaatattacaggcactctgggagccaaaaacctagtgcggtagctttatctaatgactcttaaatatgttgatttagatttttcatctctataaatacgtatgcaagaaaatttccacgtgttaggcaaaagctattaaataatttcatttagtggttctcgtgaaattaccccagacttaaaaacaatatattatttggtcaaattcatatgaaaggcatcatcttagccggtggttccggcaccagattataccctataacaataggtgtatctaaacagctcctcccggtatacgataagccaatgatctattatccattatcagtactgatgctagcagggataaaagacattcttattattacaacccctgaagatcaaataaacttcaaacgccttttgaacgacggaaatagcttaggaataaagattagttacgcaactcaggataaacctgaaggactggcccaagcattcattatcggtgaagatttcattggtgatgactcagtttgtttagttctaggagataatatcttttggggacaagctttctcaccaaaactacaaaaagcatcttcccaaaaaactggagctaccatctttggttatcaagtaaaagatcctgaacgttttggaattgttgaattcgatgaccagatgaaagcgatttctattgaagaaaaacctaaaaaacccaagtctgactatgctgtcacaggtctttacttctatgacaatcgggttattaatttcgctaagaaagtcactccatcagatcgtggtgaattagaaatcacatcaattaaccagatgtatcttaatgataattctttaaatgtagaactccttggccgcggttttgcatggctagatacaggcacccatgacagcttactagaagccgccacctttgttgaaactattgaaaagcgccaaggctttaaaattgcttgcttagaagagattgcatggcgtaacggctggctgaatgaaaatgatatagccaaagctgctaactctatgtcaaaaaacggatatggaaagtatttacaatctcttattcagaggaagatatgagtttaataaaactaattgattttaaaattcttggtgatgagagaggacagctaatttcattagaaggaaacaaaaatatcccttttgaaataaagagagtttattacatatttaatactaaatccggtgtatcaagaggtttccatgcacataaggagctcaaacaaattttatttgctgtaaaaggaagttgcagaatacgactcgacaatggaaaaataacagaagatatcatcctaaatcaacctcaaaaaggtatattgatagactcatttatatggagagaaatgcatgatttttcagaagattgtgttttaatagttttagcaagccagcattatgatgaatccgattatataagagattacaaagttttttctgatatatataaaaacactcattagaatagaatctcgatttttaattaattatatttaataacatattatttttggctgataaagatgatcaattttcttgatttaaaagcaataaataaaaaatacgaaaacgaattaaaagaagctagttcaagagtaatagattcaggctggtacataatggggaaagagttagaatcttttgaaaaagaatttgcagagtattgtggcacaaaacattcgatcggtgtcgctaatggcttagatgctttaatactagtcctcagagcatggaaagaattaggtaaaataaaagatggtgatgaagttattgtacctgcaaatacttatatcgcatcagtattagcgattacagcaaataatttgaagcccgttctcattgagccagatcaaaatacatataacttaagccctaataatataatatccgcaatcacagaaaaaacaaaagttattttgcccatacatttgtatggtcaaatctcaccaatgcctgaaatcatgaagattgccaatgaatacaatctattagtactagaagatagcgcacaagcgcatggagctgaaatagtgggtaaaaaagccggtagctggggtaatgcatcaggatttagtttttatccaggaaaaaaccttggtgctttgggtgatgcaggtgcaattacaacaaacgatgaagaattaacaaccactataaaagcattacgtaattatggctcacatgaaaaatataaaaatatttatcaaggcattaacagtcgattagatgagcttcaagctgcatttctctctgtaaaattaaaatacctaaatatcgaaacagaatatcgacgtagcattgcaaagcattatttagagaatattaataatccatacataaaattacctatcaccattgaacaaaatgcactccatccagaaaaccatgtttggcatttgtttgtaattaattgttcacatagggaaaaactccaacaatatctttttgaaaaaggtatccaaacgttgattcattatcctatccctcctcataaacaaacagcgtattcagaatggaatacattaaatttccctattactgaaaaaattcatcagcaggtactttcactcccccttgaccctactatgaacattgaagcaatcgaatatgttatcgatatagttaatggtttcaagccatgaaacggctcttaaaagtttctgtaatgacaggacttcaaactctattgcgtatggcgatggggtttgttattgcaaaagttgtagctatttatactggacctacaggaatggcgatgttgggtcaagtacaaagtatggtcggcagcctaaatggtgtgattaacgctccggtgaatagtggtattgtacgctttactgcggagtaccacacaaaaggatttaaagcctgctctccatggtggaaagcctcactttactgggttattgttattaccgcttttacgatacccataggattgatattctcatcatatattgcaagctggcttttacatgactcttcactggcttgggtagttattgtaactgtatttgtgctacctttttcggcattaggcacgttatgcaattcagttattaatggtcagcaacactatcgccgttttgtcggtttagggatgctatcaactctgatttcttctgctgttatgattggtttaattattgctgcaaatattcaaggtgcattacttgcagctacaatacagtcagcgctaataggtatagtaatgctactagcaaatttacgtcaaccttggatgaaacttcgctattggtggggaaaacaagatactcaggcacgtaaagatatagctagttacatgctgatggctttaacaagtgctttgaccattcctatttccttgatattagtaaggaatattctaatatcccatgttggttggaatgtcaccggttactggcaagctgtatggaaaatttctgaagtatatttatcggtgattacattatctctaagcacatattacctacccaaattatcatcattaaatacatatgtcgaaattaggaaagaaataaaccataccgctaaatttatcatgcccattgttatgatattggcatttggagtctacttttttcgagatactgctataagaattttatttactccagagttcattgaagccagaaatttatttgctgttcaattatgtggtgatgttatcaaaattttatcttggttatatgcttaccctatgttatcccgtggttcaaccaagtggtttatttcaacagaaatcatcttttcagtatcacttgtattattaagctatttattcatacaacagtttggagttaaaggcgctaatattgcctatttagtaagttacttagcatatttcatatttatttatgtaaatctaaaaagaatcgcgaggttctgattatagtagcccacataaaattatttactaagaagttcatattaaaattcatttatatatttttatccatatagacaaccactataattactataaatagctatcacctttagtgtaaaataaactatcttttatagataaaattaccataaaaacgatagattacttatttttcataaagtataaagaaaatcaagaagccatatttaatgcttattttcacctataaatagatgatgagatcataaaggtatatacccgtaatcattgaagatgcttgattttatccgaaatggagatcattatcctcgctatgaaaatatttnnnncatcanaacaaaaaatcaaacttgaacgccttcacgacaccactcgcgatggtcaggtacgagacagaataaaagctatccttctggcttctgaagggtggagttctatgatgatagcccaggcattgcgactccatcagaccactgttgaccgccatatcagtgattaccttaatcacggtaaacttaaatcgggtaatgggggctctgacagtttgctttcccgagaacaaactgattttttaatcaaccacttatctcaacatcttttccatcacacccatgaaatcgtggcctatgttgctcagctctggaagattacctttagcattcccggcatgaataaatggctacaccgtcaggggttttcttataaaaaaccttgtggtgtccctcataaattcgatgtagaaaaacagcaacaatttattgaatactatgaaaatcttaaagttgccgcgaaagatgaacccatccttttccttgacgctgttcacccgactcaaggcaccaaactcggttatggctggatgcggaaaggcgagaaaaaaacagtcaaaacaacaggaagccggactcgcctgaatatattgggcgcgctcaacctgaatgccattggtcgtaccgtgttccaggaatatcagaccatcaatgactacaacatttgctgttttttcaatgaaataagaaagtcttatcctgactaccatcaaaaaattcaccttattgtggatggagcgggttacaacaaagctcatcttgttaaggagtgggcttatgttagcaatattgagttacattaccttcctccctatagcccaaatttaaacccaatagagcgattatggaaggtcatgaatgaacaggttcgaaataaccgttatttcgcggataaacatgaatttcgagacaaagtcttcaaatttttcaccacaacgctaccggatatagcggactcgctgatgtctagaattaacgaccattttcaggtgctaaaaactgcatcttgaagtttcttgggtataagctatctagactaagtagggg

SEQ ID NO: 42 - protein, 200 aa, Photorhabdus luminescens
SYAEVTLKIPEGKSGEAVRIFYVGCYEKGPEDGLCWHLLTSEPVNSQEDAHKIFSYYERRWLIEEFHKAWKTGGTQVEALRMQSKDNLERMIVLLAFIAVRIHQLRFMGLNKEEAEKESCETVLSPLAWKLLWSKQEKRRVPKKAPSLHWAFINLGKLAGWYDSKRTGRVGWERLWEGWFRLQTLIDGYLLAKSVDLEIZ

SEQ ID NO: 43 - protein, 234 aa, Photorhabdus luminescens
GVTMSNIRKKTNHITPQLTLMWDKSDEPWGARDRESRFIYANPAFYQLLNLPEYFDIIGLSMGELPLPIAEYAEEFHRQDQKTIQTMQRVTSLETHQFGEHNIKQTYICDKFPLYDENNDCIGIFFHMYKTQDFSVSYYYEKTPPATLAFTPPNDTLTQFEWEVLFLTLCSLDEEKISEELMISSEDVINHIQSIYQKFNLPLHAELKDFCKENKLDLYIPARFVTIGSRELNZ

SEQ ID NO: 44 - protein, 624 aa, Photorhabdus luminescens
MMDNLRTAANSPVLKIVLALIILSFVLTGVGGYLTSGAGSYAAEVNGQAISRAQLEQAFQQERNALQEQLGDKFSVLASDEQSMKQIRNQALDRLINNALIDQYSRELGLSASDEQVKDSIRNTSYFQTDGKFDNNKYLELLNRFNMSPDIFAEQTRQNLVNQQLIMAFSGSEIALPGEVKLNAELLLQQRTARIATLELKKIQAQQEVTDKDLQDYYNLNKSSFIASEEVKISYIKMDAVDEMNKVSATSADVDAYYEHNLKRYTQPEQKKYSLIQLATESEARTVFDELNKGADFGKLATKKSTDKFSAKNHGEIGWMEEDALPEELKQANLKEKGQISSVIKVPNGFAIFHLDDVKPQIIKPLSEVRSEIEKMVKQEKAVDAFYALQQKVSDAATSDNESLAAAEEVSGIKVVTTDWFDRNSVPAEINFGAVIHAIFEGNLVDGQGPTGTNSDVISVEGDRAFVLRVDNYKPETVQPFEKVKDQVTELVKRQKAEKQLQVESEKLLTALKEGKGEQALKDAGIQFGESQVIQRTSQDNVLVGAVFALPLPKEGKAEYGLTKNSLDDVVLIQLDKVTPGVVSEEQIKSMTDGYQSEMGNAMLESLLISLREKAKIKLGHTEZ

SEQ ID NO: 45 - protein, 292 aa, Photorhabdus luminescens
MADLDDIKDGKDFGIDIPQKNSLFELKGCGALDWGMQSRLSRIFNPKTNRTVMLAFDHGYFQGPTTGLERIDINIAPLFPHTDVLMCTRGILRSQVPPATNKPVVLRASGANSILTELSNEAVAVAMEDALRLNVCAVAAQVYIGSEYEHQSIKNIIKLVDQGMRYGMPTMAVTGVGKDMVRDQRYFSLATRIAAEMGAQIIKTYYVDTGFERIASGCPVPIVIAGGKKLPEKEALEMCYQAIDQGAAGVDMGRNIFQSEAPVAMLKAVQAVVHQNENASKAYELFLSEKQZ

SEQ ID NO: 46 - protein, 340 aa, Photorhabdus luminescens
MKTLILKKLALISLLSLACASWVHAAERIAFIPKLVGVGFFTSGGQGAVAAGKALGVNVTYDGPTEPSVAGQVQLINNFVNQGYNAIVVSAVSPDGLCPALKRAMQRGVKILTWDSDTSPECRSIYINQGTPNQLGGMLVDMAANQVQKKQAKVAFFYSSPTVTDQNQWVKEAKDKIAAEHPGWEIVTTQFGYNDATKSLQTAEGILKAWSDLDAIIAPDANALPAAAQAAENLKRQNVAIVGFSTPNVMRPYVERGTVKQFGLWDVVNQGKISIHVANELLKKGDLNVGDKLDIPDIGMVEVVPNRVQGYRYEAKGNGIVVLPERVIFTKDNINQYDFZ

SEQ ID NO: 47 - protein, 334 aa, Photorhabdus luminescens
MNIGQRYGWEFALAALLIIEILLFGIANPRMLDINILLLSTSDFICIGIVALPLTMVIVSGGIDISFGSTIGLCAISLGVMNQTGIPMAAAIPLTLLVGAICGIINAALILYTGINPLVITLGTLYLFGGSALLLSGISGATGYEGIGGFPPALTDFANLTLFGLPMPLMLFLLCVLICWLFMHRTHSGRNIFLIGQSSKVARYAAIPVARTLYLLYSLTGIASAIAAIVLVSYFGSARSDLGASFLMPAITAVVLGGANIYGGSGSIIGTALAILLIGYLQQGLQMAGVPSQVSSALAGALLIIAVVGRSISLHHHQIRDWIQRWRNQRLSSZ

SEQ ID NO: 48 - protein, 334 aa, Photorhabdus luminescens
MLKLIQNNREITALIAILCLFGLLSVIDHQYFSLQTVTLVFSSAQILILLAMGATLVMLTRNIDVSVGSIAGLCAVIMGMSLNAGFSLSVSCLLTLLLGMCAGFFNGALVTWLKIPAIVTTLGTLGLYRGLMLLLTDGKWIEGLPDELKRLSAPLWLNISPIGWLLMILILAMAWILAKTPFGRSFYATGDNLQGARQLGVRTDSIQIIAFSVNGVMAALAGIVFASQIGFIPNQTGSGLEMRAIAACVLGGISLLGGTGTVIGAILGAFFLTQINSGLVLLKLPAWWNDFIAGFVLLAVLIFDGRLRCAIEKNIRQQKYARFLKNDKSNQVTZ

SEQ ID NO: 49 - protein, 512 aa, Photorhabdus luminescens
MLHNNTAVPPLLEVSGISKQFSGVMVLKHIDFTLFPGQIQALLGGNGAGKSTLMKIIAGLEQPDKGTLKISGHHVSHLNPTKAHQFGIYLIPQEPLLFPNLSVQENILFRLPKHQVDKSKMKQLLALLGCQLDLHVSAGSLNVADQQLVEIMRGLMRNSKILILDEPTASLTPVETERLFAQLRELQQQGVGIIFISHKIPEIYQLADQVSVMRDGTIALSGKIRDYTTDDIIQAITPAAKDQPLNGTPKLGLDLSNNQHQTVPDRPILTVTKLSGEGFSNISFSVKPGEILGLAGVVGAGRTELAETLYGLRPAVSGEIKLKQHTVNGLKTAQRLAQGLVYLPEDRQSSGLFLDSSLGWNICSLTHNRNTFWIRPAYDTAVLERYCQILNIKFSHINQPIKTLSGGNQQKILIAKCLEAHPAVLIIDEPTRGVDVAARNDIYQLIRHIAQQQVAIIFISSDLDEVVRIADRVLVMHQGEINGELTKQQMDVDTIMHIAFGEHKPQQAASCZ

SEQ ID NO: 50 - protein, 334 aa, Photorhabdus luminescens
MSIKSVKEKSAKEKNIPSEDASPGNSMSEEELLARIAWFYYHDGLTQGDIGDLLGLSRLKVSRLLEKGRQSGVIRVQINSRYEGCLALEDTLQKHFSLKQVRVLPALANMNLSARLGVGAAHLLMALIEPQQLLAVGFGETTMCALQHLSGFISSQQIRLVTLSGGVGPYMTGIGQLDAACSINIIPAPLRASTAQVAETFRQESSVRDVLLAACAADIAIVGIGAVNQQQQATIMRSGYISGGEQLMFGRKGAVGDILGYFMRADGELVEDMQIHQELIGISMPELKTIPTVIGVAGGEEKAEAIIAALNGQYINGLVTEEQTARVMLNLLRZ

SEQ ID NO: 51 - protein, 536 aa, Photorhabdus luminescens
TEDSIMNQRRSANPSGKYLMALDAGTGSVRAVIFDLEGNQIAAGQAEWIHQPVPDVPGSMEFDLATNWQLVCQCIRQALKTAQLPASAIQGVASCSMREGIVLYNRNGEPIWACANVDARSSQEVSELKALYDSTFEYDVYRCSGQTLALGAMPRLLWLAHHRPDIYHQATALTMISDWLANMLSGELAVDPSNAGTTGMLDLVSRDWRPDLLEMAGLRSDILSPVKETGTLLGYVTEKAAVQCGLNIGTPVIMGGGDVQLGCLGLGVVKPAQTAVIGGTFWQQVVNLPEPVTDPNMNTRINPHVIPGMVQAESISFFTGLTMRWFRDAFCAEEKLLAERLGVDTYSLLEDMAARVPAGAYGVIPIFSDVMRFKAWYHAAPSFINLSIDPEKCNKATLFRALEENAAIVSACNLDLISAFSAVKPDSLVFAGGGSKGKLWSQILSDVTGLPVRVPMVKESTALGCAIAAGVGVGLYDAMGATGEKLVRWQHEYQPNPEHCEVYQKAKQDWQAIYADQLTLVDHGLTTSLWKAPGLZ

SEQ ID NO: 52 - protein, 356 aa, Photorhabdus luminescens
RCLILSEMEIIILAMKIFITDEQKAELEHLHHTCRDKRECDRIKAVLLASEGWSSVMIAQALRLHEMTVNRHISDYLNQGKLKSDNGGSDSLLSQEQTDFLINHLSQHLFHHTHEIVAYVAQLWNITFSIPGMNKWLHRQGFSYKKPCGVPHKFDAEKQRQFIEYYENLKVTAKDEPILFLDAVHPTQGTKLGYGWMRKGEKKTVKTTGSRTRLNILGALNLNAIGRTVFQEYQTINDYNICCFFNEIRKSYPDYHQKIHLIVDGAGYNKAHLVKEWAYVSNIELHYLPPYSPNLNPIERLWKVMNEQVRNNRYFADKHEFRDNVFKFFTTTLPDIADSLMSRINDHFQVLKTASZ

SEQ ID NO: 53 - protein, 390 aa, Photorhabdus luminescens
RPFSGAKNCILKFLGYIYRQAVFSVAHIARLYYLRNLTPKTHVWGVRQLGWAMRYAELGLYRLLESKELSCIHKNSAYVLKIPTEDLNWLVTCNTSWQKFEKELLSNINIFRDAAARLSGIAEYYSTLLQHFYPETRIVSAQGKVDDLLSLQPIIDQVIILLRQFIGDRLLAFYLHGSAARGDMRSGSDIDSIVIVDKVDTVILEAIRSTQSRFKDLSISVYSESNVHQYPSFRAYALINGTKRVYGDLALEMKPSLKSDIYGIINNLFTIRQIARSYLISGTYGHRAHYMLGLMMKLTDHGCLRPLQILKSGFYPTKKTQVLEYYRDNEIFTDIIKYTQNLKESENTLKQKLLIGSRAELENLFYSLLDACEIVAEKLHMVQVEKSILZ

SEQ ID NO: 54 - protein, 405 aa, Photorhabdus luminescens
SMTSKILARSINEFFEVQQLSDQTILKPNRKIKMKILDEGLMQTAICRSNIGRIDEKELKLEYRGHNVRDLANNYSFSDVVYLLITGKLNSEGSEEFLDMLHNNYLSALKHIEKLTPVIFDTTPTDFLTIAVLSSQGKWLSDCSVKTKDERLIITASILAAIAAAIAIYAQKYAISEPVFKTFFGTKHRFFASFLATCFGQQCDDVAEEMLNKFLILHAEHGLNCSTATVRAVASSGADPFNAVAAGICAFSGPLHGGASGAVGLMIDDIHDNSKNISTFIDELVERKQRLMGFGHRIYKQPDPRASYMSDILIKQKAKFDVISSYVNISQELASEVSKRPYFSQRGLYPNPDLFNGLLLRRAGFKSHMNTALLCFSRAAGWLAHYYDSIDSKAPILRPQELYLZ

SEQ ID NO: 55 - protein, 785 aa, Photorhabdus luminescens
MNLERSERIEIPVLPLRDVVVYPHMVIPLFVGREKSIHCLEAAMDHDKQIMLVAQKEASTDEPGVNDLFSVGTVASILQMLKLPDGTVKVLVEGLKRARITTLTDNGEHFSAHAEYLDSPIVDEREQEVMIRTAINQFEGYIKLNKKIPPEVLTSLHSVEDAAKLADTIAAHMPLKLSDKQTVLEMSDVVERLEYLMAMMESEIDLLQVEKRIRNRVKKQMEKSQREYYLNEQMKAIQKELGEMDDAPDEYETLKRKIEAAKMPKEAREKAEAELQKLKMMSPMSAEATVVRSYIDWMVQVPWVARSKVKKDLVKAQETLDTDHYGLERVKERILEYLAVQSRISKIKGPILCLVGPPGVGKTSLGQSIARATGRKYVRMALGGVRDEAEIRGHRRTYIGSMPGKLIQKMSKVGVKNPLFLLDEIDKMSSDMRGDPASALLEVLDPEQNVAFNDHYLEVDYDLSDVMFVATSNSMKIPAPLLDRMEIIRLSGYTEDEKLNIAKRHLLPKQIERNALKKNELTVDDSAIIGIIRYYTREAGVRSLEREISKLCRKTVKTLLMDKNLKHIEINSDNLKDYLGVQRVDYGRADTENRIGQVTGLAWTEVGGDLLTIETACVPGKGKLTYTGSLGEVMQESIQAALTVVRARADKLGINSDFYEKRDIHVHVPEGATPKDGPSAGIAMCTALVSCLTGNPVRADVAMTGEITLRGLVLPIGGLKEKLLAAHRGGIKTVLIPEENKRDLEEIPQNIVADLQIHPVKRIEDVLAITLQDPVFGAELVSVKZ

SEQ ID NO: 56 - protein, 466 aa, Photorhabdus luminescens
SANSATTGAIFMKKKHKPVRKLIVFGCGPHFLNRYLDVLLEYRDTIEVMLIVDLKCREMKIRCALNEKGLKPRAYLFLDEKYRNYPDSDEIYRLLSAIPEVYQADAVIVSTEPKAHKVYALWAAENGLNVFMDKPITAPYSSNAENLMVDFAELLTASRKTNSRFVISCERRMQFGYRYVEKFLTEFMSSFQIPITSMHVHFGGGWWVIPSEMLNLENHPLKYGYGVLFYSGYHYLDLVARFALYNKKIQDIDLLKPHVKTMVVRPNALAEALPFTTYSHALKEEDKNQDQIAHQLSDYGELDFSVIGNYSKGIQHRMFFSMDLIETTLTGRIMPNSIPSDGRIRQEIVNIHLGHFCSISIVSNSFRKLTEGDTIPEDFNITIATHPMFTRRGEQTVLRINRKDLSQLNPSLPLCAGLNVHARKEQLRDFLSGGDANSELSTHENSVALLAAVYEQVSKTNTVPQZ

SEQ ID NO: 57 - protein, 394 aa, Photorhabdus luminescens
SRGRVMNGKLDLLPFTTFVRGFLFWAAATAAVGYIPLFVETTDFSTTQAAVFLSGTAIGRMVFQPIMGQFISPKNCLQIYTGALIGLMSCSICLFLFSNPVSLLLCSRLLEGAFFSGFIISWRTQLNRFSQSPNFESVNDSYVISQNAGRLAGPMAGGIIVAKFDLYSVFLFSAILYSLCLIILPQKTAITSTDNHSREHIRITLAQLLSRNWRLLLVHHLEFMCLGLWLASWPIFAVYASGFNPIEVGYSFAVAAAGGFFVLPLRKLLRKIALKARFVISLILLFLQPSGALLISAHLGFWVMLLLGGLGSTIYFTAFHQFISKTYPVEQIPAIYGFLGTSTFLAQAVGQAVTPYAQQFGGVDAPIIIDAILLLIMISIAFSIYKKGSEKYDZ

SEQ ID NO: 58 - protein, 537 aa, Photorhabdus luminescens
MTDSNFFLSEYDGVALSPISFLRRAILSNGDDIAVIDGECHWTWSQYASRCERLAIALKKMGVCKETVVSALLPNIHELLELHFAVPMAGGILNALSTRTDSNTLNFIFKKLNPKVLFIDRTFISLLDDVSLDKQVKIIVIDVDGAVISESISDREFIQYESLITTHKSGELSFSLRDEQEAISINVTSGTSGQPKLIVYSHRGVFLNSISNVLDWDIPKRPTFLWTLPMFHCNGWCFPWAITARGGTHICMRKFDAEEAILLMQKHKVTHYCGAPIVHCALGTIARKQGLHFKEKIHGLVAGAPPTEMMFSLLDSIGIAVTQVYGMTETYGPVVVCEEKSDWEKLSKSVRISKRMRQGIVSNLQGQVCVIEENTGLQVPFDGKTVGELVIRGNMVASYDPDRHVTLDAASQWLFTGDLAVVENDGYVRIVDRKRDIIISGGENISSLELENILSNYPGVLAAAVVAKPDSHWGEVPYAFIELEETSSVTEYELDNYICTVMARYKRPKGYTFLTLPRNASGKIIKGQLRQLIRNSZ

SEQ ID NO: 59 - protein, 441 aa, Photorhabdus luminescens
MNSTKTVSIQHVINNQKFSKVQWQVLILCFLIVVIDGFDTVLMGYIAPAVVNDFKVEGAILGPAMSAALVGLSLGSIFAGPLADRFGRKSVLTISVTVFGLLSLATAIADSIQTLTILRFLTGLGLGAAMSNAITLISEYAPENRRSLLINIVFCGFPLGAAVGGIISAWIIPHFGWQGVLILGGILPLFLSLFLFSLLPESLRYLVSKGGAEGNIRRILSKMTGNTLNDINKFTFDGEEIIHKSSIKTVLSNRFLIGTAMLWITYCMGALVFYVLTSWMPFLMNDVGFSVSMAATLTALFPLGGVISTVFSGWLMDRINPHKVVATNYALAGILVFFIGQEENVLLLSILIFLAGITMNGAQASMGSISAQFYPTHCRATGVAWMLGFGRFGGIFGTLFGAELIRLELSYSTIFAILSIPAIIAALSLTFKDVSYRRHKZ

SEQ ID NO: 60 - protein, 325 aa, Photorhabdus luminescens
VAKKEKRPHHDGLFKYFLTQPETAREFLSLYLPEEIQSLCDLATLKLEPGSFVDEHLRQLHSDVLYSVETARGQGYIYCLIEHQSTPDPLMAWRLMYYAMLAMAAHLKKGHTELPLVAPLLFYHGEIRPYPYSNRWLDCFTLPEQAARLYRQAFPLVDVSVLSDEEILTHKGVALMELVQKHIRCRDMQEWLLQLVELLNAGYNTTEQRNVVLRYILLNGHTPDLSQFVHQLIEQSPEHETMLMTIAEQLEQKGLERGIKQGIEQGIEQGIEQGIEQGIVQGREEGRAEGKLETARALLRHGVSLDIIVTSTGLSRDKIEMLKHZ

SEQ ID NO: 61 - protein, 3312 aa, Photorhabdus luminescens
MKNNIAKVGSAFKTQTSENITDANDVSQQTRNTKNTLQRLTSSELFWYERLAAFQPLQLPFETAGDQTEPIWAMSAWQPPLPKNGEEEPLRTLLQTFVIYLARLTQQTVFQIGWSVDKVKDESANLAPVVPMAVEVAFDKPWREVAGWVDDELSRLVQYGTFSCDLFSCSPSLHAIPALATSRPWRIAVSLIKGDRPRDQKVSGELLTFQINAQGGFRWIYDENRLCTEVVLRMSEHLQVLAASKRMGDEIPIGQLNLLPEAERTLLLETWNATETPYPDPLCIHQLFEQQVEQTPEATALEYQGQRLSYAELNADANRLAHQLIALGVVPDQRVAICVARSPAMVVALLAVLKAGGAYVPLDSTYPAERLAYILNDTVPSVVLADATGRAALGDVALAGLTVLDPNILPDQPDSNPLVTALTPQHLAYVIYTSGSTGQPKGVMIEHQAIYQRHLGFNDTYAVTEQDRVLQFAAFAFDVSVEEFFSVLCNGATLVIRDDSWLASVREFIALTRQHRITIVSLPTLFWSELAARDPELPLPDCLRLVMIGGEAVKKNAVQDWFMQEGYRPRLLNGYGPTENTVTVTYKEILSPEDARSIGRPVKNSRIYLLDREGQPVPLGGIGEMYIGGVGVARGYLNRPALSAERFLPDPFSLEPDARMYRSGDLARFLPDGELEFLGRNDEQVKIRGFRVELGEIETRLVEHPAVHEAAVLVLDDGQHKRLVAYVAAQAHERLAADLREYLSAILPDYMIPVAFVCLDTFPQMPSGKLDRRALPALREEDFAHQIYEAPQGEAEIALAAIWRELLGIEQISRHDSFFALGGHSLLAVRMIERLRHLGLTLTARDLFQSPVLSALAQALGQHQAVIIPPNMITPTTTALTPEMLPLIDLTQTDIDRIVERVPGGMSNIQDIYALSPLQDGILFHHLLEQEGDPYLLHYPVVFANRSLLDRYLAAVQQAIDRHDTLRTAFIWQGLSAPAQVVLRRAQLPVTELTLDPADGPVIDQLTRRFDPSQYRLDLGQVPLLHFVVAQETDGRWFLLEVQHHLIGDHETMEVMHREVRAYFAGQEEHLPTPAPFRNLVAQSRLGVSQEAHTRFFTDMLAEVDEPTLPFGLAEVHRDGSRMTESHRMLTTTLNDRLRSQARRLGVSLAALCHLAWAQVLSHTSGQEKVVFGTVLFGRMAAGEGADNGMGLFMNTLPLRLDIDETPVEDSVRAVHLRLAELLEHEHASLALAQRCSGIQGETPLFSALFNYRHNEQPAALDETMAGIEFLGEQERTNYPFGLSVEDGGASLGLTAQVVQPFEPDRLCGYMQQALESLVEALEQTPETPVRVLNVLPETERTLLLETLNATETPYPDPLCIHQLFEQQVEKTPEATALVYEGQTLSYAELNARANRFAHQLMALGVTPDQQVAICMARSPAVVVALLAVLKAGGAYVPLDPTYPGERLAYILNDTAPSVVLVDEAGRAALGEQALAGLTVLDSNILPDQPDSNPQVAELTPQHLAYVIYTSGSTGQPKGVMIEHQALYQRHLGFNETYAVTAQDRLLQFASFAFDVSVEECCLSLCNGATLVMRDERWLTSMQEFIALAGQNRITVMSLPALFWSELVARDNGLPLPDCLRLIIIGGEAVKKSAVQDWFTRELHRPRLLNAYGPTENTVTATCKEILFLTDDRSIGRPVKNTCIYLLDKYGQPVPLGCVGEMYIGGVGVARNYLNQPELSAERFIADPFSPIAGARMYRTGDLARYLPDGELEFLGRNDEQVKIRGFRIELGEIETRLMEHPAVQEAAVLALDDGQHKRLVAYVAAQAHERLAADLREYLSTILPDYMVPVAFVRLDTFPQTPNGKLDRRALPAPREEDFARQVYEAPQGEAEIALAAIWSELLGIEQISRHDSFFVLGGHSLLAVRMIERLRRLGLTLAARDLFQFPVLSDLAQTVGQHQVVVVPPNVITSATTALTPEMLPLIDLTQTDIDRIVGQVPGGVANIQDIYALSPLQDGILFHHLLEQEGDPYLLLYPVIFENRSLLDRYLAAVQQAIDRHDILRTAFIWEGLSVPAQVVWRQARLPVTELTLDPTDGPVIDQLTRRFDPGHYRLNLSQAPLLHFVITQETDGRWFLLELQHHLIGDHETLEVMHREVQAYFTGQGDSLPAPVPFRNLVAQTRLKGDQAAHTRFFTDMLAAVDEPTFPFGLTEVHRDGSQMREFHRMLAPELNDRLRSQARHLGVSLAALCHLAWAQVLSHTSGQEKVVFGTVLFGRMEAGEGADNGMGLFMNTLPLRLDIDETPVEDSVRAVHLRLAGLLEHEHASLALAQRCSGIASGTPLFSALFNYRHNALSATSDDVISGIEFLDGQERTNYPFGLSIEDGGSTLGLTALVVQPFEPERLCDYMQQALESLVEALEQAPETPVRMLNVLPETERTLLLETFNATETPYPDPLCIHQLFEQQVKKTPEATALVYEEQTLSYAELNARANRLAHQLIALGVIPDQRVAICMARSPAIVVALLAVLKAGGAYVPLDPTYPGERLAYILDDTAPSVVLVDEAGRAALGEEALTGLTVLTLNTLPDQPDSNPLVAALTPQHLAYVIYTSGSTGQPKGVMIEHQALYQRHLGFNETYAVTAQDRLLQFASFAFDVSVEECCLSLCNGATLVMRDDRWLTSMQEFIALAWQNRITVMSLPALFWSELIARDNTLPLPDCLRFIIIGGEAVKKSAIQDWFARETHRPRLLNAYGPTENTVTATCQEILSPADDSSIGQPLKNTCVYLLNRDGQPVPLGCVGEMYIGGVGVARGYLNQPELSAERFIADPFSPVSGARMYRTGDLARYLPDGNLEFLGRNDEQVKIRGFRIELGEIEIRLLEHPVVQEAAVLVWEDGRDKHLVAYVVAEANEGLTASLRAHLSAILPDYMVPSAFVRLDTFPQTPNGKLDRRALAAPREEDFSRQVYEAPQGETETTLAAIWCELLGVEQVSRHDNFFVLGGHSLLAMRMTNIAAGRGMVCTLNTLFQFPVLAELAAKITSDLLSQPQNSAISVRSDGTELPLFFVPSGMGDYSYAFGLAQHIASGYPIYALPWPSINEEPMSTMEEQAARMITLMKAVQPAGPYRISGYSSGGILAYAIAQQLLGAGEQVNFLGLIDTLAPHCFDGQSFGQQIAQPKHQFFAELVRQLGEEHSEEIAALYQRIDELNLVQFIAAAQELALYPVNLSADLMAKRWEQIEHYDQIVRDYEPPALAVTLHQFYAIEPYPPISFVADEGSEPLNIDPSLGWEQIIADTSLKLIAIPGDHFSLLEDNENKIALSQALNMALAISDEGEVVZ

SEQ ID NO: 62 - protein, 2410 aa, Photorhabdus luminescens
SVVIRKYQSRIFLRRTIIPSNNYQSLLASAQATFREMRSKPKIQTLVQEIKKGFRENGREWSPELFQQQKMLERALESNAYWRYSNDRPVGISRLDKSEQQAFVSYIKTLATRITTIDILVQGNEKTALSLQTDDALNNAEAFRMLPKDFAQRYGTRGKLGARLTINVNKAHFNLLARALPQLFNDNNRGWLEQAKIMGPKNLGSRTDQAVIYLSKAGIEHAQTISEKLSELLPATAFVEHTPTGMYRVGKGISYSETAAGGSSSHGQSRAQLIAAAGTQSLLTDIPIEKTLTHTLQTRGYDVHNPALLSQALRDSELKGTLAPMSGDSEPRQVSANIHQFAADPVLFAKSNTINTETLIRSGSFPAEGNAQLVKIESGLYELEYTDRSANDDVAAGANSIPAYFLDYDSADQANASPAYVDIPKHAIAESFLFTGTLSGGSVVVTSLDANTYRVYHDGRVNSSLLYDNVVMAVDDKDYRVAATTDSLAVAYMQYVNDEWQLVFQRQEYQQDGQRLRLKLRGDEEPLSIQIADSQVTERNQAQFATYREQVHQQLKKVATQFGVSVEGIADGVYTEGEFSPDHPAIAAWTKLHAEVDDKINADIKQLVDKRSKLYEEQRNTSQHNLIDQQIKQINITLEYYKAQYNTVLREAGFVEQSWLWQQIKSKDGMAAVVRIDNTPIQNSGLEHTSSIGERYVIADAYQHRVHGTAFTDGQRNFRDISIPGMYDRMSALEMKILFLKGQLTPKQQSALSAHITETSQAEYIDKVLKWTAVYSEDFHRAGSSFDRLVPQDFYLSLVGDKSGGRCYPLVRAMAVALANSGEAGINNLVEKLFLAAADPHAGSSTLLKNSLIKLHSDNLEAVQASTTRGQVTLSEVVSLLKKATKTSTFALNTPNHSMMVGSMVGLEGRRYYFYDPNVGIFAFNNTSRFLEAMKHHLVGRKLAAHYGSLGDKLTPIFNLVEIDASKMAKVPVGNDLNVADLTRPDELTTVIEQRRQVEQAVNTQVRIAKDTRLHTALATLDAEQWGSRFAEASTRIAQENNLDQRWMPVIGNTEDQGKGHYRIQFINRDQPEETRWVSSGDATFIEFRRFVDEHVLTLGQHFTFEHGQIQPKGGIGEAAPVDGLNAGFAIQSLIQWFTDKNRNDAARGIASPDLATALKVHSYLNLVQMAHGGVQDVTKVTELVRTALRGEVVAAETSLKDFTSILGHTVNEGAGVLFGGAMVGLDAYELAHAENDVQKAVFGTQLAFDSASFVTGTAGVGAGLVGASTAGAVLGSGGVILGGLAVGFTALAQAFGVVAEDAKAVGRYFDTIDKAYKGNGYRYDNEKKVLVPLAGAVIKTLDLRKHQIDFDSQYIYRTHSGSTGSGRINYFFWIGDFPKMVRDRSQAIEVRSGIGYKDVSHKLDHSDSNVLILPGTPKSFISYEYIQLPSATTRHDAGFDVIRRLEEDKRFDYDFYIFPGEVTIRRIHQEYMATPIEVVLDQRNRQLIVPELPKELHGYLHYEIKGAGGEYLIGLNESASVKLTSDVPHNLVGSAPSRWIIDSSQLASDSISVSKNRLVVGGVVVELDSDRKEQVLVVNCKGEVREVDFSNLTTQVVSEDASKWQVPGYSIEQHLSDLAKAHQLHGQYAVVENYRYNERNVGRAFYDVAKDRMLFTDTPHKQARHAQLGAVMGDHAYFYDADNAAAWRVDIATGQVDAQFEPWFNQSAGQICRLWQEGNAVYLARRYQLKGKEAELSYRLLGDRMELVSAVGDDALLQLSARTGLHSDELKTILQGYENNSIQRETPMYTLGARLIQPTSAALVTVFGVDAAGVAHRYWIRTGDGTLIKPNLAPPADRTLHFEAHEQAHSAWPIPADLVLAGSMPQPGGKEVEVFFFYSKEQKVLFRQEGPGQMVLDANHPSALRINTPALANLVNLNGSLLAITEDGRVARLDAQGQLNYEAVNEHWLKGRTHWWQDLANITDSTTTLAVFGVKGTDGNSLLPVWYHNGQVVVASAALQGKSLQFLGFETDGASARLFEPESGKLYRQPAMTANALAAAFGGTGQILSASAQLPSASELTPELHLKAAQQVDTGMRLITVKGEILLRTNNGELQLVGVDKGWRQNNLTHLPQALAKLADQWQAKGVLTLQDNKELGWFDIGSGQVFWSNGIPVSHNLRFVGIAAGEKAAYVYSPMTQALYQIKDGNAQMLNKFTGVERIGSSLLLQGGGVDGSKDDLTPPLIDGVDSVVLHGGADNDIYRLSKAMWSHYHTIVIDNDDRSQALDRLILPLADPESILVNRRDDDLMLTDSSNGTALMVRQVFGSQAMAHRHLQIELEGSSSVINVDHLVEGFTQRGYTKKGLVELSWASKQSVITTHAVDAVPGAERPNLAKLSGAMASFPDTGAAREHLSRIRQASQTMLAPSLPSZ

SEQ ID NO: 63 - protein, 713 aa, Photorhabdus luminescens
LSEPITVDTSKAVADGGLLALTHAARHFNLAVEPEQLIHRLGRTQGVSNSQDLCRCAQWIGLRARHISTDMSRLDTVPLPILLDTEQGWQVLERVEGELIILYQPSTGKICRYPRTLFASHWQGSAVLLAEATEQPKRQRFGFGWFVPSIRKHVSQFRNVILVSLMLQVIALVTPILFENVIDRVLVSRSLSSLQVLGIAMLTLALFEPIYGFLRSWLFTNLASKVNSELSGRLYQHLMTLPMGYFQQRQTGEIIARVREMNQIRQFLTGSALTMVLDLAFIGLFVAVMFSYATELTWLVLGSLVLYFLFWLGVGPILRARVLREYELGADNTAFLTESVTGIETIKTNATEAGFLHRWERQLSAFVRASFRAKVVGILAGQGIDLIQKLTSALLLLWGVTLVMEGKLSPGELVAFNMLSEHVTQPILRLAQVCQDFQHTLISMRRIGDILDEEGESGNGGLASVPKLQGGVSFRGVRFRYNEDGQEVLRNLNIEIHPGEFIGITGPSGSGKSTLARLLQRLYVPQHGQVLVDGIDLAIADPVALRRNMSVVLQESVLFAGSIAENIRLCRPQASDAEVYEAATLAGADGFIKALDRGYETQVGERGGQLSGGQRQRIALARALLTNPGILLLDEATSALDYESEAAVMTNLQRIAQGRTVISVAHRLNTLRHAHRILVIDQGQVVEQGSHEQLLALNGLYARLWTLQMKDSZ

SEQ ID NO: 64 - protein, 476 aa, Photorhabdus luminescens
VADATGITKGSGIMSFKKHLKTVLRAWRQERNAPKATKRTRDEYEFQPGYLEIVERPPAPWARCTAMALTLFLLVVLLWSIIGHLDIHANATGRLLVSSHSKVIQSLEAGEIVAIHVRDGQRVKTGDVLIKLNPIGVEAELKELQEQLNFKRLEMARLQALLTDTPIEHFSVQEGMPQAQVELAREHLVSIWKEVVANLESLDSEMSVNQASQSARNADITALEKLMTNIKVRLEARRTLAASKLLPKVELLEQEKEKLEIERTLSQQHAELAVLKEQYQVLKESRERYLAKTRREYYDQLNETQTAIAVMTQQLIKAGERRRLQSLRTPVDGVVQQLAIHTLGGVVQSAQQLMVIVPDDTPLEAEVMVLNKDVGFVHAGQPVEIKVDAFPYTRYGTIRGKVAHISKDAVKDEQLGLVFPAQIQMERSSIAVDQHEVPLQAGMSITAEIRTGDRRVIDYLLSPLQQYQSEALRERZ

SEQ ID NO: 65 - protein, 425 aa, Photorhabdus luminescens
LMTDKRKDGSGKLLYCSFCGKSQHEVRKLIAGPSVYICDECVDLCNDIIREEIKELVPHRERNALPTPHEIRQHLDDYVIGQETAKKVLAVAVYNHYKRLRNGDTSNGVELGKSNILLIGPTGSGKTLLAETLARYLDVPFTMADATTLTEAGYVGEDVENIIQKLLQKCDYDVQKAQRGIVYIDEIDKISRKSDNPSITRDVSGEGVQQALLKLIEGTIAAVPPQGGRKHPQQEFLQVDTSKILFICGGAFAGLDKVIGQRLNTSTGIGFSAKVKGESEKATEGELLAQAEPEDLIKFGLIPEFIGRLPVVATLSELSEEALIQILKEPKNALTKQYQALFNLEGVDLEFRSEALTAIAKKAMVRKTGARGLRSIVEGALLDTMYDLPSMENVGKVVVDESVVNGQSAPLLIYSKPDAQVSGEZ

SEQ ID NO: 66 - protein, 711 aa, Photorhabdus luminescens
GKITMNRENISADADTLSSALNCCRLLLQLAKGEAQEPQPLLSHNKLKPAIKEYGKAHDVDLALCRLKFPKLTPKLLPLAFRDKQGGFIVLARLSTDQALIQSPYAVSPEVLSINELEARWSGEVIRLGEASLRFDVSWFIPAFIRHRHLLGEVLLFSLMLQLLALVTPLFFQVVMDKVLVHKALSTLEVLVIVLVVVGLFEVVLRGLREYLFAHTANRIDITLGIKLFRHLLGLPLLYFKHRQVGAIITRVQELDSIRDFLTGSMLTLSVDLASTFVFFGVMAWLSPSLTCVVLAVLPLYFLLAWLSSKPLQQRIEQQFQTAALNTSFLNESVSGAETIKSLAVEPKMQRRWESQTANMVEAGFRTQTLNSFISHGVMLLQKTTGVGIIWLGANMVIALELTIGQLIAFNMMVSHVNQPIAKLIDLWQQFIQTRVAVDKLGDILNLPVEQEQGNIRPQQPLSGDLQIRNLVFRYQPHQAPVLQGVTLHIRSGEKLGIVGPSGSGKSTLTRLLQKLYAPDEGEILIDGTPLHRLDPGYLRSQIGVVLQENYLFNRSVRHNIAFKDPSASLEKVMAVAKLAGAHDFILQLPLGYDTVLAEAGSSLSGGQRQRIAIARALMANPKILIFDEATSALDDESQALIQTNMAEIALGRTVIIIAHRLSTVRHCDRIITLEQGLITESGNHHQLLVKGGCYAKLWQMQQELRKEAEZ

SEQ ID NO: 67 - protein, 5458 aa, Photorhabdus luminescens
MKDSIAQAGSDFKAELLSQTSENITNVNDILPSTQNVKNIPQTLTSSESFWYERLAALQPLQLPFETAGEQAEPSWVISDWQLPLPKNGEEEPLQTLLQAFVIYLARLTQQTTFQIGWCVDGVNDKSADLAPVVPMVVELEFDKPWHVVANWLDGELSRLTRHCTFSRNLLAHAPALWAIPALTTHQPWRIAVAVIAEDRPCDQTAPGELLTLQLNAQGGFRWIYDENRLSTEVILRMSEHLQMLAASKKQGEEIPIWQLNVLSEAERTLLLETWNATETPYPDPLCIHQLFEQQAEQAPHATALEYQEQTLSYAELNTRANRLAHQLIALGVIPDRRVAICVERSPMMVVSLLAVLKAGGAYVPLDSTYPRERLTYILSDSAPSVVLVDEAGRAALGEQALVGVTVLDPNIQLDQPDSNPQIPALTPQHLAYVIYTSGSTGQPKGVMVEHQAIYQRYLGFNDTYAVTSQDRLLQFAAFAFDVSVEDFFSSLCNGATLVIRDDSWLASIPEFVALTRQYRITVMSLPTLFWSELAARDNGLPLPDCLRLIIIGGEAVKKSAIQDWFRQAGHRPRLLNGYGPTENTVTVTYKDVLSPEDARSIGRPAKNARIYLLDKYGELVPAGCVGEMYIGGVGVARGYLNRPALSVERFMLDTFSPVSGERMYRSGDLARYLPDGDLEFLGRNDEQVKIRGFRIELGEIETRLTEHPAVQEAAVLALDGDQGKRLVAYVEAKANEGLAVDLREYLSAILPDYMVPAAFVRLDTFPQTPSGKLDRRALPAPGENDFARQIYEAPQGKAEITLADIWRELLGIEQISRHDSFFALGGHSLLGVQMIERLRHLGLTLTARDLFQSPVLSALAQTLGQHQAVIVPPNAITPTTTALTPEMLPLIDVSQTDIDRIVEQVPGGITNIQDIYALSPLQDGILFHHLLEQEGDPYLVLYPVAFANRSLLDRYLAAVQQAVDRHDILRTAFIWQGLSVPAQVVWRQARLPVTELTLDPADGPVIDQLTRRFDPAQYRLDLSQAPLLHFVIAQETDGRWFLLELQHHLIGDHETMEVMHREVQAYFSGQGDRLPAPVPFRHLVAEARLGVSQEAHTRFFTDMLAAVDEPTLPFGLTGVHRDGSQKTESHRMLVPELNNRLRSQARRLGVSLAALCHLAWAQVLSRTSGQEKVVFGTVLFGRMAVGEGMGLFINTLPLRLDIDETPVRDSVREVHLRLAELLEHEHAPLALAQRCSGVDSGTPLFSALLNYRHNEQPDSLDETMAGIEFLGEQERTNYPFVLSVEDGGSTLGLTAQVVQPFDPDSLCGYMQQALESLVEALEQAPEMPVRVLDILPEAERTLLLETWNATETVYPDQLCLHQLFEQQVEKTPAATALIAGDKMLSYTELNTRANWLAHQLIEQGVCSGDHIALLLERSIALVVAQLAILKVGAVYVPVDPSMPDERKNWLISDCSARLLLTDTQADIPANLTVPLLRLSDQSDTDGREEECFNPDLPRSSAELAYIMYTSGSTGTPKGVLVPHRAVVRLVINNDYAEVGPDDRVAFTANPAFDASTFEVWAPLLSGGALVVIDRATLLTPQELVLVLQAHHITVLWLTIGLFNRLAPELSPVLPQIKILIFGGDIPDLQVIAQVLNNRPPQQLLQAYGPSEGTTFTTMYPIVALTQGVTRIPIGRPIANTRIYLLNAYGQPVPLGVTGEIYVGGDGVACGYLNRPDQTAERFLTDPFSDQPDARMYRTGDLARYLPDGNLEFLGRNDQQVKIRGFRIEPGEIEARLVEHPAVREAAVLALGDGSDKRLVAYVAAEAHEGLAMTLRDHLSAILPDYMVPSAFVRLEAFPLTPNGKLDRRALPAPDEEAFARQVYVAPQGEMEIALATIWRELLGIEQVSRYDSFFALGGHSLLAVRMVEHLRHLGLTLAVRDLFQSPVLLELAQTLGQHPVMVVPPNVITSATTKITPEMLPLIDLTQAEIDRIVGQVPGGITNIQDIYALSPLQDGILFHHLLANEGDPYLVVSQMAFADRSLLDRYLAAVQQVIDRHDILRTAFIWQGLSVPAQVVWRQASLSVTELALNPVDGPVSDQLARRFNPRHYRLDLGQAPLLRFVVAQETDGRWFLLELQHHLIGDHTTMKVMNREVQAYLAGQGNSLPDPAPFRNLVAQARLGGDQEAHTRFFTEMLAEVDEPTLPFGLTDVHRDGSQEIASHRLLTASLNHRLRSQARRLGVSLAALCHLAWAQVLSCTSGQEKVVFGTVLFGRMAAGEGADNGMGLFINTLPLRLDMDDTPVRDSVQAVHTRLAGLLEHEHASLALAQRCSGVASGTPLFSALMNYRHNDQRDPLDETIDGIEFLGEQESTNYPFGMSVEDDGATLGLIAHVVQPFDPESLCSYMQQALESLVEALEQAPETPVRTLNILPETERTLLLETWNATESPYPEALCIHQLFEQQVEKTPDATALVYQEQTLSYAELNACANRLAHQLIAFGVTPDQPVAICVARSPTMVVALLAVLKAGGAYVPLDPTYPGERLTYILNDTAPSVVLADATGQAALGDEALVGLTVLDPNIQPDLPDSNPQVPALTPQHLAYVIYTSGSTGQPKGVMVEHQAVYQRYLGVNERYAVTEQDRVLQFAAFAFDVSVEECFSSLCNGAALVIRDDSWLASMAEFIALARQNRITVMFLPTLFWSELAARDNGLPLPDGLRLIIIGSEAVKKNAIQDWFRQETYQLRLLNAYGPTENTVTATCKEILSPADDRSIGRPIRNTRVYLLDRNRQPVPLGCVGEMYIGGVGVARGYLNRLALSEERFIPDVFNPVPDARMYRTGDLARYLLDGELEFLGRNDQQVKIRGFRVELGEIETRLVEYPAVQEAAVLALDDGQDKRLVAYVVAEANEGLAARLREYLSAVLPDYMIPVAFVRLDSFPQTPNGKLDRRALPAPGEAAFARQVYEAPQGKIETMLAAVWCELLGVEQISRYDSFFALGGHSLLAVRMIERLRRIGLGIAVQTLFQHPTLCVLAQSLVQHDEIRVPDNRITPDTTVLTPAMLPLIDLTQPDIDRIVGQVPGGMANIQDIYALSPLQDGILFHHLLENEGDTYLLISQMVFADRVLLDRYLAAIQRIIDRHDILRTAFIWQGLSVPTQVVWRQAPLSVTELTLNPADGSVSDQLTRRFDPRYYRLDLSQAPLLRFVIAQETDGRWLLLELHHHLIGDHETMEVMHREVQAYLMGEEESLPVPVPFRNLVAQARLGISQEEHTRFFTEMLAEVDEPTLPFGLTEVHRDGSQVTEFHRMLTSTLNDRLRSQARRLGVSLAALCHLAWAQVLSCTSGQQSVVFGTVLFGRMQAGEGVDNGMGLFINTLPLRLDIDETPVRDSVQAAHTRLAGLLAHEHASLALAQRCSRVASGTPLFSALLNYRHNTLSATSDELISGIEFLGGQERTNYPFVLSVEDFGESLGLTAQVVQPFDPESLCAYMQQALESLVEALEQTPETPIRALNILPETERTLLLETWNATETVYPDALCIHQLFEQQVERTPEATALIAGDKTLSYMELNTCANRLAYQLIEQGIRPDDHVALLLERSIELVVAQLAILKAGAVYVPVDPSMPDERKHWLISDCSARLLLTDTRADIPANLTIPLLRLSDKKSANREQDHVNPNLPRSSAELAYIMYTSGSTGTPKGVLVQHRAMVRLVINNGYANIGPEDRVAFTANPAFDASTFEVWAPLLNGGALVVIDRATLLTPQELVLTLQEHRITVLWLTIGLFNRLAAELSPILPQIKILIFGGDIPDLKVIAQVLDNRPPQQLLQAYGPSEGTTFTTMYPIEALPQGVSRIPIGRPIANTRVYLLDVYGQPVPPGVIGEIYVGGDGVAQGYLNRPELTAERFLVDPFSDDPDARMYRTGDLARYLPDGNLEFMGRNDQQVKIRGFRIEPGEIEARLVEHPAVREAAVLALGDGPDKRLVAYVVALADDGLVNSLRAYLSKILPDYMVPSAFVRLDAFPLTPNGKLDRRALPAPDSEAFARQVYVAPQGETEMTLAAIWCELLGIEQVSRYDSFFALGGHSLLAVRMIERLRHLGLTLAARDLFQSPVLSDLAQTLGQHQAVIVPTNVITPATTALTPEMLPLIDLTQPEIDRIVGQMLGGVANIQDIYALSPLQDGILFHHLLANKGDPYLLTGQMVFTERTLLGRYLAAVQQVVNRHDILRTAFIWQGLSVPAQVVWRQASLSVTELTLNPADGPVSGQLAERFDPRHHRLDLGEAPLLRFIVAQETDGRWIVLQLLHHLIGDHTTLDVMNREVQAYLDGQEESLPTPTPFRNLVAQARLGVSQDAHIRFFTEMLAEVDEPTLPFGLTEVHRDGSQVTESQRMLAPELNDRLRSQARRLGVSLAALCHLAWAQVLSRTSGQEQVVFGTVIFGRMAVGKGVDSGMGLFINTLPLRLDMDDTPVRDSVQAVHRQLAGLLEHEHASLALAQRCSGVQDGIPLFSALLNYRHNDQPDPLDETMDGIEFLGAQEFTNYPFALSVEDFSDALGLTAQVIQPFEPERVCGYMQQALESLVEALEQTPETPVRTLNILPEIESTLMLKTWNATETSYLEPSLCIHQLFEQQVEQTPDATALVYEEQTFSYAELNARANRLAHQLIALGVEPDQRVAICVARSPAMVVGLLAVLKAGAAYVPLDPDYPGERLTHILADVSPVILLADAVGRTVLGENVLTGLTVFDPNTLFDQPDSNLQIPELTSRHLAYVIYTSGSTGTPKGVMVEHRQLVSQITSLNTKWSLNASDRLLQFCNPSFDVCASEIFCAITQGAQLVLRTNQWLLSAQAFWRLCESYKITYIAIPAQFWRIISNVDKGDIYQGLRIICIGGEAIPDHELQRWLATHGEYPVLANCYGPTEATITTTTSCLNEGMGQANIIGRPLPNTRVYLLDVQGQPVPLGVEGELYIGGVGVARGYFNRAELTAEYFLTDPFSDNPNARMYRTGDLVRYLPDGNLEFLGRNDHQVKIRGFRVEPGEIEARLVEHPAVSQSVVLALGEGQDKRLVAYVVAQADERLANSLRTHLSAILPDYMVPSAFVRLDAFPLTPNGKLDRRALPEPDNEAFARQAYEAPQGETEIVLAAIWCELLGIEQVSRHDNFFALGGHSLLAMRMMNLAAGRGLIFTLNALFQFPVLSELASKITSDLLSQPRSSAISVRPGGTGLPLFFVPSGMGDYSYVFGLAQHIPSGYPIYALPWPSISEELMLTMEEQAARMITLMKAVQPVGPYRISGYSSGGILAYAIVQRLLSAGEMVNFLGLIDTPAPHYFGKEAMQSKHHFFTELARQSGKACKEEIAALYRRIDELNLVQFIEAAQELALYPANLRADVIAKHWRQIERYTQIVADYEPSALAITLHQFYAVEPSPADSFVTDEKPESVNIEPSLGWERVMPNTSLKLIATPGNHFSLLEDNENKIALAQALNRALAISGNEEMZ

SEQ ID NO: 68 - protein, 308 aa, Photorhabdus luminescens
HDAGQLAVRAVLIRRGPAQRVGFGDFVTEIPFSPGVMAERVNLAGHQAVGVIVIAGTAAFGIEIGGDAAFVIVFKTVLPVSLRGGGGRHPARVIVVHSDIGFIGVMPAGHVPLRRVFMPQVVKLKGVTFRQIPRIIIAAGHQPLALSGVQPVNGRELLVLVMQRQGRHVGMDEAGQAVVFIVTKDGLIAVAVLYRGQAAFIALDRGKTQYLPGAAVEQAQFAVAPAVQQVMTGMEVDREDVFLRGMEGVNHPFAIGEMGFLAVAAQVLRPVIGPFGAEQPGQGGGGAVSPVQGQRQDSRQGQHRPDLZ

SEQ ID NO: 69 - protein, 316 aa, Photorhabdus luminescens
TAFPVFILTSKPEITRQVARVIDRQHRPAFRLAPGEQSSCPYQLPGFGQDFPYGPLMITHHIVQLAFFKPGQRRQGTRLIQPVNALFIVNGAIRIHRRFFDQLLAAPQVIIADYRGWFHRRSGGVHLLSFANPSPEGIIAITPAHPFRADKAGQPVVRIPAVAPGPRPVAPPPFGFLCPSPVFIVAIRAGTVLNHPPRLLGVVALAQVFTEPFRYPFLVMQVLAGIVYKLFVTGPRPAKLGGHHLVVDIVAVARLVPAGVFNAGHVVGRGVMPVAGHRAAARREMRVGLVQGLFEPVGAAPGGLMGQQPDRGVGLZ

SEQ ID NO: 70 - protein, 1504 aa, Photorhabdus luminescens
CPGGVMSVLMMAWLGAGAALRTTRTETTSAGNAPPPTEISSSADTVLNYLESERFQYHSLAAAMTYTVAMGGAPAVLPLVAGVAAGKLGVQIGNDIGESLTHGVMVFFGRRTVATEGQAPARLGDAIAHQNKSAGLWGALGGVLLGALAAVAVGGLIVATGGLAMAVVAGAAAGLAGGFVGGLVSSVGAALGQYGANKGQIVEGSPDVFFEGQPVARQGDKIVCSDHPGPVVIAEGAKTVFANGKPIARLGHRTTCDANINSAAASIALTPQTGDALTILTASNQDLRWLVAIAGLLPLPLGRKSNGGKAKSGAEPTPSVKKTGGDSQLCSKAGEPVDVATGDFLQVWPVLALPGVLPLTLNRTYRSTAALSGLFGPKWADDWSQHLRRDGEETHFTDGEGVIYTFHTPKENVFSVNLHAGHYLLYGRRDGELRLFNRRTRQILSFAAVQGDKRRLSTIEDRNGNQTVFRYDEHHRLTRLVHADMTTLALHYEHQQLTAIDWLHAGQRQRLVTCRYDNPGYLAECDTFQFHHLWHEYTPQGNMTRWHDTDKTDVTVHYDNAGRVTATTTPQGYWQDRFEYDDERRVTTYFDAEGGCTRYHYNADGLVTRQVDPLGHDTRTEWDFSHKVAETDPLGRTTAYEYSPYGELTGVMSSTGDLTAYDYDEYGQLTRVTQPDGARWQLHYSEQGNLASVIDPQGRVEETRYGPRGEILRRVLPDGRTWRYGYERQQLSEIQAPDGALTRFDTDGLGRLLRVTDALHQQTHYHPSPFHANPAGSISEIGLPDGIRQTIDYDSERRVSAVTDGEGRTTRYTYDAFDRLSRLTRPDGTALTFGYDRLTRLKTVTSETGDTYHYTRDPAGRVISETDFTGRTIHYQYDAAGRRLTARYPNHQLLRWCYTDDDRLTRQEAWQEEAEQCTLCSVTTYDHDAQGRLIRATNPDAVVTFAYDESGRLTKETINGRAVSHQWDPRSGLPAGRQMDTLPAVSWYYGLNGRLMQWQLDGHAPLQMQHDGLGREIARESAAGFIQSQAYTPVGLLAHQTAGRSSDWFKQTLYEADPHFPPRGSAVTRHWHYTPAYNVACIEDTRWDETRYGYNVNDQVVTTQFGGPRACDEQFVYDAGQHLHYQKRVPERLSEDLRQSYHTQQAGRVIQHGACTYRYDENGRRTEKTERRWGYRPRTWRYRWDAHDRLTGFISPEGVRWRYCYDAFGRRIGKRQEVDAAGPPVKPTAIIGYDYLWSGEQLIEETPVYADGTVDYEQSIHWLYEPGALTPLARFEKGQLYYVVSDHQGTVREILTEAGELIWAGRLLTWGEPECWPVLTVNDPRNLTCNFRFAGQYEDRESGLFYNRHRYYESDTGQYLSPDPLNLSGGVNPYGYVHDPVNWIDPFGLAACPTQKYEVSTFDDLQRRSKVGDKLDIHHTAQKHPAGQVITGYDPKVAPSIALPRGEHKLIPTMKGPYTGSARDLLAKDIRDLRNYTNAPPSAIKDLHNLNKEMYPEAFTKIRZ

SEQ ID NO: 71 - protein, 502 aa, Photorhabdus luminescens
MTLNDLIALDDPGQFRLRALALLQQQGDYIRQLEEALKQAQRWRFGAHSETLPAGPKRSQFEEDADTDIAVLETRLSRLHIKENATPAQPKRQPLPATLPREDIRLAPETESCPDCGHALRFLRDEISERLEYRPATFIVRRYISPQYSCARCQCVHAKAQPAHLIEKGLPEPGLLAQVVVAKYRDHLPLYRQQQIYARSGVTLARSTLSDWVGQVAVALQPLADALKQTLLTSPVLHADETPLPILAPGKGQTQRAYLWTSVTGPDTSPAVVYYELHPGRSGRYAQSLLKDWSGGTLVTDDYAGYNALHARADITEAGCWAHARRKFFDQYKASQSPVAKQALDGIRDLYKLERKIKHRPPDKRRQWRQRYARPWLNEFRSWLQTMQTQTAPNSGLRKAIDYTLKRWSALVCYLDDGGVPIDNNRAENAVRGVALGRKNWLFAGSLAAGQRAAMIMSLLETAKANGHEPWVWLRDVLSRLPVWPNNRLNELLPWPENPFRZ

SEQ ID NO: 72 - protein, 403 aa, Photorhabdus luminescens
MLENIQRSWFEHYMVPCFSPAKFIPVRAKGSKVWDQDGKEYIDFAGGIAVNSLGHAHPELKDELIYQIDKIWHIGNGYTNEPVLKLAKRLVENTFADKAFFCNSGAEANEAALKLARKYAADKYGKNKNEIISFKDSFHGRTLFTVTVGGQPKYSQDYAPLPQEITHLPYNNLSAIREHISENTCAVIVEPIIGEGGVIPADPAFLQELRTLCDRFQALLIFDEIQTGVGRTGYLYAYQEYGVEPDILTSAKGLGGGFPIGAMLTKQHIAAVFQPGTHGTTFGGNPLATAVANKVLSIVNQAELLTGVLQRHDYFMDKLSKLNQRYQIFSCLRGKGLLLGAELDKAWQGKAKQLTNLAAEEGLIALIAGPDVLRFAPALNIEFADIDEGLVRLESAIMRFVGZ

SEQ ID NO: 73 - protein, 344 aa, Photorhabdus luminescens
MMLFRAVRHSDLNGVQSLSQRAGIGLTSFPNNLDQLRSRIARSVDTFDGKLARAQQGFLFVLEDTSANRVAGVSAIEVAVGLEEPFYNFRVQKTIRSSRELGIYKSIEALTLEQDQTGNSELCTLFLDPEYQKGRNGTFLSKARFLFIAAFRDIFSKTIFAEMRGVADEQGNSPFWNSLGQHFFGIPFSQADYLTGIGSKTFIAELMPLHPIYISLLSAEAQKVIGQVHEKTVPARAILEKEGLIYQGHIDIFDGGALLQAEIDRIRAVKESRLVSVSKAESVTRDDGVPCIVANQQFSEFRALLLNVVCDSNELFLTAAEMGALQVSDGDQVRLVSLFPKENZ

SEQ ID NO: 74 - protein, 492 aa, Photorhabdus luminescens
MNYKAHYIGGRWIEGQGESITKFSPIDQQVLWQANSADASQVRAACHAAREAFYAWSHLPASERIKVIQTFAALLNEEKETLARVISQETSKPLWETRTEIQSMIGKAAISIEAWEQRTGESETIMPDGRALLRHRPHGVMAVFGPYNFPGHLPNGHIIPALIAGNTLVFKPSELTPMTAEETVKLWEKAGLPAGVLNLVQGARSTGTALLEDKQIDGVLFTGSANTGFHFHRMLGGQPEKMLALEMGGNNALIVDAYDDIDAAVYTIVQSAFISAGQRCTCARRLLVKNGAHGDAVIKRLVEVTERIVPSHWDAQPQPFIGGVISLQAVQNLLEAQDRLQKLGGISLVSLEQCQPQSTLLTPGIIDVSQVADVPDEEYFGPLLMLMRYDTFDEALAIANNTRFGLATGLISPDAALFQRLSEDARAGIVNWNKPLTGASSKAPFGGIGASGNYRPSAYYAADYCAWPMASLVADELTLPETLAPGLHFPDZ

SEQ ID NO: 75 - protein, 448 aa, Photorhabdus luminescens
MAGFEANFDGLVGMTHHYAGLSVGNKASINNKDSVSNPRKAALQGLMKMKALADEGFIQGVLPPQQRPHIPALRNLGFVGSDEQILHKAAKYSPVLLSKLSSASSMWTANAATVSPSADSADQRVHFTVANLNNKLHRSLEIATTTAALKATFADQNYFVHHQALPQHEDFGDEGAANHNRLGGDYDSPGVQVFVYGRSVFRGGPVPKRYPARQTLEASEAIARLHRLNPAQTVFVQQNPVAIDSGVFHNDVIAVSNRNVLFHHQYAYLNQSQVLTEIRQKMAVLGQNFVSIEVPAEQISIKDAVDSYLFNSQLLSKIDGKMVLVVPEECRQHSAVWDYLQSLSAQTSAPINEVRVFDLRESMRNGGGPACLRLRVVLNDAEFRAVNPATLMNTQLYQRLTKWIEHHYRDELCASDLADPQLLCEVYTALDELTQILNLGSIYEFQRZ

SEQ ID NO: 76 - protein, 208 aa, Photorhabdus luminescens
MSYSDKRDQYAPHMALVPMVVEQTTRGERSYDIYSRLLKERIIFLTGQVEDHMANLVAAQMLFLEAENPEKDIFLYINSPGGVITAGMSIYDTMQFIKPDVSTICMGQACSMGAFLLTAGAKGKRICLPNSRVMIHQPLGGFQGQATDIEIHAQEILKVKSRMNELMAKHTGRPIEEIAKDTERDRFLSADEAVEYGLVDKIFTHRDZ

SEQ ID NO: 77 - protein, 326 aa, Photorhabdus luminescens
MDLLTLLLEKKLADHLTFPETINAHWLAEGVLQLIPHEEGNRSLVISAGIHGNETAPIEILIQLLAQLAEGTLALKNNVLIIFGNLPAMRTNRRYLHDDLNRMFGGRYLNFPLGNERSRAAELENVVNRFFAEPSVSSTNIRWHIDLHTAIRASHHEQFALLPAQNRPFSAEFMQWLHDSDIDALVYHREKAGTFSHFLSEKFGADSCTMEMGKAMPFGENDLTRFQKITDALYGLISLSQITARIKFELKHYQVINSIIKSHDSFQLHIPADTLNFTELPEGFEIASQHDHHWKIKFPAKFILFPNAEVANGLRAGLLLALNKKZ

SEQ ID NO: 78 - protein, 490 aa, Photorhabdus luminescens
RTGTIMIKNNKTQQNLSAEKFADTQTLHRGLSARHIQLISIGGAIGTGLFMGSGKTIAVSGTSIIITYAIVGFFVYMVMRAMGELLLTKLNYRSFADFVSDYLGTKASFFLGWTYWMSWIVSCIADVVVCGGYIQYWFPGVSLWVPAFITLGLLGTCNLLSVRLFGEAEFWFAMIKVIAILALIIIGVGMVMVGWQSPDGTIASVNNLTDPSVFLPNGIFGFFAGFQIAIFSFTGVELVGTMTAETKDPEKILPKAINYIPMRIMIFYIFSMLSIIAVTSWGRISAETSPFVTLFALAGLPAAAAVVNFVALTSAMSSANSGLYACTRMLYGLSTEKNAHRKFKILSRNTAIPVHSLIFSCFCMVVGTSLLFIVPNVMQLFTIVSTVASVMVIYSWCVILIAYLVYRKNYPDVHKRSIFKMPLGVLMTWLTLIFFIFTIVVMVFDPDTLIALCGTPLWFIMLSILWRVKKKNEAQKEQRYQIAKESFRSZ

SEQ ID NO: 79 - protein, 297 aa, Photorhabdus luminescens
AYMQQVNISNSHRLVQSEAELLDLILTEVTNAPHPDLVIMAGHFMLFLDEDRGCLVPGVIEENTAPMREKIERRVGIFPGYTWELGVRIAEQLEHQFEAIKFLLLINDWQYVSRDSGPASELRRAFYEQFSALPASYKSILERSGQFSEQNMLASRKHPVAYPETWLKYRFQKSADKLVKAGLLNRRVLDNGPDAGTEISLVDENGDYKPLITCGVTGCAGEITEMISEVYKAQHRLLVIFAPGECFQPVKTGVSTALSLYGLSGMKVIVADPGGSGEMQTQEIYSKLVNVAVFTSZ

SEQ ID NO: 80 - protein, 389 aa, Photorhabdus luminescens
MGVAMNVNENPTGVIYLDHCATTPCFPEVVDIMRFYMEHEFGNSSSAHVMGRRARHAIENAAQQVASLIGARPEEIAFTSGATEANNIALFSSFAHNECAPAGALLCPIDHKSVLLVGKELSRRGLAVEYLPVAANGRVQPEDVITKLTADTRIVSVAHVNSELGTVQPVDEIAAITRRSGAWLHVDAVQSIGKIPVNVKETGIDMLSFSAHKMRGPKGVGALFVDARVAGHLRPFIYGGGQNHLRSGTLPTPLIVGFGLACQMIQSTLIQRQAKVTALRDYFITRLHQRVPNAVLNTDISCSSPYIVNVQFEGIASEALISGLHQVAISSGSACNSAELQPSHVLTGIGLSSAQANASVRFCFDPDLDNAILDTAIEHLVFRLNSIRZ

SEQ ID NO: 81 - protein, 290 aa, Photorhabdus luminescens
TPCLPIKFYSLGALSMTMQTSSSSAGTGFYERAFGSFSAEAVSEVRKETYGEDLGQNNWSSADEFRKFSQWLQLSDSSHVLDVCSGSGGPALFLARTSGCSVTGVDIHPHGLLTARQLAADFGLEDRSNFVDSDVRQPLPFPDGTFDALWCIDSVIHIPDRLALLREWCRLLKPGGRFLYTDPTLVTGMLSKDEIMIRGMPGYFLYSPLGLNERLISEAGLCLERQVDLTQSVVELSERWRAGREKRREQFIAIEGEEAFERMQNFLSTTQLVSIERRLSRVAFIGYRPZ

SEQ ID NO: 82 - protein, 215 aa, Photorhabdus luminescens
SKEISMILNKKVFLISPFLLAMSSFSMACKTDPKIEKIINKNGLENTKVMSMYKNCTLSVSADTPNKVTLVNNKAANRDTKAEKAMYWYRGMGIKEYKAFHQNKYKSLPCVKGENFCGIAPEYTYSQGYLTNKNPGVVVEFSTIEPGWLYNEFTTKHKCQIKAEGGGTYGLGVIGTSASCDNKYKKLVIGNVFNKWLEKPAKIDPIISYVLLAKZ

SEQ ID NO: 83 - protein, 217 aa, Photorhabdus luminescens
GNEYMTIAERVKTRRIEMGLTQTELADLIGTKQQSIEQLEKGKTKRPRFLPELAVALQCSVSYLLYGTEDKKEEIEYAGKPKNGLVRVIGEAVLGIDGAVDMVEFHAGWLRICSTDHDAYGLKVKGDSMWPRIQSGEFVVIEPNTPVHPGDEVFVRTNNGHNMIKIMNITRNGDYQFSSINSDHRPITIPKNNVIMIHYVSAIIKNTRYIDDDEISZ

SEQ ID NO: 84 - protein, 542 aa, Photorhabdus luminescens
RGNIAKSSIKIDSETLASDPEPTFKGFNMLNITPKVKQVTALNMLRHDWKKHRTFLLSASVGFGKTAIAAFIADGFVSHGMRVMFVAPYTVLLDQTATRFVEYGLPADQISYVWRNHPLHDPDRLIQIASADTLIRREFPDNIDLLIIDEAHMKRRKLLEIIRDSDIRVVGLSGTPFATWMGKYYEKLIKPTTMKELISIGDLSKYEFYAPDRPDLTGVKTTSLAAFGNDYNEEQLAQIMGDSTLVGNIVRNWLENGEDRPTICFCVNVKHANYVTMEFNKSGINTEVMTAETPHDERQLIINRFEQGATKIIVNVGVLVAGFDSDVRCIIYARPTKSEIRWVQCLGRGLRTAKGKDKCLIFDHSGSVHLLGFPDEIEYDKLPSKNDGMKSSSSFSEKVKQEKIPKECHGCHYMKPAGVYVCPKCGFKPLAGENVDVDESRGLKKLGKNERIYSKEEKQSWWSQIKYYQRERENQGKPISDGWCAHTYKKKFGVWPHGLSDHLIEISPEVYNFIRSKQIAWAKMQEKQKNANSGSSERAVAZ

SEQ ID NO: 85 - protein, 345 aa, Photorhabdus luminescens
LKSHRKFTTSFVLNKSRGQRCRRNRKMRTVEAVRGRWPEIFEYYDLPNVTGKKHYAGECPACKRKGKYRCDDKDGTGSWICSCGAGDGWKLLELTQGKDFKTLAREIDSLIGNSYNYKRGHDKQQQPETQTIRVKVISKFSTLPPLNDTAAQHYLFNRGIFELPSGHIRFNTEEKTPFGNKQAIWSIATDDKGAGCYLHRTVLDGEKKADFDGNKRMLKLQEDNYLNFANSIAIRMFPVSSTLGIAEGIETALSCKQIYGCNTWSTLNAGFLRKFRAPKGVKHLIIFADRDSNGTGLAAAFECGNKNILSNNDVELVSIRWPEAGDFNDMLINGAKVFQEQLQRZ

SEQ ID NO: 86 - protein, 272 aa, Photorhabdus luminescens
MNLESLPKYFSPKGIMFSDSPSATATDSFSITDVMASLGLASAKARLGIELFLAKQGINSIDEAVESLYQYAMTQVHKHSAINKLDEDVKQNVLQLLANYAFQDYARSAASKKVCPDCDGGFITVRKFTTKYGSSEGMLAKALNMKPKRFITSIREVEERCRVLCKTCKGKGSVSHSCRCNGRGQVLDEKQTKLQGVPIYKACLKCSGRGYSRLKFTEVFEAIKPLTGISKTTCYDKYQPLFEQLVSECFKEEEQADCVLSKLTKREFISFZ

SEQ ID NO: 87 - protein, 435 aa, Photorhabdus luminescens
MQVSVETTQGLGRRVTITVPAADVEKAVSSELVNVAKKVRIDGFRKGKVPMNVVKQRYGASVIQDVLSDLMQRNFINAIIEQKINPAGAPSYAPEQFKNGEDFTYSVEFEVYPEIELKDLESIEVEKPVVEVKDEDVDAMLETLRKQQANWKETEEAVGAEDRVTVDFNGSVDGEEFEGGKASDFVLAMGQGRMIPGFEEGIVGHKAGEEFTIDVNFPEDYHAENLKGKAAKFAITLKKVEQRELPEFNEEFIKRFGIADGTVDGLRAEVRKNMERELKNAVRNRIKSQVIDGLVKVNEIDVPAAIVDSEIDVLRRQSAQRFGGNEKQALELPRELFEEQAKRRVVVGLLLGEVISSNELKADEERVKALIEEMASAYEAPQEVIEFYGKNQELMNNVRNVALEEQAVEVLLGKAKVSEKETTFNELMNQNQMAZ

SEQ ID NO: 88 - protein, 228 aa, Photorhabdus luminescens
RDEVNMKPIEYLESISLYDSVARDALNAIKTGAFTEEQVIAEFMKVKALQNNALLELLEWKSLKEAKPFQATKGKGIPGTVRISYTATDEHGNETLQKEHHMLLTDVYRCRFIVFLEELKKSAKEFYETVMEGDEWDRKDTSEKSAECLIVNGKHHGKRRTLTSRAERYLVVSDDVFPCVDVDEIPVHFWVNEADGKIYMIATAEELNSSEISLAISETDPPLKPIYZ

SEQ ID NO: 89 - protein, 429 aa, Photorhabdus luminescens
WFYVSKTNYYQARWSRARAMTVAVDLPIPAKLVPVFTKENVRYRGAHGGRGSAKTRTFAMMSAVRAYQAAESGTSGVILCAREFMNSLEESSMEEVKQAIRSIPWLDDYFEIGEKYIRTKNRLVNYVFCGLRHNLDSIKSKARILLAWIDEAESVSETAWKKLRPTVRESGSEIWVTWNPEKDGSATDKRLRKKPPKSSIIVEMNYSDNPWFPDVLEEERQEDLESLDHSDYAWIWEGAYLENSEKQVLANKYKIESFPDDLWMQADRLLFGADFGFARDPSTLLRMFILDNCLYIDREAYSVGVELDHMPAFYDQVPESRKWPIKADSARPETISYLKRQGFNISAAKKWQGSVEDGITFLRGFKKIIIHPRCKETAKEARLYSYKVDRITGEVLPIIEDAHNHCWDAARYGLDGYIKGRTTVWDIMZ

SEQ ID NO: 90 - protein, 483 aa, Photorhabdus luminescens
PLLGCGQVWVRWIHKRQNNCLGHHVMTKKTMIGRLTDGLHSMLTSLGERVSAIKYASNNKADVPDKELLAMYKRSWVVKKYIDKTADDMLKLPRELSGDIDSSLVQRIKDTETALAVYKIFHDALTWASLLGDSLIVAITDCADEMISEPLNLQSEDIIKFLVLRKEEYTPSDNVISDIASPHFGHPQTYQISIGNQQLKFHYSRCHRTKLGKHSIKDITKYGTSDIQAPYDAIKIFDAAIVSTGDTIQEANVDVIFLPGLNNQIDAGQETQVVEYARVMKQTKSSTGLMLMDAGDSTMQSRYEQKTAQFSGLSDVITKMANVLAGALDRPINILFGQSASGFNSGEEDNKSYYETINGLQETRLRPMQDFVDQFILDKLAASIDTISYEYPSIDSINEADEATRFTQYATGFTSLVQSGVVTEDIALREMQARGVLTTVTNEEIEAMAGANNGQWYQPETDAGTQAGTFEGSQPANASANAZ

SEQ ID NO: 91 - protein, 282 aa, Photorhabdus luminescens
LKQMLERKQGRLKARNRLMRPPTPSKRTEVWYRDRLIEFIRMMQDVVIDDLQKPILNDAPNTPPLSITSRLSRAIQKLANMSIADMAKRLSFGMVKRANDQNKDQTQKTYKSAFGIDLTGMLGDEVVKKQIDDAVKENIDLIKSIQTDFINDIGSKVFTNLFDGGRHENLVSLIRERGQVTESRAKLIARDQTAKLNSALTETRQKALGIDLYDWGGAGDERERDSHFVLNNMTCKYSDPTVYSDDGGKTWKKRKSIGAFEGKPGDDYQCRCVALPKISWDZ

SEQ ID NO: 92 - protein, 387 aa, Photorhabdus luminescens
FMAWKKTPQGYVVTSATITRAGPVEYYGHEVKLTGADANRKITIHRTIEELSKPETLKSFEGLPVTLTHPLSGEVNADEWKDKAIGHIQNVRIEGDYVVCDVYLKDAKAIQLLEEKGIRELSVGYEPTEIVEKNGELHQINILGNHVAVVAEGRVGADCRLNDKKGRPMKKLSLKDVIALLKGKRANDAEGQPLTEEELIGMIAALEKTLQELEGNATPEATAKAQEVVAQLEELKAQLEQSKGAGTPPPNDADPDPAGGSDDKDARIAALEAENEQLKAENQALKEELEKLKGESDTSTTLNDAKARFPKVQFNDAKCARDVRMLALLSTGAFNDSQVKAMSDDEIRAAYAAASALNKPRSNIGAALLNDSAKAKKTASQRLGGKZ

SEQ ID NO: 93 - protein, 324 aa, Photorhabdus luminescens
ESNKMAMEPAYFEEVLQEALTERDQQLQEKELPEINIGEALPVTEGLDFSLEYVDFGVTDVLGSLKDGIIGNKTNSLKTIDSDIEWHKAPVGQWGKSATWTQQELEKIARLNINLQTKKQDDLYANATATIQYAGYVGHEGVKGQEGLLTGSKVQLIAEVTGKSIKDMSAEEFINMVLNAYNVAWAKSGYRIQPTHVAIDASDFMLAMQKFDTNSVIVGVDLLPVSAMDRIMAALRKASNNDSFSITFVKVPSNFAKNIVKGKTRLAIYTYSEDYIEMKVHMPELLAVRQRDLLTFECGYRSAFGGAMWKQPKSAVYVDYKSSZ

SEQ ID NO: 94 - protein, 208 aa, Photorhabdus luminescens
TCLSTYAGGAMIKNSGNFKGAGLKALEARIRALSKKKVVVGVPASKNSDQDGTSIVTIAVAHEFGAEIKVPARAVTVYRKMNKDGSFAGKGKFVKATKSNFASTHTVPAHTINIPERSFLRSTFNENKDKYANKLVKGIKSELKNDGDPQQALEKLGEMVARDVKRKIQAGIDPPLSQATIKRKKSSKPLIDTGQLVQSITYEVRDDZ

SEQ ID NO: 95 - protein, 504 aa, Photorhabdus luminescens
MSLSIKEVVNAQIMPQAMAAQRRDLSMIAIFTPEIGTSFADADTRYIIVSSAQDVANLFGTKSEAYKTAQALFSVRPTPKRALIARWAKEKQEIPATANALKGSTISAGINAFKAITDGSMMLNVGGKNVLLSGLNFSKAIDFSDVASVLQAALPKDSNLQAIWDTVGHRVIVQAQTAGAYPATKLGYVTEPGAGTYVGKMLKLEDGQATIVVGKAAITVEKELPSEALHKLQNVYQNWYGVYFADAIADEQLDDIHTWVASADMKVSAYTALRDEQIEWNNDNIIKKLYDKNSGRLMSQYNKTGDDHAAVALLAIALSTNWNAQNSAKTVKFKQQTTVRSDNRITQSEAEKCKRLGINFYTDYDGVSMLAEGTMIGGQFIDEIVGLDAFIDACQKQAFTTLQANPTKIPQTDKGQSMLIGALTVIGNEFVRNGFLAGGVWWGNDVGELTYGNRLDAGFYFYSDSYDLQSIADREARKAMPIMCAIKLAGAIHSVDISIQFNRZ

SEQ ID NO: 96 - protein, 674 aa, Photorhabdus luminescens
PKRYCLRRGQTMEIDELLVSVGVDTSQAAKIKDVIVALGAAAVQIANEANGVNKILGGVGEESVKSTEQAAQKAEEAGASISKLKLLAVGVVAAVSVATTKVLGFINSSISGAKDLAKEKGLLYKISDRELKQADEYEASMKKMGLSIDSVKTKIALNLVPSMTKAVNGFNAWIASNKELITDGLTKIIKVGGKVVQVIVNSVRAINKIVTSTIGWKAAIMLIVGALAILKRSMLMAFIANPVTWVIAAIAGLLLLLDDLMVYLDGGESLFGAFWGPAVKWVKDVIKWGKDFYAKYKDIIDNLVSIWSKSFKAILSIFSGVFQYIWNVLKLFVGLFTGDMDLVSEAWAGMTAALMKIWNGLIAYLKAFFAFFGVMWGIAGKLAANAWDLMKKLAGKAFDWIKGKAKGFVSSLGSIFRKVWGYITAPFKRAFKWVQGLFGVSEKDADRYIDNIGKAFDAVFAFIKSPFENAFKLVKSLIDIATNDNLTFTEKIEEIFSAVWGYITEPFKTAFKFVLGLFGVNESEADKYVSNIGKTFDGVIEAIKAPFKKAFDWVVEYYDKTVGKVIGAIKDFFTGNTKAEEATFGFSDDDLKNIQSSVIAGSGDFIGGAIANTTNTTNSSSQTTTNHGDVNMNVSITSPSPEKAAQYSVNELNKALKIAGYNTKGQFYNGAGGZ

SEQ ID NO: 97 - protein, 328 aa, Photorhabdus luminescens
IRLWLGIWMKGQKMQHNKSEAPVARTTRASECHLPSVINDSAIVTNGESIFQSTKTENQQFAAAGIQVDIPPERYMKSIIKHFEFKSSNDQLVTVSGLKYKGKPVFFAVELAEGLGYTNPSKALKDHCKSLIKLNYNDSLELGLGDNPRGVILAGQSDMFRLVMRSNLPSAERFQDWVCEAVLPSIMETGSYSIKQSQSGLPEYRKARTLKMSVDAITNLFELMPNLSNEAKQCAAANIVNPIVGFEAVPLPALEEKYYTAGEVGKMLDLSANKIGRIANDHNLKTEQHGKFFLDKSAYSDKQVEAFRYNENGIKALRHLIHGVEVAZ

SEQ ID NO: 98 - protein, 301 aa, Photorhabdus luminescens
SIDNLRLNTVTNCIFQFTLHIFTYFCTQAINSAISNTETFDEFFIKLWQLTLFHFFQRDCKLSRFTFQIFSVIIFWEIDINGKFFPCFMTNNALFKTWDHTALAHSQHKIGSLTTFELFTINRTIEVNSHTIFCTNSFFGFFPISLLLTQCFQHCINIFVFYFNNGLFNFNRFQIFQFNFWINFKLYRVSEIFTIFELFWCITWRTCWINFLFDDCINKVTLHQITQNVLNDRSTVTLFNNVHRHFAFTETIDTNFFCYIDQLTTNCFLNIGSRNGDCHTTPKALSGFNRNLHLFTSKKSZ

SEQ ID NO: 99 - protein, 250 aa, Photorhabdus luminescens
LRFFFVVEKSMDIISDFLTTQSASIVTRSIGEFQLDAVTVESHSSTLRLTENPIESGASIADHAVLEPKEITVTGVMVGYEPPRLVSDLMGFDSSAIDSFPLPMEIRAMTKQSEALVSRYISTVDAVVESTSRSMAPFLPDYQGLADDSSQTLDRVGKAYNDLLNLQKKGETITVQTGIKLYENMMIVSIGVTQTSDGSAEFSLTLREIFIVETQKAKGLNVKKSPKKKQMGKTQPKETSKSALKGIFSZ

SEQ ID NO: 100 - protein, 282 aa, Photorhabdus luminescens
MRQFGRQIKLTIGNTKESIEITNLRVTFEVSKTITSEPNPATIRVYNLNQSHRNLITSKTYNKASLAVGYDELRVIYTGDIIEAITVHDDLDFIIELTCGDGYEAYTGALVNKTLKAGATDADILSVATKSMKVDKGVVDLPKDRQLPRGKVLTGNARDIMHKIARNNGANWSVQDGNMIVLPKNKVLTDNEGFVLSQETGMIGSPEKTDDGLQITCLCNPALRIGSLVRIKSIIPEYNGDYKITELEHAGDFMSDDWHTLITCTGGKYQKVNNEQKSNSTZ

SEQ ID NO: 101 - protein, 225 aa, Photorhabdus luminescens
IMNKNPTLLDVLDKKAENERLDIHTALPARVVSFNGHTATIELMITQTLSNGEVIELPPLADVPVQFMRAGGFCFTVPVKAGDEGLAIFSERCIDGWYATGNKSAPLDARLHDYSDAFFIPGVCSQPKKIPDFFPGGASMQTDDGSTFIRMTNGKITIKGDIEHLGNSKQTGNHEQSGNWNQISGNSESNGTVSAAKVVGGGIDLQTHVHGGVQSGGSNTGKPQZ

SEQ ID NO: 102 - protein, 383 aa, Photorhabdus luminescens
MRSMQMLKITKTGIVIDQLADIHQRLADGFKRIYGEDINLEADTPDGQMIGLFSQELANINQVIAFVGQMLDPYQSTGAWLEQRAMYAGIIRRGAEYSYLDDVVITGNAGVNVPKDTVLTDDNRVKWVMLDDVTLNEQGSVRVNLRSKELGSFTLQPDKQLQMETVIVGIEKVVTTKPAKQGTNEETDGNLLLRFMQSHSVNNYDDRAGIKAALLSLPDVRQAEVYENYTGQTDPVTGVPAHSMNAVIIGGNNKDIALMLIKKKIGGCAFFGKQTCEINFAGANRKINFDRAEMIDINIDVALVRTSEFHDIDIDGIKSALAATKFNIGESVYAMRLTCQVNSIAGFYIKSITVNGSDKANIGPRQCAVIKHENVNVEVLIEZ

SEQ ID NO: 103 - protein, 219 aa, Photorhabdus luminescens
LNKKPEDFLIWQYRGKPKARQTVGLLLSESAIVFKSAVKLTEILDINKSENYGLDLIGRHVGISRTMKSFVPKDYFGFLGIDSALGFNTGVFYRYGDSLNDSTNLDDKDYQFFIKAKVIKNYQRPTIGNITLSISYLLGDQAFIIDNYDMTMNIVIPSSYLTPFRLHAIKKLDILSRPIGVQYKYIVITDSHPFGWANDPHASGFGDGKFTRIVDVNSZ

SEQ ID NO: 104 - protein, 441 aa, Photorhabdus luminescens
MSIVNKPDYKVFAQDAKSGEIETFPDVLRGWGVTLDRTAGKPPLEWFNAIGKRVDEWLMYLSQRGLAEWDSTVDYPQYAAVQHSGKFYVALKQNISQQPDRSQNNWQSMADFLGAPKLVLDALNTKQDKGDYATNAQLNTVSSELNKSINAANTSATNANNNANTRLSKSQNGADIPNKSEFIKNLGLVETVNKANNAVSSISGGTIKAGLNVQSVLSVGISQNKNLRISSNETADSQINLIVWGNSNRKTIFECGDKNGCLFYSHRLSSNNVELFSTGKIIPSDYSNFDARYDNVPAGVPMPYPHRYTPPGYLTCNGQTFDKSLYPKLAEAYPAGRVPDLRGEFIRGWDDSRGVDPGRVCGTWQADCIPDHNHYKVASKQLVEDLVLTGDAGWYTSSGSSTRTRSLDQNTYTGGVTEAQVIANETRPRNIAFNYIVRAVZ

SEQ ID NO: 105 - protein, 232 aa, Photorhabdus luminescens
SSSNSKRNPSPQHSIQLHSESSIMAEQKYSLEHETAVLGKDGLAIQAGWIKVFHSNQITREFIASDIEYVMLGVSLSAGAYPDAPELPKTNDVAVCRSVDKSRWEILPDYRGKIAYDTLTREPTEVTEIGELPDTLTFKKPPTDFDTWNGKDWVVDKDLLKSHQINEAKQQQAALLQQANETISLLQDSVDLEVATDSEKEALLEWRKYRVLLTRVDVNQAPSVEWPEVPKZ

SEQ ID NO: 106 - protein, 580 aa, Photorhabdus luminescens
MVTSRQRYREKVSQMISWGHWFALFNILLSLGLGSRYLFVSDWPSSLFGRVYALSSWLGHFSFIVFAAYLLVLFPLTFIAMSQRLLRFLSAIFATAGLTLLIFDIAIYNRFHLHLTPLVWDLVINPDQGELAREWQLMFICIPVIFLIQMLFGTWSWQKLRSLNRQRFGKPLAAVLISAFLASHLMYIWADANFYRPITMQRSNLPLSYPMTARKFLEKHGLLDQQEYQRRLMQQGDPAALTVEYPLNDLTYQDKGNGYNLLILVVDKLDNRDITENMPALSHFRETNIQFNQHFSTGIQNDTALFGLFYGISSGYLDGILAGRKSSALINALTHQGYQFGLFSSVGFGTPLYRHALLSDYSLPTEVNQSNQLTVEQWQQWLNLPNTNAPWFSFLRLSGLDKADSVGNAAALDGPINTVLETLKNKNALNNTVIVITAEHSETATTHPPRWINNGKFNRAQMHVPLLIHWPGTPSQTISKLTSHQDVMTTLMQRLLHVSNTPADYSQGQDLFAAQRDNPWVITGDDGSLIITTSENTLFLDKNGNYHLYDLEGNEIKDAKPNLAQLLQILTEVKHFIANZ

SEQ ID NO: 107 - protein, 335 aa, Photorhabdus luminescens
MSLQIDQIALHQLIKRDEQTLDVVLRDSLLATDQVVEDMMAELHRVYSAKSKAYGLFNEESELAEALRHQRKGDEDFLGFSRAATARLRDELAKYPFAEGGTVLFCQYRYLAVEYLLIAVLNSCNSMSVNDNLDLNTTHYLDIPHADIVARIDLTEWETNPESSRYLTFLKGRVGRKVSDFFMDFLAASEGMNAKVQNKGLLQAVDDYCESGELNKDERQAYRQQVYNYCNEQLQAGEEIEIKALSQALPTFGEQNFQQFSQEQEYELEESFPADRSTLRQLTKFAGSGGGLTINFDAMLFGERIFWDPATDTLTIKGTPPNLRDQLQRRSSGHZ

SEQ ID NO: 108 - protein, 586 aa, Photorhabdus luminescens
MTFTLRPYQQEAVDATVNHFRHHHEPAVIVLPTGAGKSLVIAELAKLARGKVLVLAHVKELVAQNYSKYCAYGLPADIFSAGLQQKQSAGKVVFGSVQSVARNLEHFDNQFSLLIIDECHRISDDENSQYQQIIHHLRQNNPQLRILGLTATPYRLAIGWIYHYHYHGMTRGDESCFFRDCIYELPLRYMIKHGFLIPPKRLDMPVMQYDFSQVRSSQQSIFNDTDLNHEIKRQKRITPHIIRQIIEYSADRKGVMLFAATVEHAKEIFQLLPPGQAALVSADTSTADRDRFIEAFKTQRLRYMVNVAVLTTGFDAPHVDLIAILRPTESVSLYQQIIGRGLRLFPGKKDCLILDYAGNPHDLYTPEVGSNKPDKQSQPVQVFCPICNFANIFWGKCTSDGEIIEHFGRRCQGWENDQYGKRRQCEFRFRFKLCPHCNAENDIAARRCHSCQEVLVDPDDMLKAALKLKDALVLRCGGMQLIPETDSKGEWLKIIYYDEDGADVSERFRLTTPAQRLAFEHQFLRQHQRASAIPFNWKTASDIVHQQPLLRHPDFVVARKKGRFWQIREKIFDYQGRFRRADELYZ

SEQ ID NO: 109 - protein, 193 aa, Photorhabdus luminescens
MLKRILFPFITLFLLAGCAAPSNILTIEPKITLPTADPTMGAITISISGADNRQSQTLAQVNRNAKLEILKPSRDLRFLLQEILEKQMAARGYMIGSPANANLQIIVNNLYADVKEGSLRHNISTKADISIISTAQNGSKQVKNYRTSYNVQGPLGATNEKIADAVNTVLSEVIADMAQDPSVSNFIKQNARZ

SEQ ID NO: 110 - protein, 234 aa, Photorhabdus luminescens
MRLDKFLSQQLGISRNDVGRELRAGRITVDDEIVKTGAYKLTPEQQVMFDGSLLEQQQGPRYFMLNKPQGYVCSTDDPINPTVLYFIDEPAAHKLHTAGRLDMDTTGLVLLTDDGQWSHRITSPKHHCKKTYLVTLECPVAAETADKFLAGVQLNGEKTVTKPAQLEILEPQIARLTISEGRYHQVKRMFAAVGNRVTALHRERIGEIILAPELEPGEYRSLTEQEIASVTFLZ

SEQ ID NO: 111 - protein, 395 aa, Photorhabdus luminescens
VQQQRSSYLGLILILGLLSMLMPLAIDMYLPSLPTVAEDFGVDSGQVQMTLSSYILGFAIGQMVYGPMADSLGRKPVILGGVTVFALASAACAMVQNIDDFIYMRFLHGFSAAAAGVVINALMRDLFTKDEFSRSMSFVILVMTIAPLIAPILGGMIMIWFTWHAIFWSIAVTSVITVFLVAFFIRETLPKEKRQKFHLRTTVSQFIMLFRQRRVFCYMLASGFSFAGMFSFLSAGPFVYIELNGVSPQHFGYYFALNIVFLFVMTTINSRYVRRFGALKMMYFGLSVQFMMGIWLLLSTALDFGFTALVIGVAAYVCGIAMITSNVMAVVLDDYPHMAGTVSSLAGTVRFGISALVGILLAMLPARNAWPMVGSMVLSVILAVLLIIYAKKRRZ

SEQ ID NO: 112 - protein, 197 aa, Photorhabdus luminescens
MVKSQPALRYITRLIPALFVAITLSACSSPDSSRFRNTQTDTHAVNGKNGFLLQASQDEFEALVRNLDIKSKILSQYNGWKGVAYRLGGVTKRGIDCSGFVQRTFRDQFGMELPRSTFEQQNIGKKIDRSRLRPGDLVLFKTGARTRHIGIYVGNDQFVHASTSNGVIVSRLSSTYWSKRYYSGRRVISNSIVPNGZ

SEQ ID NO: 113 - protein, 235 aa, Photorhabdus luminescens
MTRSHPFAIFILNLLGITLFLSWYLPEHHGFWLKIDSAIFYFFNEKLTSGSTFTEFVAFVNIRAFDVISLLCMGLLYYNAFRKQNYDGKRRLFMIGLVMIISAVILNQIGHLLPVVRPSPTLTFDHINRISEMTNLVTKDASSDSFPGDHGLMLLIFSCFILRYISGRAFCIALLIMVIFALPRIMAGAHWFTDIAVGSLSLILIGTSWLLLTPLSDIMINWLDKNLPQIGRPIZ

SEQ ID NO: 114 - protein, 191 aa, Photorhabdus luminescens
MAKANEIKRGSAVSYNGKLLLVKDIDIQAPSARGASTLYKMRFTDIRTGQKVEERFKGDDILDTISLTRRSVNFSYIDGDEYVFMDDEDFTPYHFKKEQIEEELLFIPEGGLPGMQVLTIEGQVIALELPQTVDMVIEETAPGIKGASASARTKPAKMSTGLTVQVPEYISSGERIRIHIAERRYMGRCDZ

SEQ ID NO: 115 - protein, 420 aa, Photorhabdus luminescens
MSTETPQSLKRPPILGGAMIIAGTAVGAGMFSTPVATSGVWFTGSIILLVYTWVCMYFSGLMILETNLNYPSGASFHTMTKDLLGKGWNAINGISIAFVLYILTYAYISAGGSIIAHNFKNIISISQANAGFIFAFIVAFIVWLSTQAVDRLSTILIGGMVITFFMSVGGMFTEVKYVILFNQTDTTSNDTATSYISYALTALPYLLVSFGYHGNIPSLVKYYHKDRKAVIRSLLLGTLIALTIYILWQYVIQGNIPREAFKQIIADGGNIGDLLKHMDNTTNSKTVHQLLNAFSYMALASSFLGVSLGLFDYIADFFGFKDNNTGRLTSALVTFIPPTALALLFPNGFLYAIGFAGFAATIWAVIIPALMARASRQRFPEASYRAPGGKFLIGFVILFGLINAIAHILSSLDLLPVYHZ

SEQ ID NO: 116 - protein, 313 aa, Photorhabdus luminescens
MSRRVATITLNPAYDLVGLCPEIVKGAINRVQAAGLHAAGKGNNVAKVLRDLGIDVTVSGFLGKENQEGFQQFFNENGMVNRFHLVPGRTRINVKLTEESGEVTDFNFTGFYVGEAEWSGFVNDSLSWLGQFDMVVVSGSLPAGVSAESFTDWMTCLRQLCPCIIFDSSREALVAGLKASPWLVKPNRHELEVWAGRLLPELSDIIIAAHQLRDQGIAHVVISLGEQGALWVNASGAWLAKPPHCKVVSTVGAGDSMVGGLVYGLLMRESSEHTLRLATAVSALAVSQPNVGISNRPELAAMMAKVELIPVRZ

SEQ ID NO: 117 - protein, 281 aa, Photorhabdus luminescens
MKFVGAHVSAAGGVDQAVIRAHELKATAFALFTKNQRQWHAPHLAADVIDKFKENCERYGYGSRQILPHDSYLINLGHPESEALEKSRLAFIDEMQRCEQLGIDLLNFHPGSHLNKVDVDKCLARIAESINIALNKTQRVTAVIENTAGQGTNLGFKFEHLAAIIDGVEDKNRVGVCIDTCHAFAAGYDLRTNDVCEQTFQQFEKIVGFQYLCGMHLNDAKSEFASRVDRHHSLGEGNIGKTPFSYIMKDARFDGIPLILETINPDIWPQEIAWLKLQQNZ

SEQ ID NO: 118 - protein, 344 aa, Photorhabdus luminescens
MKLIPGLILAAILTAISIYAGNIPWFINMGLGTLTLAILAGIIVGNTVYPLLKPYCDEGIHFSKHYLLRAGIILYGFRLTFQQIADVGITGLLIDAAMLSSTFFIAIWLGKSLFGLDQQTVILIGAGSSICGAAAIMATEPVVNAPASKVAVAVSTIVIFGTIAIFIYPWFYQLNEHYQWLPLTQETFGIFTGSTLHEVAQVVAVGHAISDQTENVAVISKMIRVMMLAPFLLLLSRYINHADTKNGRNHQEKTPITIPWFAVIFIAIAGFNSFNLLPAAIVNSLINIDTIMLTMAMGALGLTTHVSAIRQAGFKPILLALILFVWLMAGGLLINLGIQHLFGZ

SEQ ID NO: 119 - protein, 292 aa, Photorhabdus luminescens
LRGNMHITLRQLEVFTEVLKSGSTTQASQQLALSQSAVSASLTDLESQLGVQLFDRVGKRLVTNEHGRLLYPKALALLEQAGEIQQLFKQELGALRIAASSTIGNYMLPEMLANYRQDFPDTPLELNISNTQDVINSVLEFRVDLGLIEGSCHSPELITQLWMEDELVIFSSPENPLAEQDLKLDDLVKASWILRERGSGTREVLDHLLFVHLPGFKILMELGNSEAIKHAVKFGMGISCLSRRVVAEQLQNRTLLELKVPELRLFRTLYLIHHRQKHMSIALQKLLSYCRZ

SEQ ID NO: 120 - protein, 493 aa, Photorhabdus luminescens
MSYRYLTVFTQHNSRILLLLGFVSGLPLALTASTLQAWMTVEDVDLKTIGFFSLVGQAYVFKFLWSPFMDRFIPPFLGRRRGWLLVTQLLLIASIAAMGFLQPSQHLWWLATLAVTVAFCSASQDIVFDAYKTDLLSSEERGVGAAVSVFGYRLAMLVSGGLALWIADRYIGWQHTYWLMAGLMLIGVYATLKAREPEIDAPSPKTLQQAAIEPLVDFFNRNNAWLILLLIVMYKMGDAFAASLSTPFLIRGIGFDAGEVGMINKTLGLAATIVGALYGGYLMQRWSLFRSLMIFGILQAISNIGYWLLSITDKNIYTMGSAVFLENICGGMGTAAFVALIMALCHKSFSATQFALLSALSAVGRVYVGPIAGWFVELHGWPNFYLFSIAASVPGLLLLFICRQTLVYTQRTNDFMPRTEFKNSYRLALGLLSLASILLTFWLFTITTNALNWTHAPYLAETLLLWAAQIGITGIILGSFLDYLALRRNKLAZ

SEQ ID NO: 121 - protein, 520 aa, Photorhabdus luminescens
QRFLAILIVRICYNPPSDLFAANRNRMSQQQKSVSRKPATQHLRRELKARHLAMIAIGGSIGTGLFVASGATVSQAGPGGALLSYALIGLMVYFLMTSLGELAAYMPVSGSFSTYGSKYVEEGFGFALGWNYWYNWAVTIAVDLVAAQLVMGYWLPDMPGWIWSALFLALIFLLNFISVKGFGEAEYWFSLIKVSTVIVFIVVGLLMIAGIMKGAEGAGWHNWTVGDAPFAGGFSAMIGVAMIVGFSFQGTELIGIAAGESKDPAKNVPSAVRKVFWRILLFYIFAILIISLIIPYTDPSLLRNEVGDISVSPFTLVFENAGLLSAAAMMNAVILTAVLSAGNSGMYASTRMLFTLAKEGKAPRIFGKLSKGGVPRNALYATTVVAALCFLSSMYGNQTVYLWLLNTSGMTGFIAWLGIAISHYRFRRGYVAQGLDLSKLPYRSGFFPVGPIFAFVLCLTITLGQNYQAFLQDKIDWYGVTATYVGIPLFLLIWFGYKLARKTHFIKYSEMKFPDIENQZ

SEQ ID NO: 122 - protein, 384 aa, Photorhabdus luminescens
YERANKMKFMSRSIAKSISVGLLAGSAVMASFASWAETVTDIVGRTVEVPENVNRILLGEGRLFHAIALLEGDKPLARIAGWQGDFRKLDPQSYAVYKAKFPEIDKVPLIGNTSAESVSSEKVLTLNPDIAIFGLSGHGPGKDSELVAQLEKAGVPVVFVDFRTEPLKNTLPSIRMLGKVLNREKQAAEYADFYEKNVKLVTEITNKIPEEKKPTVFIDLRAGAFEDCCATAGDGNMGNFIDLAGGKNIAKGVLPGALGNMNLEKIIAVDPYIYIASGAKAPDSNEPGVKLGAQSTSELAKASLKQMTERKGISTLTAVKEGRDYAIWHNYYNSPYNVVATQVFAKWFYPEKFTDLDPQKTLNELHSKFLAVDPSGVYWVSEKZ

SEQ ID NO: 123 - protein, 330 aa, Photorhabdus luminescens
VMMVFIVLIIGVSLVLDFTIGPSGLSLSSLWQTLVSPESVDAGTRVIVWDIRLPYALMAVVIGLSLGLAGAEMQTILNNPLASPSTLGVAQAAAFGAALAIVSGIGIPGVPDQWFISANAFIFALLAALVLDTITRWTRVATSGVVLFGIALVFTFEALVSMMQFIATEDTLQGLVLWTMGSLARATWIKLGVMLLVFAAIFPISMMNSWRLTALRLGEDRAISFGIDVRRLRLGTLLRISILAALAVAFVGPIAFIGLIAPHIARMMFGEDHRFYLPASALIGALVLSMASIASKNLIPGVVIPVGIVTALVGVPFFLSIILRHRANIZ

SEQ ID NO: 124 - protein, 267 aa, Photorhabdus luminescens
MNPGLAINNFFAGYPKHSVIENLNIAPLPRGKITVLLGPNGSGKSTLLRSLAGLNCARGQLWLDGQDLMKMSFVQRSENVVYLPQSLPAGVHLHVLESIIVAQRASGGRHSETSEEEVMLLLRQLGIEHLALCYLDQLSGGQKQLVGLAQSLIRKPTLLLLDEPLSALDLNYQYHVMALVAQETYRRNMITVVVVHDINIALRHGDHVLMLQKGHLIAEGIPEQVITPDSLAQVYGVKGRIERCSQGIPQVLVDGLVSKLASENSFZ

SEQ ID NO: 125 - protein, 660 aa, Photorhabdus luminescens
MGVFNKRKIALGIIATISSGSVFAASSSNDTILVTTAAGFQQKIEDAPASISVVSREQLETKAYRDVTDALKDVPGVVVTGGASSSDISIRGMAAQYTMILVDGKRVDTRGTRPNRDNSGIEQGWLPPLAAIERIEVVRGPMSSLYGSDAMGGVINIITRKAQKEWKTSFRADGTLQERSKSGNSHQSSVYTSGPIIDGLLGLKVSGLYSHRNEDKFIGGFNKQEMRNGSATFSFTPDEQNTFDFEAGRYEQDRDSTVGKTKTSSWRSPGNSESRYKRNNYSITHNGVYDFGTSTTYFQRDESRNPGRDMKYYDNLFNTHTVFMLDDHSLSIGGQYRYEDLRDEGNQLASAKNINKLNRWSWALFAEDEWQMTNDFALTGGIRMDKDENFGDHWTPRLYGVWHVDEQWTIKGGVSTGYRSPELRQAASNWGQITGGGGDPAIIVGNPDLKPEKSFNQEIGVIWNNRDNFNVGLTIFNTEFKDKITELRRCTDPSGKSQGKCVIDGTAYKFISDRVNIDKANMRGVEATMNWDIVDNWVLAANYTYTDSEQKSGNFKGKPLNKMPKHMANATLNWQASPEMQAWTRVNYRGKTSNYLSRTSMGTGTPSYTFVDIGVSYYLAEGLRLVGGVYNVFEKQVTEDTHDIVLDGRRYNIGINYDFZ

SEQ ID NO: 126 - protein, 429 aa, Photorhabdus luminescens
MMGLAYLQPMTIFDTFGIVSGLTDGHVATSYAIALIAILFTAVSYGKLVKRFPSAGSAYTYAQKSISPHVGFMVGWSSLLDYMFMPMINILLAKIYLQAIFPSVDPWIFVVGFALLMTAFNLRGINVVANLNTAIVIVQVTVMVVFVGLLIHGVYNGEGVGTLWNAKPFVSEDAHLIPMITGATILCFSFLGFDGISSLSEETPNAGKVIPKAIFLTVLIGGVIFIAVSYFLQLYFPDISRFENPDESQPEIMLYVAGTLFQSIILVFSCVTVLASGMAAHAGVSRLLYVMGRDGVFPEKIFGYVHPKWRTPVINVSLVGIIGLSAITFDLVTATALINFGALIAFTFVNLSVISQFYIRERRNRTLKDTINFLVLPVIGACTVSVLWMNLEQSSMELGLTWGAIGLVYMVFLTRRFRQPMPQCSEMVZ

SEQ ID NO: 127 - protein, 572 aa, Photorhabdus luminescens
MNDAKTSQNQQLITTLTNIVGKSHILTAPHKTERYRKGFRSGQGDALAVVFPGSLVEQWHVFKVCVEADKIILMQAANTGITEGSTPNGKGYDRDIVIISTLRMNKIQILKQCNQVVALPGSTLWQLERALKPLGREPHSVIGSSCIGASVIGGICNNSGGSLVHRGPAYTEMALYGRVNECGKPELINHLGIYLGETPEEILSCLEEQRYSDQDVEQGQRKASDHEYTQRVRDVDADTPSRFNSDERRLFEASGCAGKLVVFAVRLDTFPAEPLSQVFYIGTNQTGVLTELRRHILANFHNLPMAGEYMHRDIFDIAEIYGKDAFIMIDKLGTDKMPTYFTLKGRMDAIFNRVPFLPVNLIDRIMQGLSRLLPSHLPKRLKEYRNRFEHHLILKMSGDGVEEARSWLEDYFSRVEGDFFACTPEEGAKAFLHRFSAGGSAIRYQAVHSNEVGNILSLDIALRRNDREWFEQLPPEFDDVLVHKLYCGHFMCYVFHQDYIVKKGVDVQALKARMIELLDKRGAEYPAEHNVGHLYQAKPQLKAFYRMSDPTNTLNPGIGKTSKLKNWGEGSZ

SEQ ID NO: 128 - protein, 477 aa, Photorhabdus luminescens
VKNSSEQPTFYIHDYETFGQHPALDRPAQFAGVRTDMDFNIIEEPLVIYCSPADDYLPQPEAVMITGITPQIALEKGVNEAEFARQIHNAFSVPNSCILGYNNIRFDDEVSRNIFYRNFYDPYAYSWQKGNSRWDLLDVLRACYALRPEGIIWPENEEGLPSFKLEHLTKANGVEHSHAHDAMSDVYATIAMAKLLKEVQPRMFNYFFQLRNKQKINALIDIPQMKPLVHVSGMFGAARSNLSLVAPLAWHPANQNAVIVCDLAGDISPLLELDADALRERLYTRHDELQPDQPPVPIKLVHINKCPIVAPDNTLRTEDAERIGLDRDYCGRNLAILQNNPQIREKVVELFAEAEPFPESNNVDTKLYDGFFSSADKAAMNIIRETLPQNLPALDLTFQDSRIKTLLFRYRARNYPTTLTYDEQQHWLRHRQEIFTQDKLSEYFFIIEQLFTEYQGNEEKCRQLKALMEYAVQLAGZ

SEQ ID NO: 129 - protein, 244 aa, Photorhabdus luminescens
FRSDSGWLFTQASIRLQSHTRRICNFLPTAAAYFFNVLYEGPCVPEASRLSSRVMAVALVPMRSATCACVSPAFLRAASSSSSNANSCSSFSYSAFTAGFDNIFATISSCVMVGGVYLPVIFYLFHSDFGFPAFFKWGLLCFLHEAVQHHYTVPNHCAIEYASNSFSPFESEFKQPITKRFCVWFSEVGTMFSHSFGIPDVTGLKCVRESKDLVLHLGAIVIDSIFHEPNITKLLYFCNTLLMZ

SEQ ID NO: 130 - protein, 211 aa, Photorhabdus luminescens
MKPWLIFGAGSGIGRHLVTVALQQKRPVIALIRNFQQATELSALGVKVIQGDACNAEDVEKTVQHVSSEAIVFSTIGGIDSDLFGNMTIIDTIEKTEITRMLLVTSIGCGESWKTLSPRVKSLFGQSVRRKSMAENYLQTSSLNYTIIRPGGLTDKPGTGHCQRYQHEIHGAASRQDVAHQLATMAEEESSYQQIYTLVDPELKPDWAVAZ

SEQ ID NO: 131 - protein, 254 aa, Photorhabdus luminescens
MRTTILATALFTTVSVPAYAEYQGGFANISMNYLDWTSHTTHKSGQTSHKDDFAYLELEGGAGFNWGELYGFFDLENAFNNQHAEPGDNQRYTFKTTGRFYLADTGFNLYGHVYGTYSLPGTAHGGNFHEVNTLYGIGYNTDFAGVWFKPFVALHYVDQTFYSGNNGYVVGWVAGYDFQLWEEKFSITNWNEIELNRNERYGNGGRNGTNGAIALWWTPHQSFTTGIQYRYADHKLGEDFWQDGIVYTIKYNFZ

SEQ ID NO: 132 - protein, 1035 aa, Photorhabdus luminescens
MKRMLINATQQEELRVALVDGQRLYDLDIESPGHEQKKANIYKGKITRIEPSLEAAFVDYGAERHGFLPIKEIAREYFPNNYHPHGRPNIKDVLREGQEVIVQVDKEERGNKGAALTTFISLAGSYLVLMPNNPRAGGISRRIEGDDRTELKEALASLEVPEGMGLIVRTAGVGKSAEALQWDLSFRLKHWEAIKKAAENRSAPFLIHQESNVIVRAFRDYLRPDIGEILIDNPKVLDLARQHITALGRPDFTSKIKLYSGEVPLFSHYQIESQIESAFQREVRLPSGGAVVIDTTEALTAIDINSSRATRGGDIEETAFNTNLEAADEIARQLRLRDLGGLIVIDFIDMTPVRHQREVENRLRDAVRQDRARIQIGRISRFGLLEMSRQRLSPSLGESSHHVCPRCSGTGTIRDNESLSLSILRLIEEEALKENTHQVHAIVPVQIASYLLNEKRQAVSAIERRQGDVGVVIVPNDQMQTPHFSVLRVRKGEEISALSYLLPQFHEAGAINPQEDVQPERKRPEQPAISAFALPADTPAQQPSHKAKEKKPNHTAQTITEQPGLLSRFLTALKKMFSTEAEEEKPAQKKENKLSGHDNRRSSERRNQRRQNSRKDRDDNNLRDEQRNNRDRDEQRKNRNTQQKNGTQDNNVTIDTAARETQQQQRREQRAERQRRRQEEKRQLQPETQKPEIVENEVEERLPVIPRRQRRQLEQKIRIIDEVKEVTTVASLPIPVVTEEQLPVPVEIPLETAQPQQLTENKEQQDNVMPRRSRRSPRHLRVSGQRRRRYRDERNLLQSPAPLSMAVASPEMASGKVWVRYPVVPISIEMPEEISMIEQQEQQNEVLPVIAAETVPAIIVVAESEQTVIESPKVAETPAAHQNGIKSATGITEQNDIVLQQTKPVQEERSVIELVATTPIIPEFEQQSEADEDIVVSEDVVVSEDIVISKEIAAVMIIEESKDEMVKQPVAIIAKVHHSYAPMTKAPAPEMIEKPIVINEWQRPFSHFEGKGGAGGHSATNAATSPMAKPQFFEZ

SEQ ID NO: 133 - protein, 327 aa, Photorhabdus luminescens
VIIKIAIMKTNNQVVQFVTIDDDEAGQRVDNFLLARLKGVPKSMIYRIVRKGEVRINKGRIKPEYKLSAGDVVRIPPVRVAERQAVPVSAKLDKVAALDDCILYEDDHILVLNKPAGTAVHGGSGLSFGVIEGLRVLRPEAKFLELVHRLDRDTSGILLIAKKRSALRALHEQLRLKQMQKDYLALVRGQWPSHCKVVQAPLLKNILQSGERIVKVNSEGKPSETRFKVEERFANATLVKASPVTGRTHQIRVHTQYAGHPIAFDNRYGDKVFDSQLSATGLNRLFLHASVIKFTHPSTGETLRLEAPMDEQLRYCINTLRQNHSNZ

SEQ ID NO: 134 - protein, 203 aa, Photorhabdus luminescens
MSFGKIMTQIILASTSAYRRMLLEKLRLPFICAAPNTDETPRMNENAEQLVMRLAQAKAQALQTKYSQHLIIGSDQVCVINGEITGKPHSFEHAFKQLRQASGHCVTFYTGISLFNSKTGITDTRCELFNVYFRELADDEIRAYLTAENPLNCAGSFKSEGLGITLFERLEGKDPNTLIGLPLITLTELLIRQGVNPLTAIGZ

SEQ ID NO: 135 - protein, 346 aa, Photorhabdus luminescens
LTNLTLALDAMSGDFGPRVTVPAALQALASNPRLKLLLVGIPDIISPMLVNSDTELLSRLQLVPAERVVANDAKPSQAIRNSRGTSMRIALDLVKSGEAQACISAGNTGVLMGLSKLMLKSIEGIERPALMTVLPNLKQRQTVVLDLGANVNCDSRMLVQFAIMGSVMAEEVVGVVNPAVALLNIGTEESKGLDNIREAATILKRIPTINYIGYLEGDELLTGKSDVLVCDGFAGNVTLKTMEGAIRVILSLLKSSDGQKKKFSWLLRIVKKWLQKRMTKRFGHLNPDQYNGACLLGLYGIVIKSHGAANEHAFKAAIEQAVQAVERQVPDRIAARLETALPKSDZ

SEQ ID NO: 136 - protein, 318 aa, Photorhabdus luminescens
MYTKILGTGSYLPAQVRTNADLEKMVDTSDEWIVTRTGVRERRLATDDETVAVMGFRAAKKAIEMSGIDKEQIDLIIVATASSTHAFPSSACQIQHMLGTQNSAAFDISAACSGFVYALSIADKFIKTGVAKHALVIGSDSITRTLDPEDRGTLVLFGDGAGAMVVGASDEPGILSTHLHANGSYGELLVLPYQERQNLKEPAYASMIGNEVFKIAVRELANIVDETLEANNLPYSELDWLVPHQANLRIIAATAKKLNMTMDKVVVTLDRYGNTSAASVPTAFDEAVRDGRIKRGQLILIEAFGGGLTWGSALIRFZ

SEQ ID NO: 137 - protein, 313 aa, Photorhabdus luminescens
MSMSEFAMVFPGQGSQDLGMLADLATAFPVVEQTFAEASDVLGYDLWALVQQGPEEELNKTWQTQPALLAASVAIWRVWQEKGGKAPSLMAGHSLGEYSALVCAGVIDFKQAIRLVELRGKLMQEAVPEGTGAMYVIIGLDNESIDRACKEVAQGQIVSPVNFNSPGQVVIAGEKEAVERAGDACKAAGAKRALPLAVSVPSHCALMKPAADKLAVVLEGIEFGYPQFPVVNNVDVKIEQSAEAIRHALVRQLYNPVRWTETVEFITEQGVGQLLEIGPGRVLTGLTKRIVNTLSAAAVNDTASLITALENNZ

SEQ ID NO: 138 - protein, 245 aa, Photorhabdus luminescens
MRLDGKIALVTGASRGIGRATAELLAERGAYIIGTATSDKGAEVISAYLGEKGKGFVLNVTDPESIEQLMSTIRTEHGGLDILVNNAGITGDNLVMRIKDDEWQHVIDTNLSSVFRMTKAAMRFMIKKRYGRIISIGSVVGSMGNAGQASYAAAKAGLVGFSKTLAREVISRGITVNVVAPGLIETDMLRALPEEQLANFSNDIPAKRLGDVKEIASAVAFFASDEAAYITGETLHVNGGMYMNZ

SEQ ID NO: 139 - protein, 417 aa, Photorhabdus luminescens
VSKRRVVVTGLGMLSPVGNTAESSWKAVCAGQSGISLIDHFDTSHHATKFAGLVKGFNHEDFNISRKDARKMDDFIQYGIAAGVQAIEDSGIEVTEANASRFGAAIGSGIGGLGLIEENHGALVASGPRKISPFFVPSTIVNMVAGHLSIIYGLRGPSISIATACTSGVHNIGHAARIIAYNDADIMLAGGAEKASTPLGVGGFGAARALSTRNGNPQGASRPWDKDRDGFVLGDGAGILVLEEYEHAKRRGAKIYAEIVGFGMSSDAYHMTSPPENGAGAALAMENALRDAGITTKQVGYINAHGTSTSAGDLAEAHAVESVFGEGTDVLVSSTKSMTGHLLGAAGAVESIFTILALRDQVVPPTINLENQDENCRLDFVPNESRKVEGMEYALCNSFGFGGTNGSLIFRKIKPDZ

SEQ ID NO: 140 - protein, 275 aa, Photorhabdus luminescens
MYWINGERCDYLPANDRSVQFGDGCFTTAKIEQGQVALLSLHIQRLQKGVERLYLPQPDWQRLESHIRQIASTTEQGVLKVIISRGTGGRGYSAQGFTQPNQILSLSPYPDKYLKQRQKGLSMVLSPVAMGINPYLAGIKHLNRLEQILIKTFIEKSNADEALVLDTDGLLVECCTANIFWRKGKGVYTPDLRGCGVEGVMRERIIALLSESDYHFSCVSCYPETLADADEVIVCNSLMPVIAVKEIQAHENQPRWQYQSRELYEYLLPECLKLZ

SEQ ID NO: 141 - protein, 312 aa, Photorhabdus luminescens
MRLMKYNKGIGILSILAATLVLSGCDMVLMNPKGAIGAEQKTLILTAIGLMLIIVIPVIIMAFTFALRYREANRSATYRPNWAHSNKIELVVWTVPIIIIIILATITWKTTHELDPYKPLVSDEKPVTIEVISLDWKWLFVYPEQGIATVNEIAFPSGVPINFKITSDSVMNSFFIPQLGGQIYAMAGMQTKLHLIADEPGTYKGLSSSYSGHGFSGMKFTATATADREGFEQWVQKVKASPKTLDTMQAFNELAKQSQNHPVEYFSSVKPNLYQDIIAKFMGNMNMHGGHGTTTGHNMNMSETAHAGVEEZ

SEQ ID NO: 142 - protein, 340 aa, Photorhabdus luminescens
LMKWKKRLFALLALIVITAAILLYAGYEKVEKFADQTLTIKQNRIFTLPTGIGRHGLEALLVRDNLIEDSHIFPWLLRLEPKLAEFKAGTYQLTREMTLREMLQLFSSGKEAQFTVRFVEGSRLSDWWRILQQSEYLKHELDNKDAQELAEILDIKDTDTLEGWLYPDTYHYTAGTSDVALLKRAYRQMKMTLEEEWEGRDKNLPYKNAYEMLIMASIIEKETGVEAERTKVASVFINRLRLNMRLQTDPTVIYGLGEKYTGTIFRKDLTTLTPYNTYMINGLPPTPIAMPGLASIKAAAHPAKTEFLYFVANGKGGHTFTTNLAAHNKAVNIYRQRLKZ

SEQ ID NO: 143 - protein, 213 aa, Photorhabdus luminescens
MNSKFIVIEGLEGAGKTSAMKTIVEMLQQHGIQNLIFTREPGGTPLAEKLRGLIKQGVEGEPLTDKAEVLMLYAARVQLVENVIKPALARGTWVVGDRHDLSSQAYQGGGRGIDKNLMTSLRDTVLGDFRPDLTIYLDLPPQIGLLRARERGELDRIEKESMDFFDRTRSRYLEFAAQDKSIVTVDAAQPIEQVQADIYQVLEQWLKQQENGZ

SEQ ID NO: 144 - protein, 330 aa, Photorhabdus luminescens
MNWYPWLNQAYRQLVESHQQGRGHHALLVHANAGTGADVLIYGLSRWLMCRNRQGMKSCGKCHSCHLMMAGTHPDWHIMSPEKGKTSVGVEAVRQITEKLYSRSQQGGVKIVWLPLTECLTDAAANALLKTLEEPPKHTYFLLECRQPSSLLATLRSRCFYYFLPVPKTESSLYWLQKQLPLISSVDAMTALKLSQGAPVAAEQLLQPEQWQIREQFCQAVKQALDKHDALSLLPQLNHENAPQRLHWLISLLFDAVKWQQQLQRYCINQDQQTLIYQLSSMHTLAVLLQGVDDWMSCRHQLLSVVGVNWELLLVEQLLNWEKQFTSSPZ

SEQ ID NO: 145 - protein, 262 aa, Photorhabdus luminescens
MLLVDSHCHLDCLDYENLHKNVDDVVAKAADREVKFMLAVATTLPGFQQMKTLIGERENIVFSCGIHPLNLDEGYNFDELARLASGNEVVALGETGLDYYYQQDNAELQRTSFREHIRIGCKLNKPVIVHTRSARDDTLRVLREEQARECGGVLHCFTEDKDTARELLDLGFYISFSGIVTFRNAEQIREAARYVPLDRILIETDSPYLAPVPHRGKENQPAYVRDVAEYMAVLKGVSIEALAEVTTQNFCDLFHVDVDKIZ

SEQ ID NO: 146 - protein, 191 aa, Photorhabdus luminescens
LMRRILFVALSVMFLAGCPSLPPEQPEPPTPVVPVTPSEKPTPPSEKVPEPPKMSAIDWESTVQPLVEQLVKAHGLENAKLLLVDTVKNNTNGALQTMQATDALRQAISSEHVFELIPQNQVQNARQSLGLSEEDSLGLRSKAIGLARYLNAEYVLYSIVSGNSDKRDIVMQLMLVKTGEILWSGHGDVKZ

SEQ ID NO: 147 - protein, 298 aa, Photorhabdus luminescens
RRARFFGRGTVTLNNHNCLLRALCKQWPHTAVNDWKIRPLSGLTNESYYATNGEYHIVGRRQGQQGKQLGVNRQRENAILRHLSQVKIAPQVIAMVPHWLLLEWLPGHIIGQNEFSQPDLLQKLAALLAILHHQPLFGYRLQLRHQLESHWLQIDKARLTPCWLRLHKRFMSSPMPSILKLSPAHMDVHYGNLLNTSQGLKLIDWEYATDTDIGFALAALFRTNHWDEPQQQDFLNYYCSQSSGYSNRTLLERQIKRWLPWVDYMILMWFEVRWKQSGDPQFLELAQPLRLSFGLTFZ

SEQ ID NO: 148 - protein, 341 aa, Photorhabdus luminescens
MGPVMLDVVGYELDNEEKEILQHPLVGGLILFTRNFYDVEQLRELVRQIRKASRHRLVIAVDQEGGRVQRFREGFTCLPAAQSFAGLSDNLNGTQLAEEAGWLMASEMIAMDIDISFAPVLDLGHQCAAIGERSFHEDPEQAKMMAEHFIKGMHSAGMKSTGKHFPGHGAVNADSHKETPCDDRPLEVICHHDMSIFRDFIQRNLLDAIMPAHVIYPQVDKHPASGSSYWLKSVLRQQLGFNGVIFSDDLSMEGAAMMGSYVERGQTALNAGCDMILICNNRDGAVSALDNLPLTKVEKLSELYHRGGQYSLNELKNSERWQQANKALTALYEQWQDCARZ

SEQ ID NO: 149 - protein, 435 aa, Photorhabdus luminescens
MTTPKKRIVIIGGGAGGLELATSLGHKLGRKKKAEIVLVDRNQSHLWKPLLHEVATGSLDDGVDALSYLAHARNHYFSFQLGALTDIHRDSKKITLNEIRDEYNEVLVPERELSYDILVMALGSTSNDFNTQGVKEHCIFLDNPQQAHRFHNEMLNLFLKYSANCGQQDKVNIAIVGGGATGVELSAELHNAVKQLNSYGFEGLNSEALNVTLVEAGERILPALPARISAAAHQELTKLGVHVLTKTMVTSADEHGLNTKEGELIKADLMVWAAGIKAPDFMKDIAGLETNRINQLVVKPTLQTTLDDHIFAIGDCASCSKKEGGFVPPRAQAAHQMASRCYSNIIALLHDKPLKEYTYKDHGSLVSLSKFSTVGSLMGNLMRGSMMIEGRIARAVYISLYRMHQVALHGYIKTGLMMLVGGINRVIRPRLKLHZ

SEQ ID NO: 150 - protein, 565 aa, Photorhabdus luminescens
PKRRMTMSISLEYFQSAKFDGNLYLKCHGEISNDTEIKYTVTNSKTKEIYECYSEDNQLVCLTSLKPANYKIEATIKKDGKIIATLTPEDIEIKESDFLFDIDKKIDEIDKDKTDNININHIPSKQIPSKGNTVSLKGNNDIPNKNLKYNLEIMFSPDGLKKFEIEKDNLLPAFNSSQHSIEIKPVFNQEDLDKKTWKTPEFSKLIHLYKIDADINHADLVKLANELEKLDYVEFCSLMPILKELPPPPLLLSEEETIIPEFDTTHIVTPDFSHLQGYLDEHSGMNIRKAWDEGYKGKGVTVHHLDFGVYRNHEDLVGNITVINSRPETQDCNHGTAATGCIAAKDNTFGVTGIAHECQFRFYDVDDFDRIIYSFLPGDIISLNIQTVANNRYYPFTYLKSNWQRIKSCADAGAIIIFASGNSGINLAYDFTFPNYGDPGGIMIGACTSINGHRLGFSNHNLHTSLNSWGENVTTTGYTNLQYLPGNKRNYTRSYNGTSSATPLVSGALALIQSYIKLKYHKYLNCTQIATLVRSSGFTIGELQGVGTRPNVANAFKLVDRLFSZ

SEQ ID NO: 151 - protein, 282 aa, Photorhabdus luminescens
MTELNSFQTEEITPFGLKITPQYSDQHIDTLPVEQLKELARKHHLLILRGFKSDLSDHEKYEKYARNWGEIMMWPFGAILDVREHQDATDHVFDNSYMPLHWDGMYKPTIPEFIMFHCAHAPESDQGGRTTFVNTRRVVANATQQQLEQWKNISITYRINKVTHYGGEVHSPLVEEHPDRNGFVIRYNEPAVDGEKFLNKHAIEYHNINPDQVAEFQQDFINILYDKRHLYAHAWKKSDLVIVDNFSLLHGREGFTSKSERHLQRIHIQSNPAFNNQALRSZ

SEQ ID NO: 152 - protein, 356 aa, Photorhabdus luminescens; identical to SEQ ID NO: 52

SEQ ID NO: 153 - protein, 664 aa, Photorhabdus luminescens
MLGKLTLDAIPLHEPIVMVTLAGILFAGLAIVGALTYFRKWKWLWSEWLTSVDHKKIGIMYIIVALVMMLRGFADAIMMRGQQAVASAGEAGFLPPHHYDQIFTAHGVIMIFFMATPFVVGLMNIVVPLQIGARDVAFPFLNSLSFWFFVVGVALINISLGIGEFAQTGWLAYPPLSGIEYSPSVGVDYWIWSLQISGIGTLLTGVNFFATILRMRAPGMSMMKMPVFSWAALCTNVLIIAAFPILTVTIALLTFDRYMGTHFFTNDMGGNMMMYINLIWAWGHPEVYILVLPVFGVFSEVTATFSKKRLFGYTSLVWATIAITVLSFIVWLHHFFTMGSGANVNAFFGIATMIISIPTGVKIFNWLFTMYRGRIEYKTPMLWTVGFIVTFSIGGMTGVLLAVPGANFVLHNSLFLIAHFHNVIIGGVVFGCFAGTAYWFPKAFGFTLNEKWGIRAFWFWITGFFIAFMPVYALGFMGMTRRISQDINPEFHNLLVVSAIGVALIAVGILCQVIQFYVSIRDRDQNRDLTGDPWGGRTLEWATSSPPPFYNFADVPHVQTRDAWWDMKEKGTAYKRPAKYEEIHMPKNAGAGVIIAGFTLLFGFAMIWHIWWLAIASFAGMIITWIAKSFDEDVDYYVPVAEVEQIENQHHEQISKAGLNHVNZ

SEQ ID NO: 154 - protein, 337 aa, Photorhabdus luminescens
IYLQQARETIIMQSVTANNITSENVSLNNISMQILRELLQYRRHLTDPVKNSAKEEEIIKTVQLPRIEYFIKNKKPIEFILPAFPTKSPNINKVLGTAPDMAERLSLIFLNSFCQRIQLYYPPGARIIICSDGHVFGDLIHVSDEVISQYHEDIKQLLHEVGAINLSTFNLNDDKELCEHSDDFNLQRQMLVKHYARSEASIKDELLQNNNGLQLYRAVTRFLYEDSLLPGYTGSNNALQKDAKQRAIGVIQRSWAWGSLLDTHFPKAIRLSIHPQPADSIKFGIHMMPTRDDWLTPWHGVAANVNGQFILMKHKEVQMMGGKLVNIHGKPSHYVIZ

SEQ ID NO: 155 - protein, 1152 aa, Photorhabdus luminescens
LTPMSSKYRYELPERRGDNRQLGQLTGAACAVECAEIIERHQGPVVLITKDMQNALRLHDEIHQFTDCSVDLLSDWETLPYDSFSPHQEIISNRLSTLYRLPTMTKGVLILPINTLMQRVCPHEYLNGHALVMHKDQRLSRDKLRTELEQAGYRSVEQVLEHGEFATRGALLDLFPMGSEHPYRIDFFDDEIDSLRIFDVDSQRTLTEVKQINLLPAHEFPTDKETIELFRSQWRERFEVRRDNEHIYQQVSKGTLPAGIEYWQPLFFNQPLPSLFDYLPDNTLLISQEINHSAERFWQDIQQRFESRKIDPMRPLLPPEELWLPADNLFSALKNWPRIQLKTEELSKKASHVNLDYQLLPDLSVVAQNKAPLDKLRRFLEQFSGRVIFSVESEGRKETLQELLSRIKIKPIKISKLHQAQQPGHFLMIGAAEHGFIDTKNELALICESDMLGERVVRRRQDTRRTINTDTLIRNLAELRPSQPVVHLEHGVGRYQGLTTLEAGGIKAEYLILSYAGNDKLYVPVSSLHLISRYAGGADENAPLHKLGGEAWNKARQKAAEKVRDVAAELLDIYAHRAVKPGFAFKHDWEQYQLFCQSFPFETTPDQEQAINAVLNDMCQPIAMDRLICGDVGFGKTEVAMRSAFLAVHNDKQVAVLVPTTLLAQQHFDNFRDRFANWPVRIEMISRFRSAKEQQQIVEMAAEGKVDIIIGTHKLLQSDLRWKDLGLLIVDEEHRFGVRHKEQIKAMRADVDILTLTATPIPRTLNMAMSSMRDLSIISTPPARRLAVKTFVREYDSLLVREAILREVLRGGQVYYLYNDVENIEKAKLRLEELVPEARIAIGHGQMRERDLERVMTDFHHQRFNVLICTTIIETGIDIPSANTIIIERADHFGLAQLHQLRGRVGRSHHQAYAYLLTPHPKAMTTDAHKRLEAIASLEDLGAGFALATHDLEIRGAGELLGEEQSGQMTTIGFTLYMELLESAVDALKAGRKPSLEDLTNSQTDVELRMPILLPDDYIPDVNMRLSFYKRIASAKDASELAELKVELIDRFGTLPDPGRHLLHSAAIRLLAQKLGIKRIEAHEKGGFIEFSEKNKVDPTYLIGLLQKQPEIYRLDGPAKLKFIIDLNERTARLEFIQQLLDTFEHHQICSZ

SEQ ID NO: 156 - protein, 401 aa, Photorhabdus luminescens
MFQSVSLFIGLRYMRGRAADKFGRFVSWLSTIGITLGVAALITVLSVMNGFERSLETSILGLMPQAVVTSVNGSLDPKAHPASELAALKQVDRMTPLVMGDVVLQSARNVGVGVMLGIAFDEYEPLTEYLTGAYRHQLEPGSYNAILGEKLAGELGVKRGDRIRLMVPGASQLTPMGRIPSQRLFTVIGTFASNSEVDGTQILVNQQDAARLMRYPPGHITGWRLYLSEPLAVDSLSLQTMPEGLLWKDWRERKGEFFQAVRMEKNMMGLLLSLIIAVAAFNIITSLGLLVMEKQGEVAILQTQGLVRRQVMAIFMIQGAGAGIIGTLLGTGLGVLLSSQLNNLMPLIGLLTSGVELPVAIEPLQVATIAISAMAIALLSTLYPSWRAAAIQPAEALRYEZ

SEQ ID NO: 157 - protein, 268 aa, Photorhabdus luminescens
LLQSQFQRWRLLYCLRYILPGVLLPFNLLRLCVMNNQPLLLCNNLCKKYQEGQVLTEVLKNVTFAINQSEMMAIVGSSGSGKSTLLHLLGGLDTPTSGEVLFKGHSLNKMSSGARAELRNHELGFIYQFHHLLPDFNAVENVAMPLLIGGKNRGQAQKKAFEMLAAVGLEKRAHHRPSELSGGERQRVAIARALVNEPSLVLADEPTGNLDLRNADSIFALLGELNRQQGTAFLVVTHDLNLAGRLNRQVEMRDGYLQDELTVTGALZ

SEQ ID NO: 158 - protein, 416 aa, Photorhabdus luminescens
MANLPLSLVTALRFSRGRRRGGMVSLISVISTLGIMLGVAVLIIGLSAMNGFERELRNRILSVVPHGEIYTVHQPFEQWQPALERVKNTTGVVAASPYITFTGLMEKGASLHAVQVRGVDLATESQVSSLPQFVQDNVWQNFQAGHQQVILGQGVANALKVKQGDWLTVMIPNNDPEMKLLQPKRIRLQVSGIFQLSGLLDHSLALVPLADAQQYLDYGQGITGIAIKVDDVFAADQRVRSAGEASQEYVYISSWIRNYGYMYHDIQMVRSIMYLAMILVIGVACFNIVSTLIMAVKDKSSDIAILRTLGAKDRQIRAVFLWYGLLTGMTGSIAGAVAGVLASLNLTALIHGLEKLIGHQFLSGDVYFIDFLPSELHGMDVLYVLATALILSLLASWYPARRASRLDPARILSGKZ

SEQ ID NO: 159 - protein, 284 aa, Photorhabdus luminescens
MRVRRRLSRLGRLRKVKRLRHQRFRSRIFYRDNRLALNMKKPYIVVLTGAGISAESGIRTFRSSDGLWEEHRVEDVATPEGFQKDPELVQAFYNARRHQLQQSEIKPNVAHYALAALEHELGDNFLLITQNIDDLHERAGSYRTVHMHGELFKIRCCQSGQVFEWTDDLTTDERCHCCQFPSPLRPHVVWFGEMPLEMEQIYSALAQADIFIAIGTSGHVYPAAGFVHEAKLAGAHTVELNLEPSQVESLFDEKHYGPASKIVDEYARRLIDSIKEFKADLTQZ

SEQ ID NO: 160 - protein, 422 aa, Photorhabdus luminescens
MDRLLERFFKYISFDTQSKPSAKTIPSSHGQLELAKALKQELIELGFSNVVQDAHGCVMATLPANTSWPVPAIGFIAHLDTSPDFSGKNISPQMLENYRGGEIALGAGNEVLSPVMFPILHNMLGKTLITTDGKTLLGADDKAGIAEIITAMVRLKNSNILHGDIRIAFTPDEEIGKGARYFDINSFDAEWAYTVDGGGVGELAFENFNAAVVTVKIVGNNVHSGSAKNVMINALSLAIHIHQALPSEETPEHTDGYEGFYHLQRIKGTVECAEMHYIIRDFDRNNFEERKKKMIKIAEKAGEGLHPGCYIELTIDDNYYNMHDEVIKYPHVIEIAKQAMLDCNIEPIIKPIRGGTHGAQLSFRGLPCPNIFMGGYNYHGKHEFVSLEGMEQAVSVVMRIAELTALLSKKSEMSQAFCSRSZ

SEQ ID NO: 161 - protein, 374 aa, Photorhabdus luminescens
MDYQLNLDWQAFLHNHWQKRPLLIKQGFRQFIDPLTPDELAGLAMENEVDCRLVSQKNGRWDVSHGPFESYDHLGEKEWSLLVQAVNHWHRPSAALMQPFRVLSDWRIDDLMVSFSVPGGGVGPHLDQYDVFIIQGMGRRRWRVGEKLPMEQRCPHPDLLQVDPFSAVIDEEMEPGDILYIPPGFPHEGYSIEDSLNYSVGFRAPNSRELFSSFADYVLANDLGSYRYSDADLTFRENPALVQPHELSALHTMMNELLAQPDTFQQWFGEFISQSRHELDIAPPEPPYESDEIYELMKQGENLHRLNGLRVIRVGDQCFVNGELIDTPHIKAADVLCCHYEINAEMLGEAIDDVRFIRLLTALVNSGYWYFNDZ

SEQ ID NO: 162 - protein, 488 aa, Photorhabdus luminescens
VLKHKKQPFSLRTRFLMATAAVILALTMSYGIVAIVGYLVSFDKTAYTLLRSQSNLFFSLAQWNNNQLDISVPPNFTLNNPSLVLIYNNKGAILWRQHHIPKVENSIPSEWLKEDGLYELDTDLKSSRDLLKNSANTQGQLGKLNSLDENEDNELTHSVSVNRYSATAHLPALTIVVIDTIPQDLQKTVLVWEWFGYVLIANLILVIPLIWLAAHWSLRPIKSLIHQISSLEKGEREKLDENPPTELRGLVRNLNVLLNNERNRYTKYRTTLADLTHSLKTPLAVLQSTLRSLRDSKQMTIQQAEPIMLEQIGRISQQIGYYLHRASMRSEHSTIMRKVSSVPALLDSLCSALTKVYQRKSVSLTLDVSPEITWLGEKNDFMEVMGNVLENACKYCLKFVEISVTIDHDSVMIIVDDDGPGVPIEKWDIIFQRGQRVDTLKPGQGLGLSIASEIIEQYKGDISISDSPLGGARICVIFRCQQINDDDZ

SEQ ID NO: 163 - protein, 223 aa, Photorhabdus luminescens
MRILIVEDNMLLRHHLTVQLRDTGHLVDAAANAKEADYYLVESEPDIAIVDLGLPGEDGLSLIRRWRQKDEKLPILVLTARESWQEKVTVLDAGADDYVTKPFHLEEIIARMQALLRRNNGLVSQIIEFPPFKIDLSRKEFTVYGESVKLTAFEYRIIEILMCNSDKVVTKESLMRQLYPDAELREGHSIDVLIGRLRKKILDIWPYEAIVTVRGQGYRFDVZ

SEQ ID NO: 164 - protein, 257 aa, Photorhabdus luminescens
LWLVIVSVDMVQTCLANLFMVLILNLLNFSNGYVVINIFIKAFCNPSDNHACEACDSQPPDMPNHGETKQQGKASNNYTRTGIFRHMNFFILSRTFISSAFFFHIPPCITGLNMWNVSKVIKRWWRRCCPLQSTSAPRVTGQVTVLVTVTDTNVELDDLTQDTNGNQCNTNRGDDQQIMEFRVDILANTTGHPHKSERVNWHKGDKEAGDPEPECADTPFFIQCETKSFREPVSSTSETTEDNTTDDHVMEVCDQEZ

SEQ ID NO: 165 - protein, 457 aa, Photorhabdus luminescens
MELSSLTAVSPIDGRYGDKVSVLRTIFSEFGLLKFRVQVEVRWLQKLAECAEIKEVPAFDTDANAYLNEIIANFNEQDAMRIKTIERTTNHDVKAVEYFLKEKVAHIPALHQVSEFIHFACTSEDINNLAYALMLQTAREEVLLPQWRQMIDTIKKMASEYRDLPLLSRTHGQPATPSTVGKEFANVAHRMERQYRQLEQVEILGKINGAVGNYNAHIAAYPQVDWHQFSETFVTSLGIKWNPYTTQIEPHDYIAELFDTIARFNTILIDFDRDIWGYIALNHFKQKTVAGEIGSSTMPHKVNPIDFENSEGNLGLANAVFGHLASKLPISRWQRDLTDSTVLRNLGVGLGYALIAYQSTMKGLNKLEVNEQHLLDELDKNWEVLAEPIQTVMRRYGIEKPYEKLKELTRGKRVNGEGMKTFIDGLDLPEEEKIRLKAMTPANYIGRAITLVDELKZ

SEQ ID NO: 166 - protein, 209 aa, Photorhabdus luminescens
VAKNHYNITLALAGICQSGRLVQQLSHENQCDTDAVTTMVNSILNTNPASVLDVFGNHERNLKIGLNAMLGMFNSSNNGISADLTRYILSLIALERRLMKNQAASDALGNRISLLERQQAYFEPMSEGMFNALAGIYVDVISPLGPRIQVTGSPDILRNPLVQAKVRAILLAGVRCAVLWQQVGGGRLQLMFSRQRLIQQAKDILSHCZ

SEQ ID NO: 167 - protein, 368 aa, Photorhabdus luminescens
MSDNSQKKVIVGMSGGVDSSVSAYLLQQQGYQVAGLFMKNWEEDDDEEYCSAATDLADAQSVCDKLGIELHTVNFAAEYWDNVFEHFLAEYRAGRTPNPDILCNKEIKFKAFLEFAAEDLNADYIATGHYVRRRDINGKSQLLRGLDNNKDQSYFLYTLSHQQIAQSLFPVGELEKPEVRRIAEKIGLVTAKKKDSTGICFIGERKFRDFLGRYLPAKPGPIMTVDGESLGEHQGLMYHTLGQRKGLGIGGTKEGSEEPWYVIDKDVQNNILIVAQGHEHPRLMSTGLIAQQLYWVDRQTLTEKIHCVVKTRYRQQDIPCSVTPISEDKIEVHFANPVAAVTPGQSAVFYQGEVCLGGGVIEQRLQEZ

SEQ ID NO: 168 - protein, 418 aa, Photorhabdus luminescens
MESKVVIPAEGKKITVDAKGKLVVPNNPVIPYIEGDGIGVDVTPAMLKVVDAAVQKAYQGERKISWMEIYTGEKSTHVYGKDVWLPDETLDLIREYRVAIKGPLTTPVGGGIRSLNVALRQQLDLYVCLRPVRYYQGTPSPVKQPELTDMVIFRENAEDIYAGIEWKAGSVEADKVIKFLQEEMGVNKIRFPQQCGIGVKPCSEEGTKRLVRAAIEYAIDNDRESVTLVHKGNIMKFTEGAFKDWGYQLAREEFGGELLDGGPWVKIKNPKNGKEIIVKDVIADAFLQQILLRPAEYDVIACMNLNGDYISDALAAQVGGIGIAPGANIGDECALFEATHGTAPKYAGQDKVNPGSVILSAEMMLRHMGWTEAADLIVKGMEGAIAAKTVTYDFERLMEGAKLLKCSEFGDAIIQHMZ

SEQ ID NO: 169 - protein, 255 aa, Photorhabdus luminescens
MKNEHSTSMRKRRVALITGAARRLGAVIAKTLHAEGFNIVVHCNTSQLEANQLVQELNSIRAQSTISVQADLSNLCNCEPIINAAISEWGQLDILVNNASTYYPTEIGSVSHSQWHDLVDINLKIPFFLIQTAMPWLHQVRGNIVNIVDINAKRPLKGYPVYCAAKAGLALLTEALALELAPNIRVNGVAPGTIMWPEKSNKLDDNEKFTTLKKIPLGRIGDGKDIAEAVRFLAISEYITGHIIRIDGGAILSRZ

SEQ ID NO: 170 - protein, 456 aa, Photorhabdus luminescens
SSMIPAQELHRLAHEALNRQDFEHCAKYCYTQLRAANEPYCLQDEITLDCIYMLLFIHDIYNQQCHLPFTEKWTRHDLFSLAETYYTKKISLDTHIKLKVLKGKYLANTQSSEAAILAIQDAVILAENSCTPYIKALALAELGHKTMKISLKHGRELIRQAHDILHQSPVSHELSLENQRHIHFISSIHGVCEFDFGNYEAAMKHLSKVYESSLHLGIKFDISIFCNYLAQVHISLGDYETAESLLLSCLEYFIPEKTPHAWNANNRALLGKVYMEWGKYDKAREHLITGWKESRLARSLPLITLVRNYYAEFLLQRESSPSKQNISLAEEILQENISEAHQAGIYRSEILSLSLMGQISLSRNDFDAAKKYSQSAIDMLIHMGWLPALRAQEIYMNHYTVAISCGDMEQEKYWLSEAYNVVMSIARRILDDTRRLSFLNRVKINEMIVHKYMETZ

SEQ ID NO: 171 - protein, 943 aa, Photorhabdus luminescens
YDHNRYIMKNTIILEKLSANDETMLISEWLVEEGDYVTVGQMIARVEASKAIVEIHSPMSGYLLKRYQAGDEVAVGNVIAEIVQEPTSTPTKEDPDASMFQVDRSNATARFSKAATAYLEHHRINPSKLGFSGLITLDYLRQHFAVEKHIQKPFTTTLLADPHESDKILSLVENITTTEPIEVSKQAEIRILSDAQNGSLPSSITVQFNSINLREKLRNDTNSSGQIFPYLLWILGITLQDWPQLRSYYEKQRIHRYSTVNIGVAIDMNHGLRVPVIRQINQLALPNVEAAVADYVCRYHENKLSLEDVTGATFTVSDLSGQNVLHFQPMLNKQQCAILGIGGDKDLEGYPMSLTLVFDHRVITGAIAAQFLNDFKRRLLTSNATKLHLSDTEAQQPTPVHNRFSPTNLKLADDISNIWQSQLECQGVNPSDNFFKLGGDSMKAAHTISQVAAHIAVAVPLRLLFENPTLQKFTQKITQLINETPRNIDDLLPASPDNYATLSLQQERLLKLCADGDPSDYNLFRAYRLIGHLDREALRQALHHLTKRHEILRSRFDWTTASLIGYFEEDADLPIEIIDLSAITKEGQDEQLMSALQRNSQCIWHAGDWLFHVSLILLKTDEQVLTLCLHHLIADGESIRILAAELSTFYAHACGDKSVALPKDLQRQYRHYANWQQQYIRDVSVKRQISYWKHKMEGAPSLLALPICNQSEIYQTRCSASEVFQIPQEIGVLEFSRHIGATPYTVLMSAWAIVLSHYSSQQEVVIGTAADNRQPEYGNNLGFFANNWAARIFVEDTQAFTLLTKSIRRITLDAKDNIDWSFGTIADALAPYEKHKVRSRIFQVMLIMLPNAKLTLRNIETIPMNLDIGRGREPFDGTVLDMTLWISVEHENIYAKLVYNVDLFQQKTVKSIVRSFTAVLRKACSESSITLLKLKDTCETIEZ

SEQ ID NO: 172 - protein, 655 aa, Photorhabdus luminescens
GLTNMDSDILRTSLLIRETEEALLRLYSTGELHGTVHTCIGQELTGAIVCKFLKKNDWVFSNHRCHGHFLSRTGDVTGLIAEVMGKETGVCGGRGGSQHLCKEGFFSNGIQGGILPVATGAAFAKKLRHDNSISIAFIGDGTLGEGVVYEVLNIAAKWDLPLLIVLENNQYAQSTHISETLSGSISKRAQAFGMRYTKSDVWNWEHLIAETEELINYTRNQRHPAFLQIDTYRLKAHSKGDDLRNIDEIEHFNTIDPINVILRERAAELETEVAGVQERVNDAIRKAKQARSSPFYGAETQLQSRSSTFHPLPSQGSKIRLSRAINKAFLEIMELDKNILFIGEDVKAPYGGAFKISDGLSDSFPEQVINTPISESAIVGIGCGLAMHGYCPFVEIMFGDFLTLAFDQILNHAAKFRDMYNDQVKVPLVIRTPMGAGRGYGPTHSQTLEKHFMGIPGLTILAINNLIDPAIVYKTLAKQEEGPVLLIENKILYTKSIRNAPLGFTSYASDDPFPAVVVSPLSTNVDVVIFGYGGLSDLLVDVAEELFVEHDVIAQVICPLQIYPFSVIPYIKLVSKCKIAIIVEEGQGFAGFGSEVVAQLTEILGKLLPRTIRIYPSSMAIPSSKALENLMIPGKDMLIERILKAYISEAEPQQZ

SEQ ID NO: 173 - protein, 264 aa, Photorhabdus luminescens
EVKYRSVKWKYAFLQTDHNEPSSYNNEVPMPTVEPGDLEVATHGFADGISMQLAKKRALHGPNEVLTKTELNLIIDEAAISFGEFLTALGVDWKNDPNSKDTPRRVAKAYVLDLWKGRYKPMGPITTFPADNYDGIVFDGWIALDSMCSHHHQAISGYVHVAYMPSQYGRVLGLSKLNRIVEHFGRRGLIQERLTAAIHNAVNQVCERNQGVAVLVDASHNCVRCRGVRHQRSRMKTQMFSGAFAEADSPAKQEFYELIRGIAZ

SEQ ID NO: 174 - protein, 298 aa, Photorhabdus luminescens
MKLRHLRCFVVVAEELHFARAAERLHIEQSPLSRIIKKLEDDLGTMLFVRTTRNTRLTRAGEILLEQTPRIFSVLGQARDSVKAVAAGFHSQLRIALSDGVTPSKLAELLAKCREDEPETDIRLHEVPLAQHMNGLRDNLFDVGFAQSTIVRDGIIAIPAWYDSLVAVIPARHPLLAYKELPLNEFLRYSLIVCGQETHEGFLRQVLSIFQNAKLVPCISEKVASFDLLLTLVAAGYGIGVAGESQINLARHGDVAIRPFAGGIPKLVTYMLRLDSPLTEELVRFKERVGNLYHNVYZ

SEQ ID NO: 175 - protein, 205 aa, Photorhabdus luminescens
MSTETMTNHNHAHEHHGHHDAGATKVFGFWIYLMSDCILFACLFATYAVLVNGTAGGPSGKEIFGLSFVLVETFLLLFSSITYGFAMLGMNKGKIGQVNAWLGMTFLFGLGFVAMELYEFHHLIVDGHGPDRSAFLSGFFALVATHGIHVTCGLVWIIIMIIQVTRRGLTDVNKTRLNCLSLFWHFLDVVWICVFTVVYLLGAMZ

SEQ ID NO: 176 - protein, 491 aa, Photorhabdus luminescens
LTNLTELISFFNSILWGSVLIYLLLGAGIYFTIRTGFIQIRHFGHMFSVLKNSKKSDSAGISSFQALCTSLAARVGTGNLTGVAIALTAGGPGAIFWMWVVALIGMATSFIESTLAQLYKTKDDKGNYRGGPAYYMEKGLGVRWMGVMFSIFLIIAFGLVFNAVQANSIVQAAAFAFDFDPLYVGIGLVILSGFIIFGGLRSIARVAELVVPFMAIAYLILAFWVVGHNFERMPEVFALIFKSAFGLQEAVSGTVGYGVAQAMTQGVQRGLFSNEAGMGSAPNAAASASPYPPHPASQGYVQMLGVFMDTLVICSATAVIILSSGVLDGNISGISGIELTQRALSSAVGDWGSEFIALAIFFFAFTSIIANYAYAESNIVFLERNHTAGLMILRLAALGMVMFGALAELPLVWKMADLSMALMAITNLTAILLLSGVAFKLAKDYNQQRRVGKLPTFDINQYPEIQKKVEVGIWEETASLAKSNQVAGHKZ

SEQ ID NO: 177 - protein, 274 aa, Photorhabdus luminescens
MMKKIILVGLFMLLAGCSSLEDRGAYKVDSSFPSQGQNDRVRFLVFHYTAVDDKDSLRILTQGGVSAHYLIPSLPNYVRGKPVILQLVPEEKRAWHAGVSGWNGRKDLNDTSIGIEIVNKGFTEMLLEKEWYPFNEQQIDLLTRLAKDIIQRYGIEPINVVGHSDIAPLRKYDPGKLFPWKNLAEQGIGAWPEDATVEKYMAGRKWHDKASVELIQKTLAKYGYTIPQTGVLDEDTRKTISAFQMHFRPDDISGNPDAQTESIALALVEKYKKZ

SEQ ID NO: 178 - protein, 460 aa, Photorhabdus luminescens
MAGQSQRSTLKRGLKNRHIQLIALGGSVGTGLFLGIAQTIKMAGPSVILGYAIAGFIAFLIMRQLGEMVVEEPVAGSFSHFAYKYWGDFPGFLSGWNYWAMFTLVGMAELTAVGMYIHYWWPDIPTWVSATIFFVLINTVNLINVRLYGETEFWFSIIKVTAIICMIVFGSYLLVSGNGGPQASITNLWQHGGFMPNGISSLIMAMAVIMFSFGGLELVGITAAEAENPRISIPKATNQVVYRILIFYIGSLTVLLSLYPWGNVVEGESPFVMIFHNLDSFWVANILNIVVLTAALSVYNSGVYCNSRMLYGLAKQGNAPEMLTKVNESGVPIRAIVMSALATSIGVLINYVMPGKAFELLMALVVTTLVINWVMICMAHLKFRAEKVKQGIAPSFKAFWYPFGNYLCLVFLAFILVIILMMDSIRISVILMPFWVGVLWLGFLMSHSRRDKMKTEELGZ

SEQ ID NO: 179 - protein, 209 aa, Photorhabdus luminescens
IMKFDLTAACTLSATLLVSSGTVFATTANTANKSLTTIESHTPISYGNNSSSLWEKFNNNVALTWDAPNNELYLPVITWHNRHTYDKEKTDRYNERPWGFGYGKYRYDEDNDWHSLYAMAFMDSHNRLEPIVGYGFQKMWIPGDLEGFRMGIGFTLSVTARHDYYYVPIPLPLPLFSIEYDRLSFQGTYIPGTYNNGNVLFAWLRWQWZ

SEQ ID NO: 180 - protein, 266 aa, Photorhabdus luminescens
MRINSLTIAGTDPSGGAGIQADLKAFSALGAYGTTVMTALVAQNTCGVQSVYDIDPTFVAAQLESVLSDIRIDSAKIGMLSNAANVVVVADAISRYAVPYVVLDTVMIAKSGDPLLAPEAVSEVVERLLPKVSLITPNLPEAAVILQCSVAETETDMQKQGRELLSLGCEAVLLKGGHLTEHESPDWLFTAEGEWRFTAPRINTRHTHGTGCTLSAALAALRPRYSNWQTTLPVAKSYLQAALEQADSLEVGKGIGPVHHFHQWWZ

SEQ ID NO: 181 - protein, 350 aa, Photorhabdus luminescens
MTDIAKLLGKDADSLLQHRCNTILSENLYLPGADFVDRVMIDNNRPNTVLRSMQTLLNHGRLAGTGYLSILPVDQGVEHSAAASFAANPLYFDPKNIVELAIEAGCNCVASTYGVLSAVSRRYAHKIPFLVKLNHNEALSYPAQYDQTLYASVEQAFEMGAVAVGATIYFGSIESRRQIEEISAAFKRAHELGMVTVLWAYLRNSAFKKEGVDYHASADLTGQANHLAATIGADIVKQKMAENNGGYTAIGFGHTDKRVYTDLTTDHPIDLVRYQIANCYMGRAGMINSGGASGNNDLSDSVRTAVINKRAGGMGLILGRKAFKKSMKEGIELINAVQDVYLDKQVTIAZ

SEQ ID NO: 182 - protein, 459 aa, Photorhabdus luminescens
MFTPELLSPAGSLKNMRYAFAYGADAVYAGQPRYSLRVRNNEFNHENLALGIKEAHELGKRFYVVVNIAPHNAKLKTFIRDLKPVIDMGPDALIMSDPGLIMMVREAFPEMEIHLSVQANAVNWATVKFWQQMGLTRVILSRELSLDEINEIRQQVPDMELEIFVHGALCMAYSGRCLLSGYINKRDPNQGTCTNACRWEYHVQEGKEDDIGNIVHMHEPIPTKNIEPTLGKGTPTDKVFTFEEAKRPGEYMSAFEDEHGTYIMNSKDLRAVEHVERLTKMGVHSLKIEGRTKSFYYCARTAQVYRRAIDDAVAGKPFDPTLLTTLEGLAHRGYTEGFLRRHTHDAYQTYEYGYSISDTQQFVGEFTGERVNGLAEVAVKNKFMIGDRLELMTPSGNIQFTLETMQDKKGQPMEVAPGDGYIVYLPIPKQIDINYALLIRNLNGINSQYPQTNRNSDKZ

SEQ ID NO: 183 - protein, 235 aa, Photorhabdus luminescens
MSTEFEHYTVLIVEDEPKLGQLLVDYLQAADYETQWLLRGDEAVSHVQQHNPDIILLDLMLPGCDGITICREIRRFSDVPIIMVTAKTEEIDRLLGLEIGADDYICKPYSPREIVARVKTILRRCYRPQDIVKQSDLHIDEACFQARYRDKILDLTPVEFRLLKTMASRPGQVFSRDKLLNNLYDDHRIVTDRTIDSHIKNLRRKLEQLDNSKTFIRSIYGLGYRWEADICRLLZ

SEQ ID NO: 184 - protein, 463 aa, Photorhabdus luminescens
MKLGISGKLFMAIFATCMLVLITMHWGVRSSFQHGFIGYIKQNIQLRTAMLAEALAEQYQQHGNWKFLKRNDRAIFQIIRSIEQTSESRQGPPPRGWRTQFWVVDSDMKLLVGHEGKIPSETYRKPIIYHHQVVGWVIVSTSDKITRQADISFDRQQQLTSWIIAGLSTLLAMIATLLLSRGMLKPVKRLVEGTHKLAAGDFSVRVTPSSKDEIGQLAHNFNQLASTLEKNEQMRRDYMADISHELRTPLSILRGELEALQDGVHKPTPETLNSLLAEITTLTKLVDDLHQLSLSDRGALAYRKEFINISELIQVAIASYHGRFLDKQIQVDVKLPEMITLFADPSRLTQLFHNLLENSLRYTADNGKLIIKGCSDDNHFILNWEDSKPGLSPEQCQRVFERFYRSESSRNRASGGSGLGLAICYNIVEAHNGTIHAEPSPLGGLRIIVELSLTESLDGETLZ

SEQ ID NO: 185 - protein, 1037 aa, Photorhabdus luminescens
VKFFALFIQRPVATTLLSLAITLCGVLGFTLLPVSPLPQVDFPVISVYASLPGASPETMASSVATPLEHALGRIAGVNEMTSSSSLGSTNITLEFDLNRDINSAARDVQAALNAAQSLLPSGMPSRPHYYKVNPTDAPIMILTLTSDTYNQGQLYDFASTQLAQKIAQVEGVSEVSVGGSSLPAVRVELNPGVLFHQGVSLDAVRKAISNANVRRPQGYVDSEQQHWQIQMNDELKTAENYRPIIVHYNNNSPVRLQDVANVKDSVQNVRAAGMSGGEPAILLIIRREAGANIIATVNRIREQLPALHESIPASIQLKVAQDRTPTIRASIVEVERALVIAIGLVILVVFLFLRSGRATLIPAIAVPVSLIGTFTAMYLCGFSLNNLSLMALTVATGFVVDDAIVVLENISRHLEAGIKPMQAALQGVREVGFTVLSMSISLVAVFIPLLLMDGLVGRLFREFAITLTTSISISLLVSLTLTPMMCAHLLKSQRPKAQKKIRGFGKVLLKIQQVYGRSLMWVLNHSRWVLLILAGIIALNVWLYINIPKTFFPEQDTGRLLGFVRADQSISFQSMREKMKNFMQTINADPTVDSVIGFTGGGRVNNGFMFISLKPLKERSENAEQIISRLRIKLANEPGANLFLIPVQDIRAGGRQANASYQFTLLADDLNDLRKWEPVIRKALGQLPQLTDVNSDKEDKGAEMAIIYDRDTMSRLGINVSEANNLLNNAFGQRQISTIYQPLNQYKVVMEVAPEYTQDVSALEKMFVINNQGKAIPLSYFAHWQPANAPLSVNHQGLSAASTIAFNVPEGYTLSDAINAIERTTTELRVPSTVRGTFAGTAQIFQETLKSQLFLILAAIITVYLVLGILYESYIHPLTILSTLPSAGIGALLALELFDTPFSLIALIGIMLLIGIVKKNAIIMVDFAIEAQRNGNICARDAIFQASLLRFRPILMTTLAALFGSLPLVLSSGDGTELRQPLGITIVGGLVMSQLLTLYTTPVVYLCFDRLRAYPNRRNCCRQFEHGQRGKTGTYTZ

SEQ ID NO: 186 - protein, 295 aa, Photorhabdus luminescens
MIKQYLQVTKPGIIFGNLISVIGGFLLASKGVIDYPLFISTLLGVSLVVASGCVFNNYIDRDIDRIMERTKNRVLVKGLIDPKISLIYASILGIAGIVLLYAAANALAMQLAIIGFVVYVGVYSLYMKRKSVYGTLIGSLSGAAPPVIGYCAVTGQFDTGALILLLIFSLWQMPHSYAIAIFRFKDYQAANIPVLPVIKGISVAKNHIILYILAFMIATLMLAISGYAGYKYLVVAAAVSVWWLGMALSGYKTDNDRIWARKLFIFSIVAITSLSVMMSIDPHVPSEAFLTYVRZ

SEQ ID NO: 187 - protein, 1049 aa, Photorhabdus luminescens
MQAGSPIPGGGPSRLFILRPVATTLFMAAILLAGIIGYRMLPVSALPEVDYPTIQVVTLYPGASPDVMTSAVTAPLERQLGQMSGLKQMASQSSGGASVITLQFQLTLPLDVAEQEVQAAINAASNLLPNDLPYPPIYSKVNPADPPILMLAVTSDAMPMTQIQDMVETRIAQKISQVNGVGLVTLAGGQRPAVRVKLNAQAVAAQGLDSETIRTAINNANVNSAKGSLDGPTRSVTLSANDQMKSVNDYRNLIIAYKNGSPVRLQDVATIEQGAENTKLGAWSNNTQAIVINVQRQPGANVIETTDNIRQMLPELISSLPKSVDMKILTDRTTTIRASVKDVQFELLLAIALVVMVIYLFLRNGIATLIPSIAVPLSLIGTFAVMYFCGFSVNNLTLMALTIATGFVVDDAIVVIENISRYIEQGEKPMTAALKGAGEIGFTIISLTFSLIAVLIPLLFMGDIVGRLFREFAITLAVAILISAVVSLTLTPMMCARILKPESQIKHNRFEQASGRFFEQMIAGYAVWLKRALNHPWITFGIALSTLALTALLYLMIPKGFFPSQDNGLIQGTLEAPQSISFTAMVNKQQQVSSLLLQDPAVENITTFVGVDGSNPTLNNGRLQITLKPLNQRDDRIVDIIPRLQEKVAAIPGIKLYLQPMQDLTIDTQVTRTQYQFTLQATSLDELSIWVPKLLAELKQRAELVDISSDWQDQGLIAYVKVDRDIASRLGISMAAIDNALYNAFGQRLISTIYTQANQYRIILEHDVTSTPGLAAFDNIRLNGTDGHVVPLRTIATIEQKFGPLAINHLAQFPSATFSFNVAEDASLEQAVNAVRDAAQLINMPKDISTQFQGTTLAFESALGNTLWLIAAAIIAMYIVLGILYESFIHPVTILSTLPTAGVGALLALMMAGHELDVIAIIGIILLIGIVKKNAIMMIDFALAAEREQGLSPYEAIYQACLLRFRPILMTTMAALLGALPLMLSTGVGAELRRPLGICMVGGLIMSQILTLFTTPVIYLLFDRLAHYRRNRQLSVSNTPSIDHQEPRZ

SEQ ID NO: 188 - protein, 407 aa, Photorhabdus luminescens
ENVEEMNQNNKHRTLLFRAALAAIAIAAAIFFWYQLKTPQQSSPSDQSSGLRHSPLPPVQVATAKEQAVPRFLAGLGTIQAANTATVTSRVEGQLIALHFQEGQQIKQGDLLAEIDPRPFQVQLAQAKGQLAKDEAILANARQDLNRYQKLANTHLISQQEMDNQRALVRQHEASLKVDQAAIDSAKLQLTYSRITAPISGKVGLKQIDVGNFISSGNSSSIVVITQTDPVDVLFSLPENDINAVLQAQKTNHDVVVSAWDRNNQQQLAAGKLLSIDNQIDATTGTIKLKARFSNQESILFPNQFVNVRIKVDTLENAVVIPNAALQMGNEGNFVWMLGKENKVSKHLVTVKLQDTKRVVISAGLAAGDKVVTDGIDRLTDGAKVDIVTPMVNKPQPQKHDQTENSZ

SEQ ID NO: 189 - protein, 310 aa, Photorhabdus luminescens
MRHFIIDTDTASDDAVALFMALREPSVFIEGITIVAGNCAVAQCRKNALVSIEKAGTYIPPVYEGMSKPLFREHYASYHIHGKDGMGNMNLPESSLIVEDKHAVDAIIDIVKKFPGEIEIITLGPLTNIAMAVLKEPNLYKSVKVIYIMGGSGLKSGNITPLAEFNLYSDAEAAHIVLNSGLPLIFCGWELGMEEAFINEFDMDKLNSLGDLGQFAVSCNRTLIEFNAGRTNRKGFDLPDPITMAIALYPNEMIEDKLAVYGYVEYQSARSYGHLVIDSTDLLNHPHNMSVVTKIKGEVFKNKLFTLLSZ

SEQ ID NO: 190 - protein, 337 aa, Photorhabdus luminescens
KMNFNPDLLRKVELHTHLDCGLSYHFVKKFIPDITRKSFCEKYIAAEKCHDLGDFLNKIIPSLDLLQKRDVIADAVEDLFIQLKSDNVVYAEIRFAPLLHLRLGLNERDIVEIVLEAMKNYSIKYGIAAGLILCTLRNFSEDQSLRTAYLVNEYSNYGVVALDLAADEARYPLSAHLNAFRMVLENGGNIIAHAGEAKGAESVRETINKLNISRIGHGVRSIEDRDVIELLIERNIHLEVCPTCNIICDIYDIYDIYDIYENHPVNFLKEVGVNIGINTDARTVANITLCEEYLRINRYFGWQYSDFIETNLNALHASFSSNELKSRLEKEIMRLSZ

SEQ ID NO: 191 - protein, 225 aa, Photorhabdus luminescens
KENKLKDYIDKYHLDSIFPAEFMPKLDVVEIKKNTYLTHQSSIFTHLYILVEGKLKVEFYNVNGKFSVFAFATPLFLIGDLELFHAQGDNIINTVFAQERSVLLSIPLETVRIFGLTDVGFLQFVCKQLSNKLFESSLFRTGIFLTVEDKLKRFLYYHSKRNGTVLVLEKREDLASVLGVSVRQLNRAIKSLNEKGIIVSKNKRVDIIDYDFLKKDIEFQFDAKZ

SEQ ID NO: 192 - protein, 516 aa, Photorhabdus luminescens
PKELPMCGIGGVFNTENRLIDDIENKLQTIMSKIAHRGDPSRFNEKVVRNNFSIATNRLAIVERDSAYQPISNQEHDLHLVLNGQIYNYKSLRNELIKQGYQFKNGGDAEVALIAYICYGKSFIKKLDGMFSFILFDNKNNKFLLGRDHVGIKPLYYTQKEGNWYVASEIKSLIEFNSEIKPVEPGSIFDGLTSEKYISYDTTIPASSDNVEQAKEKIYSLLDNAVRKRVDTDLPVSIMFSGGIDSTIVLYLAKKYHHDITAISFGLPGSKDIEIAQRYCTENNIKHIIYTFTQEELINNIQDAIYYGEFFEQIDAIDSTIAHFGYYIANRLGFKIALCGEGSDEIFAGYDLFKTYPDPHHLSLYRLNNLHRTDLQRVDRASMRNTVEARVPFMDSALVPYVLSLDFSYKLNNGIEKYILREAFRGKIPEYIIDRPKIRMPDGSGVKNTIIDYVKDIKCNLPRNMVDSLNSIGLTHQSSLYFAEKYLSLGYPLPKERFKESGKDFSESGYFNFISZ

SEQ ID NO: 193 - protein, 457 aa, Photorhabdus luminescens
KREKNMNYYGNNHPPFIEINKTKSLNGSITLPASKSSSTRAILTASLTEGTSKINNMASGNNTTAMKLNCSRLGASFNSDITGTIVEGIDIRQIDKKIIFNPGNSGVVLRLLMGVAGYLPDTEFITEYSYSLGTRSQLEMVNALKSLNIQCTAVGPDSLLPISMKSDKNIGNYTEISCRKSSQFLSGLLYLGAISERDLQIKVIDTITAPSMVHTTINNLRKAGINIEYDDKFRNFFTTGKSRFIPSEFSVGADPASTAAILALCASLNSDVTLNGFFEEELGNGAVVNYLINSGTKISFIRDDCLNIRSGGTLKAQDFDGSLAPDAVPALAALAAFANGKSVFYNIEHIRYKESDRISDFRRELDKIGIRSEERLDQLIIYGNPYGYKGGVIVDGHYDHGLIMALTTIGLHCDEPLIISEPYHVGQTYPEYFAEISTLGANVNELKYSAPILEDVZ

SEQ ID NO: 194 - protein, 441 aa, Photorhabdus luminescens
STWRLGMNKISVLPGSTLNGEIVIPSSKPHIQRALLLALLNQETTTVNNISWCTETEDLLIALQQFGLQILDRSENHIILKGAHPIYHCNGIINANGSGMLFRISVALASLTEKEVYIKCNDSLFNRESLYDESFFSYLNVFAEKRKENIVIISRRIYPSQSPLNFNKSTQFLSFSLLVSPFMKGKSIIINNNGETKNGYVDITITMMALLGSKISRTGSTFISTEYQPRDITINIPSDFTSLSYIASSILSINRPSKITIRSYYFGNTINERVLFDIYKKFGMNLNYNPIKNELNISLEKEHNTITDEIYLHELPSVATNIIAAAINGNGDITFSGLNAINNHKCQRAFIINENIRMMGGKSYLIFNDTGAFNKIRINSNGPLNGGIEIFSYYDHRICASNIIASLGAKERTTVNHIHKLDDGFPGFIQSLNSLGARISZ

SEQ ID NO: 195 - protein, 421 aa, Photorhabdus luminescens
ISTNDGVDMSVFIFIEARPVECSAIDYIRDLGFSPVLLTSMESMNKGLYDDLRKELFDNIYYVDTRNSTDIINLIKDTRIPVAAILGCYDDFMIVASEVALEFGLPHPDINGLRNAFSKKNVRDILAQHGYEQPAYAVFSYNNIPENPKVPFPFVIKPLRDAGAYGVSLCKSQDDYHHVLSEISSHGTMSMLGKVNEEFLIEEFLQGNFYGAELIYSHDEWHLIGINRIFVSPDDDLCMIGLSHPAELPEFEFAMACKLVKEWLAALGLRGGAINVEFIYTSRGPILVEINLRIAGARAAQQIFMTSGINMVKYLVDFVCGIESSISPASEIVYPFVADAFVFYRGEGVVNDIRIDADIPYFISAGFKKTPFAISLKSKSSSKNKNFGSIVGYVLAYGDSCEEAMENATRIANSVQLITNZ

SEQ ID NO: 196 - protein, 286 aa, Photorhabdus luminescens
EIITMAILMGLISALCWGSTDFLAGQVARKVGVAKSLFYSQLFGFFVLSLLLFFYFEMSFVNASFFQLTLCVVASVCNLMAMVFLLKALSIGKASIVAPIVSLYGAVTTILSLINGKPMTVLVLFSLFICVIGACLTSMPKSKDGQRESSGSIFFALLSSLMFGLGFWLQGEFAVRDLGVINALWVYYLTAVVVLFLTLLKKGNLSLPPISIIALVFSISFFSLIGFASLAYGSATGHVAVVTVLSSLASGVTALLGFFIRGERLSRIQWMGIVIIIAGVILLKLZ

SEQ ID NO: 197 - protein, 460 aa, Photorhabdus luminescens
MNDNKMTPLELRATWGLGSVFSLRMLGMFMVLPVLTTYGLHLKDATETLIGIAIGIYGLTQAIFQIPVGLLSDKIGRKPLIIGGLLLFVLGSIIAALSDSIWGIIIGRALQGAGAISAAIMALLSDLTREQNRTKAMAFIGISFGITFAIAIVLGPILTNAIGLNGLFWGITILAGSAILITLLAVPSTDKHMLNRESGIVRHSFSKVLADSQLLKLNFGILSLHTLLMASFVALPLVMQQAGLPTQQHWKVYLITMLVSFLSVLPFIIYAEKKRRMKQVFSLCITMLLIAEIVLWAAGHHLWMIFIGIQIFFIAFNVMEAILPSLISKEAPAGYKGTAMGIYSTSQFLGVALGGGLGGWLYELKGAPLVFAAGIVLTIIWFIISTTMKQPPYVSSIRISLPENIVNKALLEQKILVQPGVCDVVIVPEEHSAYIKVDTKLISRAQLEQLIANNNDTIDZ

SEQ ID NO: 198 - protein, 511 aa, Photorhabdus luminescens
MPLTHDKPTPRPIEIAAIDLGSNSFHMIIARIVNDAFQILGRLKQRVHLADGLDNNNQLSEEAITRGLACLALFAERLQGFPADNVCLVGTHSLREASNAKEFIKRAKEVIPYPIEIISGHEEARLIYMGVEHTQPEKNRKLVIDIGGGSTELVIGENFEPLLVESRRMGCISFAHQFFPDDEISAEKFRRARLEAAQKLENLSWQYRITGWNSALGASGTIKAVYEVLVAMGEKDGLITPERLEMLVKEILKFKKLKTLDLPGLADDRKHFFIPGLAILCGIFDTLHIKALQLSDGALREGVLYEMEGRFRHQDIRQRTARSLAEHYNIDREQAKRVLNTTETLYQQWAIQNPKLVQPQLEAILHWAAMLHEVGLSINLSGLQRHSAYILQNTNLPGFNQEQQLLLATLVRCHRKTIKLDDLPRFNLFKKKQYLPLIQILRLATLLNNQRQSTTIPESLRLVTDDSHWALYLPYNYLSANTLMQLDLEKEQGYWHNVTGWQLEIAEESIZ

SEQ ID NO: 199 - protein, 690 aa, Photorhabdus luminescens
MSQDRLYTDKELSWLSFNERVLQEAADKSNPLIERMRFLGIYSNNLDEFYKVRFADVKRRILINEERGSATSARNVLKKIQAKVAKTDQEFDVLYNELLLEIARNQIFLINERQISPNQQIWLRQYFRQHLRPHITPILINPETNLVEFLKDDYTYLAVEIVHSQNIQYALLEIPSDKVPRFVNLPPEMPHRRKSMILLDNIMRYCLDEIFKGFFDYDSLNAYSMKMTRDSEYDLATEMESSLLELMSSTLKQRLTAEPVRFVYQREMPDEMVELLRSKLGLSNNDSVIAGGRYHNFKDFIKFPNEGKRNLLNKPLPRLRHTWFDNFRNGFDAIREQDVLLYYPYHTFEHVLELLRQASFDPSVLSIKINIYRVAKDSRIIDSMIHAAHNGKKVTVVVELQARFDEEANIHWAKRLTEAGVHVIFSAPGLKIHAKLFVISRLEGEEIVRYAHIGTGNFNEKTARLYTDYSLLTANPKITNEVRRVFNFIENPYRPVKFENLMVSPQNSRAMLNQLISQEIANASANKPAGIMLKINNLVDKELVDRLYDASEAGVKIRLLIRGMCSLVPSQPGFSENIQITSIVDRFLEHDRVYVFTNDGDEKVFLSSADWMTRNIDYRIEVAVCLLDPQLKQRVLDILELQFNDTVKARYVDKELSNSYVLRGNKRKIRAQLAIYDYLKALEQPEPRAZ

SEQ ID NO: 200 - protein, 213 aa, Photorhabdus luminescens
MKNIVVLISGSGSNLQAVIDACQQNRINGQVCAVLSNTANAYGLLRAKQADIPTHVISPKNYADRQTYDEALKHTIDQYQPDLLVLAGYMRILTPDFVQHYLGRLLNIHPSLLPKYPGLHTHRKAITNGDTEHGTSVHFVTEELDGGPVILQAKVPIFAGDQENEVVKRVQTQEHNIYPLVINWFIEGRLSMVNGKAYLDGKILPPEGYAAEZ

SEQ ID NO: 201 - protein, 347 aa, Photorhabdus luminescens
VTNKTSLSYKDAGVDIDAGNALVNRIKGVVKQTRRPEVMGGLGGFGALCALPQKYREPILVSGTDGVGTKLRLAMDLKRHDTIGIDLVAMCVNDLVVQGAEPLFFLDYYATGKLDVDTAASVISGIAEGCQLSGCALVGGETAEMPGMYHGEDYDVAGFCVGVVEKSEIIDGSKVQAGDALIALAASGPHSNGYSLIRKILAVSNTDPEATELESKSLADHLLAPTKIYVKSLLSLIEQVDIHAIAHLTGGGFWENIPRVLPENTQAQINESSWQWPAIFNWLQQTGNVSRHEMYRTFNCGVGMVIALPPTAVEQAIELLTAAGEKAWQIGTIATLKEGEQQVVIQZ

SEQ ID NO: 202 - protein, 209 aa, Photorhabdus luminescens
MKIVEVNHPLVKHKLGLMRAHDISTKRFRELAAEIGSLLTYEATADLETEKVTIDGWCGPVVVEQIKGKKITVVPILRAGLGMMDGVLENVPSARISVVGVYRNEETLEPVPYFQKLASNIDERMALLVDPMLATGGSMIATIDLLKKAGCQSIKVLVLVAAPEGIAALEKAHPDVELYTASIDERLNEQGYIVPGLGDAGDKIFGTKZ

SEQ ID NO: 203 - protein, 436 aa, Photorhabdus luminescens
MKQIKIAIIGGGSSYTPELVEGLIQHKKEIPLSELALVDIDSGKQKVEIIAALTRRMLARYGMEHVIVSVHFTPDNAIRGASFILTQLRVGQLPARVADERLGLKYGLIGQETTGVGGFAKALRTIPVLLDIAHKVEQLAPDAWIINFTNPAGIVTEAISRYSKAKIIGLCNVPVTMHHMIANMLQRPYQDVQLHFAGLNHMVWVHQVLVSGQDKTQQVLDMLCNGAILTMNNIQEAPWPPPLLKALGAIPCPYHRYFYQTRNMLQEEREAAFEQGTRAEQVMKVEQELFELYADPELDHKPEQLSFRGGAFYSEVALDLICAIHNNLNSQLVVNTTNHGAIRGLPDDAVIETNCIINAEGAHPLTFGRLPDSMYALTQQIKTYERLTIKAAIHGDRNAALLALITNPLVADIDIASPLLDDVLTINRDYLPQFQZ

SEQ ID NO: 204 - protein, 443 aa, Photorhabdus luminescens
MSLYTSFMRVLENHIIPFAGRIGNQRHITAMRDGFISAMPFLIIGSMMLIVANPPFDLQTTSSFGQAWLSFAKTHWDTITMPYFMTMGLMSVFVSVGTAYSLAKSYGLDGLTSALLSLMAFLLAAAPQIENKIALDFLGGAGVFTALICAIWSVELTRLLKKYNITIRMPTQVPPAIARSFELLYPVIGILLTVYPASLLLQSEFNLLIPAAIMQMFQPLISVGDTLPAIILALLIANLLWFAGIHGANIVTGLMAPIFMANIATNATLMAHGTAATQILTDPYWAFYICIGGSGSTLVLAILYLRSRSIHLRTIGKLSVVPSIFNINEPLLFGSPIVMNPTLFIPLLVVPLVNAVLSYSVLHLDLVHKMVAISPWTTPAPIGAMISAAWDYRAAVLVIILTIIDLFIWYPFFKIYEKQLIDEENKQQENTASTGVETQSQPZ

SEQ ID NO: 205 - protein, 210 aa, Photorhabdus luminescens
VLATSDEAMRKLISESDFDIKLNMTEKNVEHTQAFIERGVQDFSLPGFVTPYGYRLLASVSGNQYRLVTDADMPETVYVVKLEFMEHIVPSKKTCTQILVWRTVLPQHDGAVRGLSQEFFRFFLERYSIIVSDSEQTLDGRRFWERMIAWAISINGYHVYVSDSTKEERPLSLITSWDDFYVTWANYCWGHDKDYHYHRLFVISKERLHZ

SEQ ID NO: 206 - protein, 234 aa, Photorhabdus luminescens
LNTPSQLSLPLYLPDDETFASFFPGENATLLAAIKLAINQPHGSYIYFWSRDSGGRSHLLHAACAELSLKDEAVGYVPLDKRAYFIPEVLDGMEHLSLVCIDNIESIAGDEEWEMAIFNLYNRILEIGRTCLLISGDRPPRQINLKLPDLASRLDWGQIYKLQPLSDDEKLQALQLRAKLRGFELPEDVGRFLLKRLDREMRTLFMALNQLDHASIVAQRKLTIPFVKDILHLZ

SEQ ID NO: 207 - protein, 488 aa, Photorhabdus luminescens
MKIMSNQSLTAILISTLLLTSSPVLSASIEDSLPDIGTTAGSILSINQELAMGDFYVRQIRNNAPLIYDPLLTQYINALGQRLVAHADSVKTPFHFYLIDNPNINAYAFFGGNVVLHAALFRYSRNESELASVMAHEISHVTQRHLARMMEDQQRTAPLAWAGTLGSILLLMASPQAGMAALSGTIAGIQQGMISFTQSNEQEADRIGMQTLRRAGFDPQGMPDFMQIMVDQTRYSSKPPEMLLTHPLPDSRLADARNRANQYPAQNIPQSQDFLFARVRVMGMYTTEQRGYLEQILENYRRGTAKEQLAAAYGRAILLSQDKKYPEARAILEPLLAKQPDNVWFIDTMTDIDIEQNRIAQAITRLQNALQKQKDNLVLQINLANALIHAKQYQQALKLLHRYTFNNPDDPNGWHLIAEAAAKQGKRHEELSAHAEEMALRGQFDNAIKYLSSASALVKLGSYDQARYDARIDQLRQLQQRYSQYKRZ

SEQ ID NO: 208 - protein, 291 aa, Photorhabdus luminescens
MKITVLGCGAIGKLWLAALSQQKHQVQGWLKSSRSYLSVHIDEMNGEIFNQPIPTNNSDHLTNSELLIVCLKAWQVADAVNNLLPKLSPNCPILLLHNGMGTQEELLSAPNPILLGVTTHGAYQDDQQVYHTASGLTYIGSATSNATGLSSLANVLHQSLPDVAWHNEILSISWLKLAANCVVNPLTALYECQNGDLLRYPEQVNILCEEIIQVMQRENIHTTIDNLISYVYDVIKLTAKNYSSMLQDVRAKRRTEIDYITGYLLRQARAHGLAAPENTRIYNLVKHKERZ

SEQ ID NO: 209 - protein, 360 aa, Photorhabdus luminescens
MLDMIIQWYRRRFTDPQVIALFVILLAGFCIIYFLHGILTPLLVAIVLAYLLEWPTAKLEKLGCSRTVAVCIVLIIFSSISLLVILIVAPTVWQQGINLLSDIPNMLNRFNEYAQTLPARYPALVDAGIIDMMAENLRSKISIAGESVVKFSVASLIGLLTLAIYLILVPLMAFFLLKDKNQMLQALQRVLPRNRILAGQVWREMNQQITNYIRGKVTEMVIVGICTYAVFAFLGLDYSLLLSVLVGLSVLIPYVGALIVTIPVVLVALFQWGVGTDFWTLIIAYLVVQGLDGNLLVPILFSEAVNLHPLVIILSVITFGGLWGFWGVFFAIPLATLIKAVIQAWPEEIVIIGDDEIKEZ

SEQ ID NO: 210 - protein, 300 aa, Photorhabdus luminescens
MSSGRFEFTGSIVALVTPMDASGQVDKASLKKLIDYHVASGTSAIVSVGTTGESATLSHDEHGDVVLTTIELADGRIPVIAGTGANATAEAISLTKRFENSGVVGCLTVTPYYNKPSQEGLYQHFKTIAENTDLPQILYNVPSRTGCDLLPLTVARLAKIKNIVAIKEATGNLNRVSQIQELVNDDSFILLSGDDASGLDFIQLGGKGVISVTANIAAPDVAKFCELALNGQFAEARKLNNRLMDLHRQLFVEPNPIPVKWGCQKLGLIADDTVRLPMTPLTDAGKVSVEKALKMAGLLZ

SEQ ID NO: 211 - protein, 350 aa, Photorhabdus luminescens
MAILLQKSKVMTVAGMSLVMLLAACSSDQSYKRQINDDETYLEAPPRKALKVPAGMVLPLQNGEYDIPAIASQGQVGKALDIRPPSQALALLSGSRTENSAKSSKLLLESTPENSHLWSQINNVLLKKGFQVSQRDDASQTLTTDWIDWLRADENVPYQARHRISVARQSYQIELSVTNEGLRQGDHQITDPLEIQRYNTLMLNELIEGVNQQRERISDDSVARNLGSLDVQSGGDRSGLPQMIVRAPYNIVWDRLPAVLEKVGMKVGSRSRSTGSITVTYKSLSSSSWKSMGVNEPSISEGDYKLQVGDLNNRSSLQFISDKGKPLTQSQNDELVAALKAAFSQTTGSZ

SEQ ID NO: 212 - protein, 238 aa, Photorhabdus luminescens
MQKKAELYRGKAKTVYTTDDPDLLVLEFRNDTSALDGERIEQFDRKGMVNNKFNHFIMSKLAEAGIPTQMERLLSDTEVLVKKLDMVPVECVVRNRAAGSLVRRLGIEEGLVLNPPLFDLFLKNDAKHDPMVNESYCETFGWVSKEHLAEMKELSLKANEVLSKLFDDAGLILVDFKLEFGLFKGQIVLGDEFSPDGSRLWDKETLDKMDKDRFRQSLGGLIEAYEEVARRIGVILDZ

SEQ ID NO: 213 - protein, 356 aa, Photorhabdus luminescens; identical to SEQ ID NO: 52

SEQ ID NO: 214 - protein, 583 aa, Photorhabdus luminescens
MRCHNLKMKSVMSKNLTVWRILLQSAVPFKGTVVCAFLALTVTLSCDLSGPYIIRNYVDKATSGTTVDQLIMLAIIYVFIASIGVIGSLVTSYMSTKAGWGIADTIRYKLFHHVMTVLPVLEIERRSQGELLENIEGNADIIGKTISKAGFKAIANVALTLGTLVIIFSVMPQAGIAIAIVVILVAYVLIQLTRLSVRRWLIARNEKARIFGFVGDSLHAMDDLQPLSQAHWPAIAFRKMLSMLLKFERSAYIGGRAFWPITQIFFALCFGIGFGFGLQLLGENSLSIGTLTMVYLYVDKLREPVEDMSSEIELIQKLFAALSLSAKMLNEGTPDKSSDNLLPDGPLSIHFDNVDFSYNGEETQVLHGVNFYVAPGSKIGIIGRTGAGKSTILNLMCGFARPDSGRVTIGNVDVSTIKPEEFAKKIAVLSQRSHLFSATLRENLTLFSNEISDDQIWEVLQELDALEWVRALPDGLDTQVGTNGLMLSAGEIQMIAGARVMLQHCSLVIIDEGTSQLDPRTEESWLKLLEKLSHNCTVVMVAHRLHTLSVVDEIIIIDDGRIQQRIPETEIAMLTSNHGLMVZ

SEQ ID NO: 215 - protein, 557 aa, Photorhabdus luminescens
SWAHGMTISNVSTKVKMLPALTELIKKFAPLYFITMFVWTLMHGFPLLIGYQISKLLDRAMNEPTNPVVWWLLASAIATMVLRSLFLFLGLTFDFTLIFKVSAYLKERVLWGVSHCSRNQRQTFSQGDILNRIRDDSDEIAEFLSWTSDFIYRALLLIIALVVLINTDIITTLALMPMIVGLWVGAILKRKVGNLQKSKRQSQGDIAGKITDVLTGIRDLRLGNKMEGQIERLSQKFVSRRAIQAKHQVFTDLLSGLFKNIVILGTSAVLLIVSKRIVDGSFTVGNLALFLTYIGWISEQILFFGRSVAYYKNADVCYGRIRQFLANNKVDKKETKEYEPDEILHKLSVNHLAYSKTQPPVSFEATANQVIGIVGDIGSGKTTFLRYLIGLEKSSSGSVLWNNREVLGNENWWRNPRIGYARQKAGFFGGTVRQNLALGDKDIDDDVMVRALEAVGLTPGSYELPDGLDTVINSGCAGQLSGGQRQRLALARMLCRPADVYIVDNCDSSLDTDTARRLWTVLPEHWPGLWIVVSHNADLLAKADHIVTVQQRRELAZ

SEQ ID NO: 216 - protein, 406 aa, Photorhabdus luminescens
CIHHDCGRRKLSNYMLIKKLIATLEGEIQILITTLLNEQWEAARELMNESLRMAADDLALTVLADSLCNSDIDIIYQQQGACHLRLNTLNGKFNLYIGIKDRQINSLSLSRCPIPDAYAKQGIFIEKTLKTFGLRDVPDGLVCLPSPHNDAKALVLLLAGSGPHSMDYDVGPNSLFRMLAHELSQYGIASVRFDKRYYRIRQRNMDPEVVDLNTEIVDDACNILTGLMGHIEFHDVPVFLVGHSFGGYVSPLIAENLQQKSGLNVTGIAMLAAPFRNLLRVILSQLPSGKEQDTISLASFLSVPDSYLKQIENYHAFDCLNSLPAMPLFFAQGDQDCQILHNVDFTMWKTALQNNRQAEFKLYTGLNHILLPTMGCDGGEDYLHPGQIPAQVIADLTAWIIHHSSZ

SEQ ID NO: 217 - protein, 431 aa, Photorhabdus luminescens
PSCCRICQTPTISGQWFFGGSMSMSKITLKFNIYSTVILFNLKMTVRSLAAHKTRVFLTLLCIAIGVASIVIMQAIGEETKHHIVKMVSSMGSNIISVKYKGQENGAFDSHHDYLTQEDITSLSGNPHISHSTLFYTAPGTIVSPQGSADVQLIGANADIAIIRNLVIDRGRFYTPQDNTALANVVVLGASLAERLFPQKETAFGQSIKINDISMQVIGILTQKGEGMDAGVDDAAFLPSNSYLVRLFGHTPPSGMVLKAKDASHIEPVKYAIEQRLSRFKHQQSYEIRNTTELLKTLHETQSKINLFLLSISSVTLFVAGVSVMNTILISVRERRREIGIRLAVGASYSDIFYQFLTEAFLISLLGTLLGLLFSFIGFRILLLFDITVGFSFYSFLLASLAACFITVVFGVYPSHRAAASAPIEGIRELZ

SEQ ID NO: 218 - protein, 222 aa, Photorhabdus luminescens
MITLNNICKTYGNEGKQHLVLKDICLTIDQNDYVAILGRSGSGKSTLLNIIGLLDIASAGEYLINDLTVTQQKIHSLALLRRKYFGFVFQNYNLLENYRIDENILMPMYYLKRNFDYDREHFRYLIDRLQLDNLLDKYPRHLSGGEQQRVAVARALINNPKFIIADEPTGALDTTNATNLMQLFTELHHNGCGIILVTHDQVVAEYAKRRLYLDSGSLVAQZ

SEQ ID NO: 219 - protein, 483 aa, Photorhabdus luminescens
MKFIIKLFPEITIKSQTVRLRFIKILASNIRNVLKTLGDNIAVVRHWDNIEVRTKDENLGVQICDALTRIPGIHHILQVEEREFRDMHHIFEQAYEAYGELLHNKTFCVRVKRRGKHQFTSNEVERYVGGGLNQHIESAKVKLNHPDVTVNLEIDQDVLILVKARYEGIGGFPIGTQEDVLSLISGGFDSGVSSYMLMRRGCRVHYCFFNLGGSAHEIGVKQVAHYLWNRFGSSHKVRFVAVDFEPVVAEILEKVDDGQMGVVLKRMMVRAASKVAERYGVQAIVTGEALGQVSSQTLTNLRLIDNASDTLILRPLISHDKEHIIRLAREIGTEDFARTMPEFCGVISKSPTVKAVKAKIEAEEANFDFNILEKVVSEAQNVDIRQIAEQSSEQVVEIETVTAFAPTDVLLDIRSPDEQDDRPLQLNGVEIKSLPFYKLSSQFGDLPKEKTYLLYCERGVMSRLQALYLSEQGFDNVKVYRPZ

SEQ ID NO: 220 - protein, 389 aa, Photorhabdus luminescens
MLIVLVKKKKWVVITIIMIAFLAVAYNHFSQKETSTVMTEQIVTGTLGDVITTVNAAGIVQPTSQVNVGSQISGQLTKLYVEVGDIVETGKLVASIDDTFYRTKVEASRARLEKLRAMLQEEQYAYQLLVITEKRQRELNLRSATSQQLLDEAAFGVKKSQARIESLKADIRQNEHILHSEEVSLSYSQIYSPIAGVVTAIHVDPGQTLNVNQQTPVLMQIADLKNMTVYAKVSEADINQIVTGQKASFKIYSTNQHIWHGNVKKIMYKPDLINNAVYYTVLFDVPNDNFLLKPSMSADVTIVTHESTGVVTIPSDILNNKRHQPLNDDLTTYFLREMKDGNIVVRQLLIGHNNGRRSVVVSGLQSNEQIVVLSKQDNLGKIQNDNAKZ

SEQ ID NO: 221 - protein, 1472 aa, Photorhabdus luminescens
NIAWSRTIMEYNNNYWPLNYTQLRLAIANTVADDKSVFNVGEFISFSDNISLARLKQAIITIHQFNDGFSLRYRIAEHNIFQEKSSTPVDVIPIKLSDPAVEPAAKADFAKRTTQPLAPEKGVTIRHYLYFNDVGCCFWGIIAHHIATDYWGIGQLIHDVLSCYEQQTFHPTSAPIFTYQAYLDEVKYKANVHYANNKEYWNNYLNQLPKLEDYTRKRLFPSKAIKVSRPLTANNHSFTFNDKLMMMLALCLQMSKRGRVSTNIINLPFSNRRDKGEYRYYRPAMNTLPLMVSLAPQATIKQILVAMQSQISLHSKHSRIDINDLNDEAINRADQFIAAPYVNLLHELEHDLMKDNRAIRGCMTSGAVNNYGINIRFSPDGISALVELDVGSRLYSHFAAHTLIDDYLHIYSTIAENINETVEAYWVKYKEIEPTDNIISSLDNPKNIVINHPIKENIIARIAQIVAVSPDKKSVIHGDQTEINTVHRLNYGELYHKLFTFSQLLLSCPLQNRRVAVLLPRGMDSLLSILSIHTAGLCFVPINMTFGQEEINNILNSLNISLLITARHYHEKINGVNNTHILFIEDIETRPSEIFLGHDIKRPATQEDEAYIFFTSGTTGVPKAVPITFKGLYAYLAAMTEQYDIKQDDVILNFSTPVFDAYIEEVFGCFYQGATLAIANDNMIVELETLFSFCHAQSVTIVNFPTNYWHQIVFFLHAAIKELAPSIRMTIIGGDLAMDKAIHHWLEKVGCGISLINSYGPTECCVVASSHKIADKFQPGNIIGKALANTNIVIREYGTNKIINGSNGEICIRGDSICSGYINDNQSTSRRFLQLNDGEIYYLTGDRGFYDAQGNLNFIGRLDKEHKIDGKRVDLDEMQKLLTAAINIDDIHLAIKENETGYQYINIFIPDRSCSITRHEIVSFLRGCYPKLQVPFIVELSSSNNSAPISELNKEDNISQIKGEKREIFFTLWREVFGDSDGIVDEETNFFDAGGTSLKALLLINKIQQRFNCSIHLEDFYHTPRLGYLLQSVIQQGQIPVLIDKNSSCLTEQHDQYYWIIDTISNRSGAHNIPLYYHLIGEIDLKKLRYALLYIMQYFPALCQRVTIIDGQLSLTFSPAIEENLPFEYIDLTHATGINIEISFRKILNDMAFKPMALQDNPPVYFKLLKIAEHEHYLLLNFHHAFCDGMSIAHVLQKLSSAYADNVPKIEAATETGINVINQRMSDETLNFWTEKLFNVLSVVGQNNESSETHLRARGRRYSMPLSPQLMAELSSTQKKYAVTLEHIMIGAFLMTINSLLNKDEIIVGIPCANRAPPISFDSVGSFATTLLLPYVTAETSLINLSIYVREFLADANTHSNISLAYLKQHLHHHHGMQLPEVTYYFSSQIGFETGLYLGETRCTKEKIKGLKPKGDIALELINLPTGIGLEWLYDDDIFSEDIISDMGLFLIDLLDCIGTQHNLMPGDTERZ

SEQ ID NO: 222 - protein, 343 aa, Photorhabdus luminescens
LIKERMMKRRTFIGVAAGAAIGSVIPTVNASTDSNRLFGVPRSLLSPGEVEENKLRLSMSNAKLPVEVWEEIITYNRFWETLQQQPNLALEYRESPEKVLAEFGIDKDIVSPGSAEELLLFITYDKDLMNAVKINDYEALFSRLKTYGLNERGSSLRSRINHHLNQDASLFAHFKENIESYQLQDTNSPPLLRLKEILEPLNSEDDTSIEIARLAVGANVVAAVNVAVGTRVVAAVNAAAAVNVVAYLSLAVQTAVTVCMANYLPKLDHSDLSAGTASLHLARLYNNQEMVDTLVKEAVRREITACLFAAQKCGYINLPATREERKEVIHLFTELSLGMAAAZ

SEQ ID NO: 223 - protein, 356 aa, Photorhabdus luminescens
IMPCFPPGYWEQYPNTATVITTYTCNAACKECCFECNPSVKARLSLDEIKQFIAHSKANFPGLKLVVFSGGECFLLGKDLIEAIRFASDHGLLTRCVTNGYWGKNREKAQKIAQDLINAGITEMNISTGKDHSEWIPLDSVVTAAEALAEQNITTLITVEQDTFDSAIATQITQNPVIKRLKEQNKINLQRNTWMPFYDTSEERKDIPNRDQQLAKGCDQVFENIVLTPHGEISACCGLTLEHIPEMKLGRLQGGDVSQLFKGQEEDFMKVWLRTEGPYNILKKYRPQDSNINLEKIVHPCQACAHLHKDERTRRNLLDNYHKEIIPVIKKFNAKERLDLIYYSAEKNAVNLIEEZ

SEQ ID NO: 224 - protein, 540 aa, Photorhabdus luminescens
MSIEFTPWPVELAERYREKGYWLGKPLTDILYKQCQRQPEAIAIICGNRKFSYHQLDQQSSALASNLTLAGIKRGDTAIVQLPNIAEFYITFFALLKMGVVPINALFSHNKLELLAYAQQIDPSLIVLSSEHSLLQNNDFLEQLKIHCPRLRNIVVDGRKIQYTNELKSWLESTNLPLNFEATRSDEVAFFQLSGGSTGTPKLIPRTHDDYYYSVRRSVEICELTQQTRYLCALPAQHNYPLSSPGALGVFYAGGCLILATDPGPTTCFPLIREHKVTMTSLVPSAVALWIQTMRKYQYSLESLRLLQVGGAKLSESVARVIPKLFSCKLQQVFGMAEGLVCYTRLNDDDERIFTTQGCPMSGDDEVRIVDDNGNIQAPGSAGMLIIRGPYTFRGYYKSPAHNAKVFDKEGFYYTGDLAYMTKEGYICIVGREKDQINRGGEKIASEEIESLLLKHEDVIHSALVSMPDPLMGEKSCAFIVVADPNINTLQLRKYLRGMGIAEYKLPDRFEIIDVMPVTPVGKIDKLLLRKLIRDKLENZ

SEQ ID NO: 225 - protein, 218 aa, Photorhabdus luminescens
MTIPSLKNYMLPQPKDFPGNKASWLFEPHRAILLIHDMQDYFLQFFGDNSPLINKLIENIHLLRVFCKEKEIPIIYTAQPKMQSDEERALLNDIWGAGLNRSPHLQNINPALAPNNDDIVIVKWRYSAFQRSSLEKNIKDLGRDQLIICGVYGHIGCMITAVDAFMRDIKPFLVGDAIADFTLEDHLMALKYVAEKSGMVMSTKEIISSVNFDKLNLZ

SEQ ID NO: 226 - protein, 257 aa, Photorhabdus luminescens
  misc_feature (90)..(90): Xaa can be any naturally occurring amino acid
MKNKQNLQMDFSHKTVWVTGAARGIGEQIARDFTALGANVIGFDRVFEQDNLPYKCIQLDISDPEKVEMICSQQLSVSAELDILVNAAGXLQLGNIDELNISDWHRCINVNASGAFYLFRSVIPHFKRQRGGTIISVSSNAARVPRMQMAAYCASKSALTSLTHCVGLELAPFGVRCNVVSPGSTDTFMQRSMWKTDDDEKNTINGYPERYKLGIPLGKIASVNEISHTVLFLSSDLASHITLQDIVVDGGATLACZ

SEQ ID NO: 227 - protein, 683 aa, Photorhabdus luminescens
MLPELSVIQTEMQQQGLRRLLVLSGDDHWCYLQANELQRRFIGDWLWISHRKQHAVLPEKAVSLLGQEYLHGIFDATEGFNAEALAILAGTLKAGSWLVMMVPSWYQWRDQPDKDSARWNEQLEAIPTPHFVQHIQQQIVSDPQVLLWRQNDPLCIPVFPQYSAWQLPNGSPTASQHAILARLLRASQGVWVITAPRGRGKSTLAGMLMQQWQGNCWLTAPAKATTAVIRCYAGEKGKFWAVDNLLKYCRQNSVSDIDWLLIDEAAAIPMPQLSELIGYFPRILLTTTVQGYEGTGRGFLLKFCVGLPDRHVLNLTAPVRWAENDPLENWLESALLFEDAIPVNNSDQAISYQVYHQQQWIKQPELLRQFYGILTSAHYKTSPLDLRRLLDAKGMQFVAALGNNALMGALWMVEEGGLTLELAHEIWAGRRRPRGNLVVQSLAAHSGLPQAAVLKSQRISRVAVQANHRRHGIAQGMIAYQRERAEKQGVDFISVSFGYTAELWALWQKCGFQLVRMGTHLEASSGCYTAMAIFPLSEQGILLGIQAQQQLARDAYWLELQIGFSLPVDYQTDHHLNQHDWQELSGFAFAHRPFSASLPSLQRLLLNSDLPLIALRNHLQQEMRVEQCITVLQLSGYKALMRLWRQETAQALSSLDKKLAKDWQEWTTAFFEANHLHHPTCYZ

SEQ ID NO: 228 - protein, 238 aa, Photorhabdus luminescens
PDLSTCYGAVNPVITANMLTGLATGHLIALFGNHRLQPEAANAFFSMQQAAEKAGINLQPASTFRDFQRQQAIWNGKFRGERPVLDENSQPMDITQLSEGERCKAILRWSALPGGSRHHWGTDLDVYDPTMLPANQMLLLEPWEYENGGYFAPLTHWLTENMAHFGFYRPFVGNCGSVADEPWHISYQPFAKQLEKLLTQQMLLDVWQQHDIAGIDWLSANLPYIFENYLHVAQETTZ

SEQ ID NO: 229 - protein, 376 aa, Photorhabdus luminescens
MTCPVIELAQQLIRQPSISPDDKGCQDIMIAHLQTIGFTIERMPFGDTNNFWAYRGIGPTLAFAGHTDVVPAGDESQWEYPPFEPTIRNGMLYGRGAADMKGSLAAMIVAAERFVAAHPNHNGRLAFLITSDEEAKATHGTVKVVEALMSRNERLDYCLIGEPSSQHRLGDMVKNGRRGSLTANLTVHGIQGHVAYPHLADNPIHRVLPALQTLVNTHWDEGNEFFPATSMQIANIHAGTGSHNVIPGNVQVQFNFRFSTELTDSQIREQVETILKNHNLNYTIEWILAGQPFLTAKGELVNAVIQSIDQYCGYQPELSTSGGTSDGRFIAQMGAQVVELGPLNSTIHKVNESVSAADLQQLSRIYQRVMEQLIQZ

SEQ ID NO: 230 - protein, 310 aa, Photorhabdus luminescens
LNKPMSEQNSTQFKEQLKICQQRVNNVLISTLSSVAFANNPLVHAMQHGTLLGGKRLRPFLVYAVGEMFGLSANNLDAPAAAVECIHAFSLIHDDLPAMDNDDLRRGQPTCHIKFGEAHAILAGDALQALAFEILSKREMPDVTTADRLEMVAELATASGIAGMCGGQALDLAAEGRHIDLHMLEQIHRHKTGALIRCAVRMGAYGAGQSGHDALPELDQYAQAIGLAFQVQDDILDVIGDTEMIGKRQGSDQQLGKSTYPALLGLEQAQKKAYELYQEALKALNKLEDKSYNTTMLRALASFIIERNNZ

SEQ ID NO: 231 - protein, 212 aa, Photorhabdus luminescens
MYNHSVMIVDDHPLIRHGLKQIVELDRALTVTAEADNGEEAINIACKLKPDVIMIDLNMNGLSGVDTIKSIRRKGINSYVLVLSVSDDRNDVYAAIDAGANGYLLKDSDLDSLLSSIRHAARGQTVFSEKIYQHLANRHKHVDPLSELTKRELDVLKEVSSGMTNKEVADVLFISEETVKVHIRNLLKKLNVRSRLAATIMYLQHRKNGVAZ

SEQ ID NO: 232 - protein, 760 aa, Photorhabdus luminescens
MDEKLKQSALDFHQFPQPGKITITPTKPLITQRDLALAYSPGVAAPCLEIAEDPLAAYKYTARGNLVAVISNGSAVLGLGNIGALAGKPVMEGKGVLFKKFSGIDVFDIEVDESDPDKLIDIIAALEPTFGGINLEDIKAPECFYIEKKLREKMNIPVFHDDQHGTAIICTAAVLNGLRIMKKEISAVRLVVSGAGAASIACMNLLVALGLQRKNIVVCDSKGVIYRGRDKNMEETKAAYAIEDNGSRTLGDVIPGADIFLGCSGPGVLTQDMVKMMAKDPLIMALANPEPEILPPLAKQVRPDAIICTGRSDYPNQVNNVLCFPFIFRGALDVGATTINEEMKLACVHAIADLALAEQSEEVASAYDDQDLFFGPEYIIPKPFDPRLIVKIAPAVAKAAMDSGVATRPIKDFGAYIEKLNEFVYKTNLFMKPIFSQAKKAKKRIVLAEGEEVRVLHATQELISLGLAYPILIGRPSVIEMRIQKLGLHIEAGKDFEVVNNENDPRFKKYWQEYHHIMKRRGVSAEQARRAVIGNPTLIGAIMVLRGEADGLICGTVGSYSEHYDVVRNVFGFRDGVHTAGAMNALMLPSGNTFIADTYVNNDPTPEQLAEITLMASETIRRFGIEPKVALLSHSSFGSTDCLSAQKMRQTLELVNKMSPSLEIDGEMHGDAALVESIRRDIMPDSPLKGAANLLIMPNMESARISYNLLRVTSSEGVTVGPVLMGVAKPIHILTPISSVRRIVNMVALAAVEAQTHPLZ

SEQ ID NO: 233 - protein, 333 aa, Photorhabdus luminescens
STNSSAVIPIAPVSCRQGRFVVNDSYYLHDGQNINNMDMDMMKFLTTVKSFLIICGLLILSGCVSVHQKTALQALSPELTQQGAIIDLKTGHALTPDELINRLASHQRVIVGEKHDNPYHHQIEIWLVQQLPLKREQGSVLLEMINPDQQQKVNKVKSWLQTQPIVRESRIKELLAWQDGWRWELYGGLVMELMHQPYPLLSANLDRSEIKAAYRNPPVLQGNISVAENVKAQIKEVIKDVHGGEITEQQLSAMTTIQQMRDRRMAEQLLKAPAPATLIAGGYHATKVIGVPLHVKELSPQEDFVVLIMAEKSNVLDSQYADYVWYTPVKKPZ

SEQ ID NO: 234 - protein, 273 aa, Photorhabdus luminescens
NYALSSMLTLTHSAFQTGHFKKGLVSAIAVHLILVGWIISQPEEIAVGELMPPPAVMMELSLLTEATHQVQKQPIGLEQQLSVASRQQESEVNEIKTPELMKDEQAQILVHKPKKQKKHHEEIKKTPPVKRQQVEEQESEKSQSSAAMASSTATSTNLTSRVAAAYDSDSKAVADADALWRAEVVGHLNRYKRYPEDAQRRNRTGRPTVRFTIDKQGYVTNSDLVRRSGTHSLDREAKQILARAQPLPVPPIAVLNGNEITIEIPIDFSLTNZ

SEQ ID NO: 235 - protein, 686 aa, Photorhabdus luminescens
MPPKAMKQPHHITTHGDTRIDDYYWMRDDNRKDQKVIDYLTAENKYTEQMLKPGEQLRDTLYEEMVGRMKQDDQSVPYTYNGYIYRTTYETGKDFPIYQRKPVDGSSDWQILVDGNERAKGHEYYQLSNFAISLDNKRMAIAEDTQGRRNYQISFKDIADKQWNNDVIKNTSGNMVWANDNNTLFYVRRHSQTLLPYQVFRHQYGSNTSEDHKIYQEEDERFYLSISKSTSRDYIMLAITSNSTSEYLLIDANKPQAELQLFSPRQEGREYYIDHFRDHFYIRSNHENETYGLYQTDAINIPWKIVIAPRQDSDLEDFDLFNDWLVVQERTKGLPTIRQINWQTQQEKQIKFDDPSYMAWIDYNPEPNTDFVRYGYSSMTTPSSTFQWNMKTGERELLKQQEVKGFDKHHYESQRIWVKARDGVEVPVSLVYRKSLFKKGHNPILIYGYGAYGISMDPSFSSPRLSLLDRGFVYALVHVRGGGELGKKWYLQGKVENKENSFNDFIDVTKALIAQKYGDSKRIYAMGGSAGGLLMGAVINQAPELYRGVVAQVPFVDAVTTMLDPSIPLTVGEYEEWGNPENKEDYFRIKSYSPYDNIKHQRYPNLLVTSGFYDSQVQYWEPTKWVAKLRDMKEDNSILLLETNMSAGHGGKSGRFSRLKDTALDYSFILMLDDAKKYFPQLKDNZ

SEQ ID NO: 236 - protein, 771 aa, Photorhabdus luminescens
ANIDLYAFGMIEMKIMTKIAGAGVVLIGLQGLAYGEEKQERKSDKVMKFGSLKVSGSQDDAEVRAMERPGSYSSKGEDTKLQSTDSILRSMPGTYTQIDPGQGTVSVNIRGLSGFGRVNMMVDGVSQSFYGTSPTSPAHGTTYNQFGTIIDPNFIVGVDVNRGQSDGSSSVNALVGSANFRTIGVDDVIFAGNSLGVRTKTAYGNNGIGYNGMIAVAGKTPAFSSEGSIGAMLAVSGHSIDAHYKNGDGVLSDEFVTDKSFKQKPNSQLMKIKIEPNEFHDMELSGRNYHNKFTRRHIDSRDIYLKYNYTPFSEWVDIKLLVSTSESRQRYEGDSLFKLLNSNAKNKSDAIDISNISRFDYGDTNFELTFGSKLMETEYSRTTNSVYSGRGKDEKEKQEYNKKDSEVKENNVFAPSGKQDIASIYGGLKINRGIYQADITFNYMDYRVKGYKPACDLRIPCFPQGATELDLKEHGFNPGILLSAEIIPEFQPFVSYARSMRAPNIQETFYSNEGGGSMNPFLKGESSDTYQIGFNSFRPDLIVKGDTFRLKAAWYHTKVKNYILSDIWLICGNRKKCKADSSTDYNEVDPNIKMYIYHNSLTPVKIHGYEIAADYDAGMFYSKLAYSWQKTRQPTSAATAHFGAEPLSQLPDSFMTLDTGVCLFNEKFRVGAIVKYTGDSHRLDPDQYNFDEDGRVVQQKEPKIPTIVDLYSDYQINHNVLLKFSVQNLANKNYSEALNRANSSPLMTEQTSAMQTARGRTYIVGAEIRFZ

SEQ ID NO: 237 - protein, 458 aa, Photorhabdus luminescens
MSLPFNTGIFSVSRLNQTVRQLLEMEMGRIWLSAEISNFSHPSSGHWYFTLKDERAQVRAAMFRSSNQRVTFRPQNGQQVLVRAIITLYEPRGDYQLIVENMQPAGDGLLQQQFELLKQKLDAEGLFDQSHKKPLPSPAQQLGVITSTSGAALHDILNILKRRDPSLPIIIYPTSVQGAEAPLQIIRAIELANERRECDVLIVGRGGGSLEDLWSFNDERVARAIFHSDIPIVSAVGHETDVTIADFVADLRAPTPSAAAELVSRNQLELLRQIQSQQQRLEMAMDYFFAQKQHIFSLLSHRLQQQHPHLRLARQQNLLVNLRQRLTDSLQRYLKQNSLAYEKLQQRLWYAEPSQQIHHYSQQIQQQDFRLRQAIERQISRSREKFAVSCSRMEAVSPLATLARGYSISQTSDGKLLKQTKQVDVGDVLNTRLQDGWIESEVLKIKKERKKRSANLKZ

SEQ ID NO: 238 - protein, 491 aa, Photorhabdus luminescens
LLMLRIKKEALTFDDVLLVPAHSTVLPNTADLSTQLTSSICLKVPMLSAAMDTVTESGLAIALAQEGGMGFIHKNMSIERQAEEVSRVKKHESGVVTDPVTVAPETTLREVKELTERNGFAGYPVVTEGNELVGIITGRDVRFVTDLDQPVTAVMTPKARLVTVKEGEAREVVLQKMHEKRVEKALVVDENFHLLGMITVKDFQKAERKPNACKDARGRLRVGAAVGAGAGNEARIDALVAAGIDVLLIDSSHGHSEGVLQRIRETRAKYPNLQIIGGNVATGEGAKALVAAGVNAVKVGIGPGSICTTRIVTGVGVPQITAISDAVEALEGTGIPVIADGGIRFSGDIAKAIAAGASCVMVGSMLAGTEESPGEIELYQGRSFKSYRGMGSLGAMSKGSSDRYFQTDNAADKLVPEGIEGRVAYKGLLKNIVHQQMGGLRSCMGLTGCATIDELRTKAEFVRISNAGIQESHVHDVTIIKESPNYRLGLZ

SEQ ID NO: 239 - protein, 526 aa, Photorhabdus luminescens
MTTNIHQHRILILDFGSQYTQLIARRIREIGVYCELWAWDVTEEQIREFNPSGIILSGGPESTTAQGSPRAPEYVFNAGVPVLGVCYGMQTMSVQFGGKVEDSTEREFGYAQVEIKAESALFRGIQDSLNEQGKPSLDVWMSHGDKVTAIPEDFITIASTDTCPFAIIANEEKRFYGVQFHPEVTHTHQGQRILERFVLDVCQCEALWTPASIIEDTVVRLREQVGEDHVILGLSGGVDSSVTALLLHRAIGNRLTCVFVDNGLLRLNEATQVMEMFAGKFGLNIVHVPAEDRFLTALAGINDPEEKRKTIGRVFVEVFDEEASKQAQVKWLAQGTIYPDVIESAASATGKAHVIKSHHNVGGLPEEMKLGLVEPLKELFKDEVRKIGLELGLPYDMLNRHPFPGPGLGVRVLGEVKKEYCDLLRQADAIFIEELHKADLYNKVSQAFTVFLPVRSVGVMGDGRKYDWVVSLRAVETIDFMTAHWAHLPYDFLGRVSNRIINEVNGISRVVYDVSGKPPATIEWEZ

SEQ ID NO: 240 - protein, 550 aa, Photorhabdus luminescens
LATEGGLEARGAIFTRFEVVDFILDLVGYTEDQPLHEKRLLEPSFGGGDFLLPIIERLLSAWRAARPSGSALDELTDAIRAVELHHETFKSTKAAVVTLLRRQGIAANAAVTLASYWLSQGDFLLAPLEGQFDFVVGNPPYVRQELIPAPLLAEYRSRYLTMYDRADIYIPFIERSLSVLSDGGSLGFICADRWMKNRYGGPLRSLVAERFHLKVYVDMVDTPAFHSDVIAYPAITIISREVPRPTRIAYRPAIDPATLTALAGLLKAPSLPKEVGPARELAQVTNGSEPWLLESFDQMAVIRRLEGDFPLLEEAGCKVGIGVATGADKAFIGDFDALNVEPDRKVPLVTTKDIMTGEVEWRGLGVINPFAEQGGLVDLDEYPRLRRYLEARREVIAGRHCAQKAPANWYRTIDRITPSLAARPKLLIPDIKGQAHIVYENGELYPHHNLYYVTSDDWDLRALQAVLLSAVTRLFVATYSTKMRGGFLRFQAQYLRRIRIPHWAEVSEPLRRELAEAAIKRDLQACNRAVFRLYDLSQEERSALGGNGEZ

SEQ ID NO: 241 - protein, 622 aa, Photorhabdus luminescens
MSIDIAKYPTLALAENPEELRMLPKESLPKLCDELRQFLLNSVSRSSGHFASGLGTVELTVALHYVYKTPFDKLVWDVGHQAYPHKILTGRRDRIDTIRQKNGLHPFPWRDESEYDTLCVGHSSTSISAGLGMAIAAQREGKGRRTVCVIGDGAITAGMAFEAMNHAGDIDPDILVILNDNEMSISENVGALNNHLAQLLSGKLYTTLREGGKKVFSNLPPIKELLKKTEEHIKGMVVPGTLFEELGFNYIGPIDGHDVLTLTQTLKNMRELKGPQLLHIMTKKGRGYAPAEKDPISWHAVPKFDPTTGALPKSSDNRPTFSKIFGDWLCEEAANDKKLMAITPAMREGSGMVRFSREYPDQYFDVAIAEQHAVTFAAGLAIGGYRPIVAIYSTFLQRAYDQVIHDIAIQNLPVLFAIDRGGIVGADGQTHQGAFDLSFLRCIPNMVIMAPSDENECRQMLHTGYHYQQGPVAVRYPRGTGTGAEPQPFEQLPIGKGVIRRQGNKVAILNFGTLLPDAITAAESLDATVVDMRFVKPLDKELILDMADNHDLLVTLEENAIMGGAGSGVNELLMQKGRLVQILNIGLPDQFVPQGSQEEIKADLGLDAAGIQNSINKRLFSZ

SEQ ID NO: 242 - protein, 247 aa, Photorhabdus luminescens
MALDLVDYEQKAREAVKAFWGNREAARQKQIESGKADQGERAGVTAGKNMDGFLALVLDIIKANGLAHAEIHQNRAMLTLPGYFRPTKLWDLLVLYKGQLIAAIELKSQVGPSFGNNFNNRTEEAIGTAHDLWTAFREEAFGKQPRPFVGWMMMVEDASESRKSVRDSSPHFPVFEEFKGASYLKRYDLLCQRLVQEQLYTTAAVIAAERSAVNTGDFAELSSMTSLKTFVAALAGHVAAEAARLGZ

SEQ ID NO: 243 - protein, 288 aa, Photorhabdus luminescens
QATLRQKRHDWAEIGAPMSDLSGSERRKLERLLGMSGGYVLNFSDRTFGDFFVEYRVEIDAECYRARGTSKANRMRTFWELEANYVVGRVIGGLVDYASEKQCFGDSNPVLIDDCRKIAQRLLSDQPVAELDALIAIADERDFEVVAEHVREAIEKNQPEGGLDRLHTFVNKFIRVTCAPHGITITRGKPLHSVFGEYVKALRDGGHLESAMTERILKSSISVLEAFNDVRNNKSLAHDNPILNYEESLLIFNHVAASVRFIKSLEARIKAKVTQAKHGGWDESILFZ

SEQ ID NO: 244 - protein, 1302 aa, Photorhabdus luminescens
NYFQYKERKLRFIQDGPLIPDELLLARDQGHVVFFCGAGISLAKAKLPNFFQLAQKVIDLLGTTNDSQARQLYDFLNKGLKDKEGNEVALPSYASTLISTDRIFSLLEQEFETNLIEKTVAQVLKPSDTVDTSAHKLLLDLATTSEGRVQLITTNFDRLFNDCSLTEIPCFLPPNLPDLSKNELIDGLVYLHGRSNSDYIGAEGNGFVLSGSEFGRAYLSDGWATNFIREIFSKYTVVFIGYSANDPPMQYLLEGLNKNLIKAKNVYAFQSGTIEEARKLWEHKGVQAIAYSPEDKHTALWETLDAWAKKAKNVEQWYSETIEIARRGPTNLLPHERGQVAHIVSTSKGMKKFALIDNPPPAEWLCVFDRNIRLATHSNNHWPLRCNTSPEPFTLYGLDFDKTPDIYQKNNEDIDKEIAKKAWDAFQPHHDDIKELNKKHFASFRTTSEYGNSKLSNRQWFLGVWLAKVAHQPTAIWWATKQNYLKPAIQHYILQKLKENKVDSEIRKIWQYLIESWQYEYKDEDFERHWYSLSHEIKTYGWNEVTFRQYIKLTRPYLAVSSKINSLLPPINTITELRKFLELDVRYIEKHHFDAINIPNSLLIKVIPELRKNIEYAYSLESEKRTPHSVRLLSPIREDSSIELGLSIRDVGLEGYVLRYVHLYERLIQLDLYEARNEFLSWPRNNPIFSQLRIWIACKPEIVPSSDFYPLINALSDDEFWNEHNQRDLMLTLADRWDELRENECIEIVERLLKGRLIPACIDSNLGDKWQADSILNRIFWLKNKGCHFYIDIKERVRELQNIYPEWEIGLADNAITSMEPKGGYISIESNCNELLGIPIRDIIPQALEFNSVERIVSERNDPFKGLSKQYPLRAFSALRHWAKEKKEYPKEIWEKFLSSESRKNDKKKFIYFIARQMMSYSNKDLVSIIDPVLCWISSINEKLASIDIDIYDTLLKHLIDTIGIMPTPITTIEIKRERRDWIPEAENSPMSSIAHILFKDPRLKNFHLEDKLSQQWLSNIERLNTLSGDSRKYALVYLVKQLIWLHHHIPVWTNNNLLHVIKNGEPDEKEAFWNGYFWGETYPRSSQLYDTLKPFLLGFLRNSVSFHSEHQTNSVANFLLFGWASKLYEKSKQFISDSEFRDALFYGDEKLRHKILWLLWRLSSKDEPDNKFFLQWRDLIIQFFTHVWPRQKAIKSPETTENISRLLFSQETMFPKLVDIVMPFLTCTNNGASLMYYIKNEAIVKKFPKETIAVLSNTLPEDVKKWPYDFEKWLEKMEKADASLGSDSKFIELKYKWEYRZ

SEQ ID NO: 245 - protein, 273 aa, Photorhabdus luminescens
MSYQCPLCHQSLLLIRQQWRCENNHQFDCAKEGYVNLMPVQHKRSKEPGDSPEMMQSRRVFLDSGHYQPLQRRVSELLEKYLPENAESLLDIGCGEGYYTAAVEAQLSKRRNFKIYGLDVAKIAVRYGAKRYPVVSFCVASSHRLPFADQSLAGVLRIYAPCKAEELARVVKPQGIVLTVTPGPRHLYQLKELIYQNIHLHPLKAELLEGFELITDESLSYPMKLDGLQAYHLLQMTPFAWQATEDVKNKLADRALFECETDFILRVYQRLNZ

SEQ ID NO: 246 - protein, 194 aa, Photorhabdus luminescens
MNMYATLILALALSMDAFAASICKGAALHRPHFREAIRTGLIFGLAEACTPLIGWSLGLYASQYIIEWDHWVAFTLLFILGCRMITESFKTKQEKKCESPCRHNSIVLITTAIATSLDAMAIGIGLAFLEVNIVHTAMAIGMMTMIMATLGMLIGRYIGPRLGKRAELIGGLILIAIGFNILFEHLELFMYAKZ

SEQ ID NO: 247 - protein, 292 aa, Photorhabdus luminescens
MSNMLDTTKTTAQTAGQKKLTPSDIRGVFLRSNVFQGSWNFERMQALGFCFSMVPALRRLYPENTDERKQALKRHLEFFNTHPYVVAPVLGVTLAMEEQRANGATIDDGAINGIKVGLMGPLAGVGDPIFWGTVRPVFAALGAGLAMSGSWLGPVLFFFLFNLVRLLVLYSGISYGYKKGINIVQDMGGGFLQKMTEGASILGLFVMGALVNKWTKVNIPLVVSEIPNQQTGEKTITTVQNILDQLMPGLVPLLLTFACMWLLRHKVNALWIIIGFFILGIIGARFGFLGLZ

SEQ ID NO: 248 - protein, 267 aa, Photorhabdus luminescens
MEITVVQIALIFIVACIAGMDSILDEFQFHRPLVACTLIGIILGDMTTGIIIGGTLEMIALGWMNIGAAIAPDAALASIISTILVIAGGRDIGEGIALAIPLAAAGQVLTIIVRTITVAFQHAADNAAERGSLRAISFIHLSALLLQAMRIAIPALIVALSVGTNEVQQLLASIPKVVTDGLNIAGGMIVVVGYAMVINMMRAGYLMPFFYLGFVTAAFTDFNLVALGIIGIVMAVLYIQLSPKYNKSQVAAAPGHTNNDLDNELDZ

SEQ ID NO: 249 - protein, 328 aa, Photorhabdus luminescens
VSIAIMIGTHGAAAEQLLHTAEMLIGEQENVSYIDFVPGENADTLFEKYNSKLETLNTEQGVLFLVDTWGGSPFNAASRIAVDKENYEIITGVNVPMLVETFMCRDDDPSLAELVSVALETGKEGIRALKTEEPQIAEPAKPVASVAAPSFAPSAGGHMKIALARIDDRLIHGQVATRWTKETNVKRIIVVSDEVAADTVRTTLLKQVAPPGLSAHVVDVAKCVRVYNNPKYANERVMLLFTNPTDVLRLVEDGVDITSVNIGGMAFRQGKTQVNNAISVDETDIAAFKKLNERGIELEARKVASDSRLQMMDLLQKVKNENQIRAIZ

SEQ ID NO: 250 - protein, 455 aa, Photorhabdus luminescens
VISVFDMFKVGIGPSSSHTVGPMKAGKQFVDDLVNQGLMPSITRVAVDVYGSLSLTGKGHHTDIAIIMGLAGNLPATVDIDSIPGFIRDVEQTQRIKLANGLHEVDFPRDSGMVFRSDNLSLHENGMQIHAFAGDKKVYSKTYYSIGGGFIVDEEHFGKPSQDTKPVSYPFNSAKELLMNCNKTGLSISGLMMKNELDLHSKEEINAYFADVWDTMQACIERGLNTEGILPGPLRVPRRAAALHRMLTSSNNLSNDPMNVVDLVNMFALAVNEENAAGGRVVTAPTNGACGIVPAVLAYYNHCIEPVTPELYIRYFLASGAIGILYKMNASISGAEVGCQGEVGVACSMAAAGLAELLGGSAEQVCIAAEIGMEHNLGLTCDPVAGQVQVPCIERNAIASVKAINAARMALRRTSEPRVSLDKVIETMYETGKDMNAKYRETSRGGLAIKVQCDZ

SEQ ID NO: 251 - protein, 457 aa, Photorhabdus luminescens
MSISLQKRQLPYQPDAAINYFAPISNQSWAMLLHSGAANHPHNRFDILVAEPRITLLSHNKSTEINEDGDSYITEEDPFYLLKRQLEKLNITAKRDPDLPFQGGALGLWGYDLGRYLEELPLQAKNELSFPDMAIGIYDWALIVDHHKKEVILFSYSDVDTRLNWLTSHQVSPKMAFTLTSEWQSNMSAKQYHEKINCIHHYLLSGDCYQVNLAQRFCADYQGDEWQAFIKLNENNRAPFSAFIRLPENSVISVSPERFLLLENKQIQTRPIKGTLPRLSDTEKDVLQAVKLAASKKDQAENLMIVDLLRNDIGRVATPGSVKVPELFLVEQFPAVHHLVSTITATLPNEQHATDLLRACFPGGSITGAPKIRAMEIIEELEPHRRHGYCGSIGYISFCGTMDSNITIRTLLTEKEKIYCWAGGGIVADSTAEKEYQETFDKLNRILPQLGKIKVIZ

SEQ ID NO: 252 - protein, 330 aa, Photorhabdus luminescens
MACGEFDLIARYFDRQEINRRDVNLGIGDDCALMTLADKQQLAVSTDTLVSGVHFLPDISPEDLAYKSLAVNLSDLAAVGADPAWLSLALTLPEVDERWLSGFSDSLFEQLRYYGMQLIGGDTTRGPMSLTLTIHGLVPAGRALRRTGAKNGDWIYVSGSLGDSAAGLALLQNRLQIFDPVSHNWLVQRHLRPQPRILQGQALRGLATSAIDLSDGLISDLGHILKASRCGARINLDALPYSDAMKQYVEPQQALMWALSGGEDYELCFTVPERNRGALEIALAHTGAGFSCVGQIMAESEGIRYYSNNKEIKLDLKGFDHFITEEAHGZ

SEQ ID NO: 253 - protein, 318 aa, Photorhabdus luminescens
MSELKKLYPACEAYRSGYLDTGDGHQIYWELCGNPVGKPAVFIHGGPGGGIASYHRRLFDPKKYHVMLFDQRGCGRSKPHASLENNTTWHLVEDIERLRQLMGVEKWLVFGGSWGSTLSLVYAQTHPQHVSELILRGIFLLRPQELHWYYQDGASNFFPDKWQRTVSILSEEERKDVIKAYNKRLTNHDLRVQLEAARLWSLWEGETVTLLPSNSVECFTEDEFALAFARIENHYFINEGFMNEEQQLLNNIDVIRDIPAVIIHGRYDMACRVQNAWDLAQAWPEAELHIIEGAGHSFDEPGILHQLISATDRFAAQZ

SEQ ID NO: 254 - protein, 298 aa, Photorhabdus luminescens
MSLAALYVLCRFTHFVAVMLVFGFSIFTAILVPERLSVLIDARLRLGVIISTVVTLVTTIGWLAIQSGIMGDGWQDICNLEIWLAVLGTTFGKVWQWQILVSIVATGFLFISKQKVRNILMLISSAVLLSCHAFIGHSVMHDGITGVFSQINQVIHLVSVGYWFGGLWPFLLCLQFLRIQNELAIGLDKQIMISMMRFSTYGHVAVTLIIITGIISSLILLPNWPKYSGSEYQSMLWLKIALVVGMVMLALINRYILVPKLKQPGRYQLLIINSWVEIILGALVLLCVAVFATYQPIZ

SEQ ID NO: 255 - protein, 240 aa, Photorhabdus luminescens
MENQPKLNSSKEIIAFLAERFPLCFVAEGEARPLKIGIFQDIVERIQDEECLSKTQLRSALRLYTSSWRYLYGVKEGAQRVDLDGNSCGELEAEHIEHALQQLTEAKARVQAQRAEQRAKKREAENVAAGEKNERPTAKKPAPRRRANNTEGEKRQPPRPQKRPQQARKPVAKPVQAKPIQAAPIQIVDVSSLKIGQEIKVRVGKSSVDASVLEVAKDGVRVQLPSGLAMIVRAEHLQFZ

SEQ ID NO: 256 - protein, 684 aa, Photorhabdus luminescens
MNKFVRLAFVLGVSIFGTCYANTNSPVAVPVGIEQLPILKQEPQHSTVSERVTSRFTRSHYRQFDLNGDFSAKIFDRYLNILDYSHNILLASDVAQYADKKKLLGKELENGNLEIPYDLFNLLQKRRFERYQYALSRLEQPMSFDGNDTIDVDRSKAPWPQSVEELNKLWDAKVKYDWLNLKLSGKEDNKIKEMLTKRYQSALKRLTQSQSEDVFQLIMTAFAREIDPHTNYLSPRNTEQFNSEMSLSLEGIGAVLQIDDDYTVINSLVAGGPAAKSKALNVGDKIIGVAQSGKSMVDIIGWRLDDVVALIKGPKGSKVRLEVVSDTKGAKPRTVILTREQIRLEDRAVKMSVKTIGQEKVGVLDIPGFYVGLTDNVKTQLQKLTKQHVSAIVIDLRSNGGGALTEAVSLSGLFLPSGPVVQVRDNNGKVRQDSDTDEVVYYKGPLVVLVDHFSASASEIFAAAMQDYGRALIVGEPTFGKGTVQQYRSLSRIYDQMMRPDWPSLGSVQYTIQKFYRVDGGSTQRKGVTPDIVMPTGVDPAETGESFEDNALPWDSIPPARYTGSKVIAALVPQLNVVHNIRITTDPEFKYINEDIAHYKALKEHKNIVSLNYAQREKENKEADALKLNRINDRFKREGKKPLTSLDDLPKDYQGPDPYLDESVKIALDLAHQPAEKMLAKSKZ

SEQ ID NO: 257 - protein, 296 aa, Photorhabdus luminescens
MMRIVLFLLTNLAVMLVFGIILSLTGIQGSSVQGLMIMAGLFGFGGAFVSLLMSKWMALRSVGGQVIEQPANEVEHWLVETVRSQAEQVNIAMPQVAIYAAPDINAFATGARRNASLVAVSSGLLDNMSRAEAEAVIAHEISHIANGDMVTMTLLQGIVNTFVIFISRLLAQAVSSFLSGNSDEEESNSSGNPIVYMVASMVLEIVFGILASIITMWFSRYREFHADAGSAKLVGREKMIAALQRLKTSYEPQEEGGMMAFCINGKSKTFSELFMSHPPLDKRIEALRSGQYLNKZ

SEQ ID NO: 258 - protein, 464 aa, Photorhabdus luminescens
MNLPLISNVLVFVALLLLLSKASSRQWNLSKKVFAGLAIGIIFGLALQLVYGSDNTIVKESISWFNIVGNGYVQLLQMVIMPLVFASILSAVAKLHKASSLGKISFLTIGTLLFTTMIAALIGIMIINLFGLTAEGLIQGPQETTRLSAIENNYVSKVSDLSVPQLILSFIPKNPFADLTGANPTSVISIVIFATFLGIAALQMLKDDHERGERILVAIDTIQAWVMKLVRLVMRLTPYGVMALMTKVVANSNIYEIAKLGTFVIASYIALALVFVAHGFLLSLFGINPLRFFKKTWPVLTFAFSSRSSAASIPLNVETQTLRIGVPESIASFSASFGATIGQNGCAGIYPAMLAAMVAPTVGINPLDPMWIATLVGIVTISSAGVAGVGGGATFAALIVLPAMGLPVTLIALLISVEPLIDMGRTALNVSGSMTAGTITSQLMGQTDKTIFDQEEHVELSQLZ

SEQ ID NO: 259 - protein, 222 aa, Photorhabdus luminescens
MSFHLPIKAAIFDMDGLLIDSEPYWTQGEKEVFSELGLDFSLAEKLPDTLGLRIDQVVELWYQASPWQGVSKSDVEQRITDHVIDLVKENRPLLPGVEYALNLCRKQGLKIGLASASPQYMLEQVLEMFSLNHYFDTVVSAAKLPHSKPNPEVYLRAAEQLDVAPINCVALEDSFNGMIATKAARMRSIVVPSAHHFDDPRWVLADIKLHSLEQLTVMNITZ

SEQ ID NO: 260 - protein, 290 aa, Photorhabdus luminescens
MWQTVNRLLNEHFGVAEIHDKTELAGGDIHQAWRVTHGKQQVFVKSNLREMLPVFKAESEQLELLARSQTIRVPTVYGIGNTRDHSFLLLEFLPLKSFDLHSAYCFGQQLAKLHQWSEQPQFGFDFDNMLATTPQPNSWQRRWHQFYAEKRVGWQLQIAAEKNMIFGDIDNIVQAISNKLQHHQPQPSLLHGDLWPANCASLDDQAVAFDPACYWGDRECDFAMLPLYPDLPMQIFDGYQSIWPLPTNFIERQPVYQLYYLLNRCNLFGGDNLITAQNIIDNILTENSQZ

SEQ ID NO: 261 - protein, 296 aa, Photorhabdus luminescens
MNELTQLLTEPFMFPFMQRAIFAAIVTGAVCAILSCYLVLKGWSLMGDAISHAVLPGIVLAFAAGIPLAIGAFLSGIFCAVATGYLKEHSRIKEDTVMGIVFSGMFAFGLVLFARIDTDQHLTHILFGNILGITKDELHQTLWITCITMAVILLKRKDFMLYCFDPNQARVVGLPVKLLHYGLLCLLSMTIVASLQAVGMILVIAMLISPGIIAFMLCRSFDRMLIVAIIASVSSSVLGTLISFHIDGATGPCIVIVQAIFFTLALAYSQIKLVRAKSKRKTYQAALQISNEPNQZ

SEQ ID NO: 262 - protein, 293 aa, Photorhabdus luminescens
MTELLLQPFHYNYMVKAIWVSAIVGAVCAFLSSYLMLKGWSLMGDALSHSVVPGVAGAYALGLPYAGGAFFTGMLAALSMTLVRHITRLREDAVIGFIFSTFFAAGLLIVSLNPTSVNVQTIIFGNILGIADEDVLQVEIIIAISFIVLMFIWKDLLIVFFDETHARSIGLSPLRMKIIFFTLLSACTVAALQTVGAILVIAMVVTPGATAYLLTDRFKHLLIIAVTIGSLTSAFGAYLSFFLNGATGGVIVTLQTIIFLLAFFFAPKHGLFASRIRARKESSALAQETTQLZ

SEQ ID NO: 263 - protein, 509 aa, Photorhabdus luminescens
MSETTISVNKSPGRILGWIERVGNKIPNPFILFIYLIAVLMIATAILSWFDLAVKNPTNGEFIRVKNLLSAEGLQWILPNIVKNFSNFTPLGAILALVIGAGLAEKVGLLQTLMYKMASGINKRYASYMVLFIAFFSHISSDAALVVMPPLGALIFIAVGRHPVAGLLAAIAGVASGFTANLLIVTTDVLLSGISTEAVKMLDPNLHVSVIDNWYFMATSVIVLTIAGAILTDKFVEPRLPAWKGSHNEKLAKLTPQQNRGLLMSGLSALIFIGIVALLVVPENALLRDPQTGSIIPSPFIKGIVPVIILFFFVVSITYGVSTKQIKKSNDIPDLLVDPMKNMAGFIIMVFPLAQFVAFFNWSNMGKFMAVGLTDMLEALGMTGVPAFIGLMFLSAFLCMFIASGSAIWSILAPIFVPMFVLLGFHPAFAQIIFRISDSAVLPLAPMSPFLPLFLGFLQRYYKGAQLGTYYTLVLPYPLVFFAVWILLLIGWYFAGLPIGPGIYPTLLZ

SEQ ID NO: 264 - protein, 370 aa, Photorhabdus luminescens
VNNDKKYMARALELARQGRFTTSPNPNVGCVIVHDGQIVGEGFHLRSGEPHAEVYALQIAGDKAKGATVYVTLEPCSHHGKTPPCADALIAAGVSRVVAAMQDPNPQVAGRGLYKLQQAGIAVEHGLMMEEAESLNRGFLKRMRTGFPYIQLKMATSLDGRTALASGESKWITSPQARCDVQKFRAQCSAILSSSSTVLADDPHLTVRWSELDAEIQAVYPEENLCQPVRVIVDSQNRVSPQHQVIQQPGYCWLARTKVDEHDLSENVEQILLPAHGIGVDLVSLMMQLGKRQINTVWTECGALLAGALLTLGLVDELVLYVAPKVLGDTARGLFTIPELKNLAEAPEFDIFDVQQVGPDLRLHLRPVYZ

SEQ ID NO: 265 - protein, 299 aa, Photorhabdus luminescens
MNSNILFERPHLVVDDATVTYNNGHTAIYDASFSITGGTICALVGINGSGKSTLFKTIMGLVSPSQGKVTLSDMPVKNALKKNIIAYVPQTEEVDWNFPVLVSDVVMMGRYGKMGFLRIPSKRDHQAVDKALERVGLTALRNRQIGELSGGQKKRVFLARALAQEGKVLLLDEPFTGVDVKTENAIIDLLCDLRDEGHLVLVSTHNLGSVPEFCDHVILINRTVLASGPTETTFTQKNLEMTFGGVLRHINLSGPELHDDDDPRSLTVITDDERAAVFYGRDHHVPPRQGQHKEKRQSZ

SEQ ID NO: 266 - protein, 307 aa, Photorhabdus luminescens
MKKKLSLLLLSPPVLGIMLILLSVILFSHPVSAAKQFKVVTTFTIIQDIAQNVAGDAAIVESITKPGAEIHDYQPTPKDIIKSQHADLILWNGLNLERWFERFFENLKDVPAVVITDGIEPLPIREGPYNGNPNPHAWMSPTNALIYIENIRQAFVKYDPKNTETYNKNAKAYAEKIAQLDSPLRERLSRIPQDQRWLVTSEGAFSYLAKDYQFKEVYLWPINAEEQGSPQQVRHVIDTVRANKIPVVFSESTISDKPAKQVSKETDARYGGVLYVDSLSGSSGPVPTYIDLLNKTVDTIAKGFNQZ

SEQ ID NO: 267 - protein, 249 aa, Photorhabdus luminescens
VKIFLDCKRNCICCALVTFDPEDYRVKLKLSFVALVVLLVGCAERNVQQTNVGKQSGQQRMLSNTANAARISSSFSPTPFDTFIQQASNRYGVDETLIRAIIQVESGFRPNAVSKSNAIGLMQIKASTAGRDVYRQKGRSGQPTTRELKDPKTNIDLGTAYISILKEQHLAGIDNPETLYYATIVAYVNGAGALLRTFNADRQLAVNKINRMTPDEFYQYVQDNHPAPQAPRYLWKVKKAYRSLVMVDZ

SEQ ID NO: 268 - protein, 16368 aa, Photorhabdus luminescens
MKDSITKKAESILKAELLSQTPENITNNVKNIPALPRSCIIVGGTTLAVFCAEQIQAAGHTIQAMLTTDTVLQTWAAGQGIVCVNSVEALQAQIAQHPVDWLFSIVNPIILPVSLIGQIRGGAFNYHNSPLPRYAGSHATSWALLAQETHYAVSWHCIEEGVDTGDIAVQWPVSIEEHDNAFSLNLKCYQAAQEGFIKLLRDLDQGELVTHPQDLTRRSFYTQSRRPDGGGYLCWQQPGEALSALVRALDFGENYLNPLGCPKLLLKWGTVRISWLQRLNHYSGGAPGTLIAVEEDAWQVTTGSEDVRIGGFAALEGKLLSAGELADISELKPGKQLPLLSSQQAQNVKDILQALAPSESFWRERLASLIPLQLPFETAGKSAAPKWALSAWQSPLLENSEKLKNGEKAPLPILLQTFAIYLARLTHQTEFQIGWCVDRVKNEPDLLSGLAPVVPMTVKVEFDQPWCTVANWMNDEFARLVQHRTFCRDLLSRSPSLCAISALTTSRPWRVAVSFIPDDKPWEQNALGELLTLQMNTQGGFRWIYDTNRLSAEVVQRMSEHLQVLSSSAEEKDDIPVWQLNLLPEAERTLLLETWNATQTRYPDQTCIHRLFEQQAEKTPDATALVYEEHILSYAELNARANRLAHQLITLGVAPEQQVAICVASSPARIVGLLAVLKAGGAYVPLDPAYPGERLVHILTDAVPAIVLADNTGRAALGEKVLAALTVLDPNSLPDQPDSNPQVSALTPRHLAYVIYTSGSTGIPKGVMVEHRGLVNLIQEKIVQFEIHPGSRMLQFASFGFDAGVWETMMALCSGATLAIPADTVRQEPRYLWHYLEEQAITHACLTPALLREGTDLPEMTIRPTLILGGEAPSATLLQALSRRATVFNAYGPTEITVCATTWRCPSDYTEGVIAIGRPTVNTQVYLLNTDGQPVPLGAVGELYIGGIGVARGYLNRPDLTAERFLADPFSDKPDARLYRTGDLARYLPDGNLEFLGRNDQQVKIRGFRIEPGEIEARLMEHPAVSEALVLALNDGQDKRLVAYVMAEADDQLVNSLRAYLSAILPDYMVPTAFVRLDTFPLTPNGKLDRRALPAPGEEAFARQAYAAPQGETESLLSAVWGELLGIEQVSRHDSFFALGGHSLLAVRMVERLRNAGLTLAVRDLFQSPVLSEFAQTVGQSQAVIVPANIMTPAITALTPEMLPLIDLTQSEIDHIVAQVPGGVANIQDIYGLSPLQDGILFHHLLANKGDPYLFVSKMVFADRALLDSYLVAVQQVVNRHDILRTAFVWQGLSAPVQVVWRQAQLSVTELTLDPVDGPVRDQLAQYFDLHHHRLDLNQAPLLHFGVAQEEDGRWSVLQLLHHLIGDHTTLEVMNGEIQAYLAGQEGNLPVPIPFRNLVAQARLGVSQAEHTRFFTEMLAEVDQPTLPFGLMEVHRDGSQVTESYRMLPATLNDRLRSQAQRLGVSLATLCHLAWAQVLSHTSGQEKVVFGTVLFGRMQVGQGADSGMGLFINTLPLRLDINDASVQDSVQAVHTRLAELLDHEHMSLALAQRCSRVPGEIPLFSALLNYRHNDQPTFPNKEVPGIEFLGAQERTNYPFVLSVEDGGSTLGLTAQVVQPFESERVCGYMQQALESLAEALEQRPETPVRTLNILPAAEKKLLLETWNATATETSYPDHSCIHRLFEQWAKKSPDATALVYEEQILSYANLNACANRLAHQLIALGVTPDQRVAVCVSRSPAMVAGVLAVLKAGGAYVPLDPAYPSARLAHILTDAAPAVVLADKAGKVALGEEALTGLTVLDPNILPNQVDSNPQISGLTSRHLAYVIYTSGSTGVPKGVMIEHRNTVNFLYWAQQAFETEEIREVLFSTSMNFDLSIFECFVPLSQGATIHLVEDALSLMQHALPVTLINSVPSAMKPLLQAQALMASVHTVNLAGEPLKGALIEQIFEKTQIQRLCNLYGPSETTTYSAWLPIQRGDRIIESIGRPIANTRLYLLDENGQPVPLGVVGEIYIGGAGVARGYFNRPDLTAERFLIDPFSDVPDARMYRTGDLARYFPDGNLEFLGRNDQQVKIRGFRIEPGEIEARLMEHPAVSEAVILALDDDQDKRLVAYVVAEADEVLINRLHAHLSAVLPDYMVPAAFVCLDAFPLTPNGKLDRRALPAPGEEDFARQIYAAPSGEMETTLAAIWRELLGVERISRYDNFFALGGHSLLAVRMMNRIAALGIELPLSTLFTFPSLIAFAEVMRTQFDESGAALPAIVPLSREDHQLPLSFAQQRLWFLAQLNGVSETYHIPLALRLRGRLDITAWQQALDTLFARHEALRSVFVAVDGQPQVELLPAASSLLMKKYDLRDTPDVDDQLAFLSAQEASAPFDLARGPLIRSSLVQLADDEHVFLLTQHHIVSDGWSLGILKSELEALYSAHLNQQPDPLPPLTIQYPDYAAWQRQWLSAERIQSQSDYWRARLVDAPVLLDLPTDRPRPPQQSFAGALLPVNLDAELTQSLKRLSEQQGVTLFMTLLAAWTAVLSRLSGQEDLVVGTPSAGRSRQEVESLIGFFVNTLALRMDLSGAPNVTELLARVRQTALAAQEHQDLPFEQVVEIVQPPRRLAHTPLFQVIFAWQNNENIEWRLPGLAVSLADQPIDIAKFDLELSLSEVDGRVVGYLNYATALFDQATIERQVGYLHTVLRGMATNPQQPVGKIDILTVTERKLLLETWNATKTSYPDHGCIHRLFEQQAEKTPDAIALVYEKYILSYAELNARANRLAHQLITLGVAPEQRVAICVASSPARIVGLLAVLKAGGAYVPLDPAYPGERLIHILTDAAPAIVLADNTGRAALGEKVLAALTVLDPNSLPDQPDSNPQVPVLTPHHLAYVIYTSGSTGIPKGVMVEHCGLVNLVQEKIVQFDIHPGSRMLQFASFGFDAGVWETMMALCSGATLAIPADTVRQEPRYLWHYLEERAITHACLTPALLREGTDLPEMTIRPTLILGGEAPSTTLLQALCRRATVFNAYGPTEITVCAATWRCPSDYTEGVIAIGRPTANTQIYLLNTDGQPVPLGAVGELYIGGIGVARGYLNRPDLTAERFLADPFSDKPDARLYRTGDLARYLPDGNLEFLGRNDQQVKIRGFRIEPGEIEARLLEYPAVSEALVLALGDGQDKRLVAYVAAEANEELVNHLRTHLSAILPDYMVPAAFVRLDAFPLTPNGKLDRRALPAPGAEAFARQVYAAPQGETETLMAAIWSELLGIEQVSRHDSFFALGGHSLLAVRMVERLRNAGLTLAVRDLFQSPVLSEFAQTVGQSPVVVVPANVITPALTTLTPEMLPLIDLTQSEIDHIIEQVPGGVANIQDIYALSPLQDGILFHHLLANKGDPYLLVSQMIFADRSLLDRYLAAVQQVVNRHDILRTAFVWQGLSAPVQVVWRQAQLSVTELTLDPVDGPVRDQLAQHFDPRHHRLDLNQAPLLHFAIAQEDDGRWSVLQLLHHLIGDHTTLEVMNGEVQAYLAGQEESLPAPAPFRNLVAQARLGVSQAEHTRFFTDMLAEVDEPTLPFGLTEVYRDGSQVTEFHRMLPATLNDRLRSQARRLDVSLATLCHLAWAQVLSRTSGREQVVFGTVLFGRMQAGQGADSGMGLFINTLPLRLDMDETSVQDSVRLAHTRLAGLLEHEHASLALAQRCSGVLGEVPLFSALLNYRHSTQPVTTDAIISGIEFLSEQERTNYPFVLSVEDFGHALGLTTQIVQPIDPERICGYMQQALESLVEALEQAPETPIRALNILPAAEKRLLLETWNATQAPYPDQCCVHQLFEQQAGNTPDAIALVYGEHILSYAELNARANWLAHWLIGQGIQPDDRVAVQLERSIELVVAQLAILKAGAVYVPIDPRVPDERKHWLISDCAAKLLLTDIPVDLADKIGAISGEDYPNPDLPRISTELAYIMYTSGSTGTPKGVLVPHRAVARLVINNGYAEIGPDDRVAFGANPSFDASTFEVWAPLLNGGTLVVIDHATVLTPKEFALALQTYRITVLWLSVGLFNRLVAELSPVLPQLKILIVGGDVLDPHVMAQVLRDNPPQQLLSAYGPSEGTTFTTTYCITALPSVVARIPIGRPIANARIYLLDTYGQPVPLGAIGEIYVGGDGVACGYLNRPDQTAERFLTDPFSDQPDARMYRTGDLARYLPDGNLEFLGRNDQQVKIRGFRIEPGEVEARLLEHPAVHEAVVLVVDDGQDKRLVAYVVAEADEMLVNHLRDHLSAVLPDYMVPAAFVCLDAFPLTPNGKLDRRALPVPGEEDFARQIYAVPSGEMETTLAAIWRELLGVERISRYDNFFALGGHSLLAVRMINRIAALGIELPLSTLFTFPTLMAFAEVMSARFDESGEALPAIIPLSREGQLPLSFAQQRLWLLAQFEGVSETYHIPLALRLRGLLDIATWQQALDTLFARHEALRSVFVAVDGQPQVELLPAALGWPMKKYDLRNTPDVDAQLASLSTQEAGTPFDLARGPLIRSALVQLANDEHVFLLTLHHIIFDGWSVSVLMCELNALYTAFLTGQPDPLSPLTIQYPDYAAWQRQWLSAERIQFQSDYWRARLVDAPVLLDLPTDRPRPPRQSFTGNILPVSLDAELTQSLKRLSEQQGVTLFMTLLAAWATVLSRLSGQEDLVIGTPSAGRSRQEVESLIGFFVNTLALRMDLSGAPNVTELLAHVRQTALAAQEHQDLPFEQVVEIVQPLRRLAHTPLFQVIFAWQSNENAEWQLPGLTVLPADQLIDIAKFDLELSLSEVDGRIVGYLNYATALFDQATIERQVGYLHTVLRAMVANPQQPVGKIDILTVAERKLLLETWSMTETSYPDHGCIHRLFEQWAEKNPDATALMYEGQAISYAELNTSANRLAHQLITLGVVPDQRVAICVARSPAMIVGLLAVLKAGGAYVPLDPAYSGERLGHILVDAKPAILLADNTGRAALGEKALADLIMLDPNILFDQADSNPLIPELTERHLAYVVYTSGSTGTPKGVMVEHRGVVNLALAQITRFSVDETSRILQFASSGFDASVSEIMTALSGGACLVIPTDIIRQDPRRLWSYLEKQAVTHAFLPPALFREESDLPVITIKPTLIFAGEAPGSTLFRALCDRVNLFNDYGPTEITVCATSWSCPSDYTDAWVPIGRPTTNTRVYLLDTYGQPVPLGTVGELYIGGVGVARGYLNYPELTAERFLTDPFSNEPDARLYRTGDLARYLPDGNLIFVGRNDQQVKIRGFRIEPQEIEARLMEHPAVSGALVLALSDGQDKRLVAYVVAEPDDGLTASLRGYLSAILPDYMVPAAFVRLNTFPLTPNGKLDRRALPAPGADAFARQVYAAPQGETEILLATIWSELLGIEQISRHDSFFALGGHSLLAVRMIERLRNAGLTLAVHDLFQSPVLSAFAETVGQSQAVVVPENVITPATTALTPEMLPLIELTQTEIDYIVQQMPGGIVNIQDIYALSPLQDGILFHHLLTNEGDPYLLVSQMAFADRSLLDSYLVAVQQVVNRHDTLRTAFIWQGLSAPVQVVWRQAPLSVVELILDPADGPVYEQLAQRFNPRQHRLDLGQAPLLRFVIAQEMDGRWIALQLQHHLIGDHTTLEVMNREVQAYLTGQEESLPVPAPFRNLVAQVRLGVNQAEHTRFFTDMLAEVDQPTLPFGLTEVHRDGSQMTQSYRMLPAILNNRLRSQARRLGVSLAALCHLAWAQVLSRTSGQEKVVFGTVLFGRMQTGQGTDSSMGLFINTLPLRLDMDDTPVRGRVQAAHARLAELLEHEHASLAMAQRCSGIQGEVPLFSALLNYRHSALSATSNEIMNGVEFLGAQERTNYPFTLSVEDFGNALGLTTQIVQPFDPERVCGYMQQALESLAETLELAPETPVRTLEILPEAERTLLLKTWNETEIAYSDPLCIHQLFEQQVEKNPDATALVYEEQTYSYAELNTRANRLAHQLIALGIVPDQRVAICVTRSPTMIVGLLAVLKAGGAYVPLAPAYPGERLAHILTDAAPAILLADNVGCAALGEEALSGLTVLDPNTLPDKPDSNPQVTALTAQHLAYVIYTSGSTGTPKGVMVEHRGLINLVRDKIAQFDIHSDSRILQFASLSFDASVWEIMMALGSGACLVIAVDIVRQDPLRLWHYLEQQVVTHACLTPALLRDGGDLPALTITPTVILGGEAPSAALFQTLCRRAALFNAYGPTEITVCAATWRCPPDYTDTLVPIGHPTANTQIYLLNSDGQPVPLGAVGELYVGGAGVARGYLNRPELTAERFLADPFSEMPGARMYRTGDLARYLPDGNLVFVGRNDQQIKIRGFRIEPGEIETRLTEYPAVREAVVLARGEEHDKRLVAWVVAEENDELANSLRTHLSTILPDYMMPAAFVRLDALPLTPNGKLDRLALPAPDEEAFSRQIYEAPQGETEIALAAIWRELLGIELVGRYDSFFALGGHSLLAVRMINRMAALGIELPLTTLFKSPTLADFAEVMRAQLGEQNNSVSAMLPISREGALPLSFAQQRLWLLTQFEGVSQTYHVPMALRLHGQLDIAAWQQALNRLFARHEALRSIFISEDGQPQVELLPAELGLPMSKHDLRKVFDADKRLERLCVQEAEVPFDLAGGPLIRAGLIQRADDDYVFLLTQHHIVSDGWSAGVLMHELSALYTAFSMGLPDPLPPLAIQYPDYAAWQRQWLSAERLQIQSDYWRMSLADAPVLLDLPTDRSRPSQQSFAGALLPVNLDAELTQSLKRLSEQQGVTLFMTLLAAWATVLSRLSGQEDLVIGTPSAGRSRQEVESLIGFFVNTLALRMDLSDSPNVAELLARVRQTALAAQEHQDLPFEQVVEIVQPPRHLAHTPLFQVMFAWQNNEGMEWKMPGLTVSPAEQRIDIAKFDLELSLSEVDGRIVGYLNYATALFDQLTIERQVGYLHTVLREMAANPQQPVGKIDILTVAERKLLLETWNATQTRYPDQTCIHRLFEQQEEKTPDAVALVYEEHILSYTELNARANRLARQLIKWGIRSDERVAVLLERSIELIVAQLAILKAGAVYVPIDPRVPDERKNWLINDCSAKLLLSGIPVDVAIPRFSLTDEMITIEEEDHRNLDLPRSSTDLAYIMYTSGSTGTPKGVMVPHRAVVRLVINNGYAEIGPDDRVVFEANPAFDASTFEVWAPLLNGGTLVVIDHTTLLTPKEFVQALQTYRITVLWLSVGLFNRLATALFPVLPQIKTLIVGGDVLDPHVMAQVLRDSPPQQLLNGYGPSEGTTFTTTYRITALSPEVSRIPIGRPIANTRVYLLDTYGQPVPQGVTGEIYIGGDGVACGYLNRPELTAERFLPDPFSDKPDARLYRTGDLARYLPDGNLEFLGRNDQQVKIRGFRIELGEIEARLLEYPFVSEAVVQVMGDGQDKRLIAYVVTEADEELVNRLHTHLSTILPDYMVPTAFVRLDTFPLTPNGKLDRRALPAPGEEAFARQVYEAPQGETEILLAAIWSELLGIEQISRHDSFFALGGHSLLAVRMIERLRNVGLTLAVRDLFQSPMLSAFAQTVGQSPPVVVPANVITPATTALTPEMLPLIELTQLEIDHIVGQVPGGMANIQDIYALSPLQDGILFHHLLANEGDPYLLVSQMTFDDRALLDRYLAAVQQVVNRHDILRTAFVWQGLSTPAQVVWRQAPLSVTKLTLDPVDGPVRDQLAQLFDPRRYRIDLQRAPLLHFVVAQEEDGRWSVLQLLHHLIGDHTTMEVMHGEVQAYLVGQEENLPVPVPFRNLVAQVRLGVSQAEHTRFFTDMLAEVDEPTLPFGLTEVHRDGSQVTESHRMLPVRLNDRLRNQARRLGVSLATLCHLAWAQVLSRTSGQDKVVFGTVLFGRMQAGQGGDSSMGLFINTLPLRLDMDDTPVQESVRAAHSRLAGLLEHEHASLALAQRCSGIPGEAPLFSALLNYRHSAQPVTTDATISGIEFLGGQERTNYPFVLSVEDVGHALGLTAQIAQPIDPERICDYMQQALESLAVALEQHPEIPVRTLNILPTAEKKLLLETWNATETSYPDHGCIHQLFEQWAEKSPDATALVYEEQSFSYAELNNRANRLAHQLIALGVIPDQRVAVCVSRSLAMVVGVLAVLKAGGAYVPLDPVYTGERLTHILTDAAPAILLADNVGRDVLGEDALAGLTVLDPNSPPDQPDSNPQVPALTAQHLAYVIYTSGSTGTPKGVMVEHRHILRLFEATEFWYHFNRQDIWCLFHSIAFDFSVWELWGALRYGAKLVLVPHAIARSPQELHQFVCQHGITVLNQTPSAFKAFIASYIANPLPDCLRYIIFGGEALDPSILKPWYALREETLPQLVNMYGITETTVHVTYRALARHDVEQITSPIGTRIPDLTLYLLDKYSQPVPLGAVGELYIGGAGVARGYLNRPELTAERFLPDPFSSEPDARMYRTGDLARYLPDGNLAFLGRNDQQVKIRGFRIEPGEIEARLTEHPAVHEAVVQVMGGGQDKRLVAYVVAEVDKELINRLRTHLGAILPDYMVPAAFVCMDAFPLTPNGKLDRRALPVPGENAFARQVYAAPQGETETLLATIWSELLGIEQVSRHDNFFALGGHSLLAVRMIERLRNAGLTLAVRDLFQSPVLSAFAQTAGQSLEVVVPTNVITPVTTALTPEMLPLADLTQSEIDHIIAQVSGGVANIQDIYGLSPLQDGILFHHLLANKGDPYLLAGQMVFANRDLLDNYLAAVQQVVNRHDILRTAFVWQGLSAPVQVVWRQAQLSVTELTLDPVDGLVCDQLAQHFDPRRYRIDLQRAPLLHFAVAQEDDGRWSALQLQHHLIGDHTTMEVMQGEIQAYLAGQEENLPVPVPFRNLVAQARLGVSQAAHTRFFTDMLSEVDEPTLPFGLMEVHRDGSQVMESHQMLTPELNDRLRSQARRMGVSLATLCHLAWAQVLSRTSGQVKVVFGTVLFGRMQAGQGADNGMGLFTNTLPLRLDMDDTPVRDGVRLAHTRLAELLEHEHASLALAQRCSEVPRETPLFSALLNYRHSAQPVTTDVTISGIEFLSGQERTNYPLVLSVEDFGHALGLTVQIVQPIDPKRVCGYMQQALESLAAALEQQPETPVRLLNILPEAEKRLLLATWNATQAPYPDQSCIHRLFEQQAENTPNAIALVYGKHILNYAELNARANQLAHWLIGQGVKPDNRVAVLLERSVELVVAQLAILKAGAVYVPIDPRVPDERKYWLISDCSAKLLLTDTPIDLAIPRFCLADEMGAIRQEDNRNPDLPRSSTELAYIMYTSGSTGTPKGVMVPHRAVVRLVINNGYAEIGPDDRVAFEANPAFDASTFEVWSPLLNGGVLVVIDHATLLMPKELVQALQTHRITVLWLSVGLFNRLAAELSPAFPQLKILIVGGDVLDPHVIRQVLRDNPPQQLLNGYGPSEGTTFTTTYRITALSPEVVRIPIGRPIANTRVYLLDTYGHPVPQGAIGEIYIGGDGVVCGYLNRPELTKERFLPDPFSDEPNARLYRTGDLARYLPDGNLEFLGRNDQQVKIRGFRIEPGEIEAQLLKHPAVSEALVLTLGNGQDKRLVAYVVAEADEMLVNHLRTHLSMILPDYMVPAAFVRLDTFPLTPNGKLDRRALPVPGEEDFARQIYAAPLGEMETLLATIWCELLGVERISRYDNFFVLGGHSLLAVRMMNRIAALGIEWPLSTLFTFPVLTTFAEAISAQFGESDRILPAIVPLSREGQLPLSFAQQRLWFLTQFDGVSETYHIPLALRLHGRLDIAAWQQTLDTLFARHEALRSVFVAVDGQPQIELLPAASGLLMRKYDLRDMPDVDAQLASLSAQEIETLFDLARGPLIRSSLIQLADDDHVFLLTLHHIVFDGWSVSVLMRELSSLYTAFLAGQPDPLPPLTIQYPDYAAWQRQWLSAERIQSQSDYWRARLVDAPVLLDLPTDRPRPLQQSFAGALLPVSLDAELTQSLKRLSEQQGVTLFMTLLAAWATVLSRLSGQEDLVIGTPSAGRGRQEVESLIGFFVNTLALRMDLSDAPNVTELLARVRQTALAAQEHQDLPFEQVVEIMQLPRQLAHTPLFQVMFAWQNNENTEWRLPGLEVSPVEQVFDVAKFDLELNLFEVEGQIVGYLNYATALFDQATIERQVCYLHTVLRGMVANPQQPVGKIDILTVAERKLLLETWNATEMPYPAHCCIHRLFEQQAEKSPDATALMYAGQVLSYAELNARANRLAHQLIMLGVAPEQRVAICVASSPARIVGLLAVLKAGGAYVPLDPAYPGERLVHILTDAVPAIVLADNTGRTALGEKVLAALTVLDPNSLPDQPDSNPQVSALTPRHLAYVIYTSGSTGIPKGVMVEHRGLVNLIQEKIVQFEIHPGSRMLQFASFGFDAGVWETMMALCSGATLAIPADTVRQEPRYLWHYLEEQAITHACLTPALLREGTDLPEMTIRPTLILGGEAPSATLLQALSRRATVFNAYGPTEITVCATTWRCPSDYTEGVIAIGRPTVNTQVYLLNTDGQPVPLGAVGELYIGGIGVARGYLNRPDLTAERFLADPFSDEPDARLYRTGDLARYLPDGNLEFLGRNDQQVKIRGFRIEPGEIEARLIEHLAVSDALVLTLGDGQDKRLVAYVVAEADDQLVNNLYAHLRAILPDYMVPAAFIRLDTFPLTPNGKLDRRALPAPGVEAFARQVYAAPQGEIETRLAAVWRELLGIEQVSRHDSFFALGGHSLLAVRMVERLRNAGLTLAVRDLFQSPVLSEFAQTVGQSPVVAVPTNVITSATTKLTPEMLPLIDLTQTEIDHIIEQVPGGIANIQDIYALSPLQDGILFHHLLASEGDPYLLVGQMVFADRALLDSYLVAVQQVINRHDILRTAFIWQGLSTPVQVVWCQALLSITELTLNPIDGPVRDQLAQRFDPRRYRIDLKRAPLLHFVVAQEEDGRWSVLQLLHHLIGDHTTLEVMNGEVQAYLAGQEENLSAPVPFRNLVAQARLGGSQAEHTRFFTDMLAEVDEPTLPFGLTEVHRNGSQMAELHRMLTPELNNRLRSQARRLGVSLAALCHLAWAQVLSRTSGQAKVVFGTVLFGRMQVGEGVDSGMGLFINTLPLRLDIDETSVQDSVRLAHTRLAGLLEHEHASLALAQRCSGVQNEAPLFSALLNYRHNVPAIATDAIISGIEFLSGQERTNYPLVLSVEDFGDALGLTVQIVQPIDPERICGYMQQALESLAAALEQQPEAPVRLLNILPASEKKLLLESWNATQAPYPDQCCIHRLFEQQAENTPDAIALIYGEHIFNYAELNARANRLARRLIRQGIQPDERIAVLLERSIELVVAQLAILKAGAVYVPIDPSVPDERKHWLIRDCSAKLLLTDIPIDLAIPRFCLADEMGAIRGEDYLNLDLSRSSTELAYIMYTSGSTGMPKGVMVPHRAVVRLVINNGYAEIGPDDRVAFEANPVFDASTFEVWAPLLNGGALVVIDHATVLTPKEFAQVLRNYRITVLWLSVGLFNRLAAELSPVFPQLNILIVGGDVLDPHVMAQVLRDSPPQQLLNGYGPSEGTTFTTTYRIATLPSGVIRIPIGRPIANTRVYLLDANGQPVPLGVEGEIYIGGDGVACGYLNRPELTAERFLPDPFSDKPDARLYRTGDLARYLPDGNLEFLGRNDQQVKIRGFRIEPGEIEARLMEHPAVHEAVVLVMSDGQDKRLVAYVVAEADEMLVNHLRDHLSAVLPDYMVPAAFVCLDAFPLTPNGKLDRRALPAPGEEDFARQIYAAPSGEMETTLAAIWRELLSVERISRYDNFFALGGHSLLAVRMMNRIAALGIELPLSTLFTFPTLMAFAEVMSARFDESGEALPAIIPLSREGQLPLSFAQQRLWFLAQFEGVSETYHIPLALRLRGRLDIAAWQRALDTLFARHEALRSVFVAVDGQPQVELLPTEWGLPMRKYDLRDTPDVDAQLASFSVQEASVSFDLARGPLIRSTLVQLADNDHVFLLTQHHIVSDGWSLGVLKSELETLYSAYLNQQPDPLLPLTIQYPDYAAWQCQWLSAAQIQSQSDYWCTKLADVPVLLDLPTDRPRPPQQSFAGNTLLISLDAELTQSLKLLSEQQGVTLFMTLLAAWATVLSRLSGQEDLVIGTPSAGRSRQEVESLIGFFVNTLALRMDLSGEPSVAELLARVRQTALAAQEHQDLPFEQVVEIVQPSRRLAHTPLFQVMFAWQNNENTEWRLPGLVVSPVEQAFDVVKFDLELNLFEVEGRITGYLNYATALFDQVTIERQVGYLHTMLREMVANPQQTVGKIDILTVAERKLLLETRNVIETRYPKQLCIHQLFEQQVENEPNETAVVYEEHTLSYGELNARANRLAHQLIALGVIPDQRVAVCVSRSPAMVVGVLAVLKAGGAYVPLDPVYTGERLTHILTDAAPAILLADNVGRDVLGEDALAGLTVLDPNSLPDQPDSNPQVPGLTAQHLAYVIYTSGSTGTPKGVMVEHRHILRLFDATESWYRFNRQDIWCLFHSIAFDFSVWELWGALRYGAKLVLVPHAIARSPQELHQFVCQHGVTVLNQTPSAFKAFIASYVANPLPDCLRYIIFGGEALEPSMLKPWYALREETSPQLVNMYGITETTVHVTYWALARHDVEQTTSPIGTRLPDLTLYLLDKYGQPVPSGAVGELYIGGAGVARGYLNRPELTAERFLTDPFSHIPDARMYRTGDLARYLPDGNLEFLGRNDQQVKIRGFRIEPGEIEARLMEYPAVREAVVLALDDGQDKRLVAYVVAEVDEELINRLRTHLGAILPDYMVPAAFVRLETFPLTPNGKLDRRALPAPGEDAFARQVYAAPQGETETLLATVWSELLGIEQISRHDSFFALGGHSLLAVRMIERLRNVGLTLAVRDLFQSPVLSAFAQTVGQSPAVVVPANVITPVTTILTPDMLPLIDLTQPEIDHIVEQVPGGMANIQDIYALSPLQDGILFHHLLANKGDPYLLVSQTAFVDRSLLDSYLAVVQQVINRHDILRTAFIWQGLSTPVQVVWRQAPLSVTELTLDPIDGPVYEQLIQRFDPRYHRLDLSQAPLLRFMVAQETDGRWIALQLQHHLIGDHTTLEVMNREVQAYLTGREENLSAPVPFRNLVAQVRLGVSQAEHTRFFTDMLAEVDEPTLPFGLTEVHRDGSQVTELHRMLPTILNNRLRSQARRLGVSLAALCHLAWAQVLSRISGQEKVVFGTVLFGRMQGGEGADSGMGLFVNTLPLRLDINNTPVQDSARLTHTRLAELLAHEHASLALAQRCSEVSGETPLFSTLLNYRHSAQPITVDETISGIESFNGQERTNYPFTLSVEDFGHALGLTAQVVQPFDPKRICGYMQQALESLVEALEQAPETPVRALNILPEVERRLLLKTWNATETVYPKQLCVHQLFEQQVEKNPDATALVYEEQTFSYAELNTRANRLAHQLIALGIAPDQRVAICVTRSPTMVVGLLAVLKAGGAYVPLDPAYPGERLAHILTDAAPAILLADNVGCAALGEEALSGLTVLDPNTLPDKPDSNPQVTALTAQHLAYVIYTSGSTGTPKGVMVEHRGLINLVWDKIAQFDVHSDSRILQFASLSFDASVWEIMVALGSGASLIIAVDIVRQDPLRLWHYLEQQAVTHACLTPAFLRERTDLPEMTIRPTVILGGEAPSVMLLQALSRRATVFNAYGPTEITVCATTWRCPPDYTDMLVPIGHPTANTQIYLLDSYGQPVPLGVVGELYVGGVGVARGYLNRPELTAERFLSDPFSDEPNARLYRTGDLARYLPDGNLEFLGRNDQQVKIRGFRIEPGEIEARLMEHPAVQEAVVLVLGDEQNKRLVAYIVAEADEALVNRLRTHLSAILPDYMVPAAFVRLNAFPLTPNGKLDRRALPVPGEEAFVRQIYAAPSGEMETTLAAIWRELLGVERISRYDNFFALGGHSLLAVRMMNRIAALEIELPLSTLFTFPALADFAEAINTRLNEQSSKLPVIIPLSGEGKLPLSFAQQRLWFLSQFDGVSETYHIPVALHLRGRLDIAAWQQALDALFSRHKALRSVFVAVDGQPQVELLPAASGLPMKKYDLRNAPDADAQLASLSAQETEVPFNLTRGPLIRSSLVQLANDEHVFLLTLHHIIFDGWSVSVLMRELNTLYTAFLAGQPDPLPPLTIQYPDYAAWQRQWLSAERIQSQSDYWRTKLADAPILLDLPTDRPRPPQQSFAGNILLVSLDAELTQSLKRLSEQQGVTLFMTLLAAWATVLSRLSGQDDVVIGTPSAGRSRQEVESLIGFFVNTLALRMDLSGAPNVTELLARVRQTALAAQEHQDLPFEQVVEIVQPSRQLVHTPLFQVMFAWQSNENRDWMLPGLTISPVGRSFDIAKFDLELNLSEMDGRIVGYLNYATTLFDQSTVERQVGYLHTVLREMTANPQQPVGKIDILTVEERKLLLESWNATQTRYPDQTCIHRLFEQQTEKTPDAVALVYEERILSYAELNARANRLAYRLIERGVQSDDRIAVLLERSIELVVAQLAILKAGAVYVPIDPRMPDERKNWLISDCSAKLLLSDILVNLAVLQFCLDDEMDAIRQEDHCNLDLPRSSTELAYIMYTSGSTGTPKGVMVPHRAVVRLAINNGYAEIGADDRVAFEANPVFDASTFEVWAPLLNGGALVVIDHATLLTPKEFVQALQTYRITVLWLSVGLFNRLATALSPVLPQIKTLIVGGDILDPHVIAQVLRDGPPQQLLNGYGPSEGTTFTTTYRITALSPEVSRIPIGRPIANTRVYLLDTYGQPVPQGVTGEIYIGGDGVACGYLNRPELTAERFLLDPFSDKPDARLYRTGDLARYLPDGNLEFLGRNDQQVKIRGFRIEPGEIEVRLMEHPAVSEAVVLAQGDSQDKRLVAYVAAEANEELVNHLRTHLSAILPDYMVPAAFVRLDTFPLTPNGKLDRRALPAPGEEAFARQVYAAPQGVTETTLAAIWSELLGVEQVSRHDSFFALGGHSLLAVRMIERLRNAGLILAVRDLFQSPVLSAFAQTVGLSRAVVVPANVITPATTVLTPEMLPLIELAQPEIDHIVEQVPGGMANIQDIYALSPLQDGILFHHLLANKGDPYLLAYPIAFADRSLLDRYLAAVQQVINRHDILRTAFVWQGLSVPAQVVWRQASLSVTELTLDPADGPVYEQLSQRFDPRQHRLDLGQAPLLRFVIAQETDGRWIVLQLQHHLIGDHTAMDVMNREVQAYLAGQGDSLPVPIPFRNLVAQARLGMSQAEHTRFFTDMLAEVDQPTLPFGLTEVHRDGSQVAQSHRMLPAMLNDRLRHQARRLGVSLAALCHLAWAQVLSRTSGQEKVVFGTVLFGRMQAGEGGDSGMGLFINTLPLRLDMDDTPVQESVQAAHTRLAGLLEHEHASLALAQRCSGVQNGIPLFSALLNYRHNAPVIVTDEVTNGIEFQGEQERTNYPFVLSVEDFSNALGLTTQIVQPIDPERICDYMQQALESLAEALEQKSETPIRLLNILPEAEKKLLLESWNATQALYPDQCCMHRLFEQQAEKTPDAIALMYGEYILNYAELNARANRLARRLIGLGIRSDDRVAVLLERSVELVIAQLAILKAGAVYVPLDLRIPDERLHWLISDCSAKLLLTDIPVDLDIPLYCFADEVDDIEEEGYLNLDLPRSSTDLAYIMYTSGSTGTPKGVMVPHRAVVRLVINNGYAEIGPDDRVAFEANPAFDASTFEVWAPLLNGGTLVVIDHTTVLTPQEFVQTLQAYRVTVMWLSVGLFNRLAAELSTVLPQLKILIVGGDVLDPHAIAQVLRDGPPQQLLNGYGPSEGTTFTTTYRITALSPGMTQIPIGRPIANTRVYLLDIYGQPVPQGVTGEIYIGGDGVACGYLNRPELTAERFLVDPFSDLPDARMYRTGDLARYLPDGNLEFLGRNDQQIKIRGFRIEPGEIEARLVEYPTVQEAIVLVLGDGQDKRLVAYVVAQEDEGLANSLHTYLSAILPDYMVPSVFVRVDDFPLTPNGKLDRHALPAPGNEAFARQVYEAPQGEMETVLVAIWCELLAIEQVSRYDNFFALGGHSLLAMRMINLAANHGLICTLNDLFQFPVLSELAAKMTSDKLSQPRNSAISVRSDGTGLPLFFVPSGMGDYSYVFGLSQQLHLGYPIYALPWPSISEEPMSTMEEQATRMINFMKAVQPEGPYRICGYSSGGILAYAIAQQLLYSSEVVNFLGLIDTPAPHYYRQRITPPKLQFFIELARQAEDGYIEEMAALYRRIDELNLVQFIETAQKLALYPANLRADLIAKRWEQIANYAQIVRDYEPQVSAITLHQFYAMESSPSVPVVIDTKIMDIEPQPLNMGSSLGWAQVLPDSSLRLIPISGNHFSLLENNEDKVALVQALNMALAVGWNEEVQZ

SEQ ID NO: 269 - protein, 643 aa, Photorhabdus luminescens
MPVVTLPDGSQRQFDHAVSVMDVACDIGPGLAKACIAGRVNGELVDACELIDSDANLAIITSKDDAGLEIIRHSCAHLLGHAIKQLWPDTKMAIGPIIDNGFYYDVDLGRALTQEDIELLEKRMLELAKKDYDVIKKKVNWQEARDTFVARGEDYKVQILDENISRDDRPGLYNHEEYIDMCRGPHVPNMRFCHHFKLQKVAGAYWRGDSNNKMLQRIYGTAWADKKQLNTYLQRLEEAAKRDHRKIGKQLDLYHMQEEAPGMAFWHNDGWTIFRELETFVRTKLKEYQYQEVKGPFMMDRVMWERTGHWENYGEHMFTTSSENREYCVKPMNCPGHIQIFNQGLKSYRDLPLRMAEFGSCHRNEPSGALHGLMRVRGFTQDDAHIFCTEEQIHREVSSCIKMVYDVYSTFGFEKIVVKLSTRPEKRIGTEEQWNQAEESLAAALQENGVQFEYQPGEGAFYGPKIEFTLHDCLDRAWQCGTVQLDFSLPGRLSASYVGENNERKVPVMIHRAVLGSLERFIGILTEEYAGFFPTWIAPQQVVVMNITDSQADYVQELVKKLQDAGIRAKADLRNEKIGFKIREHTLRRVPYMLVCGEKEVESGKVSVRTRRGKDLGSIDVNGFIEKLLIEIRSRNLHQLEEZ

SEQ ID NO: 270 - protein, 328 aa, Photorhabdus luminescens
MPHLAELVANARAAIEDAQDVAALDLVRVEYLGKKGHLTLQMSSLRDLPVEERPAAGAVINQVKQEVQEALNIRKEKLETDLLNFRLAAEKIDVSLPGRRMENGGLHPVNRTIERIETFFGELGFSIESGPEIEDDYHNFDALNIPAHHPARADHDTFWFDAKRLLRTQTSGVQVRTMHSQQPPIRVIAPGRVYRNDYDQTHTPMFHQVEGLIIDRDISFTSLKGTLHDFLTNFFEEDLQVRFRPSYFPFTEPSAEVDVMGKNGKWLEVLGCGMVHPNVLHNVGLDPEIYSGFAFGMGVERLTMLRYGVTDLRAFFENDLRFLKQFKZ

SEQ ID NO: 271 - protein, 796 aa, Photorhabdus luminescens
MKFSELWLREWVNPAISSETLSDQITMIGLEVDGVEAVAGQFHGVVVGEVVQCAQHPNADKLRVTKVNVGGERLLDIVCGAPNCRLGLKVAVATVGAVLPGDFKIKAAKLRGEPSEGMLCSFSELGISEDHDGIIELPIDAPLGVDLREYLKLDDKVIEISITPNRADCLSIIGVARDVAVANKMPLSEPQIEAVKPTTDAIFPIRVEATEACPRYLGRVIKNINVKAATPQWMREKLRRGGIRSIDPIVDVTNYVLLELGQPLHAFDLERLNGSITVRMAKQDEKLVLLDGTEANLSTDTLVISDEKQAVAMAGIFGGEHSGVNEETQNILLECAFFAPLAIAGRARRYGLHTDASHRYERGVDPQLQHKAIERTTQLLIDICGGEAGPIIDVTDESQLPQSATITLRREKLDRLIGHYIPDEQVGDILTHLGCKVTIQENCWQAVAPSWRFDVEIEEDLVEEVARIYGYNNIPDVPIRADLIMKKHRETDLSLQRVKTVLVDRGYQEAITYSFVDPKIQALLHPQQQALMLPNPISADMSAMRLSLLTGLLTTVVYNQNRQQNRVRLFETGLRFVPDENADQGIRQELMLGGVITGNRFEEHWSLEKQSVDFFDMKGDLEAVLELTGKLSKISFRADVNPALHPGQSAGIYLENEYIGYIGVVHPELERKLDLNGRTVVFEVLWNKLASRVVPDAKEISRFPSNRRDIAIVVPENVAVEDVLAECKKVGVNHIVGINLFDVYCGKGVAEGHKSLAISFILQDTARTLEEEEIAATINKCVAVLKQRFQASLRDZ

SEQ ID NO: 272 - protein, 336 aa, Photorhabdus luminescens
MQSTHSIAELVTRQKRHDYRFLAILTCLFLLVFFLSLCAGENWIWPNKWFSETGQLFVWQLRFPRVLAVVAVGASLTVAGAVMQALFENPLAEPGLLGVSNGAGVVVVFLVLMFHGIAPFWLLSIGAVLGALTVTMILLTFSRNRYLNNARLLLVGVAFGVASGALMTWMVYFSTSLDLRQLMYWMMGSFSGIDWRHQWLVVALFPLIIWLSRQGKVLNFLSLGETQAQQLGISLYYWRNLFVFAVGLLVGLSVALAGTISFIGLVIPHILRLCGLTDYKTLLPACVLSGGYGLLLADLLSRLSLNNAEVPIGVVTATLGAPVFIWLLLRVRDWSZ

SEQ ID NO: 273 - protein, 259 aa, Photorhabdus luminescens
VNNVQVTNQLMALNQVSVRNRLMPLTALVQQGEQIHIIGPNGSGKSTLLACMAGILPYSGAIDLQQKCLSQYSHCQLARYRAWLSQQISSVPIMPVFQYLQLHLAAHLVNCDGVLSELCSFFKLGKFLETPVGNLSGGEWQRVRLTGVFLQVWPSINLEGKLLLLDEPTNNLDITQVAALDLLIKKFCELGGTVVMSGHDLNHSYDKADRIWLLADGSLVANGKPDEVMKENTLSRVFAADIKCVPEKTDKYWRVFLPZ

SEQ ID NO: 274 - protein, 385 aa, Photorhabdus luminescens
LCFMDSFLPFSRPAIGDEEIQAVEKVLRSGWITTGPQNHQLEQDFCRMFGCKHAVALASATAGMHLTLMALGIGPGDEVITPSQTWVSTINMICLLGAEPIMIDVDRHTLMVDAQTVKKAITSRTKAIIPVHYAGAPCDLDILRGIAQEAGIPLIEDAAHALGTRYKNEWIGEHGTAIFSFHAIKNATCAEGGLIATDNNELVERIRCLKFHGLGIDAFDRQIQGRRPQAEVVEPGYKYNLSDIHAAIAVVQLSKLESMNIRRRQIVARYSTALKDSPLQMLSVPDYEHIHAHHLFMVRVNKDVCGIDRDTLMERLKNKNIGTGLHFRAAHTQKYYRDRYPQLSLPESEWNSVTLCSLPLFPDMSDDDVDRVTDALQEIISEHRZ

SEQ ID NO: 275 - protein, 323 aa, Photorhabdus luminescens
VAQDYTVEQLNYGRRVYDFMRWDNVAFGISLLLLVASVFVMATRGFNWGLDFTGGTVIEIKLSQSADLDKMRDNLAKAGFEDPLLQNFGSSRDVMVRMPPVTGAANEELGKKVIKVINDTIDKDASVNRIEIVGPSVGAELAQDGAMALLAALICILIYVGFRFEWRLALGAVLALAHDVIITLGVLSLFRIEIDLTIVASLMSVIGYSLNDSIVVSDRIRENFRKIRRGTSYEIMNVSLTQTLSRTIMTSATTLLVVLMLYIFGGAMLKGFSLAMLIGVSIGTVSSIYVASALALKLGMKREHMIQQKVEKEGADQPSLLPZ

SEQ ID NO: 276 - protein, 326 aa, Photorhabdus luminescens
VSFEQIKKVSVVIPIYNEEESLPLLLERTLAACKQLTQEYELILVDDGSSDKSAEILIQAAEQPENHIIAILLNRNYGQHSAIMAGFNQVNGDLIITLDADLQNPPEEIPRLVKTAEQGYDVVGTRRANRQDSLFRKTASKIINAMITKATGRSMGDYGCMLRAYRRHIVEAMLQCHERSTFIPILANTFARKTIEIDVAHAEREFGDSKYSFMKLINLMYDLLTCLTTAPLRLLSVVGSVIAVSGFLLAVLLMVLRLIFGAIWAAEGVFTLFALLFIFIGAQFVAMGLLGEYIGRIYNDVRARPRYFIQKVVGDNKTNDNQEEYZ

SEQ ID NO: 277 - protein, 661 aa, Photorhabdus luminescens
MKAIVFAYHDIGCVGINALTKAGFDIQAVFTHTDDPNENHFFSSVARLSADLALPVFAPENVNHPLWIERIRELKPDVIFSFYYRDMLSEDILSLASTGAFNLHGSLLPKYRGRAPINWAILNGEVETGVTLHKMVLKPDAGDIIAQYKVAIAETDTALTLHGKIREAAEKLFDQVLPQIKAGIYPAIPQDESQATYFGRRTAVDGEIDWHKSATEINNLVRAVTEPYPGAFTFLGERKITIWRACPLNETHDKQPGTVLSVDPLIIACGKGTLEIINGQSESGLYVQGHRLAVDMSMVTDVRVGPKATTQINHRKRVLILGVNGFIGNHLTERLLRDGNYDIYGMDIGSSAIERFISNPRFHFIEGDINIHTEWIEYHIKKCDVVLPLVAIATPIEYTRNPLRVFELDFEENLKIVRYCVKYNKRIIFPSTSEVYGMCDDKEFDEDDSRLIVGPINKQRWIYSVSKQLLDRVIWAYGEKEGLKFTLFRPFNWMGPRLDNLNSARIGSSRAITQLILNLVEGSPIKLVDGGEQKRCFTDINDGIEALFRIIENREGLCDGQIINIGNPTNEASIRQLAEILLDSFEDHELRDHFPPFAGFKKVESGSYYGKGYQDVEHRKPSIKNAERLLDWKPTIDMKQTINETLDFFLRGAVEELGKNZ

SEQ ID NO: 278 - protein, 298 aa, Photorhabdus luminescens
MKQIGLRVDVDTYRGTVEGVPKLLKILAKHQIQASFFFSVGPDNMGRHLWRLLRPKFLWKMLRSNAASLYGLDILLAGTAWPGKKIAKDLGYLMKQTLNAGHEVGLHAWDHQRWQAKVGRWSEAQLTEQVKLGVDALVQAIGQRVTCSAVAGWRADERVLAVKQQFGFDYNSDCRGTHPFRPILPDGTLGTVQIPVTLPTYDEVIGIQVKDEDFNQFILDKMKNSQGVPVYTIHTEVEGMSKSTEFATLLEMVHQENIQFCALSHLLPENIQRLPVGRIVRSEFPGREGWLGCQQEAZ

SEQ ID NO: 279 - protein, 553 aa, Photorhabdus luminescens
LNNRACKVGAFLMALFFVITYLLPLNGRLLWQPDETRYAEISREMLQRGDWIVPYLLDIRYFEKPVAGYWINNISQWIFGDNNFAVRFGSVFCIFISAILLYRLAMMMWHNRHIAFATSLIYISMFLVFAIGTYSVLDPMFSLWVTAAMMCSFWGLKTDCTRRRIMAYLVLGLCCGMGFMTKGFLALAVPVIVMLPIVIYQKRVLQIVCFGPLAIISAIAISLPWVIAIALREPDYWHYFFWVEHIKRFSSDDAQHIAPFWYYIPILILGVIPWLGLLPGAVMKSWKERKSNPEMFFLLCWFVVPLLFFSIAKGKLPTYILPCMAPLAMMMAKFGVDCVKNGKMELLKINGMVNVFLGLLAVIVLFAMEVVTKHALYQPSEWLKWVLAIVAFGIWGIIGYLCFALNGKYWLLAAFCSIVVSLVIGHALPENTVNSKLPQNFIKLHHQELAGSRYILSESVGLATSVAWEMKRSDIYMFERWGELEYGLNYPDSRYRYISYKDFPQWLAKARKEGRVSVLFHLYKDEKLPDLPKADQISRNYRFAILVYEKQPZ

SEQ ID NO: 280 - protein, 317 aa, Photorhabdus luminescens
IISRGKLMTDKQPYFPEIKYSPWGPNDAPLFIILGQSNSYGHGTQLPQDEEITQGLKNIFTLSLSEVYSVDFPAINWTGLTSFGDANIGAPVGLSRGNQDHSVNAANRFAKLWQDHINRGNALNLPDLYVILMGWGGQGMYLDNPPDNRWAPERDPCDVESLYPRAIRTLRMAVESLRKLGKNPCILAVHWNQWEAETESLLAAQASERNFTRIITGISDALGSRSIPWRLYYPLSVAFDPINTRYVLKAINNVIADDPQYRTLIDARNSPDYTGKATEFGVFLPDSLHYDGKAQTWFAQREWELILSGYKGVELPZ

SEQ ID NO: 281 - protein, 231 aa, Photorhabdus luminescens
FTWKIFVDLIVWGKNIYPVLDEISFTIMRGQSCAIVGASGSGKSTLLNILGLLDQPSSGYFQFSGVNITNVTPNERARIRNQEIGFVFQSFNLLPRMQALDNVALPLLYRGYSRSLARQEAKYQLELVGLAGRIYHRPADLSGGQRQRVAIARALVGKPSLILADEPTGNLDSATARDIMALLLSLNREQGVTLVMVTHDEAIAKNMQRCLYVNGGRLSETDLWLDSLDAZ

SEQ ID NO: 282 - protein, 402 aa, Photorhabdus luminescens
VNSGRYGFSFAQALCESLGSLRLLGRRSLLALLGIAVGCASVIALLNIGHNAVNEAISTFKSMGSNILVAHFSFTPGTDVKPAPSTLDTQALTRTIPTITHAAPLTLHSTRIRFQGQGIDTNITGTSSDLAAVLDLQIEQGRFLSDYDRQTTYAVLGANIAKQLKVANQPIRIGNQLQIGEYLFEVIGILAVQGPNPLLPGSIDDSVILPIEAMRRLRPAPEIGSVIARARDTTTLNSDAVSLRDYLVSLSKGRQVEVDIPKQLLDGLTRQARTFSYLLAGLGGISLLVGGVGVMNVMLMNVSERRREIGVRMALGARPMDIGILFMLEAAILAIAGAMVGSLLGVVAGYLFVKFSGWVFTLSLFSLPLGIASSLVIGLFFGINPALAAARLQPVEALRDDZ

SEQ ID NO: 283 - protein, 497 aa, Photorhabdus luminescens
RHFVMISQVFQRAIGIIIALIIVASVKPALAEPLNPSQATMPATDTISLNQKTIGLTLSDAIYLGLRNNRSIRSAYLDRIAQKFDLRVAEDRFTPKLLINSRYIAARNQSDRYRQSEITPTSTLLGEYGTRFSLSWTNRTTWADNAGRSRNDGVSFSVIQPLLRGAGKDVATAPVRLAQLMEQTNRLNLKATVSQTITQVIMAYRGLLRAQEQLQIARDALERSRQLLEVNKAMISAGRMAAFEIVQTEADVAMQELAAEEAANQLDTSRLELLRLLALDLQTQVKATDRLEAKRVDINLLQAQHLAQEQQPSYLTQLITAEQAAINLTVARNERLWDVSLVGGASQVRDRTGSNRSRNWENYAGVQVEIPIGDLSQRQAEVRARVDVQNQDIRLAEAKQSLERNVGNAVRDIGTRWRQYEIAQRARDLSLRKLEIEREKLTVGRSSNFQVLSFETDLRNAENVRLNALITYLNAQAELDETLGTTLGSWDIALNDZ

SEQ ID NO: 284 - protein, 433 aa, Photorhabdus luminescens
GVGILHLMTKIRGLARFRYKTRWLVTLAVALVIGATIAYVLFSSSIDTSSPQRWVHVEPQRLENRLGLVGRIQAATSLTIAAPFDGVIAEVMVTEGQRVKRGQPLLSLDTTQLDIQLRQALTELLKAQKTVQDLVGWENSQDVARVRRALTNAQLSLSDTERKLTDTRALFERGIVPRMEVDILEQQVRVQQLDLAAAKAELSVALDKGTGENRQIADMELANAQSRYQALQIQQAQRELVSPFDGIVIRPQVPESDKGVFIQKGTRVTQGTPLLGVINLEQIQAVARIEEADLYQVYEGMPVEITGDGFAGLSLRGQIKTIGVQGSSKEMQGAGVTYDLLVAIDPLTPEQRQRIRLSMSAKLAIVTYRNERGLALPAEALHTGPDGRTFVTYRRELNAQTQQIVVTPGHAVLQGVEVIGLEAGYVEVPARKZ

SEQ ID NO: 285 - protein, 600 aa, Photorhabdus luminescens
MPGEFTSSTQEKKNSTDNTLTDNTLKVEKCKIVNHSTRKARSCVVIGGTTLAIRCTQQLQAAGYIIVAIFPTESLFFEWATSQNIHCVEALEDLLTLSKTESICWLFSIVNPVILPTLLINQFSQGAFNYHDAPLPRYAGSHATSWAILAGESQYAITWHLIGSMVDSGDIVVQRHIDLKNTDTALSLNLKCYQAAAEGFTELLNNLENGDIPRRQQDPDNRNFFSRRRRPDAAGCLLWNKKAQELSSLVRSLTFGVYYPNPLTLPKVLLRDRLVSISTLQVMYTRSDHKPGTLLGISEDHWLMTTSSEDIRISFVNSRGNPINALTLANQCKLDIGDQLPTIERSDIKTLTDIHEQLTEQELFWQKRLERFSTLMLPFKLRATIDKIPDWHVSEWKTVLNHSSFISTELVQHIICAWFIYLAHTSNDTQFQVGWAQAGDAVHSSKWSSFFAMIVPMEVHINLQQRLTEILNSISSEQQLLEQHRVYPRDMVSRQPVLRTINLLHNNRPWPIGISVISGYSKDLTNKNAIQEHAIVGEIMTLQIDQNKGNFRFIYNSKLVAVNNIEHVASDLALLSNVIADTKNLNMTANELPIYAFSRZ

SEQ ID NO: 286 - protein, 616 aa, Photorhabdus luminescens
VLNRYPLWKYLMLIAAILIGLLYALPNLYGEDPAVQITGARGIAASEQTLVQIHNVLEKNQIASKSIALENGAILARFDNSDIQLRAREALVSTLGDQYVVALNLAPATPTWLSKVGAEPMKLGLDLRGGVHFLMEVDMETALGKLQEQNIDGLRTDLREKGIPYSTARKIDNYGVEIRFRDEKARSEAENYLTGRHRDLVFSIGSNNTLKAVMSDERQREARSYAVQQNITILRNRVNQLGVAEPLVQRQGADRIVVELPGIQDTARAKEILGATATLEFRLVNTGIDSTAATSGRVPGDSEVKSTRDGNPVVLYKRVILTGDHITDSIPDTDEYGNPQVSISLDSAGGTAMSNFTKDNVGKPMATLFVEYKDSGKKDANGRSVLVKHEEVINIANIQTRLGNSFRITGLSNATEARQLSLLLRAGALIAPIQIVEERTIGPTLGLQNIEQGLEACLWGLIASILFMVIYYRKFGVIASSALLANLVLIVGIMSLLPGATLTMPGIAGIVLTLAVAVDANVLINERIKEELRNGRTVQQAIHEGYKGAFSSIIDANLTTLITAVILYAVGTGSIKGFAITTSIGVATSMFTAIVGTRGIVNLLYGGKRIKKLSIZ

SEQ ID NO: 287 - protein, 407 aa, Photorhabdus luminescens
KLFKGGSMIKEKTATHAGSTNFPFVALLALAMTGFLALLTETFPAGILSQISDSLAVSEALAGQFVTLYAIGSLVAAIPLTTATQGWRRRRLLLMALTGLLVFNTLTALTSNYIVALAARLLSGMAGGLIWGMLVGYARRMVPDHLKGRALAVAGVGAPLALSLGVPLGTFIGGIVGWRTTFGLMSILTLVVIAWVMLKVPDYPGRTAEKRIPIKKVIMIPGVRPVLSVLVCWVLAHSILYTYVLPFVTQAGLATRIDLVLLAFGVASLLGIWMTGLLIDKMLRSLVLISLALFTFASLILGVIGTLPVFVFLAVILWGLTFGGAAALLQTALAESAGEGADVAQSILVTLWNLAIAAGGIIGGILLETLGASSFPWTLLVLLVLALLIVWNSGNYGFPHKGIKGKZ

SEQ ID NO: 288 - protein, 919 aa, Photorhabdus luminescens
NKMQSTLPIIKWRNILKTGQYRKYDISSAQPANENWITLNNIKLPASFQRKECLPGLLFSHVRSTPWATAVIHGEEQLSYLEMAIGSVHLACYLQNLGCLAGDCVGIFVEPSIEQMIGVWGTLFAGGAYLPLSHDYPEERLRYMIHDSNLKMIFTQEKLKEKLVRLVAENIHIVTLEDVEKSFESSAITNNTLHDYLSPDNLAYVIYTSGSTGKPKGVMIEHRSIVNQMCWLNEKCDLNIEKTIIQKTPISFDAAQWEILSVSCGSRVVISSSGTHRNIPQLIDLIIRHNVTTLQCVPTLLQALIDNHQFRECHTLRQIFIGAESLSRKLATQCIHTLPNCLLINMYGPAECTINASVFLVNHYPISDEVNSVPIGKPVSNTEFFILDHHYQLASEYEIGEIYIAGTQVARGYLNRQDLTEKHFLEIAIPPNTQKIRLYRTGDLAYWDKEGNAHFAGRKDNQIKVRGMRVELEEIKNAIEVIDQVKHAAILAEKDPQHRSTRLTACIELADETIRQQAKYDITSILRSELSKTLPDYMLPDRFLFLDTMPLTSSGKIDFDTLQVLVSTVSHSPQVLPSTSTETQIVKIWEEVLTRESISTEDDFFALGGNSLIAVHLIQRLNEEFALSLPLHTLFEAATVKQLAKIVEGEVTRLSSRLACLQEKDAGLPVFCWPGLGGYPMNLHLLATQICTDRSFYGIQAYGINEGEVPYSTIAEMVIQDITEIKKLQPTGPYTLWGYSFGSVLAFEAAYQLERAGEHVEKVVLIAPGLSKIKYHVNSTGTENGSTYQNNELISLLFSVFAGTSHSSALNECLANVIDEQSFVSFVHKHYPTLAPTLIVRIARIVIQTYGQKYSATELQERIIKAPITVFNARDDAVSFIEEATPYLKHPPENINLNVDHFEVLKESGVNELARFLSZ

SEQ ID NO: 289 - protein, 296 aa, Photorhabdus luminescens
MDSLGSLNVFVRAADARSFTVAGQQLGISSSAVSKAIVRLEERLGIRLFHRSTRTVTLTLEGTLFFERCKRILDEVEAAETELSQMQKMPSGKLKISLPSVGMLFMPKFAAFTRLYPEIKLDISCSDRIVDVIEEGFDAVLRTGDPRDSRLMSRMLGSYRQVIVGSPAYFAAAGFPEEPEDLVSHPCLLYRFPTNGKLNVWPLNRDGKKIELNLPCNMVTDSLEPQVCFAEHGLGIACVPNIAVYRQLKEGSLVTILDKYNESSTIFRILWPSSRHLSPKVRVFVDFMAENLLPSZ

SEQ ID NO: 290 - protein, 225 aa, Photorhabdus luminescens
SSLIYLKQYHRSSFNLMEVVMQSDLAFLTKKLAFFVLYALILATVIGLLFIDVIYLQNAVKENSLTEIAQESILFVISAVFLLEAKKNSQLRPALVLISGFFACLLIRELDAIFDEIFHGAWAWIAIPLALICIFYSAYKGRDTLAGLVHFTRHQSYSMMVAGILCVLVFSRLFGMGELWKGLMLEHFDRTAKNMVEEGCELLGYCLCLISTFWYLPDAIKLRKZ

SEQ ID NO: 291 - protein, 265 aa, Photorhabdus luminescens
MNAIKNNISLQAQNLSYSIGNQKIIDNVSLSVNKGEIVAIIGPNGAGKSTLLRLLTGYIKPEHGQCDLHGTPIEQWPAEQLARTRAVMRQHSSLSFPFSVEEVVAMGRSPHGIHHKQTAIDTVIEQTDCQALRHRDYRQLSGGEQQRVQLARVLAQLWHPTPIECCLFLDEPTSALDLYHQQHTLRLLYRLTREQPMAMCCVLHDLNLAALYADKIFLLHKGKLVAAGTPEEVLNDHTLRKWYQADLGITRHPETQQPQIYLRQZ

SEQ ID NO: 292 - protein, 334 aa, Photorhabdus luminescens
MSRMKSPGLGLAFLCLLLSGLAIGSANLGALSLSFKTLWESSISEPQWQIWLNIRLPRVLLAILVGCALATSGAVMQGLFRNPLADPGLLGISSGAALMVAMAIVLPVSLPSVITVYGHIIAAFIGSLLISLLIFSLNKYNYGNLARLLLAGIAINALCMSAIGLLSYISDDQQLRQFSLWMMGSLSQIEWPTLAITASLIIPTIILTFSQARKLNLLQLGDEEAHYLGINVQRTKFQLLLLSALLIGSAVALSGVIGFIGLVVPHLIRMRFGGDHNWLLPGAALGGASLLLTADTLARTLVSPAEIPVGLITGLIGGPYFLWLILKQPGSRTZ

SEQ ID NO: 293 - protein, 273 aa, Photorhabdus luminescens
MKQWLLTFALAVSFSAFSTERIVTIGGDVSEIVFALGEGDKVVARDSTSQKPTELLTLPDVGYMRMLNPEGILSMNPTLVLTSELAKPSLALKQLQDSGVEVIQITGKAALEAVPEKIKTVAKAVNQAERGAQLIQQYQKALAEIPTTTLPTRILFVMSHGGIMPMAAGQKTAADKMIRAVGATNAMQGFNNYRPLSQEGVIASAPDLLLVTEDGIKSMGGLDKIWQLPGLKHTPAGQKQRVLIVDDMGLLGFGLETPSVMKQLRQAAEKTQZ

SEQ ID NO: 294 - protein, 358 aa, Photorhabdus luminescens
VNSSLYERYLQAKSDNKAKYARDLAAYLNVSEGELLHSRVGIDAKRLNVDAPTLLEELAVVGEIKAITRNDFAVHEHIGRYVNTHFSSHAGLVLNPRELDLRIFFGHWSSVFYLVEPAKNGMRHSIQFFDHQGDALHKVYATGNTDMTAWEALIEKYQTEDNPALVIKPIEEITYSTLTNELKAQLDEEWRAMTNVHQFFTLLKNHNLSRQQVFNAVHDDLAYKVENSALNELINTAYNDQNEIMIFVSNHGCVQIFTGKLERLMPHQEENSDQKWINIFNRNFTLHLIESAIAESWVTRKPTEDGFVTSLELFDANGDQIAQLFGQRTEGTPEQTQWREQVAALPKLQSIQEERVAZ

SEQ ID NO: 295 - protein, 674 aa, Photorhabdus luminescens
MSQSARSTLKLSALSLAIISNIPAVYAATKSPDANSDKSSREVITVYATGNERDSFEAPMMVTVINSQSPQSQTAGNANDLIKKIPGINIAGINRANGQDVSLRGYGPKGVLTLIDGIRQGTDTGHINGTFLDPALIKQVEVVRGPSALLYGSGALGGVIAYQTVDAADLLQAGQDHGFRVFARGATGDHSMGFGGATFAKSESLDGVFAFSTRDSGNIRHGGGVVGDNDEFISNLMAKGSWKIDDNQSLSSQLRYYRNEANQPKNPQTLTGKNKNPSTWTDRTTTQRDAQLSYQLNPAEYDWLNAKTDLYYSDITINARTKAKGFEGRKQKTYGVKLENRSRLWTDSPLAHQFTYGGETYKQKQTPDGNTDSFPDADIRFYSGWLQDEITLRDLPVSIVAGTRYDNYKGNNSKDEAVSADKWSSKGAISITPTDWSMLFTSYAQAFRAPTMGEMYNDSMHYPGNFWTPNPNLRPESNETWESGFGLRFNDLLADNDELKFKASYFDTKAKDYIKSDIVNRGRNTTSVNISSAKIWGWDASINYESNLFSWELAYNRTEGKDEKSGGSLDNLSPDTITSILEIPIAQTGFSVGWVGQFTNHTDFKGKDARGRDPKQQAGYGVNDFYVSYQGEGMLKGVTTTAVLGNAFDKEYYSPQGTPQDGRNAKLFVSYQWZ

SEQ ID NO: 296 - protein, 353 aa, Photorhabdus luminescens
LRKYMYKTDGLRTHRVDSLVTPQTLAIQFPVSEKIVNNVTASRKRIADILSGNDPRLMVIIGPCSIHDIDAALDYAQRLNRLREKYQHRLEIIMRTYFEKPRTVVGWKGLISDPYLDGSCQVNRGITLARKLLVDVNELGLPTATEFLDMVTGQYIADLISWGAIGARTTESQIHREMASALSCPVGFKNGTDGNIRIAIDAIRAAGVCHTFLSPDKRGQMTIYQTEGNPYGHIIMRGGKQPNYSAKDIATACTQLREFNLPEHLVIDFSHGNCQKIHKRQLTIAKEVGHQIQEGSTAIVGVMVESFLVEGTQQVIQGQPLNYGQSITDPCLNWQDTEQLIDILAEAVSYRFZ

SEQ ID NO: 297 - protein, 375 aa, Photorhabdus luminescens
VKFELQTTDGQARRGRLIFERGVVETPAFMPVGTYGTVKGMTPEEVKETGAQILLGNTFHLWLRPGQEIMKLHGDLHGFMQWHGPILTDSGGFQVFSLGAMRKIKEEGVHFRNPINGTPVFLSPEKSMEIQYDLGSDIVMIFDECTPYPADWDYAKRSMEMSLRWAARSRKRFDELQNKNALFGIIQGSIYEDLRDISVKGLVEIGFDGYAVGGLAVGEPKEDMHRILEHVCPQIPQDKPRYLMGVGKPEDLVEGVRRGIDMFDCVMPTRNARNGHLFVTHGVIKIRNAKHKEDTSPLDEQCDCYTCRNYSRAYLHHLDRCNEILGARLNTIHNLRYYQRLMAKIRQAIEEGNLEQFVEDFYQRIGKPVPALSIZ

SEQ ID NO: 298 - protein, 300 aa, Photorhabdus luminescens
KVTVNIMAKFRLETSAERNGRNSVEGVERTVFFISDGTAITAEVLGHAVLSQFPIKITSYTLPFVASETRAEEIKQQINQIYQDTRIRPLVFYSIISSGVKNIITSSEGFCQDIVQTLVAPLQQETGLEPKPELNRTHGLTEKNLSQYDARIAAIDYALAHDDGISLRNLDQAQVILLGVSRCGKTPTSLYLAMQFGIQAANYPFTADDMDNLQLPATLKQFQHKLFGLTISPERLAAIREERRENSRYASLRQCRIEISEVEALFRKNKINYLNTTNYSVEEISTKIIDMMKLNRRMFZ

SEQ ID NO: 299 - protein, 793 aa, Photorhabdus luminescens
MPNNDLTPRNVLWYNQLGMHDIDRVGGKNASLGEMITHLSELGVSVPNGFATTAQAFNDFLEQSGVNQRIYDLLDETDVDDVNQLAKAGAQIRQWVIDTPFTSQLEKDIQDAYQQLSEGEPEASFAVRSSATAEDMPDASFAGQQETFLNVQGIDAVMVAIKHVFASLFNDRAISYRVHQGYDHRGVALSAGVQRMVRSDLASSGVMFTIDTESGFDQVVFITSAYGLGEMVVQGAVNPDEFYVHKSTLNKGKPAIVRRNLGSKKLHMTYADNKEHGKQVRIEDVPASQRNRFSLADEEVEALARQALLIEKHYGRPMDIEWAKDGHNGKLYIVQARPETVRSNQQVMERYQLNEQGQVLVEGRAIGHRIGAGRVKVIHNLNEMDRIQPGDVLVTDMTDPDWEPIMKKAAAIVTNRGGRTCHAAIIARELGIPAVVGCGDATERLQENQSVTVSCAEGDTGFVYQNQLNFTVQSSQVDQLPELDVKIMLNVGNPDRAFDFARLPNDGVGLARLEFIINRMIGVHPRALLEFDQQTPELQQEIKSLMAGYDNPVEFYVGRLTEGIATLAAAFWPKRVIVRLSDFKSNEYANLVGGDIYEPDEENPMLGFRGAGRYVSDSFRRCFALECEAVKRVRNDMGLTNVEIMIPFVRTVAQAEAVIAELASQGLKRGENGLKVIMMCEIPSNAILAEQFLEHFDGFSIGSNDMTQLTLGLDRDSGVVSELFDERNDAVKALLSLAIQAAKRQNKYVGICGQGPSDHQDFAHWLMEEGIDSLSLNPDTVVKTWLGLAKVSZ

SEQ ID NO: 300 - protein, 370 aa, Photorhabdus luminescens
MDKSQPYYDLPKLLFTLIFLSLLIVTSFWVIKPFIFGFVWAGMVVIATWPLLEKLQDSLWGKRWIAVSIMTLLLILLFVIPIALLVSSLLENSAPLIQWTKSPSHFQIPTMTWLNSIPLVGDKLYSAWNSLITDGGNVLIAKVQPYVGEAATWFFTQAANAGRFVFHLCLMVLFSVLLYLKGEQVTMSIRHFAIRLANKRGDAAILLAAQSIRAVALGVVVTALVQAIIGGLGLAVSGIPYATLLTVLMFVCCVAQLGPLLILVPAVAWLYWTGDTTWGTVLLVWSCIVTTMDGFLRPFLIRLGADLPMALILIGVIGGILSFGMIGLFIGPVVLAVAYRLLIAWMNEVPEPENDLAETEKYLEQKFSEZ

SEQ ID NO: 301 - protein, 1020 aa, Photorhabdus luminescens
MIPRISQAPHVSEVAQKFLDTLKEQGFTGDVASSYADRLTMATDNSIYQLLPQAIVFPRSSADVVLLARVAGEKEYQNLTFTPRGGGTGTNGQALNDGIVVDMSRYMNRILEINPAQGWVRVEAGVIKDQLNQYLRPYGYFFSPELSTSNRATLGGMINTDASGQGSLVYGKTSDHVLSLRAVLLGGELLDTRAMDIVQAESIAQEDSVTGRIYNTVLSRCREQRELIVEKFPKLNRFLTGYDLRHVFSDDMRKFDLGRILTGSEGTLAFITEAVLDITPLPKVRRLVNVKYDSFDSALRNAPFMVEAKALSVETVDSKVLNLAREDIVWHSVKELITDIPNKDMQGLNIVEFSGDDQPLIDRQVETLCQRLDELMDGNQAGIIGYQICRELADIERIYAMRKKAVGLLGNSKGAAKPIPFVEDTCVPPQYLADYIVEFRQLLDSHHLNYGMFGHVDAGVLHVRPALDMCDPQQEILMKQISDEIVSLTARYGGLLWGEHGKGFRAEYSPAFFGSILYEELRRIKAAFDPDNRLNPGKICPPMGVDAPMMKVDAVKRGTYDRTIPINVRNTFRGAMECNGNGLCFNFDVKSPMCPSMKVSQQRIHSPKGRATLVREWLRLLTEQGVDPTLLKQGLEQKRPSLRGLIEKTHNSWQAWRGEYDFSHEVKEAMSGCLACKACSTQCPIKIDVPSFRARFLELYHGRYFRPLRDHIVASAESSTPLMAKVPRVFNFFLKQPWIQELSRRTIGMVDLPLLSSPTLPQQLAGHYALSTTLEQLEKMEQAHRDEHVLIVQDPFTSYYDAKVVADFAYLVEKLGYKPVLLPFSPNGKAQHIKGFLSRFTKTAKKTSDFLNRVAELGIPMVGVDPALVLCYRDEYKEILGEQRGKFEVQLVHEWLINTLPEKSDHEEKSGDKWYLFGHCTEVTMLPGSSQQWGKIFHRLGSKLDNISVGCCGMAGTYGHENKNIEHSIGIYKLSWQPALQKLPLERCLSSGYSCRSQVKRIEGQVLKHPLQALLEIIPZ

SEQ ID NO: 302 - protein, 365 aa, Photorhabdus luminescens
RGGNMIDYRVRSVSLLNLVNDIRSKKLIPDAYFQRNLVWREKHKVDFIDTILSGYPFPQIFISKGKIDVDRMITVSCIVDGQQRTNAIMEFIDDKFPVRNKYFNELDGDEKANFLKYEIAVIELDLENDDPKVNDIFQRINRTSNSLTNIEKLASQYSTSDYMLVAKLLTDQIDISWIEDGEAMFKEDPNIPVEFYSWAKTKEVNNFRKLILEKGIYTSSDFIRKVHLIHILNIMSTYLYSFFHRNEKTYDYLNSYSYVFEEKDELIDNFEKTAYIILKMKFTSKSYWLNKANFFTLFLSIVSNVRNKNIINISLLKEKLNYFSDHLPDDYKLAASEAVNDKKERQLRAVYIDKIVSECVSCQLZ

SEQ ID NO: 303 - protein, 503 aa, Photorhabdus luminescens
VYQYMSQSNVEISDDVQTWLSDHRYKEGFFTQVATDELAKGLSEDVVRAISAKRNEPEWMLEFRLEAYRHWLGMEEPHWLKANYPNLDYQDYSYYSAPSCGACSDSCNSQSGAVQGTGSEQANSYLTAEIEETFDKLGVPVREGEAVAVDAIFDSVSVSTTYRDKLAKEGIIFCSFSEAIQEYPGLVRKYLGSVVASHDNFFAALNAAVASDGTFVYVPKGVRCPMELSTYFRINAAKTGQFERTILIADEGSYVSYIEGCSAPVRDSYQLHAAVVEVIIHKDAEVKYSTVQNWFSGGDSAGGILNFVTKRALCEGENAKMSWTQSETGSAITWKYPSVILKGDNSIGEFFSVALTNGTQQADTGTKMIHIGRNTKSTIISKGISAGRSQNSYRGLVKILPGAENARNYTQCDSMLIGTECGAHTFPYVEVQNNTAQLEHEATTSRIGEDQLFYCLQRGISEDDAISMIVNGFCKDVFSELPLEFAVEAQKLLAISLEHSVGZ

SEQ ID NO: 304 - protein, 249 aa, Photorhabdus luminescens
MLSIKNLRVSVEGNEILKGLNLDVKPGEIHAIMGPNGSGKSTLSATLAGREEYEIDDGEITFKGKNLLGFEPEERAGEGIFLAFQYPVEIPGVSNQFFLQTAVNAVRQYRHQEPLDRFDFADFIEEKIELLDMPPDLLTRSVNVGFSGGEKKRNDILQMAALEPTLCILDETDSGLDIDALKIVANGVNSLRDPNRSFIIVTHYQRILDYVKPDFVHVLYQGRIIKSGDFSLAKKLEEQGYGWLIDQQZ

SEQ ID NO: 305 - protein, 426 aa, Photorhabdus luminescens
VRQVAERNQQALARFADLYHCRHGEDSFHASLHWQTAIKTGFPQFRHEDWRYTPLDKLLNQQYSSKTWELTVAQCEQLAISMDCWRVVMVNGCFSPLLSSCEFGPYQLSLLDNKSGLPAPIQQGEIFLHLTESLAQQPLVITLKAGQVAEKPLYLLNITSSHCSEALNSSHYRYHIAVGTNASASVIEHFVSIDGQQPHMTGGRLTAEVGDNAHFTHIKLGVENSASYHFAHNDIVIGRDAQVKSTSFLLGSGLGRHNTSVKLNGEGANLSLNSLLLPQGKEVADTRTYLEHHKGHCESRQLHKTIVMDQSKAVFNGMIKVAPHALKTDGQMTNNNLLLGKQAEVDTKPQLEIYADDVKCSHGATVGRIDEEQLFYLQSRGISRRDAEHMMVFAFAAELTESIEDESLKAIVMNHIKHRLARVERZ

SEQ ID NO: 306 - protein, 413 aa, Photorhabdus luminescens
MTFSVKKVRQDFPVLTQQVNGHPLVYLDSAASAQKPVSVIERESEFCLHQYAAVHRGIHTLSSAATRMVENVRYQIAQFIHAQSHEEIVFVKGTTEGINLIANSYGRKFINNGDNIVITEMEHHANIVPWYMLAEQIGFEIRVWPLNENGELDQAILASLIDSRTKLLSFTHLSNVLGTVNPVRQIIKQARKLADEQEGRLHILVDGAQAIMHKQIDVQDLDCDFYVFSSHKLYGPTGIGVLYGRKSLLDAMPPWEGGGAMIKQVSLQKGITYAEPPWRFEAGTPNITGIIGLGAAVDYVTSLGLDEIQQHEQALMDYAMARLKEVKTLKLYGPEQRQGVIAFNLGRHHAYDVGSFLDQYGIAIRTGHHCALPVMEHYHVSSMCRASLAIYTTQEDIDALVVALQRIEQLLGZ

SEQ ID NO: 307 - protein, 356 aa, Photorhabdus luminescens
MRVSDFTFELPDEMIAHYPQPQRSGCRLLSLDGETGALTHGIFTDVLDKLNAGDLLVFNNTRVIPARIFGRKATGGKLEVLVERVLDDKRVLAHVRASKAPKEGTELLLGDNESLKATMLARHDTLFEIRFDDERDVLSILDDIGHMPLPPYINRPDEEADRELYQTVYSERPGAVAAPTAGLHFDEPLLEALRKKGVEMVFVTLHVGAGTFQPVRVETIEDHIMHAEYAEVPQDVVDAVLACKARGNKVVAVGTTSVRSLESAAKACQDELIAPFFNDTQIFIYPGFEYQVVDALITNFHLPESTLIMLVSAFAGYKNTMNAYQEAVAEKYRFFSYGDAMFIRRNPFACKEKISZ

SEQ ID NO: 308 - protein, 361 aa, Photorhabdus luminescens
MKRVLTFIGVLLFSGLTNTVSATEYTLPAANSRLIGENTTLVVPDDGRSLEAIAAEYKIGLLAMLEANPGTDPYLPAQGSELIIPSQMLLPDTPRQGIVINLAELRLYYFPKGKNNVIVYPIGIGQLGRNTPVMTTSVSQLIKDPTWTPTKNIRKHYAEQGVILPAVVPAGPENPMGAFALRLAAGRGEYLIHGTNADFGIGMRVSSGCIRLRPDDIETLFNAVPRGTRVQIINEAVKYSVEPSGKRYIEVHQPLSKKEDDNPQTLPIVRSADLNKFIDNNKTDKNIVEQAMVRRSGMPVLVSKGIEPETQQDLPEENPEENIVPMEDDVKGAEQAVNNDVSESFKLPPLYQPGPIYRENZ

SEQ ID NO: 309 - protein, 284 aa, Photorhabdus luminescens
MLSDQSNEYFNISIDNGVAHLQLSRPEKANSLALGFWKRFPETVEQLSRSGEVRAMVISAQGNTFCGGLDLQIFASSKEANTANPNEREAMQFSLLQMQEAISVLEHARFPIIAAVQGACLGAGFDLIAACDFCFAAENAKFRIEETNIGMMADLGILQRLQHLIPSGIARYLALTGDTLSAVQAHDLGLVVKVFPSTETLIEGALATARRIADRPPIAINGVKRAMLYSRDHGVYESLQQIALLQASIFSRQDILCSIQAKATGTKSEFQNLSEVGKAFDEPZ

SEQ ID NO: 310 - protein, 208 aa, Photorhabdus luminescens
MDGFDTAWHNAVCTFTNRCHDSHCFYWIFAFCTFARKHNCISTIQNSVSDVTGFRTGRARVFNHRIEHLSCSDNNFASDITFLNHHLLGEDHFFNRNFNAKITTSNHDPVRSFQNFIKIVQTFLIFNLRDDLNVFTAVRFQMFTDFQNIGALADKRSGDEINTLLATKDQILLIFFSQGRQADGNTRQINTFIFPQITVIQNLANNLZ

SEQ ID NO: 311 - protein, 470 aa, Photorhabdus luminescens
MKKTKIVCTIGPKTESEEKLAELLNAGMNVMRLNFSHGDYEEHGQRIQNIHSVMTKTGKQAAILLDTKGPEIRTMKLEGGNDVSLTAGQTFTFTTDTSVIGNKDRVAVTYRGFPADLAPGNTVLVDDGLIGMTVKEVTKSEVICQVLNNGDLGENKGVNLPGISISLPALAEKDKQDLIFGCQQGVDFVAASFIRKRSDVLEIREHLKAHGGENIQIISKIENQEGLNNFDEILEASDGIMVARGDLGVEIPVEEVIFAQKMMIQKCNIARKVVITATQMLDSMIKNPRPTRAEAGDVANAILDGTDAVMLSGESAKGKYPIEAVTIMATICERTDRVMPSRIEAVHCRNLRVTEAVCRGAVETAEKLEAPLIVVATYGGKSAKSIRKYFPDAPILALTTNEVTARQLLLVKGVFTQIVKEIASTDDFYRIGKEAALASGLAKKGEIVVMVSGALVPSGTTNTSSVHVLZ

SEQ ID NO: 312 - protein, 458 aa, Photorhabdus luminescens
VQKYLKEARSLLALGIPVIIAQFSQTAMGVVDTVMAGSVSATDMSAVAVGTSIWLPVILFGYGLLLALTPIIAQMNGSGRRNLIASQTQQGFWLAIFLSIIIIAILYNSKFLIDRQHNIDPILAEKAVGFIHAIMWGAPGYLFYQVLRNQCEGLSKTKPGMVISFLGLLINIPINYIFIYGKFGAPALGGVGCGVATASVYWVMFLLMRWYVKRASSQRDIRPKHRFAAPEWHILKRISALGLPIAMAVFFEITLFAIVALLISPLGVTAVAGHQIAQNFSSLMFMFPISLAAATTIRVGYNLGKKSIENARISAYTGIMVGLVFACLTATFSIILREPIALMYNDNPEVITMASHLMLFAALYQLSDAIQVVGAGVLRGYKDTRSIFYITFIAFWILGLPSGYILGLTDYIVPAMGPQGFWIGFIIGLTASAVMIFARISWTQKQPDEVILQHSTHZ

SEQ ID NO: 313 - protein, 226 aa, Photorhabdus luminescens
MFTGIVQGKAPLVAIDEKSNFRTHVVKFPAELLPGIETGASVANNGCCLTVTKIEGDEISFDLMKETLRLTNLGDLQLGDYVNLERAAKFGDEIGGHLMSGHIITVAEIAKIFTSENNHQIWFRIHDKQLMKYILHKGFIGIDGISLTIGDVVNNRFCVHLIPETLERTTLGKKRLGQRVNIEIDSQTQAIVDTVERVLAQKERERVASQQPETLMEECAINEERZ

SEQ ID NO: 314 - protein, 341 aa, Photorhabdus luminescens
VRGVTPYLKINRIVLMDKSLENMYCCLSHHPAISDKVRNGECIKIFIGSDTEHSDIAQKMYMYKKNFDVKSDFAFLEKTSPDDIKQKISDCDLFIFLYASSTLKNASPQGPEYLTKIRSFITESWKKSVLFKDYGPHFIEAFSEPPASITERNKKLIELSNRSQKIQYTDNKGNSIVGYLEKDHKWTSIDGSGNLDVIPGEIASHIKRLNGSVSFSGTFLSTAPFAIKYGVVNDMMTINIKEGEIIGFDCEHDEFSRDFNLYLNHNHGNRIVEEFGIGTNRGVKALYGRNAGFEERHPGLHLGLGGGVKGSHHLDLIFSGGKIAFDQTVFFDNGYVNDFRZ

SEQ ID NO: 315 - protein, 384 aa, Photorhabdus luminescens
MSSSCIKNPKTAINSWQRMTNEMLEEAGVQINGHNPYDIQIKNANFYKRVLQQGSMGLGESYMDGWWDCERLDIFFYRVLRAGLENKMPNNLKDIVRIAITRLRNLQTPKRSWIVGHQHYDLGNDLFTHMLDPYMQYSCGYWKQAKTLEQAQLDKLKLICEKLALSPGMTLLDIGCGWGGLSAYAAKNYGVSVTGITISAEQQKYAQKQCTNLDVKIILKDYRDLHEQFDKIVSVGMFEHVGPKNYATYFDVVQRNLKPDGLFLLHTAGSNKTKTSADPWISKYIFPNGCLPSIEQIAHTSKSRFVMEDWHNFSADYDRTLMAWHERFITCWPEIENNYSPTFKRMFSYYLNACAGAFRARDIQLWQIIFSLKGIEGGLRVARZ

SEQ ID NO: 316 - protein, 407 aa, Photorhabdus luminescens
MIFKESNQMKNSSQFMFYLAGLSMLGYLAIDMYLPAFGTMQQELATSAEAISASLSIFLAGFAFAQLLWGPLSDRFGRKPIIITGLSLFSIGCLGMMWVTDATQLLVLRFIQAVGVCSAAVSWQALVIDRYEANRTKRVFATIMPLVALSPALAPLMGAWLLQHGGWRIIFLVLLAITLLLLFFTLFLQENRNNRETQVQTNNVSFLTLLKSPLFSGNVLIFASCSAGFFAWLTGSPSILGEMGYTPDDIGLSYIPQTLAFIVGGYGCRSILAKIKSDIIFPYLLIGYAISMIVLYLIAKFDEPTLFTILVPFCFMAAMNGALYPIAVANALSAYPQDSGKATALQNTLQLGLCFIASLIVSAFINNPLISTTTVMVSTVVPMALGYFIQWKKNADRCIQTVEQNSZ

SEQ ID NO: 317 - protein, 303 aa, Photorhabdus luminescens
MWSEYSLEVVDAVARTGSFSAAALELHRVPSAISYTVRQLEEWLAVSLFERRHRDVELTEAGAMFIKEARSVIKKMIDTRHQCQQIANGWRGQFSIAIDLVVKPERSRQLILDFYHHFPDIELFIHQEVFNGVWDALVNSRVDVAIGATRVAPVGERYSFRDMGFMPWLCVVSADHALTQLPGLLSDDQMRPYPSLCLEDTSRNLPKRDTWNLDNQRRLVVPDWESGLSCLNEGLCVGMVPKHRAMPLIRQNKLAVLELEQPLPDSPCCLAWVQNSHSPALSWLLDYLGDSETLNAEWLQDEZ

SEQ ID NO: 318 - protein, 199 aa, Photorhabdus luminescens
MNFLAHLHLATLADSSLLGNLMADFVRGNPEGQYSADVVAGIRMHRRVDVLTDTHPLVIQARHLFSNSYRRVAPITLDIIWDHFLSLNWDKLVPTYSLPAFIHHARSQIEPHLYYTPEKFQELNAFLWRQNWLIRYADLAFIADVLKGMARRHPRLSALSGSFQDIEQHYADFDALFWQFYPYMMEKAENKDFYCLPQZ

SEQ ID NO: 319 - protein, 342 aa, Photorhabdus luminescens
MATIKDVAKHAGVSTTTVSHVINKTRFVAEDTKAAVWAAIKALNYSPSAVARSLKVNHTKSIGLLATSSEAPYFAEIIESVENSCYSKGYTLILCNSHNNIDKQKAYLAMLAQKRVDGLLIMCSEYPEQLLGMLEDYRNIPMVVMDWGQARSDFTDTIIDNAFHGGYLAGRYLIERGHRDIGAIPGPLARNTGGGRHQGFLKALKEANIPIKEEWVIQGDFEPESGYKAMHQILNQKQRPTAVFCGGDVMAMGAICAADELGLRVPQDISVIGYDNIRNARYFSPALTTIHQPKERLGQMAFSMLLDRIINKREDAQTIEVHPRLVERRSVVDGPFVDYRRZ

SEQ ID NO: 320 - protein, 218 aa, Photorhabdus luminescens
MSDKKAPNVLSGRFRGYYPVVIDVETGGFNAKTDALLEIAAVTLEMDGEGWLTPGESLHFHIEPFEGANLEPAALEFTGIDPLNPLRGAVSEYEALHAIFKMVRKGIKNNHCNRAIIVAHNANFDHSFVMAATERTGLKRNPFHPFATFDTAALGGLVLGQTILAKACITAGIPFDNNQAHSALYDTDRTAELFCEMVNRWKQLGGWPLTTTAEKTGZ

SEQ ID NO: 321 - protein, 398 aa, Photorhabdus luminescens
KEKRKRAPCLRPPLNLNRRSIMANRKPRRGSLLTVDEVYRKPVGPAHDPKSLYALLLRFVVWRQERNWSESTLKVQTHHTYHFILWATERGLYYAADITRPILERYQRYLYQYRKTNGEPLSTRTQRTQLEPLKVWFKWLTKQNLILANPAADIELPRLEKHLPRYILTIDETEQILAQPDLTTLQGVRDRALMELLWSTGMRRGELTRLDVYSVDGKRKTVTIRQGKGNKDRVLPLGERALSWLQRYQQQVRPQLIVNPDVKALFVAMDGLDGLQANGISNLVTAYINAVGIEKKGACHLFRHAMATQMLENGADLRWIQAMLGHASVESTQVYTQVSIRALQAVHASTHPAEQMADEKVSDADEVGLLADLYADDNADTDTPPDSSEPTSTPDSRZ

SEQ ID NO: 322 - protein, 1106 aa, Photorhabdus luminescens
SMARIPDTDLAHLKQTVSLLGLARKQGRTMKKRGEDYVLRCPFHNEKTPSMVISPAKNLYHCFGCGAAGSVLDWVIQTEGVTLKIGIRRLRELAGLPDMDNAVVAASSLAAQPELQAAPLPRPKLADLDDDGQALLHQVIDFYHQHLLASPEAKAWLERRGLNHPELVSHFKLGYAGHHGIGGSAGLLPSKSSQEGQQLRDKLSGLGVLRTTTRQDHFRGCVVVPVIGWTESVNVTSRGRVLQLYGRRTQPDYKVLKDSPKHLYLPSPLAGVWNESAMQASNEIILCEALIDAMTFWCAGFRNVIAAFGVNGFNREHLEALQYHGVKRVLIAFDRDEAGDRGATSVAADLLEAGIEAWRVQFPPGMDANDYALKSGNAEHALGLALQQAVWLGQGTAPGAVFSHERPVSPTVTEKPQSAGVAKPAALAAPSALTVAPVPCERTACGELLMKSGPRVWRVRGMKKSPVPDVMKVNVQVRDETSGLFHVDTLDMYHARHRQNYISTAAQELECEPSVIKREAGRVLLMLEQQQDAQQQADAEASGTTAVTVSAEDEAAALALLTSPNLTEQIINDMAACGVVGESTNLLTGYLAAVSRKLDKPLAVLIQSSSAAGKSSLMDAVLNLMPEEERIQYSAMTGQSLYYLGETSLQHKILAIAEEEGVRQAAYALKLLQSDGELKIASTGKNEQSGELVTREYKVQGPVMLMLTTTAIDVDEELLNRCLVLTVNESREQTQAIHAMQRHRQTLAGLLADSEKGYLTQLHQNAQRLLRPLKVVNPYAHQLTFLSDKTRMRRDHMKYLTLIQAIALLHQYQREVKKTTHRGQVIEYIEVTQDDIALANRLAHEVLGRTLDEMPPQTRKLLLLIQEMVNEQAQIQHCQPNEVRFTRRDIRAFTHWSDSQLKNHCQRLTEMEYLLLHGGSRGHLLHYELLWDGEDNGAAHLCGLLDVGEPDSETAGSERKSDPKGRKSSPSPGQVWPESGEEKPASSPIAQGPAGAQVRADENAVIRENNHRDALPVPDRDKTPEAVPTGQESKSDLNKRKSASSLGQVRAKSGVKKSPSEQAEHGFSVPQVGVTEDTVIKGKKKTRPLSAPTPQSQPEVNHGKPZ

SEQ ID NO: 323 - protein, 323 aa, Photorhabdus luminescens
YRLKEMSRLTLVGIYCSLPGNIRRLMMAIENNYLSVNELDSFAHQARTCEGESCKQVIKDMVDTNIRNQQEMMDFCNSNPTQCAQKYGYLVDQWPVFERTLKNMDRDGTLPVEFRNYLSAVNTLGQAATGKVGELGWTKRFEAMGMSQETAAAMAMTLPVIVEGSKGPKSSPTTKGSTGAVVNTEKAALEKIGKNSQGTTNLGDKSANTIYHQQLIKNAEKISTAKPGQQVAAPRDLNEQILWNQVKANPSSGDPLRGMNKDPRFPTDAGFQKMQVTHELPDGSNITIHYQYNSTTGKAYDMKITTPKRPEIQPKPSITDKKZ

SEQ ID NO: 324 - protein, 2143 aa, Photorhabdus luminescens
IRKRDSTMDKRHNSMARVTSYLLIYLTAIQPLHPAMAIGITPDNNRTQVQNQGNVPVVNIATPNDAGISHNTYQEFNVATQGAVLNNATQAAQSQLAGQLNANPNLKGKAAELIINEVTGSGRSDLQGQLEIVGNKANVMIANPNGITCDGCGFINTASATLTTGKPQFDKQGALEALEVKKGQITIGGKGLDGKTTDYVDIISRAAELNGKIQANTLSLTQGANRVSLKDGTVKPIAGEGAKPQLAVDTKALGGMYANKIRLVATEDGVGVNLTNLTTTQDAISLTAEGKIILGEVQAKTDININSKAIETAAQSHVQAGQHLKLTTETLRNQGQIRADGDVTIKATQLDNVNPTKQSHPIITAGKNNSITANEINNVGELSAGQNLTLTGKNFSTKAIKDNQQNIIGKLSAGGDLTAVFKEGFSFDFNKEHFKAGKKPTDLALITGKNISLTARDLANRASMRAEQNLAVDAETIYLGQGNLKAGNHVMLDGKSHLDVNGYDISGRDVTLLASRGLLSVVSGDDYTPEGIRVLTTLSADNILRIIAEGPINIADTLINRAKNIFLATNDKLEIYASGDLIDEQSSLNDGAKQAFINQRLRQLSQLQADENIEIHAGKIVDLRSISLTAGKDITLTSGGTLDVSKITAEDPYEYEDEHGTGYEKHYEYENADDEEDEQSYPQFQLPIASSIITAGNNLTLNAGGDIIDTEATLSAKGVTAIVKNNAELHSPSGRYNSVEGKYTPVTSALIACALSHAPQLTINASEVEGEVPGIKLADKQTRITSKNNHPIIHIAAPNARGVSHNRYQEFNVGASGLVLNNATEATQSVLAGQIGANPHFNGQSAELIINEVVGTLASNLQGLLEVAGQKANVFIVNPNGMTCNGCRFVNTPAVTLSTGKPVFDKDGALAALEVKKGAITLGEKGLDATAQDSIAIISRTTKLNGKLQAKSLTLTQGPNQIDFKRGTLVPMTGEDYGPWEAIDTGLLGGMYANKIRLVSTEPGKVVNLTNLTATQGDISLTADGKVTLGDVQAKTDITVNGKDIDMVKKSHMQAGQHLILTTDTLQSWGRIRADGDVTIKAKTLSLDGGNITAGNQVLLQGKNSFTVRGTDISGHDITLIANSYNTSVSPSDTSESTQVLPIISAVNTLRILSEQGISLSDTLINRAKNIFMASNGWIGINQHLAADENIDLHAGGGIKLDGISLTAGKDITLTSGGSINIGKVTAGNNLALIADSNITETALSAEGTAAVAQYSTALHLADGRYTPVTSALIDLALDNAPQLTINIPEIAGGIPGIQLADKRARIAVRNNLPIIHIAAPNSRGVSHNRYREFNVGASGLVLNNATEATQSVLAGQIGANPHFNGQSAELIINEVVGTLASNLQGLLEVVGQKAPVFIANPNGITCHGCGFINTPAVTLSTGKPVFDKEGALAALEMKKGVITFDEKGLDATAQDAVDIISRATILNGKVQAKNLTLTQGANRIDFKRGTLIPIAGEGDTSWKAIDTGSLGGMYANKIRLVSTEAGKGVNLTNLTATQGDISLTADGKVTLGNIQAKTDITVSSKSIKTAEQSHVQAGKEITLAANTLNNTGKIIAEGDMRLFIDHLYNQYKGLIQANNHLWLQKDASGNLSTEINNTSATLKTHNGDIIIRAKALNNAWDASVAAGMNAYIHATKLDNDESQFHAKKNLILTGHDFNRGMDGKLSADLNVVADFIHQLRGTAFISAKNILLHAGEIINIGHLNAGNDLSVIAERRMYAGQSTLEAKRNLTLIAGKDIEAFQVGLKGENIELLTREGDIQMWGDGSRISADNNLRIFADHKLDLYGLLFDKSNTITLNAGHEIDTSRVKLAVQKNLTLIAGKGITARETGLKGENIELLAREGNIQMGGHDSRISASNNVQMFASNKLDLQGLLFDKANNITLNAGHEINADRVKLAANKNLTLIAGKDITARQAELKGENVELLVREGDIQMGRNRPHELLASISADNHLRISAGNDLDLSGTQLDKSHNLTLSAGRNLNASRSQLKAAGNINLFAGNDLMLRQAGIRAGQQVMLSAGRDIDISRPNTPESLFYLSELDGLDKFSELGTQITAGDHLQLSAGGDIAGIARLISTKGNVSVNAGRDLLFSARKYSPINDGDZ

SEQ ID NO: 325 - protein, 959 aa, Photorhabdus luminescens
MTQTLSQLENQGEFIRRHIGSSAEQQKEMLATVGASSLNDLTQKIVPRDIALPEPPDVGGGATEQQALAELKAIASQNKRYQSYIGMGYAPAVLPPVILRNLLENPGWYTAYTPYQPEVSQGRLESLLNFQQVTIDLTGLDIASASLLDEATAAAEAMAMAKRISKLKNADRFFVADDIHPQTLDVVRTRAETFGFDVIVDKAEKVLELDGVFGVLLQQVGTTGEVHDYADLIAQLKQRKIIVSVAADLMALLLLTAPGKQGADMVFGSAQRFGVPMGYGGPHAAFFASRDEFKRSMPGRIIGVSRDAAGNTALRMAMQTREQHIRREKANSNICTAQVLLANIAAMYAVYHGSKGLKRIAGRIHRLTDILAVGLQKAGFTLRYKTWFDTLTVEVADKAAVLARAEKAEINLRTDTYGAVGITLSEATRRDDVIKLFSVLTGTDDKLDVEALDKELMTESHSIPASMLRSDEILLHPNFNRYHSETDMMRYMHRLERRDLALNQAMIPLGSCTMKLNAAAEMLPISWPEFNELHPFCPPEQAQGYQQMISQLSHWLVQLTGYDVVCMQPNSGAQGEYAGLLAIRRYHESRGEGHRHICLIPSSAHGTNPASAHMAGMTVVVVSCDKEGNIDLVDLREKAEESGNELSCIMVTYPSTHGVYEETIRQVCEIIHQYGGQVYLDGANMNAQVGITAPGFIGADVSHLNLHKTFCIPHGGGGPGMGPIGVKAHLAPFLPGHSVVQMDGLTEQRAVSAAPFGSASILPISWMYIRMMGSQGLKQASQTAILNANYIAARLKNDYDVLYTGHNGYVAHECILDIRPLKEEFGISEMDIAKRLIDYGFHAPTMSFPVAGTLMVEPTESESKVEIDRFVDAMLAIRAEIGKVAKGEWSLEDNPLVNAPHVQAELVSDWSHSYSRETAVFPTLETKANKYWPAVKRLDDVYGDRNLHCSCAPVSDYQZ

SEQ ID NO: 326 - protein, 299 aa, Photorhabdus luminescens
MAKQTPLYDQHLACGARMVDFHGWMMPLHYGSQMDEHHIVRTHAGMFDVSHMTIVDLHGTGCRDFLRYLLANDIAKLTEKGKALYTGMLNASGGVIDDLIVYYLSNDFYRLVVNSATREKDLAWINEHVANYPVDIQVRDDLALIAVQGPDAQAKVESLLNDEQKQTIAGMKPFFGVQAGDLFIATTGYTGEAGYEVALPKEQAADFWQKLLSVGVKPAGLGARDTLRLEAGMNLYGQEMDETISPLVANMGWTIAWKPEDRQFIGREALEKQREEGTEQVGWFGDERKGCVTRWFSGZ

SEQ ID NO: 327 - protein, 407 aa, Photorhabdus luminescens
MQSFDVVIAGGGMVGLALACGLQGSGLRVAVVESYPPTQSVVAGEEYTLRVSAINAASERLLQHLGVWQDILDMRTSPYQEIEVWERDSFGRIRFSAAEYGLEYLGHIIENRVIRETLWKKVDSLSDVTILAPAALKQVAWGENETFMTLSDGRMLTARLVVGADGAHSWLRQHADIPLTFWDYEHHALVATIRTEEPHGWVARQVFYGEGILAFLPLADPHLCSIVWSLPGEVAEQYKQLDHRRFNQQLAVDFDLRLGQCELMSERLTIPLTGRYARNFAAHRLALLGDAAHTIHPLAGQGVNLGFMDVAELIGELRRLHGQGKDIGQHFYLRRYERRRKHGAAVMLAGMQGFRQLFDGNNPAKKLLRDVGLSLADNLPGIKPKLLRQAMGLNDLPNWLCSAEKIZ

SEQ ID NO: 328 - protein, 393 aa, Photorhabdus luminescens
MNVIIVGGGMTGATLALAISSLSKGQIHVSLIEAAEPEQKHPGFDARAIALAYGTCQRLQQIGVWSALEDYVIPITHVHVSDRGHAGFVNLYAKEYNIPALGNVIELYDAGQGLFGLLKNAPGVTLYCPSKVMAVERTLSSVAVILDSGERLQGELLVAADGSHSAIGHACNIQWQRHAYEQVAVITNVLTSEHPRGRAFERFTEYGPLALLPMSEGRSSLVWCHQLARRKEIAGWNNEQFLRQLQQAFGWRLGKILETGQRYRYPLTLSTANQQISHRLALVGNAAQTLHPIAGQGFNLGMRDVMTLAQIVSEAFAAGQDIGAYQVLANYQQQRVLDRENTIDITDGLIRVFANRYFPLQIGRNFGLMMMEKCPPMRDILARQTLGWVAQRZ

SEQ ID NO: 329 - protein, 201 aa, Photorhabdus luminescens
MVLVTRQAPDFTAAAVLGNGEIVGNFNLKKHLNGKPAVIFFWPMDFTFVCPSELIAFDHRYEEFKKRGVEVIGVSFDSEFVHNAWRKTPVDQGGIGEVKYAMVADTKREIQKSYGIEHPEAGVALRGSFLIDKNGVVRHQVVNDLPLGRNIDEMLRMVDALQFHEEHGDVCPAQWEKGKEGMSASPDGVAKYLSQNAAKLZ

SEQ ID NO: 330 - protein, 439 aa, Photorhabdus luminescens
MIKQEYLSRRQALLAKMAPASAAIIFSSPPAPRNSDNEYPYRQHSDFLYLTGFNEPEAVLILIKSDDTHNHSVLFNRASDLTAEIWFGRRLGQEAAPEKLGIDRALPFDDIKEELYLLLNGLNVVYHAQGEFAYADEIVFHALDILRKGGRRNLSAPLSITDWRPWVHEMRLFKSKAEIEAMRRAGKISAQAHRRAMKVCRPGMFEYQLEAEIHHEFTHQGARYPAYNTIVGSGENSCILHYTENESRMKEGDLVLVDAGCEYLGYAGDITRTFPVNGKFTRAQREIYDIVLKTLNVSLELYKPGTSINKVTEHVVRIMVEELVKLGIMHGEVEHLIETKAYRQFFMHGLGHWLGLDVHDVGDYGVERDRILQPGMVLTVEPGLYIAPDADVPMEYRGIGIRIEDDILITETGNENLTASVTKEADEIEALMAEAKQGZ

SEQ ID NO: 331 - protein, 414 aa, Photorhabdus luminescens
MVKVSLEKDKIKFLLLEGVHQSTVENLRAAGYSNIEYHKGALDPKELKEAIRDTHFVGIRSRTQLTEDIFQAAEKLVAVGCFCIGTNQVDLKAAAKRGIPVFNAPFSNTRSVAEMVLGELLLLLRRIPLANAKAHRGVWDKQAKGCYEVRGKKLGIIGYGHIGTQLGILAENIGMDVYFYDIENKLPLGNAHQVRHLSELLNMSDVVSLHVPETPSTKNMIGATELTLMKPGSILINASRGTVVDIPALCDALESEHLSGAAVDVFPVEPATNNDPFESPLRKFDNVLLTPHIGGSTQEAQENIGYEVAGKLAKYSDNGSTLSAVNFPEVSLPVHADDTNRFLHIHENRPGILNSINQVFAEQDINIAAQYLRTSGDMGYVVIDIVTENPAQAEMVFQKLKALPGTIRSRLLYZ

SEQ ID NO: 332 - protein, 220 aa, Photorhabdus luminescens
MTQDELKKAVGWAALEFVTPGTVVGVGTGSTASHFIDALGSIKDQIEGAVSSSEASTEKLKSLGIPVFDCNEVDSLDIYVDGADEINGNMQMIKGGGAALTREKIIAAIAKKFVCIVDASKKVEVLGKFPLPVEVIPMARAYVARELVKLGGVPKYRQNVVTDNGNVILDVHNLAILDPAELENKINRISGVVTVGLFANRGADIVLMGTLDGVETITQZ

SEQ ID NO: 333 - protein, 269 aa, Photorhabdus luminescens
LSIVFAVAHPASAMQAEQKTVTNGVASIEYSVRGKGPLLVVIASTGRGTAEFAPLADRLARRGYRVALPEPRGISGSTGPMENVTFHDFADDFAAVVAAEGGKAIVVGHAYGHWIAKTIASDYPEMTRGIVLLAGAAKSWPSELSDAIMVISDPKSTREERLTKLKLAFFAAGNDPTPWLEGWHSDVIKSQSSARKLTNRKDWWAGGTAPILDLQAGSDPFRPESSRMEAKDEFGNRVTVAVIEGASHALPAEKPIEAAMQLPIGPINZ

SEQ ID NO: 334 - protein, 464 aa, Photorhabdus luminescens
LEKKLGLTALTALVLSSMVGAGVFSLPQNMAEIASPAALMIGWGITSVGILFLAIALLLLSRLRPDLDGGIFTYAKEGFGELIGFCSAWGYWLCAVVANVSYLVIVFAALSFFTDKGGIVIFGDGNTWQSLLGESILLWFVHWLVLRGVQTAAGINKLATMAKLLPLGAFIILAAIAFKMDIFHFDFKGIDLGVPVWQQVKDTMLITLWVFIGIEGAVVVSARAKKRTDVGIATMLAVVAALTIYILVTLLSLGLVPRPELAAMRNPSMANLMVGLVGSAGEIIIAAGLIVSVCGAYLSWTIMAAEVPFIAAQHGSFPKVFNRQNRNNAPSSSLWFTNGAVQLSLVLIWLSGSNYNSLLTIASEMILVPYFLVGAFLLKVAFDRSNKGLLLIAVGACIYGIWLLYASGLMNLLLSVVLYAPGLIVFLYARRQNPQKNSLHLAEKLTITALLITAIPATGLLIKZ

SEQ ID NO: 335 - protein, 302 aa, Photorhabdus luminescens
LIEVVKSLISPLQESDEIYIREVILKPIPEFEFPWKFSKFVDVFPETVQLHPPELAPLNLEDEEPFDLVILGYQVWYLSPAPPIVAFLKSEEGKRLLNGRPVVTVIACRNMWLIAQETVKRLLHESGAYLRDNVVFVDKANFFATVFTTPIWLMTGKRQPFPNLPRAGVSEEDVKDATRFGDALLAALKTDKEKVDAPMLKGMGAAVVDQAFIFGERAAHRGFRFWSGLICRVGKRGIWVRRSLLALFVTYLILMVLVVFPISVVVRRLLSPLLKERLNELQKYYEQPSGSARYDDKEINKZ

SEQ ID NO: 336 - protein, 383 aa, Photorhabdus luminescens
MSNNVYITKVSAFMPGNPIDNNTMESVLGFVGGRPSRSRHIVLRNNGIKYRHYALDPETGEATYTSAQLAAEAVKGLVDEHFSLDDMQSLAASSGTSDQIIPGHGVMVHGELKNKPCEVISTSGACAAGMTAMKYAYLSVLSGATSNAVSTTSEVPSTVLHARNFQSENEARVAELERRPEIAFEKDFLRWMLSDGAGAALLENKPRPDGVSLRIDWIDIYSFANEQETCMYSGGEKLADGSLKGWAQMSQADWLAYSVFCIKQDVRYLNERVVKFTLTEPLRRIVADRNLSSESIDWFLPHYSSEYFRMKFSEGLDDINFSIEQERWFTNLTVKGNTGSASIYIMLDELMKSGKLKKDQRLLCFIPESARFTGAFMHLTVVZ

SEQ ID NO: 337 - protein, 318 aa, Photorhabdus luminescens
MKLKTTIIAAAVLSLTGITTVQAAQELSPEKAAELKPFKRITVTGPFNAIYEAADAVSRRADKMGADGFYIQSLDDLNNSGNLRVTADLYHKDAEKIDNSPKYRLFRGIKELPKAEAVTLEPFDTVTINGFYDNEPDLNEAIAKEAKKKGAAAFFIVRQVAINDGGNQTVTAYVYKDDAPKRQIQADEAVIPADSDSGRIALAAGGESAKKVEIPGLASSTSTSNSVGRFFETQYSKGKRYTVTLPDGTKIQELNKVSAAQMVPFDSITFSGYYNSMPDVSYEVAKRAAAKGAKYYHITREWQSSGGTSTISADLFKZ

SEQ ID NO: 338 - protein, 510 aa, Photorhabdus luminescens
MRIGVPKERLANEARVAATPNTVEHLLKLGFNVVVESGAGHLASFEDSAYQQVGAEITDRHNIWRSDIILKVNAPEDDEIALMREGSTLVSFVWPAQNPELLQKLSDRKVTVLAMDSVPRISRAQSLDALSSMANIAGYRAIVEAAHEFGRFFTGQITAAGKVPPAKVMIIGAGVAGLAAVGAAGSLGAVVRAFDTRPEVKEQVQSMGAEFLELNFEEEAGSGDGYAKVMSEAFIKAEMALFAEQAKEVDIIVTTALIPGKPAPRLITKEMVESMKPGSVIVDLAAQTGGNCELTQADKLVITANGVKIIGYTDLPSRLPTQSSQLYGTNLVNLLKLLCKEKNGEINIDFDDVVIRGVTVVKEGEMTWPAPPIQVSAQPQAKPASIKAEKPAAKPVSPWLKYGLLALAVILFGWLANVAPKEFLSHFTVFALACVVGYYVVWNVSHALHTPLMSVTNAISGIIVVGALLQIGDGGWVSFFSFIAVLIASINIFGGFTVTQRMLKMFRKDZ

SEQ ID NO: 339 - protein, 463 aa, Photorhabdus luminescens
MSSGVVTAAYIVAAILFIFSLAGLSRHESSKRGNIFGITGMAIALIATIFGPDTGSVVWVILAMVIGAVIGIRLANKVEMTEMPELVAILHSFVGLAAVLVGFNSFIAHDSFAEPVMENIHLTEVFLGVFIGAITFTGSVVAFGKLCGKISSKPLMLPNRHKLNLAALVISFVLLITFVKTDSTGLQVFTLLLMTAIALVFGWHLVASIGGADMPVVVSMLNSYSGWAAAAAGFMLSNDLLIVTGALVGSSGAILSYIMCKAMNRSFISVIAGGFGTDGSSTGDDQEMGEYRETTAEDVAELLKNSTSVIITPGYGMAVAQAQYPVHDITAKLREKGVNVRFGIHPVAGRLPGHMNVLLAEAKVPYDVVLEMDEINDDFSDTDTVLVIGANDTVNPAAQEDPNSPIAGMPVLEVWKAQNVVVFKRSMNTGYAGVQNPLFFKDNSQMLFGDAKASVEEILRALZ

SEQ ID NO: 340 - protein, 587 aa, Photorhabdus luminescens
MLKTWKTPLVIISLLVSSHLYAASEPAVEAKNGMVVSSQHLASQVGVDILKMGGNAVDAAVAVGYAQAVVNPCCGNIGGGGFMTIHLTDGTDTFINFRETAPSAASADMYLDKEGNVIKGASLYGYRAAGVPGTVMGLDSTLKKYGKLSREQVMAPAIKLAREGFILARADTDILDTTIKRFRKDPEAARIFLRKDGSPYQPGDRLIQTDLANTLELIAKKGQDAFYHGNIPKLVAEAAKKSGGIITEADFANYKISETTPVTCHYRGYKFISSPPPSSGGVTMCEILNILEGYNLKEMGFNSADYIHTLTEAMRHAYMDRNTYLGDPEFIKNPIDHLLSKHYAESLRKKIEPGKATLSENIQPGIGPHEKPETTHYSIVDKEGNAVSTTYTINGLFGAVVIAPGTGFFLNDEMDDFTTKIGEKNLYGLIQGATNSIAPGKRPLSSMSPTLVTKDNKTFLVLGSPGGSRIISITLQTALNIIDHGMSPQEAVNSPRIHHQWLPDEVYYEQRGISKDSLNLLEKMGYKMVEQIPWGAAEVIMVGLPKTTSTSAKSSGNDATVSGQVRENHLYGANDVRRPAGAAIGYZ

SEQ ID NO: 341 - protein, 305 aa, Photorhabdus luminescens
MMGVALLAYGYGLRHAVDADHIAAIDNVTRKLMQQGKSPIAVGAFFSLGHSTIVILACFAIVLTSMAFKDQMGWVHDYGGIVGTLVSACFLLAIALINLLILKSVYQKFQEIKRGRNLAKSDLTTLETTPGGIMTRLFHSVFRLVSKSWHMYLVGFLFGLGFDTATEVGLLSISAAGSLSGLPLWSLMVFPALFTSGMALIDSLDNFVMVGAYGWAFSQPTRKLYYNMTITAASVAVALFIGGLEALGLIAEQWDLHGVFWDTIGTLNDNMGNVGFWVVGIFILFWTLSVMNYRWRGYDTLEIKZ

SEQ ID NO: 342 - protein, 572 aa, Photorhabdus luminescens
MPTISRQEYVGLFGPTTGDKIRLGDTNLFIEIEKDLRGYGDESVYGGGKSLRDGMGADNRMTSENILDLVITSVTILDARQGVIKADVGIKGGRIVGIGKSGNPNMMNGVTPGMVVGVSTDAISGEHLILTAAGIDTHIHFISPQQVEHALSNGVTTFFGGGVGPTDGTNGTTVTAGPWHIHRMLRAFESLPVNVGILGKGHAAVAMPLVEQIKAGVAGLKVHEDWGATNSALRNALRVADEMDIQVAVHTDSLNEGGYVEDTIDAFEGRTIHTFHTEGAGGGHAPDIIKVASQMNVLPSSTNPTLPYGINSQAELFDMIMVCHNLNPKVPADVAFSESRVRPETIAAENVLHDMGVLSMFSSDSQAMGRVGENWLRVMQTAHAMKAARGKLPEDAAHNDNFRVLRYVAKITINPAIAQGISHVLGSVEVGKMADLVLWEPRFFGVKPKLVIKGGMINWAVMGDPNASLPTPQPTFYRPMFGALGKTLQETCVTFVSQAAMELGVKESLGLERQVMAVHNCRAISKKDMVRNAETPTIEVDAETFAVRVNGEYATVKPVRTVALNQRYFFSZ

SEQ ID NO: 343 - protein, 199 aa, Photorhabdus luminescens
MIVIEQILGNAKKDVFWRDRLQGISPDILVLSQWEAQKSRCRKSTLNGLDLGISLDRHQILSDGDVLLWDEAKGLAVIVQMSLRDVMVIHLKSLLSLDVETVMKTSFELGHALGNQHWKSVIKYNQIYIPLTVSTKVMDSVMKTHGFHALPYSFVKGEEILPSLNNSEARLLFGGAEDSATHVHVDNTFLNQHVIKLKZ

SEQ ID NO: 344 - protein, 229 aa, Photorhabdus luminescens
MNALRLIRIMQFADSVLPVGAFSFSNGLESAIQSKIVYDVATLSDFTRTALLQAVSSDGRAVMAACQALNSGQHDAAISHDWAIFNRKLNEESRTMVTRMGKKLAEMAVEVTGESLIAWWLAQIKSDIAAGTYPITLAVVMSALGAAPREVIVMHQYGVAMTILSAAIRLMRVTHIDIQRILFSLNQDIELFCDEAEKGGIEQMTSYAPMTDVLAALHVSAFTRLFSNZ

SEQ ID NO: 345 - protein, 212 aa, Photorhabdus luminescens
VKKITRIGIGGPVGSGKTAVIEVITPILIQRGIKPLIITNDIVTTEDAKQVKRTLKGILDEEKILGVETGACPHTAVREDPSMNIAAVEEMEARFPDSDVVLIESGGDNLTLTFSPALADFYIYVIDVAEGEKIPRKNGPGLVQADILVINKIDLAPYVGASLAVMEHDTQVVRGQRPYILTNCKTGEGVETLVNMIMRDFLFTHSLQATQZ

SEQ ID NO: 346 - protein, 322 aa, Photorhabdus luminescens
MTSTRLPQNIGEACQQANNLGVNAPELARFQDEPPQMASGDVGKSGYLRLGFARRGDRSILAQMKRRVPYLVQRALYWDEALPQMPCVFMISTSGCILQGDRLALDIHVAPEAFGHVTTQSATKIHSMENNYAAQVQTIQIEQGGYLEMMPDPVIPHSGSRFITDTQITIHPTATLIYSEIIMSGRKYHLADQGFKFDVYSSRITATDFDGKILFTERYVLEPKKQSLNSVGVMGPFHVFGNVILLTPQLHHDRILARMAPQYDAETGIASGTSRLPHQCGLIFKVLGKETYQVKAGIRLFWRIAREEILGVTLPEPFIWRZ

SEQ ID NO: 347 - protein, 315 aa, Photorhabdus luminescens
MANYQNLLVVIDPSQDDQPALRRAVYIVQRNGGRIKAFLPIYDLSYEMTTLLSPEEGSTMRKGVTSQRTAWLKQQAYYYLEAGIDIEIKVVWHNRPYEAIIQEVITGNHDLLLKMTHKHDKLGSLIFTPLDWQLLRKCPCPVWMVKDQIWPDQGSVVVAVNLSNEESYHHELNLKLVKETQELANQVMKNPEIHLVSAYPVAPLNIAIELPDFNPSVYNHALRGQHLIAMKELRQTFCIDEKYTHIHEGLPESVIPQMCDEMNAGIIVLGILGRTGLSAAFLGNTAEHVIDHLKCDILTIKPDGFECPIKAAKEZ

SEQ ID NO: 348 - protein, 252 aa, Photorhabdus luminescens
MIQEKRVIRRIQSGGCAIHCQDCSISQLCIPFTLNEHELDQLDNIIERKKPIQKGQTLFKAGDELKSLYAIRSGTIKSYTITEEGDEQITGFHLAGDLVGFDAILNTQHPSFAQALETSMVCEIPFETLDDLSGKMPNLRQQMMRLMSGEIKGDQEMILLLSKKNAEERLAAFIYNLSRRFAQRGFSPKEFRLTMTRSDIGNYLGLTVETISRLLGRFQKNQTLGVKGKYITIENMDKLSELVGKKSVSITZ

SEQ ID NO: 349 - protein, 219 aa, Photorhabdus luminescens
MENYKNVHVLPKSQYLTSLHTKARNRKAEQSEFVFYSDRIIRLLLEAASELLPYTSHNIQTPIGDIYNGAILNTKLCGVSVIRAGESIEGEYRRMYPDSPMGKILIQRDKLTKLPHYYYSNLPDDIAERTILLFEPMLATGGSLAKAIDLLKEREVPEDNIIVVNFLSSPVGLNRIMTSYPTIKLITSSIENGLNKDAFMNPGIGDFGDRYFGTYKPSZ

SEQ ID NO: 350 - protein, 223 aa, Photorhabdus luminescens
MNKIIIFDLDGTLFDTSRAIVETFNAVFKGLNIPLVGNENICTTIGLPLEKAFATLLNISPEEALIAKAVEQYQLQYRRCILPKAKELLFPGVEDGLISLNKKGVKLSVATSKFTASATALLQAAGIDVVFDEVIGADHVSKPKPDPESGRKILEYYGATPEMAVMVGDTTHDIHMANAVGLRSIAVTYGIHNVDMLKEAKPTWIANCFDDVLRIIEENILKZ

SEQ ID NO: 351 - protein, 444 aa, Photorhabdus luminescens
MTHRLSSKDIWALGFMTFALFVGAGNIIFPPMVGLQSGEYVWLAALGFLATAVGLPVITIIALAKVGGGIEELSSPIGRVAGLLLATVCYLAVGPLFAIPRTATVSFEVGIAPLTSTSELSLFIYSLIYFVLVIAVSLYPGRLLDTVGHVLAPIKMLALGILGVAALLWPAGDSIPAIDVYQQIPFSSGFVNGYLTMDTLGAMVFGIVIVNAARSRGVASSSLLTRYAMWAGFIAGFGLILVYLSLFKLGAGSGSLVPHAENGAVILHAYVHHTFGGVGSVFLAVLIFVACMVTAVGLTCACAEFFSRYLPLSYRSLVLILGGFSMLTSNLGLSHLIKISIPVLTAIYPPCIVLIVLSFTLCWWHNFTRILAPVMLVSLIFGILDAIKSSEVLVYLLPNWATRLPLADQGLAWLAPSLLVLVVAGIYDRVLGRSGTRETQMHQZ

SEQ ID NO: 352 - protein, 396 aa, Photorhabdus luminescens
GKKMINKLLNDRSYHIEFNGHLTNHIKHAVIALHGLGISASRIKDYYDNYVKLTPYGMGLEPPKTLKHVVDSSNWKHFLGKRTSYSSYCDYFEEEIKQKGIEQVLQEYMPTLLSGWAGALTHGTIHLGWALDINHPWMIIEGLAYMAFSYVPCHSERAFIDSSLNDKNAFDSILRISTLWEQRRAELTDWVNSLIDNEDLADTDLIHPELKRSGLQYRIARILMQGHPEIYRLPVWIETQNVEESWAQLFYVVTLIYLAKPGDFLFLHLITSLFAMKNIASRLPAEESKNIIKCYWVGMLCILFSTTDLSKPAKFSALNQTYSFRQDEMTYPVWEQEWSHIIARALEEEEEHNPKLVYVMNQLWKEQGLTIYRAASSQFTSTPLLPPSFEEAPIEZ

SEQ ID NO: 353 - protein, 1299 aa, Photorhabdus luminescens
LRRYSFYYYIKLSKMLENNITQCDSINDVYLKEEAITLMDMLESQLKHQADGYVVIDQEESLSYADFYLRVKEIGYCLSEISSKNSVGIGLFCDPSIDLICGAWGILSADKAYLPLSPDYPTERLKYMIEDSGIDVIFTQSHLKAQLQDIAPKSVLIMTPEDVALTIKTRTIEDILGTVQVPKPTSLAYIIYTSGSTGKPKGVMIEHHSIVNQMRFLAKAFKLGCHSRILQKTPMSFDAAQWEILAPAIGGQVIMGPLGCYRDPDAIIKTILQHQVTTLQCVPTLLQALLDNPNFLDCLSLTQVFSGGEALTTKLATQFLNSFTHCELINLYGPTECTINSSFFRVTNETLPNYQTSISIGAPVDNTEYYVLDDDRLPVAVGEIGELYISGAQLARGYLHKPEMTKDKFICNHLVSGTQHQWLYRTGDLVTRGADGNTYFVGRVDSQVKLRGYRIELDEIRHAIEEHSWIKTAAMLIKKDARTGFQNLIACVELDEKEAALMDQGNSSSHHKSKADKLQVKAQLSNSGCRSEELCENRPTFLLPYQEGEIKQREYAFGRKTYRYFEGTEITVEKLKKLLTATQSNEISSLPLSHLTLNDFGYALRYFGQFTSHQRLLPKYAYASPGALYATQMYFELHNVLGLDAGIYYYHPVTHKLIKISTLSRRQMPTIKVHFIGKHEAIEPVYKNNIQEVLEMEAGHMMGLFDDVLPEIGLSIGKSEYQDECPDWYDGDIQDYYLGAFEICSYEHGLPPFETDIYLQTHAHKIPEMPCGLYHFSNGEFVRISDDIVRKKDVIAINQQVYDRSSFGVSIIPRCVPEWHYYITLGRRLHALQSNPLYIGLMSSGYSSKSNNDLPSAKRMRSILNALDRPMAAFYFCIGGGISQAQYMCEGMKEDVVHMKGPVEIIKDDLQQQLPQYMIPNKVLVFDKLPLTANGKVDYQSLSESKAVENVSTQRLLVPLHTDTEIRLGKIWMEVLKWDSVSALDDFFESGGNSLMAVAMVNKINAAFNIRFPLQILFQSPNIAELAKWIEQTDSKTISRLILLNQASKDPIYCWPGLGGYPMSLRLLANKVVPDRAFYGIQAYGINESEIPFSSIQRMAEEDIKEIKKIQPEGPYILWGYSFGARVAFEVAYQLEQAGEEVNALNLLAPGSPHLDMKQAEYMDKGAEFTNPAFVKILFSVFSRSINSPMVKTCLEQVNSETTFINFICSRFKNLEPSLVKRIVRIVTLTYDFKYSIDELYHRHLKAPITIFKANRDNDSFIEESDVISSMSPKIIELISDHYQLLESEGVAEIEKIIZ

SEQ ID NO: 354 - protein, 323 aa, Photorhabdus luminescens
KVYSMNISNKVPFKFSLEVKEALESGKPVVALESNVITHGLDYPDNVTTAKNVEQAVRESGAIPATIGIDKGEFLIGMSDEQIEKFATASHVPKVTSRDIPVVLASGGMGATTVASSILAAEIAGIKFFCSAGIGGVHRGAETSMDISADLTQLTRSRVAVVCAGAKNILDIGLTLEFLETWNVPVISYQSDDFPAFYCRSSGFKSPQRLDELAVIAKAIEINWMLPGGKGVLITTPTKPEDALDNQKIDIIIQEAVLEAKKKNIVGNSLTKYLMRMVDRETDGISAKANMAVLVNTAEVAGKLAVAACLQSSTFFARIKSQZ

SEQ ID NO: 355 - protein, 1176 aa, Photorhabdus luminescens
LLRGYKHRSTYSVATSKELLVIEIRDAFYFRNRRGKVSEQNQTVTLPDKKDIGLLTEEGLWDNWLDIDAVKKLVNHPLLIAMSEERITLSGMRYFLIQHHYYSRNFTRFLCALISHIDNFNDIHHLMENLREEMGVNGEGKVTHAELFQRSLMETGAQVSSIPALEETSHLASCVLNYCRSGEIADGLAALCLGAEAIVPMIYKPVLHALTHLGVAERGLEFFKLHIEEDEDHAITMMHILHNIIENNEQLSKRVKAVGKNTILLRCRMFDAVYENIKNEILFTEDACRTFEKYESNVRSYCRNYPAIFTTASNALVTDKQGKSWIDFLSGAGSLNYGHNNPRLKSHLIEYIEKDGITHSLDLYTNAKRAFIESFNQQILKPRGLQYRFQFTGPTGTNAVEAAMKIARKVTGCSDIVAFTNAFHGMSLGALAATAREKKRNAAGVSLNNIVRLPFENFLSQNDTSLDVLEKMLVSPGSGIDLPAAIILETIQAEGGVNVASVEWLRGVAEIAAANNILLIVDDIQAGCGRTGTFFSFEDAGIKPDIICLAKSISGYGLPMSLVLMKPELDIWQPGEHNGTFRGNNLAFIGATYALDYWHDPHFLRSLKDKSEIVHKYLLGLHQRYPQLIRTIRGKGMLWGLELFSSQAAENVRNQATELGLIIETCGPLGQVIKLLPPLTIEINVLEHGLLLLEKSLKQVSVQLGMENKINTSSLTPHDTLFYQDEILIEKKLLSLDENEKSSLLEAQKSLSQKLIDGGLNFEGKNYPVSIRPLLLSDNLIRQLASIGERFTEVFEKFAHAWVENVSIREYFPTYKKSEHYLFNLPNHTPLTRIFRLDGLFSEDGTYQILETNTDCPGGVIQNGIAGALWSEVSNPLLNGIEASADFQPFVQNPDLFLETLLETHRERTGEPARRAAIVTYKGRFKNEVTWMVNGFNRLGVPTEEIDASLLRRHNNKVIDPQGRVIDVVYNKLDLRDLIDEPEVEEYLTATSHGEVTFINPLICQWPLADKAIMAVLSDPQMLFFLPEEEKAFCLKHIPWTRILRACQTTSPQGRQIDLVDWAIQERGTLVLKPSNATRGEGLLVGPFTTAQEWETALHLAAQSDETWVIQRYIRGRVISVVHPDIGVTDSMWSGVDTYVYGGRFAGFQARASFDPVMNVGCRGILLPVVKIKEAZ

SEQ ID NO: 356 - protein, 377 aa, Photorhabdus luminescens
RGITMANSISLNNPRLQPTVVAVPISNNAIAIHSGTRQGEASKIIPDPDGWKIVALNHMQGKLNSSGLLKVLKQNGHDVEESALTQLIEELQSHNLVQDEKYFDYQALGADQRERYSRNLNGFAALSDNGISPAEYQQKLFKGHVLLLGCGGLGSCTATALAMTGCGTITVVDFDDIELSNLNRQLYIVDDIGMRKVEGLKSRLNKINPDVTVNTVFKRITGSDVVKELISQFKPDIVVAAIDRPVIAADRWISDACFDMGIPGVFNSVSAGMGMFWTKFPDQSGCFRCDEKWSRTQDPDHYSMRAWREEHDLIPATSAFSYSAMIVGGMMSADIIRKLVGWPMISAGKLVTISFTTLQTNVEDKPQHPDCELCAYZ

SEQ ID NO: 357 - protein, 365 aa, Photorhabdus luminescens
LSHSQLYKRMLRINRNIQIVNFVHIEDTNMNESYQIIDDDPAVWCSAQLESKKDVLLPVSDEQIEAFRHHLSAMEDRPSEAFNASDFSFEEITILQERIHQRLTEGRGVVVVSGIPREMFTDSILSHLFWGIGTGLGRPVVQNSQGHRIGHVRNEKNNPNNRGYMSNRELGFHSDAFEIVGLMCLREAASGGLTQIVSGLAIYNQMLREKPELLDALFEGYHYATAERSSSKLPYTSYKIPIFSKMSGRVSSMCLGAYMRAAAKLQGLALPDALDAGLHAFYEICSRPEFRLEFMLEPGEILFLNNYTTLHSRTEFQDDALNQRHLLRLWIELSDGRPVVPALTARGRDYEQLFLETRLASTATZ

SEQ ID NO: 358 - protein, 323 aa, Photorhabdus luminescens
LTNLSQFPDGEGLTISSVKNAKGVALFDVLSLANNHAMDSGLQGLTDTLKALHSAGVQTTGAGLTFQQAWEPALIECRGIRVAVFGVTGIYYVGTEAGSFQGGVAALRSRDYYSPPFSGAVVPGALPDIMTVINEDDWAHFSCLVGNIRSQADFIIAAMHWGDHTRKDIITRYEKEISKRLSQCGVNLVIGHHHHSLRGVEWHKNMLTCFGLGNLIFDQSLSCSINEWSKTGFQLPDYARYTAAILTRCSPNEILSAHLLPLYIEADTPVPVSHGSDEWHAFLRIMRRCARQDMTVNHLVDNGTRWGDFTVLDIIKPISDVMZ

SEQ ID NO: 359 - protein, 397 aa, Photorhabdus luminescens
SMAILCLGRSIKINFAEWLEECRDDLWLISSAPQFPLQHRYRYVRQIDSLDDGEGVLSIATELGRHTSFSQILPHSEFDLIRAAQLREYYGLPGQNVESALAYRDKVLMKDYLQRAGIEVAPFRRLGSWLDVLTFSEEHNFPVVIKPVDGCSSKYVKVCRSLREVSDFFRDRTVDGWMVEKFISGNMYHVNGVINEAGDSFFAPCAYINNALDYQHAGIFGSRTIDPATPLAERLNSITYRTISALPAAPTLGFHAEIFHTADDRLILCEIAARTAGSLTGELIEHTWGINIHKAWIQSCAGINDVLKVRTEPREFAASIRVPVRPAYLISLPDSVPYDWISTLCLSGRVGQIYQQATTYTDDVVSAIITGNSDVQLTERIEHFADWIDDLVRWQNZ

SEQ ID NO: 360 - protein, 421 aa, Photorhabdus luminescens
MKILIAGSGAGAQALAWKLLQDPAVEKVWLAPGNPATSCAPGMENIPVSSGDVEGLARAALELKADFTLITPTQTLAAGVADYFKSRGLPIIAPTREASRLEWSKGFSKKFMKKYQIPTPYSAICESQEQAQKFADTLPLPVVIKADGMVHGGTGVVIAQDRQHVKNTLEEFFTRNVGPMLVEEFIEGEEVSYTILFDGKNYLPLAESRDYKKLLDGDKGPNTGGMGAYSPVLSSAQHEAIITQIVEPCLAALNSEGIEYIGFLYFGVMIDKKGMPSLLEINCRLGNPEVFTILERLESPLHELFILTLQKQLGKANVRWSKLVSVALQISSEGYPFTERKGDELILPLPSEDTHIFHSSVVSDDGKLISHGGRVIALSSIALTFNEAREKLYETVKQVHFEGMHYRTDIALNINTPSGMZ

SEQ ID NO: 361 - protein, 474 aa, Photorhabdus luminescens
WNVINRGMLMDNMKRNKRNVLLAANISYILVILDSSIVNVALPTIKESLSLGVTTLQWVVNAYLVLFASLLLSGGALCDRFGSKSVYITGLGLFTLSSALCGISSEAAILLTGRVLQGISAAILVPGSLALITHTYTDKTERTRAIASWASWGGIALVAGPVIGGWLTEYLSWRSIFLVNVPLCLAGIFLTLRVQSPEHEHKSLTMDIKGQLLLFLTIFLFIAGVIRLNDSPQINLNSVILLCLSLIIMTAFIVVERRSKAPMLPLELFRRPNFSAISWIFFSGAFSFFGAMFILTFWFQDIQHLSATQTGMALLPLSISVILGNKVSGWLARRYQTSHMMIVGAMIRLVGFSGLLVTQFNNDYAYLFVPLVLIGFGGGLGSPMSTSLFMQSTPKQYTGVASGVSRATGQIGSAFAVAVFGQMVNSEKLFVLNMKYAVITIIIATLSILIINFLFVKNDIDEYHNSITLKADKZ

SEQ ID NO: 362 - protein, 447 aa, Photorhabdus luminescens
VLERLSWKKLVSELFLFCLPALILAIFIGHLSWCLLVSVFLVLIWHGYNLLKLSNWLWLDRSMLPPSGRGGWEPIFYGIHQMQQRNRKRRRELALLIKRFRSGAESLPDAIVMMTTEGNIFWCNRLAQHLLGFRWPEDNGQHIFNLLRYPDFSRYILSRDFSRPLSIELNNGFVVEFRVMPYSEGQFLMVARDVTQKRTLENARRDFFANVSHEMRTPLTVLQGYLEVMQDQAAEDSSLNKKALNTMQEQTRRLDGLVKQLLQLSKIEVAPQIDMNEVVDVPLMLKVLRQEAIALGNECYKINFDIGEDLKVFGNEEQLRSAMSNLVYNAVNHTPKGTQIDVSWKKNSHGAEFTVKDNGQGISAEHLPRLTERFYRVDKARSRQTGGSGLGLAIVKHALHHHHSHLKVSSEIGKGTIFSFTFPAGLIVPVKITSRRDRNSLINSNNZ

SEQ ID NO: 363 - protein, 449 aa, Photorhabdus luminescens
MMDEIISLSINELGERIRSGVISPVEILGEYMKRILCYDHKLNAFSEIYEADARAAAKHAEQEIRSGNWRGPLHGIPFAVKDFFDLKGKVTGGGTNCFSQKAYVTAPVVATLLKQGMILTGKHRAVELGMGATGIMENSPTPLNPWGQSQRVAPGGSSNGSAVAVAAGLTPIALVTDTGGSARIPAAWCGVSGFRPSMGNLSSSGMLPLSQTMDTVGIIAKHASDIFIVYNQLNPNLAYHSCINNLNIGILPSEEYILDKETGLHYVSLLEVFSQMGMVTQKKPFPYPLSQCMKANSIITAFEAWQNYGYLCNSQNSLSDTIKVRLERGKEIKEKEYSEALIFCRHVRKIFSNWFQNVDALVIPTTPEPSWPIAEKDEHQPPNDFTRFVNFADLCAVSIPTGLNSQGLPFSLQIVCNRKKEKNALALAELIECRIGFSNTELKIRLKTZ

SEQ ID NO: 364 - protein, 261 aa, Photorhabdus luminescens
MNNVITHLGKKLFQSWQSHQAIDPISDEYPELTLHDAYLIQQKVIAYRLETTGERIVGKKIGITSQAVMDILDVDQPDFGILTSDMHYKNNATVPIEQLIAPKAEGEIGFILKHNLCGPGITAGDVLRATDYVVPCIEIVDSRIRDWKIKITDTVADNASSGLFVIGNGTRLPSEIDLAAVTITLEKNGKLVDTGIGAAALGHPANAVAWLANMLGTLNMALLRGEIILSGSLTTMVPVNTGDQLKINLLGVGSAKVSFAZ

SEQ ID NO: 365 - protein, 309 aa, Photorhabdus luminescens
FKINKEDIIMSISANLQHKLIQPELRSLWSAIASGEIHLHHLNVKGIKTRVLEAGNGPTLIFLHGIAGHLEAYMRNILPHAAHFRVLAIDMLGHGFTDKPVRSYEIIDYVEHLRDLIETLNLKKIHLSGESLGGWVAARFAAKYPQYIHRLVLNTAGGMIADPNVMERLRTLSLNAVKNPDREATRKRLEFLMEDPAMVTEDLVETRFAIYRQPGMLSAMENIMCLQDMDTRLRNLLTKDELAKIQAETLVLWTTHDPTAAVSVGQRLAGLIKNSRFVVMEKCGHWPQYEDPDTFNRLHIDFLLNGNKZ

SEQ ID NO: 366 - protein, 295 aa, Photorhabdus luminescens
MELRHLRYFIAVAEELNFTKAAKKLHTAQPSLSQQIKDLEDYIGSTLLERNKRRVSLTKAGEVFLQQARLILENAEKAKKMARRAAQEQIVLTIGFVPSAEVKVLPEVIPIFRLAHPGAKVELISLFNPGQEEKLLQGDIDVAFMRPPIKSDSIDFKVILNEPLVVLMPANHRLRYCEKISVNDLQGENFITPDPTQSGVLQQIIENYFTEHNVVPNIIQTANNMLLILNMVSLNLGCAIVPFYITSIMTDAVICRPLSGYSPTIELIMAWRKDNTSELLLHLIDVVENKYLQEZ

SEQ ID NO: 367 - protein, 454 aa, Photorhabdus luminescens
MTLSKDSDIYRLIDARAGRVTPQIYIDPELYQLELERIFGRCWLFLAHQSQIPNPGDFFNTYMGEDSVVVVRQKNGSVKAFLNQCRHRSMRVCYADSGNTRAFTCPYHGWSYGVDGRLIDVPLEACAYPHGLCKEQWGLQEVPCVENYKGLIFGNWDTTAPSLIDYLGDMAWYLDGVLDRREGGTEVIGGVQKWLINCNWKLPAEQFAGDQYHALFSHASAVQVLSVKDGDDKKALGADQTSRPVWETAKDAVQFAQNGHGCGFFLTEKPDANVWVDGAVARYYRETYAEAEQRLGKVRALRLAGHNNIFPTLSWLNGTATMRVWHPRGPDQVEVWAFCIADKAASPEVKAAFENSATRAFGPAGFLEQDDSENWVEIQKVLRGYKARNSTLCMEMRLGQERVRDDGIPGVTNYVFSETVARGMYQRWADLLTSETWDEIEEKSRVYQQELVKZ

SEQ ID NO: 368 - protein, 281 aa, Photorhabdus luminescens
MSWIKDQVILLTGGGSGLGLALIERFIAEGAKVGVLELSAEKATALAHCFGNDICVIHGDVVSFEDNERAVAETVRCFGKLDCFVGNAGIWDHKISLLDASPEQIDKGFDELMGVNLKGYILGAKAALPALTASEGSMIFTLSNSSWFSGGGGVLYTASKHGAVGMIRQLAYELAPVIRVNGVAPCGMPSDLRGAASLSQQDRCITDNLSLESLSAILPLQFIPQPKDFTGPYVMLASRANNRTLTGVMITADAGLSIRGIRQTTAGVMSPTKKESSDDRZ

SEQ ID NO: 369 - protein, 318 aa, Photorhabdus luminescens
MTVKLICTSHTPLMGFGSPPEATEKHVRQVFQQLAEQIKDYDPQLIVIFAPDHFNGFFYDLMPAFCVGVRANAVGDWDIGKGPLNVPENTAKDLISALYDSGIDVAHSWRMQVDHGFTQPLMLLCQNLQRYPTIPIFINCAAKPLPTCRRAVELGRAVGQFLFTTDQRVLLLGSGGLSHDPPIPQMGQVPPEVEEGLIAGRNPTKEARQKRQIRVIEVGKSLARGENIVAPLNPQWDDELLRIFCSGDIRRLASLTEGGIAIQGGKGGQEIRCWIAAFAALSVYGEYKAQRHYYQPIKEWLAGMAMVSAQPVTQIGAZ

SEQ ID NO: 370 - protein, 395 aa, Photorhabdus luminescens
MRNQTFIIVGAGQAGAMAAATLRQQQFDGDIILIGKEYHAPYERPILSKDYLINPEEAPKYLFSEDFYLEKQIDLRIGQLVSQIMPSKHCVVLENGGKLRYDKLLLTMGARARRFPLLDQLGENIYTLRTLDDAQRLRQAVKKDKRILIVGGGVIGLELAATSCELGANVTVIEQADNIMGRCAPPLLQDYLLNRHQEKGVQFFLDTNIVSAQKQGSELVLILNTGEKVIGDIIIYGIGAEFRDQLAADAGLVTDGGIVIDSRCQTSEPDIFAAGDVCLQREPLTGDLQRRETWENANRQATIAAHAMMGLAPPQPGAPWFWTDQWGINIQMVGNMQAEEWHIQGDLQSDKAILFGTENEVLVGAVAINQGREMRNLRKLLANPAQVVSGVEWAZ

SEQ ID NO: 371 - protein, 537 aa, Photorhabdus luminescens
MMKKTIKNISLFTGIVLGSLTLAHAAIIPPGTQLATNQNIVRHNGSEPASLDVHKVESDVEFDIINDFFSGLISIGNDGKFNPNLAIRWETNDNKTWVFHLREGIKWSDGSPITAHDVVFSWRRLIDPQMASPYGSYIENMYIVNAKDILAGKKKANELGVKALDNLTVEVTLEQPLSYFLNMLAHPVMVPISQKAVEKYGEKWTQPNVFVSSGPFKLSEWIVNEKVIGIRNPQYWDNKHTVINKVTYLNVTSETAVVNRYLAGEIDITKGIPSVLFKSLKTKLGNQVHISPKLGVYYYEFNTQKAPFNDIRVRQALNLALDKDIITNKVLGQGQKPAYNNTPPNIGGMNLKQPDYASWTLAKRIEKARQLLNEAGYNRNNPLKFNLLYNTSEDHKRIAIAVTSMWKKNLGVDAVLQNQEWKTMLDTMHQGNFDLVRYAWIADYDNPASFLNNFVTNSSNNTSLYHNDIYDDLISKAKATNNIEYFQQAQDILTKDVPSIPIYYYVSAKLIKPYIGGYYISPLGLMSSKDLYVIKHZ

SEQ ID NO: 372 - protein, 304 aa, Photorhabdus luminescens
FDSIPSFFQRGYSVIHLIGINEVYRNLAVLSALKSKTAPKTSEELELGFHNFLKGYQPNVPRLESVGTQIVEDPEMEDKLVELYRTDALLNDRDQSSLIGDSLKDDVRKQRLEFLLAALEELKLRMPQIYAVFQMAIDSLFLRDSKNSGGGSTSNAVGVIWINSRKHWHVQDLTELLVHELTHNLVFIDELRYLHFHDYKLLQNEANFAKSAILNIKRPIDKVFHSIVVAVEVLLVRRNYLGEPEKCHVHPPSDKMLIQALEALNSLADLPNYKDLITERGQSIMQKCQGYLDLMVGREKKLAZ

SEQ ID NO: 373 - protein, 483 aa, Photorhabdus luminescens
MNNSLIEFINEYIEQRQSDFTYLSDKIWEHPETNFEENFSAELLANALENEGFVVQRGVGNIETAFIASYGSGHPVISLLGEYDALAGLSQKAGCCEPNPMVKNGNGHGCGHNLLGTAALAAAFTVKAWLQKNQQIGTVRFYGCPAEEGGSGKTFMVRQGLFDDVDAAITWHPESFSSVFNVQSLANIQTAFHFKGVASHAANSPHLGRSALDAVSLMNVGVQFLREHIIQEARIHYAVTNTGGVSPNVVQADAEVLYLVRAPQLDQAQDIYQRVIDIAKGAALMTGTQLNIRFDKACSNYIPNRTMERVMYQYIQAFGIPEYTDEECQFAEKIHQTLTKDDLRNAKLNAARTAGEEGKRWSERQGEKALTDEVLPYIESQELLYGSTDVGDVSWVTPTAQCFSPCFAFGTPLHTWQLVAQGRSSIAHKGMCLAGKIMAATALKLLIDPALLAEVQSEFKHQRDEHPYQCPIPPDIKPSPLKZ

SEQ ID NO: 374 - protein, 230 aa, Photorhabdus luminescens
MARRILVVEDEAPIREMVCFVLEKNGYQPVEAEDYDSALACLSEPYPDLVLLDWMLPGGSGLQIIKQMKRNNNIRDIPVMMLTARGEEEDRVRGLEVGADDYITKPFSPKELVARVKAVLRRISPMVMEDIIEMDGLVLDSTSHRVTSRDKALDMGPTEFKLLHFFMTHPERVYSREQLLNYVWGANVYVEDRTVDVHIRRLRKVLEIGGHDKMVQTVRGTGYRFSTRYZ

SEQ ID NO: 375 - protein, 304 aa, Photorhabdus luminescens
SDGRTREEACIMVEIKGSMEAFPLLYHSRMLADEHRLNCFKTAIDRIVQEDSHVVDLGGGTGVLTQMLAQKTNGLVTYIDMLEASSIVAQILNRGLRKNIQYISKKSFDVQLKNPPDVLVTETLGYFGIDEGIVEICHDFCTRHSSIKVLIPSKVSLKYQFIHLPELNADFDLLLSSYASRFGPVPAELVSGFECLFCNLIRKKIIKSDGVEVCSEPKLIRRFNLGLDKSSDIEYSVECKASQRANAIHFYFEAELADGVKLSNYVFEPKTHWLHSYAGIPRGISSGQLKFVSTERKIRLRWKZ

SEQ ID NO: 376 - protein, 466 aa, Photorhabdus luminescens
KKNKIKMEVKKSAIEFLINKAFAFALLFLIVQQLIVASSTYWIAGLAKQVSANENFTLYLVLFILSLTLVYIPSSLAAVFLEKSKFLALEKYVERFRLNFWNRASIRTSKEFKDYHLPYVSSEGFLVFNESSKFIFDWASVVLNVSLNVLALSLVLDTSIAWSYLVGLAFVSSVIFFFRKRIHVKGAEAQSARTALQRVLSLAWDNFLLGNKYNQSLYQSELKVRQSLALGTAVRSQYWNNLASALGMLLMMAPVLVWTSVLFLENMDNPSVLTVLVATLPRQVLILQHAYVVIFYSTSWSALSARLKGLGQAAETPKTSQNLEERIQWNRLKYETHGTLPDLASLKELIIKPVPSSGRITIRGPNGVGKSTFLCWLKEQLGESAYYLPAHHELVFEKTNERNLSTGQELREFLKEISVKAVDKIEILMLDEWDANLDLQSRQVFSKLIDKLSESLLIVEVRHNVZ

SEQ ID NO: 377 - protein, 422 aa, Photorhabdus luminescens
MVTNMQRTQRVVITGMGTVTPIGEDIESCWQSIIEKQHQFRRIEFPNSFINSRFFSFLAPNPSRYQLLPKKLTHMLSDCGKMALKATYQAFTQAFGVNVSPVEYYDKYECGIILGSGWGAVDNAGDHACQYKEVKLAHPMSNLITMPSSMTAACSIMYGLRGYQNTIMAACATGTMAIGDAFEIIRSGRAKCMIAGAAESLIRECNIWSIDVLNALSKEQTDPNLACCPFSLDRSGFVLAEGAAVVCLEDYDSAVARGATILAEIKGYAQYSDAANLTRPTEDIEPKILSITKAIEQAQISLEDIDYINAHGTSTPLNDLYETQAIKAALGQYAYQVPISSTKSYTGHLIAAAGSFETIVCVKALTENCLPATLNLHRADPDCDLNYLPNQHCYTVQPEVVLNISAGFGGHNAALVISKVRZ

SEQ ID NO: 378 - protein, 229 aa, Photorhabdus luminescens
LHNMQQYPVQGMLSLLYVRQQLSQLTSAFTSGILNIDTSFRQYVYTALPHQLRIDTKSKTFKLENPCGKSVLSGNTSVENTMESIEHWIVQDNCQKLTITREGVCEKYAVFRHYFPSVTSIGWFLDALVFHLVINSTSFLNFEHYYFNQLQDYLNQSFTLHTGQAIKIKEDIVNSTILRSSPNICVELNPPLLIKNGPKDYIRIFYYRCLYDKNPIFVSKISIISKMKZ

SEQ ID NO: 379 - protein, 341 aa, Photorhabdus luminescens
MESVMEKKITTFTIEKTDDNFYANGRHQCMVKISVLKQEYKNGDWVKLALSDAEKRSIQVAALSDSLIYDQLKMPSGWTTTDARNKYDLGLLNGVYSADIFTEEPVINRAGDCCTNENYQNSVKSVPEIIYCYVSSNRTSTEYLMAKMTFEDTNGKRTLTTNMSVGDEVFDSKILLKAIAPYAINANQLHESTNILFDKTEEPTKSDTHHQTINLYRWTLPYHLRILEGNDRTVNNIYVLGKSSSDDRFLTRARVFKRGTSYVNARNDMSGGCVMDYSYDVTVPDTQLAAEVLHVTGCSWTTGYVDGYHDVTIIDNYGCQHKFRISSVNIGRALSIARISZ

SEQ ID NO: 380 - protein, 1590 aa, Photorhabdus luminescens
LRPNNVGNIEQVLNLSFSPLTTLNNGFGIGWRFSLTMLDVKTLTFSRSNGEQFKCKPLPPNNNDISFKDKKLKDLRVYKLDSNTFYVYNKNGIIETLKRIGSSDIAKTVALEFPDGEVFDLIYNSRFALSEIKYRMTGKTYLKLNYSGNNCTSVEYPDDNNISAKIAFDYRNDYLITVTVPYDASGPIDSARFKMTYQTLKGIFPVISAFRTPTGYVELVSYKENGHKVTDTESIPYAAALTIQPGNGQPAISKSYEYSSVHNFLGYSSGRTSFDSSQDNLYLVTGKYTYSSIERVLNGQNVISVTERVFDKFHLMTKEAKTQDNKRIITEITYNEDPSKSFSEQPENLQQPSHVLTRYTDLQTNTSREESVNIKSDDWGNTLLITETSGIQKEYVYYPVNGEGNNCPADPLGFSRFLKSVTQKGSPDAAQSVANRVTSYTYQKLPTFTGAYVKEYVSKASETIDSKIVRTFNYVNSPTNKSHGSLAKITSVMNNQQTVTTFKYEYSDSEMTTNSTVTGFDGTHMESKNVTSIYTHRQLRKVDVNHVITDQSYDLSGRIIGQIIDPGTTKEIKRSYIYQYPGGDENDFWPVMIEIDSQGIRRKTHYDGMGRICSIEEQDDDGVWGTSGIYQGTYRKVLARQYDVLGQLVKEISNDWLWDLSANPLTRLTTPLVTTKTYQYDGWGNRYSTEYSDGRIELEIHDPITRTITQGVKGLGMLNIQQNNFEQPASIKVVYPDGAIYSTRTYRYDGFGRTVTETDAEGYATQIEYDLFDRIVKKTLPDRTILESAYASFSHEELISALNVNGTQLGSLVYDGLGRVTRDTVGGRKTEYLYGSQGDKPIQSVTPAHNKQNIDYLYALGSVMSKFTTETSQQNFSYYQKTGALLSATEGVSQSNYSYFPSGVLQHESFSRDNKPISSGDYRYTMSGLIQRHKDSFAHDHVYSYDAEGRLVKTEQSSQYATFEYDNVGRLITTTTKDTTSLSQLATKIEYDVFDREIKRSLISDFSIQVITLSYTKNNQISQRITSIDGVVMKNERYQYDSNQRLSQYQCEGEQSPVDHTGRVLSQQIYHYDQWGNIKRLDNTYRDGKETVDYHFSQADPTQLIRITSDKQQIELSYDANGNLTRDEKGQTLIYDQNNRLVQVKDSKGNLVCQYQYDALNKLTAQVLANGTVNRQYYASGNVANVQLGDETITWLSSDKQRLGHQSTKNGESVYYQYGTDHNSTVIASQNENELMALSYTPYGFRSLISSLPGLNGAQVDPVTGWYFLGNGYRVFNPVLMRFHSPDSWSPFGRGGVNPYTYCQGDPINRIDLNGHLSAGGILGIVLGAIGIIVGVVSLGAGAAISAGLIAAGGALGAIASTSAFAVTATVIGLAADSIGIASAALSEKDPKTAGILNWISTGLGVLSFGISAITFTSSLIKSARSGSQVASTSVIGSVPIEFGEIASRSSRRWDIALSTISLSANAVALSTGIAASAVADNNANAANILGWVSLGFGAVSTTAGLINLARTAYAVNHHTWELSSSAGTSEGSEAYTLSRFTQSEPEAINVHPSIRAVEVNQAFRNSTGNLFSQSSINTRNVLRGRLTIZ

SEQ ID NO: 381 - protein, 358 aa, Photorhabdus luminescens
QHCSTKKQTLILIYKEELIMGNSRFEGFTKEEIKLAYEFDMLNQSMVMAEANAYALQKQLYRLSQPQKLLNKIGRNALVEIKDTMIRSVPASICAGLAGTATASGGPAISFLASAAAGSIGGELAKPITSRTGVHTQLYPTCTGNTIKDIEQEVQGKLQGKLSGYPKLHELYRTYINKEYARDFVLDTALANTPDVVTSVITEGVNNWTAGTFSSMLKYGPIPIVALTAAAGLDPRGIYNKGKDTFHAMASIKPGPHAGGNLKAKKLEKLLCTYQEYLPYLEQNLFRARDCLTKLIKLLNSNLDRKLNVEAFMKKSPNLVLSYKNAHMASQEIINMLELLIMLEKERENQVVRETCLZ

SEQ ID NO: 382 - protein, 428 aa, Photorhabdus luminescens
GNYVSASPGSNNRSINENLTLGNHLVQNAQNKKNHIQKDDPLYVKVTLSLFTVGLAAFALLYFVQPILPMLSDDFGVSPATSSLSLSLSTGMLALGLLITGPLSDAIGRKNVMVTALFAAALFTLLSAFITSWHGILIVRALVGLSLSGVAAVAMTYLSEEIHPNFVALSMGLYVSGNSIGGMSGRLISGIITDYFSWRVSVIVLGLLALIAAMMFWRMLPESRHFRPSSLKPHSLLINLKLHFRDKGLPLLFCEAFLLMGGFVTLFNYISYRLLDSPYHFNQSIVGMLSIVYLAGTYGASKVGPLTHQYGLGKVLIATISMMLIGTLITLFSSAVMIIIGMIVLTFGFFAAHAVASGWVGRRARRAKAQASSLYLFCYYLGSSVAGTFGGIFWLQLGWNGVVLFITILILLALLLGFKLAKLPEARZ

SEQ ID NO: 383 - protein, 307 aa, Photorhabdus luminescens
VIMAIELRHLRYFIAVAEELHFGRAAERLNISQPPLSQQIQSLENSINARLLERNNRNVSLTPAGNMFLKEAYQILAQVDAAAAKAARMQKGELGEISIGFTSTIPFMNKVTLSLRQFRERYPEVAIHMHQMNTKQQIAPLLTGRIDVGIMRNTQLPDNLEYRLLFREPFMLAVYDGHPLLEYAPQGIKLEMLSGYPMVFFEREVGTALYDEIITLLAQAGITPMISQEAGEAMTILGLVSAGLGVSVVTESFTRMKVDGVQYISLVDNHSCSEVWLVNHKNRPISAAADRLINLLISNILHGKNKZ

SEQ ID NO: 384 - protein, 412 aa, Photorhabdus luminescens
MRIIHTSDWHLGQYFFTKSRAAEHQHFLRWLIKQIEHYQVDALIVAGDIFDTGSPPSYARELYNRFVVELQPTGCQLISLGGNHDSVATLNESKELLSCLNTTVIAHAEKDQQKQIKILTTKQGNAGAILCAVPFLRPRDIMISQAGQSGEQKQLVLQEAIAEHYHRLYQQACELRDELNLPLPIIATGHLTTVGATVTDSVRDIYIGTLDAFPAQAFPPVDYIALGHIHRPQIVAKSEHIRYSGSPIPLSFDEVGQEKSVCLVEFTQDKLESIKLLPIPQYQPMQLIKGNLQHIEQQLQTFNDYQGEQPVWLDIEVATQDYLHDIQKRIRSMVAELPVEIILLRRSKTQQQNRLAQENRETLTELSVNEVFARRLAQSALEDEEHKKRLTTLFEQTLNDIYQAKNKEEQAZ

SEQ ID NO: 385 - protein, 404 aa, Photorhabdus luminescens
MDGQPGHIDQIKQINIGTVYRLIDQYGPISRIELSKKAQLAPASITKIVRELVDAHLVMETEFLDLGFRGRPATGLKLDSESWHFLCVSINLGSLILGLRDLSSTLIVEDVLPLPANKEKSFLDSIIDEIDAFFGRYQSRLERLTAISMTVNAIVDPTQGLIHSFPYYQVQELPIGEYLHRRTGLPVFLQHEITAWTIAESLYGTAKNCQNVIQMVIDEHVGVGVIIAGQTLHAGNRGVMEVGHIQAEPNGERCYCGNFGCLETVVGISHILSRAKRQLAMVPDSLLNGEPLTVESFCQAVNNGDTLAVDIIRDIGVKIGHIIAIMVNLFNPEKILMGSPLNASQQVLYPVISECIQQHALPAYSKQIELVPTKFNNSGTLSTVASVKKALYDGSLLISLMKGZ

SEQ ID NO: 386 - protein, 244 aa, Photorhabdus luminescens
LSLWKTEFMLTRLFVTGTDTNIGKTIVTRALLQAFNRDGATAVGYKPIATEGYETEEGMRNRDGVILQKSSPVPLKYEEINPVIWKNSYCEGNQVDFEQMKKGLNNLSNKADRVIIEGNGGWRVLLDDETFYFDWVIQEKIPVILVVGIQPGCVNHSILTAQAIINDGLQLVGWVANRINPGLSHYTKVMDRLRRHINAPQLGEIPYILRPEEKDLSCYLDVATIFKQVGGSESEVGIESQYTZ

SEQ ID NO: 387 - protein, 466 aa, Photorhabdus luminescens
MGDLITKKIRFAVVFFIALVVSGCSAFAENQTEDQNFNGNNNAQYVKIYLHNNTSHSLVAEKTDLLWGSWIEKPSSSISAYSHDSFASKGKIFSGTEGKIIYRLPNGEDKLNVHWNLSYWGVQNHNIHLSEASTHYKLEKTVKSSSSLGIQIDIYLTEKNIGSNYKIAVMSDPQPWRLDPEQGDPNADKKPWEELNKKVANSINNIYDRNHLAFGIVNGDLTEFGRASTRKSLEEIYTSKIKFPLFMGLGNHDYANNVNDCTYPEGFDFSRNACARSAVFDMAERISDYSKELNNFSYDYDNEAWKGSLSYSWDFGDIHYVQLQNYPTYNVNLDHYVSPTVYITKSLDWLESDLESAQTRGKAVVLNFHDGYDHFINNSSYAEKEKFKSLIKKYNVMAVFVGHSHFLKEYTASIFGNARVYDSGALFKGDFFIIDVNKKCMQISAYNGIDGTPKFVKKMTTVCGKZ

SEQ ID NO: 388 - protein, 250 aa, Photorhabdus luminescens
MIIFVTGATSGFGESIARKFIQNGAKVIATGRRKERLEKLKAELGDNFYFVQLDVTDRAAINQVVEQLPESLRHIDILVNNAGLALGLEPAHLANLDDWEIMIDTNVKGLVNMTRALLPEMVKRNHGHIINIGSTAASWPYSGGNVYGATKAFVKQFSLGLRADLQGKNIRVTDIEPGLVSGTEFSLVRFKGDNDKVNKTYDGTQALTAEDVTEAVFWVANLPAHVNINTLEMMPVCQSFAGLNVHRNEZ

SEQ ID NO: 389 - protein, 550 aa, Photorhabdus luminescens
GVRFFKILLPFLYMEIKMKAKDVQPTIIINKNGLISLEDIYDIAIKQKKVEISTEITELLTHGREKLEEKLNSGEVIYGINTGFGGNANLVVPFEKIAEHQQNLLTFLSAGTGDYMSKPCIKASQFTMLLSVCKGWSATRPIVAQAIVDHINHDIVPLVPRYGSVGASGDLIPLSYIARALCGIGKVYYMGAEIDAAEAIKRAGLTPLSLKAKEGLALINGTRVMSGISAITVIKLEKLFKASISAIALAVEALLASHEHYDARIQQVKNHPGQNAVASALRNLLAGSTQVNLLSGVKEQANKACRHQEITQLNDTLQEVYSIRCAPQVLGIVPESLATARKILEREVISANDNPLIDPENGDVLHGGNFMGQYVARTMDALKLDIALIANHLHAIVALMMDNRFSRGLPNSLSPTPGMYQGFKGVQLSQTALVAAIRHDCAASGIHTLATEQYNQDIVSLGLHAAQDVLEMEQKLRNIVSMTILVVCQAIHLRGNISEIAPETAKFYHAVREISSPLITDRALDEDIIRIADAIINDQLPLPEIMLEEZ

SEQ ID NO: 390 - protein, 568 aa, Photorhabdus luminescens
MSKIIQTDSFSEQSYQIDNFNPSTETINFSYTSGRIALPVYNKYDTRNKPKVFGYYTDWSQYDGRLQGNQDPIRRGRGIDLQHLLDNPFAYDKLVIGFCGILGDEGEKKQQIKEQAPLFARTNNGEVTFTDAWGDCQSYQNCTYSGWQDIQMPRDFDQSKSMGVLGGLAKVQQAAKAQGHDLIMSFSVGGWTMSNGFYAMVRDETLKSYFCSSLVDIFQRFPMFTEIDIDWEYPGVAGNEGNMYASDDGDYYVSLIKDLTAAFKEAGRSDIKISIACSAVPEKMEKSKIPELLQVGLYGVNVMTYDFFGTPWAERLLHHTNLRNYPSGENSVEKAVEYLLSLGVPASAINIGYTGYSRNGRNTVIDSYSPLSGSYDPGYVPKKEPKITTTGSFESGTTEWYDTIYNYLDLEEKRGRNNFDLYTDEIADADYLYNKDSQLFISLDTPRSVKSKAQYALEKNLGGIFTWTADQDRGLLVNAAREGLGCELITEKIDMTPFYFKGVNVEPVDPIHPDTGSDYPVWDANRAYKAGDRVSWNNQNWEAKWWNRGTEPDGAGTSDAYPWVKIAZ

SEQ ID NO: 391 - protein, 435 aa, Photorhabdus luminescens
IISNRYNHHDLARIARIYNRRNTMHVGIIGAGIGGTCLAHGLRKHGIKVTIYERNSAASSILPGYGIHINSFGKQALQECLPAENWLAFEEASRYIGGQSRFYNERMRLLAVHGGISPMAGKIISEQRLSISRTELKEILNKGLANTIQWNKTFVRYEHIENGGIKIFFADGSHENVDVLVGADGSNSKVRKQYLPFIERFDVGVSMIIGRARLTPALTALLPQNFRDGTPNSIVPKSPDWLFISMWRAPVNIHVEASLAEIDNFIVWVYVAATDSLPDNITDFSAEALCDLVQSRMISWDPSLHTLVQQSDMENISPLHLRSMPHLLPWKSSTVTLLGDAIHNMTPMTGSGANTALRDALLLTQKLASVASGHEELVKAISDYEQQMRAYANEIVGISLRSAQNAVIHFSIPPLKQRHLSIRRNKSQSHQHRRZ

SEQ ID NO: 392 - protein, 333 aa, Photorhabdus luminescens
FVILFGEINMSNQDVKAMYNRYPYPSSAIGDNLIYDMATVIRLIFKPDYLTGKYVLDLGCGTGHRLLGLASMYPDTQFVGIDMTDKALEVADKLISYHQLDNVTLENNTIEKLTRDNQFDVVVSTGVIHHMEFPQEGFLAASRSLNEEGIALIWLYNAIGEYERLRQRELLQIFVKQNHAEEYFLNTDLMNKLCDNLSRNQYGDSTANHLDDSVDQVAVNVDAFLNPIVNAYRYDEICDFYYQAGFKRVRCCGFNRENGNKLFAGCCDQFNDEYFLQYRDLLLDEQLNEIFNALDYNQKIRAIELLWKPTGISSIGFKSENAQSFVNDWLRGZ

SEQ ID NO: 393 - protein, 257 aa, Photorhabdus luminescens
MLQTGTIKCKVHNIKMNQGNGADYEIPIPFFLLTHPNGHTLIDGGNAVETATDPEGYWGTITKTYWPVMREDEGCIAQVKKLDIDPADIRYVVQSHLHLDHTGAIGRFPNATHIVQRREYEYAYTPDWFAAGGYIRKDFDRSGLKWEFLDGERNDMFDVYGDGTLKTVFTPGHSPGHQSLLVTLPNSGSLLLTIDAAYTLDHWEERALPGFLTSTIETVRSVQKLRHLAKRTNAIVVTGHDPDAWPTFRQAPEYYDZ

SEQ ID NO: 394 - protein, 326 aa, Photorhabdus luminescens
MHKTNGTILDVPGVKVGHAEDELQQTGCSIIIFDDGAVCGVDVRGSAPGTRETELLDPINTVQKVNAVVLSGGSAFGLDSASGVMRYLEERKKGFDVGVTVVPIVPAAIIFDLNFGDPAVRPDAKMGYLAAQNASVTPFPSGNIGAGTGATIGKIAGFDKAMKGGLGTASVKLPDGLTIGAMVVVNAVGEIRDPKNGKTIAGACDENGHLIDLIPYIIKNNKDNNFTQGTNTTIGIICCNANMNKSQMKKVAQMAHDGLARTIYPVHTMSDGDTIFAAATGGVDSSVNIVGILAAEVMAAAVLDAVKSAKSKFGVRGYADLALSIZ

SEQ ID NO: 395 - protein, 1229 aa, Photorhabdus luminescens
MKILSLRLKNINSLQGEWKIDFTAEPFASSGLFAITGPTGAGKTTLLDAICLALYHETPRLTISTSQNELMTRHTAESLAEVEFEVKGVAYRAFWSQRRARNQPNGNLQAPKVELALSSSGKILADKIQDKKEKIIEITGLDYGRFTKSILLSQGDFAAFLNAQPNERADLLEELTGTEIYGILSQQIYQQHKQAQSVLDILQAKASTIDLLTAEQHQQYLEQQQQLTHAESQLNQQIKTVQHSAQWLTREEELEQLVTENNAILQQAEKALTHAEPQLQKLANSEPAETLRPLLDDKNRTQYEHQRTSKQLEEMHQQLQQLQQTLTPIQQKVAHADSARAEYQQHRQQQEKLITEQVIPLDHQIAVQIKELNLTQQQINEQKTVLENRCQQYDTANQRALSFTNQRKQLENYFEQQPYHQYFGEKLAFWQHQFSWRQEHQQQIDHQTQKVGKLTAEITQLSNNLNKQGEDLKQQIENNQPLELAFEQAKQQFFTLQKQYSPEKLKKQLTQYQEQLPLQHKLEILSPQILQLQAAIASHHIRLQQPEKLLKEFPVQIESIDKQLSDKQQHLSDLTQRIQLEQKIVSLEKERAQLKEGSPCPLCGAEHHPAIQAYQNIELPKSEQRLKDLRQQFEALQATKISLVNKKEFQQQEYDHILQEITDAEPRLNILTQQWQETCAILQTEISLSDKPALELFVQQNQSAHRLCQTQLTEFELAEKTYQKTEKTVTAHQEYVKEIERNIELSKHQHNILKKQLSELQPEIQQQQHKLTDVIEKMTSELQQYNLSLPMLNDTENWLQQRREEWQIYQNCHENWQQIQKEEAVIQNQIESLHKQKEEYLSHLNRLNQTAQQQKQQLAETQQQRQQLFGEQSVTEITQALQQQSQKLEEMHKQALSHLQQAQSSINQLTGAIHETEKNDNQSEQQKQQAEQNFNAALAKSPFADQHAVESALLSQEQRKELRQLKEQLEQQQIQANALCQKAAETLQQHRKNRPELLNQYTKSQLTEQLENMTDELKRNTLQQGELKNLLGNDAIRRQQQKSLLEEISHCRQNYDDWSYLNNLIGSADGAKFRRFAQGLTLDHLVHLANQRLKKLHGRYDLQRKNSDGLELQVVDTWQADAIRDTKTLSGGESFLVSLALALALSDLVSNKTCIDSLFLDEGFGTLDPETLDIALDALDHLNASGKTIGVISHIEAMKERIPVQIKVKKINGLGISKLSPEFRYDQQZ

SEQ ID NO: 396 - protein, 422 aa, Photorhabdus luminescens
LRCDVLVIGAGPAGLATAQAAIQGQQSVILIDDNPRAGGQIWRQGPFHTLPPMAKRYLSVTSEDALIYLPGCKVIAVDNQCVIVETASRHRIVHYQRIILCTGAKEKLLPFPGWTLPGVTGAGGLQALIKSGLPMTGERVVIAGSGPLLLAVAQTVKKAGGNVAGIVEQAPLYRLFSFGLQLFRWPNKLHQAITLIPLKNYYKNSMVLGVETSVEGRLTGVYISNKGQKQKLSCTRLACGFGLRPNTELAQLLGCLLDEQGNIQVDAWQQTTLSGVYAAGECTGIGGSELVLCEGFIAGFAASGQCALAEKWRQKRVKWQHFATAVAQTFKLNEEIARALPPDTLICRCEDVHLNELEPFQDWNSAKMATRCGMGACQGKICSAILHDIKHWAIPSPRIPLSPTSLETLAAGDTEKINFSDZ

SEQ ID NO: 397 - protein, 392 aa, Photorhabdus luminescens
QINHCQERSFCLGNQCMTPCQISDVIIVGAGIVGAACAYQLVQDGLRVVVIDNGGKGATQAGMGHLVCMDDNPAELALSSYSLDIWRTFTPHMPENCAWRGCGTLWLADAEDEMALAEEKSARLAAYGIENMPMTATQIHQMEPMVRRGIAGGLSVPGDGMVYAPNVVHWFLASGNEKIQFIKGQVHALKPQTVVLRDGKKYCAPRILLANGLWSTHLLPELPLVPKKGQLAITDRYPTCITHQLVELGYSASTHASNGTSIAFNVQARPTGQLLIGSSRQFHNEKHTIDLGLLRSMLQRALHFLPQLGQMNILRCWSGFRAATPDGLPLLGQHPAYEWLWLAVGHEGLGVTTAPGSAKIISALMLNSKTEIDPLPYQPARFTAMAHQRLLZ

SEQ ID NO: 398 - protein, 321 aa, Photorhabdus luminescens
LGGFMADKHDYQIVRVIDSHTGGEPTRTVIEGFPSLGKGTVAKQCQRFETEFDHWRKALILEPKGNDVLVGALLCPPAVPDADMGVIFFNNAGYLGMCGHGTMGLIASLHHLGWLTPSKYKIETPVGMVEAVLHQDGAVSVYNVPSYRYQQNVTVNVPGVGDVNGDIAWGGNWFFLIGQHNLFLTPNHIDELTQYSWAVRQALAQAGITGEKGECIDHIELFAPDNHADSRNFVLCPGKAYDRSPCGTGTSAKLACLAADGKLQPGEIWCQSSIIGSVFEAQYQWIGQKIAPVIRGTAHVYGDNKLIIAKSDPFVWGINVZ

SEQ ID NO: 399 - protein, 292 aa, Photorhabdus luminescens
PDTSQKSYFTGNRLEISMMNIYRNGIGTNGHDACNVEFLAALCSGLVNHKPSNLQDILNAVALITPLLNAIPSVVFFIKDIKARYLIANLTLATRCGFKSISSLLGKTSSEIFPAQMGSCYTEQDLRVLHQGVIIQNQLELHFYHGRKAGWCMTYKLPLYNQHNHIIGMAGISHDLMEVKENHPVYQKLAIVDDYIREHFDRTIRLDELTHLTCLSVAQLERYCKRIFHLTPRQMIHKIRIEKASELLATELPITDVALRCGYTDHSAFTRQFKTSTGLTPSDFRQSIGVEZ

SEQ ID NO: 400 - protein, 307 aa, Photorhabdus luminescens
MNKRKVNWHGVFPAVTTQFNSDFSINLDATQKVMTNLIKDGVSGLVVNGSVGENTSLSMKEKRTIVELALDVAGGKVPVLSGIAELTTDNACKMVSECRQAGANGVMIMPPLVYTPTPKENRAYFRTIAASTDLPVMLYNNPLLYKNDITPKILTSLADCENIVAFKDSSGNTRPFSDIPNEAGDRFILFAGLDDVVLESVAVGAEGWISGMSNAFPREGETLFRLAKQKRYEEARELYRWFMPLLHLDFRPDLVQCIKLCEEMVGRGSAITRPPRLPLERETLAEVRAIVEQALANRPSLPDVGLZ

SEQ ID NO: 401 - protein, 528 aa, Photorhabdus luminescens
MLVTHSGRQFIGGRRQAEGERCLHSRRAVDNAPTGYAFYQATRHEVDLAAQAAADAFTRYSQTSLEERAVFLDKIADEIDALGDDFIALVSEETALPPARIQGERSRTSGQMRLFATLLRRGDMHAARIDTAQPARKPLPRVDIRQCHIPLGPIAVFGASNFPLAFSTAGGDTASALAAGCSVVFKAHSGHMATAEIIAEAIGRAIIAAQMPAGVFNMIYGNSVGADLVKHPIIQAVGFTGSLAGGRALFDMAMQRPQPIPVFAEMSSINPVIVLPNALAQRGKPIAQELANSFTLGSGQFCTKPGIILGIRSPEFDQFITQLTREITLRPAQSMLNQGTLLNYQKGIHQLDDEPLMTRLAIGEHHENQASAMLYRADIALLLNKNALLQEEVFGPVAIVVEAESQYQLLRAIDCLQGQLTATLIGEHDELANAHELSRRLQNIAGRVVVNGYPTGVEVCDAVVHGGPYPATSDVRGTSVGTLAIWRFLRPVCFQNYPKSLLPLALQDHNPLNISRLINGVMSREVLZ

SEQ ID NO: 402 - protein, 534 aa, Photorhabdus luminescens
MALYKASSRPKSDSGQGKFKKQLTLTDLTFIGLGAIFGSGWLFAASHVSVIAGPAGIFSWLIGGIAVLLLGIVYCELGAALPKSGGIIRYPVFSHGELMGYLMGSITLIAFSSLIAIEVVAARQYAAAWFPFLSQPGSGDPTLTGWLVQFILLAFFFYLNYNSVKTFAKSNNIISIFKFIVPLLVIIILFNYFNPSNLQVHGFSPFGISGIEAAVSTGGIIFAYLGLTPIISVAGEVEKPQKTIPIALILSISLSTVIYVLLQLAFLGGIPSDLLFSGWNNIGQYFSLPFRDIALILGVGWLAFLVVCDAVISPSGTGNIYMNATPRVVYGWAKSGTLFNVFTHVDEKSGIPRPALWLTFILSVFWTLPFPSWEKLISVVSAALILSYALAPVTASALRRNAKEIKRPFYVKWFAIIGPLSFIISAFIVYWSGWKTVSWLLGLQIILFFIYLLFKNKVPIGKVSLRQQITSALWLISFYSAMIILSYLGTFGGKGIIPAPWDIVAVAVISLIAFYWGTFSALPNAILPTEDEDZ

SEQ ID NO: 403 - protein, 199 aa, Photorhabdus luminescens
MKGGRMSNVIREISDANIAYAATFGDKKNLGLPAVRRFAILTCMDARLDPAKFAGLSEGDAHIIRNAGGRASDDAIRSLIISYKLFGTKEWFVIHHTNCGMELFTDNIMGDLLESSLESAIMTDEGFKDVGNGTGSSEGKYIKWLTINNQVDSVVEDIHRIRTHPLVPANISIYGYIFDVKSGKLIEVPEAASIAEDAZ

SEQ ID NO: 404 - protein, 295 aa, Photorhabdus luminescens
MNKLVEIFCDVDDFCRFFIPQWELFCFEKGYRQRHRQGHMHPSEIMTILILFHMAHYRDFKHFYLEHIWKYHHKDFPTLLSYTRFVSVAPSVLVPLCSYLTQLKGKPTKIAFIDSTSLCVCHNIRIPRHKVFKGIAQRGKTSMGWFYGFKLHLVVNHQGEILALKVTPGNVNDREPVRELSKSLTGYLYGDKGYLSQELADDLAKIGVTFITKKRRNMKAQALSEWNNLMLKKRFIIETINGQLKTISQIEHSRHRSIKGFLLCVLGGLIAYSLKLKKPSLKIFYSEKDILMTAZ

SEQ ID NO: 405 - protein, 402 aa, Photorhabdus luminescens
QGVVMKILNIIILSLSTVIASNSLADEIRARDLGIPFSGVTGKYNAITDVSGVEVGYSTIIEGDGKLEVGKGPIRTGVTAILPKGKKFSPVFSSTFSLNGNGDMTGNQWVKESGFLETPILITNTHSVGIVRDSTISWMIDNNLTSPLKDDLFWLLPVVAETWDGILNDINGMHVKKEHVYHALNSAKSGAIEEGNVGGGTGMNLFKFKGGTGTSSRILDKKDGGYTVGVLVQGNFGDRDDLIIAGIPVGKEIQDLKPIYHGGKKKIKDAGSIIAVVATDAPLAPHQLEKIAKRVSLGLAKVGGVARNTSGEIFIAFSTANNDAFSRKDVRTIKILSNDKLDPLYEATISATEEAIINAMIAAKKMVGRNGNTSFSIPKDRVQEILKKHHVLAQTQSDTSIZ

SEQ ID NO: 406 - protein, 305 aa, Photorhabdus luminescens
VAKKEKRPHHDVLFKYFLTQPETAREFLYLYLPEEVQSLCDLATLKLEPGSFVDRHLRQLHSDVLYSVETARGQGYIYCLIEHQSTPDPLMAWRLMGYAMSAMAAHLKKGHTELPLVVPLLFYHGEVRPYPYSNRWLDCFTFPEQAARLYCQEFPLVDVSVLSDEEILTHKGVALMELVQKHIRCRDMLEWVPQLVKLLNAGYNTTEQRNVVLRYILLNGHTPDLSQFVHQLIEQSPEHETMLMTIAEQLEQKGREQGRVEGRVEGREEGKLETACALLRHGVSLDIIVTSTGLSRDKIEALKHZ

SEQ ID NO: 407 - protein, 804 aa, Photorhabdus luminescens
MHHYIGICVVAQSQIVSQGVKEAINKLELSIAAESDPCEVWKLNSTVSVDSIMTYLLQQARGYLLVYQKKHQFSFHVMTYETLDEALADIARHPDRTLDLVIADDLFLQHGHYEQVSHQFFRLFESNPGKLSPYSFLLSLSEMIPGSARIQEMDSVTLNIWQPDPLVWEIQVLKNLMDHLDSTYINPLLVRATTSKVTISSMAQFIHDYMECHFKERWDFHYYTGSMISGFIDSMLRLCDGTSTLCESGPNEHSLAVSALCGWQFYQRGYVIAVTSGMIDEFRGTLCNLKRAHAPGIIICADSPGNSWFPFQGTMHRDYDGKKSIEAKGIPCVYINDQLNLPERLNEAIDLLQSQPGPVFILATQSVLECTLKPEQLPHPSQWSLLVPQIGDNEASVMDAVMSLINHDKRRILWQCCHLTDHERELIYQIAEKAGIALVDTLVSPGAVSDYHQQKPVSNYIGILSVYGFSSKVFHYLHEGQQLADPESQSIFFLKSKVDEASSPFSASKLKNKCHIIQVNCRLEHMSPYTDLAVHSYLRSFLKTVLTRLNVDEKVLAYRRRELERVQNYPNITPIDWLPQVPMSPNYFYAHLGKQLHHLISEQGFVYTGVYDVGRCGIGAMRNLPKTGKGFSGWYGRALMGDALMSLPYLARTSSQNILAFIGDGARDLIPNIESHIERALMQNPHRQKINISVFYLCNGMLSMIRSYIDMRSATNNTKQTLLAASSRNLSLFTAANVQVVPDAYATTQVIRERWTTFDATYCETMLTTPQTIYFIDVMLSHNSDGDGMVLFSEATWQRANIIZ

SEQ ID NO: 408 - protein, 444 aa, Photorhabdus luminescens
MSKTHYSESLNLKSHWMPFSANRSFQRDPRLIVAAEGQWLKDDKGRQIYDSLSGLWTCGAGHTRTEIQQAVAAQLSTLDYSPGFQFGHPLSFQLAEKIANLTPGDLNHVFFTSSGSESVDTAVKMVRAYWRVKGQPEKTKLIGRALGYHGVNIAGTSLGGIGGNRKMFGQLMDVDHLPHTLQTDMAFTPGMAETGGAELANEMLKLIELHDASNIAAVIVEPVSGSAGAIIPPKGYLQRLREICDQHNILLIFDEVITGFGRMGRWTGAEYFGVTPDLLNFAKQITNGAIPLGGVVASSEIYEAFMSQSLPEHSVEFSHGYTYSAHPVACAAGLATLDLLDKNHLIQRSAELAPHFETALHALRNCPNVTDIRNCGLVGAIELAARDGDTAVRPFDASMALWKAGFYVRFGGDTLQFGPMFNAERADLDRLFDAVGEVLHHIDZ

SEQ ID NO: 409 - protein, 386 aa, Photorhabdus luminescens
SHNFNILFIGFIGEIMSTEYKIYIVNQQDKKKKFWCFLSEPQSEVSDKVFANSSTYMTLSKYERGDENAFIIPLEFKLKASSHNKVVGISSQISTHSLRNIELGSVWKVEFDSSEEHINPSLSKLSEETEPNQVGIKINGFDLTEQEINQWYSCLTFGIKSGAGFIGYSWLPSPSDTYHIQPKIEFYVKTGEYIENQLIKMSDVSSDSALITEENFDKRKECTVIYTTTGKWKIKPGKPSQLLYDNSLVKNLVSAHINLTASHSALVELIEKNYSEYNSRQEKRVSDIEEPTLWYISAVITLAAGFTNEILIPILKEKIVSYLYGNNFELKEIRIVKSGIEFIYSLKRGGILRDSKNNKYLLDITKEALEFEKQEHHIQSYKITNZ

SEQ ID NO: 410 - protein, 1107 aa, Photorhabdus luminescens
MCMKGKAAPELAHSPNRILHPLRRTNPKGDADPGWEKITWDEALTYVAEKLAFYKAESGAESVAFSVTSPSGTPLSDSLEWIERFIRNFGSPNVCYSTEVCNWHKDEAHKFTFGCSIPVADYRNAELIILWGHNPTNTWLAQAEALGAGRNAGAKLIVVDPRHTALAKESDNWLNINPGTDAALALGLINIIINRRGYDQAFVARWTNASLLVRNDNGLFLREKDINISAKKNRYVVWNNITQSPLPYDIHENVPCDENDHYALLGEFSINSAEDVNKKIPCKSAFQRLLNECQPYTPEYVEKITGITKEKLLYAADLIISSKRIAYHSWTGVAQHTNATQSERAIAVLYALTGCFDTQGSNRVYNKHPVNPVNARRLMPKEQQEKALGFKERPLGPPLDGWITSHDLYQAILHKRPYPIRAMMAFGTNMLSSHADTKIGIDALKQLEFHVHCDLFETPTAHYADILLPVNTPWEREGLRVGFEISAKAEELVQLRQKMISPRGESRSDNEIVFDLACRLGMNDLFFNGSVEAGWNYILEPIGLTVEALREKPAGISMPLIQHDRKYAGIDPVKNTVKGFDTETGVVEIYSEKLWRHGYPPLPIYDEPKENLNSESHFPYRLTSVKNGFYCHSQQRSLTRLRKKSPYPKLEINSRLAEKKGINNGDWVEVITRNGEARFKASLDDNIAYDTIIAEFGWWQACPDYGKEGFPAIGKNSSNYNALISDDSCDPISGASPLRSFRCDIKLAEDINPERRPWQGRKAFRVVDTKPEAKGVKTVIFESQDGTMLPDYEPGQHITVQVSIPGQDAPVIRAYSLTGTATLEGRKSYSISVRHQKSITSDGETFEGVMSSYINKTLVAGAEVNLTPPGGNFIIPLNAKQPVVMLAGGIGITPFISYLESLPANGEKPELLLLYANQNSNTHTFSKRLKEIESKIKQLKVINYYSNPLPVDIEGINYQYHGYITADAVPETLIKQQARFYMCGPAPMMKTFEEGLLTLGVPPFDIYKEMFRSLTPVKIKDGKSFAVKFEKSGVPLEWSPDKGTLLNFGEKSGIKMASGCRVGQCESCAVKLKSGEVQHLNGVEPSEQGMCLTCQCIPISDISIDAZ

SEQ ID NO: 411 - protein, 324 aa, Photorhabdus luminescens
NKSIQQYRNDIIKTKIRGLFMILKNINLLKVVLIITFATNQSLAANNITFLSNPSPQHVKDIGNFVVKQTEKPFFSDVILFAANINNSISNSPVLFYNDKISSILKENISLVRNLQKKGIRVQLSYLGNHQNAGWSCNMSQATATKLANEMVNDVVKYGLDGINIDDEYSTCYGNRQSFYWVADAIKSHPKFANKILTKALWSDYLYFKEPTNIANLLDAGYEMTYINTSASKLVPYVNFGMKKENLLLGISPEKNSISSVQNITRSVINNGYSGMMVWSPNTIFTIDQASQYYTKIIKAEEGINKEVIYVPDTSKDNASNYEZ

SEQ ID NO: 412 - protein, 307 aa, Photorhabdus luminescens
MPLDKNVEKWLASTPEIAIGEDSPLEQLRIVLEHALIQQQGEWNDATYNSSFTVLAEDGFPIPVRMYVPYGKEKMSDKPALVYAHGGGWCLGSLDAWDRPCRKLAESMGCVIFSVDYRLAPENPFPVPLTDFYAALCYVTDNAEKFGINRQQIAVGGDSAGGNLAVAACLMSRNQEGPAICYQLLFYPALDASMETDSYDKYGEGYVLTKQMMAFFWQAYINEHNSRTNPLISPSHLTHFEGLPDATILLCEYDPLRSEGEAYAQQLRDAGVSVQIETIEGMIHGAMHMTAVTPSVEAFYKKFCFCZ

SEQ ID NO: 413 - protein, 357 aa, Photorhabdus luminescens
LLTKLKGIYMHNKFFSLLPATLFFFSSFSIGAIQETRMINFENKISLPRSTEEQLYKLGNELHSASVDKLYSARYWGKYGTFSKVGMEVQGSLAYGMALASSSDLDIAFVYKYNNGESMNRLSPIELKVNAVNVFKEVFGSRYNYTIKAPVINLSNSTEDVDIAFFNVLNNSTPLCSIDKRCSELNYGKDPATSEWYRSERLSLYSELDNVFSKKTPKREIINRSGKILKVWREKIFSDQDVKIPSIALVTMIYDFSKDKGTTYNYNKSTDTLRDVTSYGITKYFKNDKCEGAPNAKIDLPVYQQDRNLLSRLNSSQRMNTCLKLVEFNKALIKATSAHVSEADSVKILEPFIGQFZ

SEQ ID NO: 414 - protein, 293 aa, Photorhabdus luminescens
MSLVPFKQVDVFTHRPFKGNPVAVVMDAQELSSIQMQGIANWTNLSETTFILPAENPLADYRVRIFTPGSELPFAGHPTIGTAHALLEAGLIQAREGRIVQECGAGLITLNVTERDEGQKLITFELPEPTITPLSSEQIDRLESILDCPLDRALTPALIDVGARWIVAHTTGAEAVLATKPDYARLLEHDTQMNITGVCLYGAYHEGAEADIEVRSFAPSCGVNEDPVCGSGNGSVAAFMRHHKVAMIDDKIVHSSQGKKLGRQGSVWLSHSDGKIFVGGSAVTCINGTITIZ

SEQ ID NO: 415 - protein, 438 aa, Photorhabdus luminescens
MIKVIYTNNKEQWKEGLSIIKTDEKANLIVTNNRGRKLDGFGGCFNELGMKALLDLDKENKKTVLDKLFSPDGECKLTLARIPIGASDYAISWYSLNDIEDDYNMAHFSIQRDRNLLIPYIKEALKRQPNLKISASPWSPPVWLKTHQVYNFGRLKSDVQSQNAYALYFAKFIEEYQKEGISIDQIHIQNEVAADQKFPSCVWSGEQLREFIKKYLGPKFEQNNVKTEIWLGTINAPEFSKEIGQDYDDYANCVLRDIDAYKYIKGVGYQWQGKNAIQRTVQSYPELRYYQTENECGDGHNSWEYAHYVFTLFRHYLTNGANGYLYWNMVLHSGGESSWGWKQNSMISIPKGINEVIYNPEYYVMRHFSGLILPDAQHIELEGSMSGNAVAFENKTGSLVVNINNSYKEKQKINISYNNDIWSIYLEPNSINSIIFNZ

SEQ ID NO: 416 - protein, 481 aa, Photorhabdus luminescens
MKNKFPTGFLWGGAVAANQVEGYWNQDGKGMSIADVMTKGEHGVNRVITHGIEENKIYPNHQGVKFYSHYKDDIALFAEMGFKCFRTSIAWSRIFPHGDELQPNEAGLKFYDDLIDELLKYNIEPIITLSHFEMPYHLVKEYGGWHNRKLINFFMNFSLTVMERYKNKVKYWITFNEINNQINWQYPLFGYCNSGVIYQDYDNPEQVMYQTIHHQFVASAKVVKLGHEINPNFKIGGMIHMSPLYPASCKPEDVLYAQQAMRQKYLFSDVQLRGYYPSYLIKEWERKKIELHIEDDDLNWLKEGCADYLAISYYMSNIVSSSTEMLEKNSQSLSFFEKGRDNPYLKSSEWEWQIDPIGIRYSLSELYERYQKPIFIVENGLGSVDKLPQNGVINDDYRIEYLASHLSEIKKSILFDGVDILGYTSWGCIDCVSFSTGEYRKRYGFIYVNVDDNGNGDFVRYKKKSFSWYKKVIATNGEDIZ

SEQ ID NO: 417 - protein, 267 aa, Photorhabdus luminescens
IYASHDVRKRMRKRDNIMNNKKIREFAELTSEQVLTAVEGKTLIWPIGGIEQHGPHLPLNVDSVIPEAFARVLAEDINGFTLPVQPVSARSLPQSGGGLEFPGTVYLDGSTFTAYISRTIKSLCSLPFKQLVIINGHFENEGFIFEAVDALRAEGHFNDRSVIVFSWWSLVSDDWTREHLVDFPGWHAEHAGLTETSLMLHLRPDLVRAERPDHDKPPRAGIYQVPIKKEFSTRGVLSKTSGSSAEIGELIFEHVRQQILELVTADZ

SEQ ID NO: 418 - protein, 394 aa, Photorhabdus luminescens
MNRRYHITLLLNANKAYDRQVIEGIGEYLQEFQCNWDIFIEEDFTTKLNSLKTLQSDGIIADFDDIEIQRFFSPLEIPVIGVGGSYHQESHYPAAHYIATNNFALIESAFNHLKDKGIKRFAFYGLPQTSGKRWAIEREYAFRQLVEKEKYQGVIYQGMETTPEDWFYAQNRLKDWLQTLPPNTGIIAVTDARARHILAACEYLNIPIPEKICVIGIDNEEIARFLSRTALSSVVQGTQKMGYQAAKLLHKLLKGYVPKKYHRQLIPPLKVIARQSTDFRALNDPAVIQAMHYIRHHACKGIRVEQVIDAIGMSRSNLENRFKSEFGQTIHTIIHNEKLDKVKNLLIHTSISISEIVTVCGYSSLHYFYSMFKRNYNMTPKEYRDKYKITKKSZ

SEQ ID NO: 419 - protein, 440 aa, Photorhabdus luminescens
MHRYFERVNRISYEGRQSNNPLAFRHYNPEEIILGKKMKDHLRFAVCYWHNFCWDGTDMFGSGAFERFWQKGGDALELAKLKADVAFEFFYKLNIPFYCFHDIDVAPEGCSLKEYIYNLGVMSDILADKQAETGVKLLWGTANCFTHPRYAAGASTNPDLNIFAYASAQVCQVMQMTKKLGGENYVLWGGREGYESLLNTDLRQEREQIGRFMQMVVDYKYKIGFQGTLLIEPKPQEPTKHQYDYDVATVYGFLKQFGLENEIKVNIEANHATLAGHSFQHEVATAIALGILGSIDANRGDAQLGWDTDQFPNSVEENSLVMYEILKAGGFTTGGLNFDAKVRRQSIDIDDLFYGHIGAIDTMALSLKSAVKILVDGKLDEYVAQRYSGWNSELGRDILEGKMTLDEVAHYAETLVQEPKHRSGQQELLENLINRYIYDZ

SEQ ID NO: 420 - protein, 198 aa, Photorhabdus luminescens
QVKGDYEMAHIQLGNGEIINLTEAETRNSREAKGGYVYMLDNIAYKPMNLNNSIKSVFKNCDRSYGLPSVYLDVFNAKFSFQGSNGIDRNDDATIIKMKRIDTSNNSGNHFFQISHGGRANLENFINNESDKERLKRILRALCAARESNLKDIQGFYSSKGSNPILFCDIHCGTTPSLEIEELIEYTQNRMKNSLDDZ

SEQ ID NO: 421 - protein, 323 aa, Photorhabdus luminescens
MAYTQLTETERYQISSLREAGFSQLFIAKSLKRSPSTISRELKRNQEVQTYCPEQAHLKVLARRHFAKKAVKITPEVKRWIKRLIWKDLSPEQVADYLKQHKGISLHHETIYRLIYQDKREGGDLWQHLRIARKPYRKRYGRYERRGKIKNRVSIDERPEIVDKKERIGDWEGDTIIGKDKKSVLLTLVDRKTLYTIIVKLDSKQASEVAKAAVKVLYPLKQKVKTITFDNGLEFADHEIIGEELETQIYFAHPYSPWERGINENINGLIRQYFPKGTNFNEISDQEINFVVNRLNNRPRKTRGGKTPNELFKGIRTCLLPDZ

SEQ ID NO: 422 - protein, 1205 aa, Photorhabdus luminescens
AMKCRCKAWRWFTPLVLLLPLSGWSLNLFEYRNAQELPANGLPVEFYSNITQESQEFLPLPIKEQAVLPSRFPTLKVGILCCIGAPLVIHRWDGKLEGIYADYLRLIETVLKRPVEVRLFGNWESAYKALQRGDIQLLSNSASSQSGNEANDTYPILVQPLALMMRKEQVNMPFANMNIMAAPSSDPNVIKQLRKHYRTILIAKNQQEGIQAVVDGEMDAYLDGQSQIAYLLAFRPFTGLTYRRDISFGERYDFLGHSGDGIVEAVNLILTSIPHAIRNKVYERWISGLALGNNNDAAIFSAQEKAWIKKNPVINVALNRNTPPYSFLDKNGQITGLDVDILRLLGEKSGIIFNFIPTDGAVGIKKRLEDGEAQMTSMLNTPERNRWLSFSHPYGTVEWVMITRNERNAPYEFEQLKHHRVAIQRGNALLSLLKQYPEIFIIEVDSVTQGIDMVLAGAADATFDSLISADYLQASRYGANISIQFFKGSLQPEQYAVIPAYPQLVDILNKSIDALPPNELRVLRLKWLSMANVTPYDDNKISPWVKLWGGALFVIALSSAFWGSYLAHQIKRRKIAESNLQNLLAYWETLFNNMPTPMFVCDPTMCITAANLYFRHEMGSVGSEVIGRSLFSLCFLKPVDEQEISLIFLRCLEGAPVHFSDRNIVIQGQDKDVYLWLESYSNTEGVVQGIIGGWFDVTERKLLAQELRQERDKAELASLEKSDFLAHMSHEIRTPLQAIIGILDLEVKKQTQPSTPLHIAWQAAISLQGIIGDVLDFSKIESGRMVLNLKPESLQVILENCVATFSHRAKEKELFFTYQFDLPSEYYHLLDATRVTQIINNLLGNAIKFTEQGGVQISASYQLIPESQQDEITLVVADTGCGIPETMYEAVLLPYVQVTQHNGGKTGTGLGLPISVQLVELMGGNLKITGAPSGGAQVTVMLPLTRTIIEKEAISEKTENIETELHESLNILVVDDLPANLQVLSLQLAPSGHRIALTESGEQAMKLVEEGYFDIVLTDCQMPMMNGYQLAQLLRTHERLRQLPPFIILGCTANAFSTEQARCLEAGMNGVLIKPLVQSKLLAEITRYYRQINEEATLTFDEIQALAQQNVAVECQLLSAIQQGMSEDIAELQQQENQQCHEKVVHHAHRMKGAFALMQYQQGIRVCLRIEKSEQCDVKIIAVLLTRAEYFQQQIKQKLGELHSZ

SEQ ID NO: 423 - protein, 209 aa, Photorhabdus luminescens
MPRQVIIADDHPVFLLGLRTILATLPENYQIVGEAHDVTSLFSLLEEKEADMLITDFIMPGNNQIDGLRMISRIREQYPNLPIVVITMINDRKIIASLIDYKVKAILNKNSLSHELVKGLYSTTGRYEPYLSEQFLESPDEEVVKTLTSKELEVIKLLGQGLSVNDIAARLYRTKQTISAQKISAMKKLGLDSEAALYNYLHQIGLGLZ

SEQ ID NO: 424 - protein, 457 aa, Photorhabdus luminescens
TVKYSYDQTKRNYHYLILSTKGSKHLSLLLLSYNVTSVLRNEIPMKMKKIVIFWFIFTLVNFALALLNLQVRDVWSLSSLVWFPAGLLQGIFCARAPRYWPVWLITGALISLTASQWYGRPVNVSLTFSSINMMMLVATALIWQFFYGVMWAPKRTRDIINLTVLCSLSGIIERFIAKWILYLFGYPTDISVSLPIVVGSVLSYLPLTLFVIYYITHEKNEVGNWKTYGLCLVALFAMTALFISPPPEAGKIHWQGIALLFSFSLPMLLAFSGNLLALSSFLSLCTVGIVSATIFGLGPFSSPLTHLQQNVQIAAWYSTALTLPALLCCSCLSNIINALHRRKARFLLMRAMLDQEQVNCFRLSAKGHLYWHHNSAAWMRFGKAPASWSQLMAWVHQEDRHKIEQLKNSVSQIPQTLKVRIADGKGEFNLIIIALIVHVGENAGFIEGTIREIKSKZ

SEQ ID NO: 425 - protein, 861 aa, Photorhabdus luminescens
VSNYLKQIVSKLTVEARQCLDEAVNLAVRRTHHEVEIEHLLLALFEKQLPTMEQVCHHGGIDSMTLLNACQRSLALLRSGNHRPPVLATNLTEWMEQTWMYASTHWGASQITAQVLIVALIMNPSLHHSLTSELQQALQGNTDGIEPWLRTQTNTTPQHITAPVGDNTQSALAQYTHHLTQAARDNKLDPVLGREREIRQLIDVLLRRRQNNPLLTGEAGVGKTALIEGLAQRIVDGRVPKVLAQAELFTLDMGLLQAGASVKGEFESRLQKLLDEVKKYPTPVILFIDEAHTLIGAGGQAGQNDAANLLKPALARGELRAIAATTWSEYKKYFEKDAALARRFQLIKVEEPSLELAIAMLRAITPAMEKHHNVKVLAEAVTEAVTLANRYITGRQLPDKSVSLLDSACARVAVSQTDEPAPIEDLRAMLANIAAEQEALLREGGHETQLQKLAQRQAKLQASLAEILPEYHAQRQLVNDILACDEHDERLPVLRAELHQRHHQHAYVFDCVDAACVADIVAGWTGIPLGRMVENERDVLRQLETRLGQRVMGQDHALSQIARQIRIAKVQLADPIKPTGVFMLAGPSGVGKTETALALAHELYGGEHHLITINMSEYQEAHSVSGLKGSPPGYVGYGQGGVLTEAVRRQPYSVVLLDEVEKAHPDVLELFFQVFDKGMMEDAEGQQINFRNTLIILTTNAASDLVMRAAMHGVKEQGENRPATLEDIQEIIRPELQRIFTPAFLGRLQVIPYLPVQGEVLHAIVHHKLNKIVTRYRQSTQCELHYSDTLVDFIAKGCQIAESGAREIDNLLTQFVLPLLSDQLLLGGVPVNQDVWMDVIDGQIQLRSDQKKLSLSNIINZ

SEQ ID NO: 426 - protein, 1175 aa, Photorhabdus luminescens
TRKSNMKKLFYAIGWLSVMVILLLLSLTIAVAFSWPTIGGLLLFICLLLLLLLLRVAMAFMPEIMNKLRWLNKFWRKGNNRLEYLLYQHWRQGGYLQSWRRFRSLLHRNEPVPPWFLVVGERGNGKQKLLTRCNVVPMTGKNLPALTENTFTCRWWFFRRAMYMVVSGRYTEGQSLYRQAWLRLISWIAQVRKPAGVLVCLSVEQLLNSDNRALYIAARQVRAQLEPLQIRLERRLPIWLILTHSETLPGFDHWCTQLSVEQHAELLGDFIEHHTVGNVTDVLDKSMNTIVNTLKMMRLKLLNQQRQQPNAEILALPETVAQLQPALGCYLNALFDQDHYLEHGLLRGLFFTAEHQTAGVFSQRLLGEYLPDQVQHSQDQRSHNVLLTGWRTLTKRVCVSLLSLMLVYGVGNALMTTWRGVTQLENIHEADPLERSYLRYQKVEYWLQETLPSLFFYPVTHTMEQRMAQQYQQQAPVGAFNPESVAAHLLARFHNAETPQKRLLVLHWARFINIEQAMTHGATLETLQRMPAYSASLLSGENDPLSAEQRVALRLAQYRQGNAQQAFDQWRNVLQTLLEDSNNWQWLLADEQPTGTHSLTLADFWPLASDDVATINTRIRGIYTQAGEQDIQATLGELAQALNRPAFFTPLQRSFYQQYQNQRQSEWLAFAQAMPQGEMLVRGKKNWQALILAAGQYDSPYITFLTQLERDLSSIEQADRQPWLQTQQRLWQLHGYVQKSGMMQRVSLGNFSVRQRIMSWLGISPQISVRLDDTALTRYRAYRQAVQLNSQRELLSDMETEVLVKNALNNEKGELDDSGLRALFNRFTLWHHETESKQSAGVNETLWRLYQGDAHLVLRYAFLSAASRLQTQWESKVIWPMEKLSRQELFDGRELNARLYEYSNAFVRDTAGYALDIRPEGIKRQEIEDVVFPFSDDFIFYINNLIQPNDLLSATSDIRRRLQEKLALLESEQQLTTAQQEPEQEQKPSAEVTIVSQPATANRGAKVLPVGSSVTLSCDDGVQQLKSMNFNDSMTLHWSPGTCGKVQIDIYFPRFTLSKSYIGSDGLLQFMHAFSRGELTLAAQAFPQRRDELSALGINNITVRYQVSESTAVSTLYQQWQQHQQQQTALLEQRNRLDSQLLNLSEPTVAKGTLSTLPSQITTHWNELRKPKSEZ

SEQ ID NO: 427 - protein, 254 aa, Photorhabdus luminescens
PSKHLLFPARKSRCIMAAGRREQTCGSALGRCARRFTNRNRYSESVMMQLLDCYIPVFTCVLRMIQQQVNQAETLRQTVLAELTQAQNRARLQGYGAQDIEEANFAVVVWADEAILCAGQKALSIWRQSSLQAELYDAELGGNTFFDRLAALVPDNYPVRLVYVFCLLAGFYGRYGKHDNLELHNIIQQELNNLPDTLRGYLSLENHRLMNSYDNKPKNKYPNHKWRRKLILFMSSITLIYIFITVYLLSIGRZ

SEQ ID NO: 428 - protein, 290 aa, Photorhabdus luminescens
MENRVIEPTYDVLGMKIKNPIIVGSGLLSDQAKNIRQFIAHGAGAVVTKTIYPRSEKLHTEKTYLFSTGMLNNTTYSKKTVEYWLTLLREFKEEQLPVIVSIHAESPEALASLAVRISAVTDAPLELGISCLHADDFTEDTPERVFNYTKVVKERTNTPFAVKLSLGDNLYGRVQAAVEGGADAITLSDTISGIAFDTANGEALLNGVCGYSGPGIKPMVLAAIYNLRKRGVTIPILGSGGVQDGNDVHEYLLAGANTVQVYTALHRHMYKTLQRIVHEYTQVMTSEKGZ

SEQ ID NO: 429 - protein, 467 aa, Photorhabdus luminescens
PMFEHKPMYWYSGLYLQPQHFQAHELQHEYWQGRYQLLTQPYAFGVVKLAFNLAALSDEVLSVHHAAFIFPDGGYVDCDVNGVLSARSLRDCWPVRDKPQRIYVGLRMFSHNQNNVTGITDANGVGNITSRWVTWPQEQRMRDAFGEGPEAEVQQLTYNLRFFLHDEIAQATGYTLLPVGQLHCTSDGIALDNRYLPPCLTLYAVPQLGQRIDQLCQELTGRIHQLEELKRPQTLEGEIYTQEKSTLLLTLRTLARYVVQLHHFQEARDVHPLQIFGLLRQLISELSCFTDRCSFLGQWNGQEEVLEKYQHLDLALTLDSCERTIADLLNALVLEPNTVISLQQESRGYYHATFNTTGSNEQQRLYLVLRSDSFTHREREIPDDRLIKLAAAEQIDNIINRALPGVRLYYQEIAPHGLPNRANTCYFRLENRGALWQQVEESKRVAVHWADAPDDLQTEIVIVRASZ

SEQ ID NO: 430 - protein, 376 aa, Photorhabdus luminescens
LLLEMEVTVNLAQTDIARFLQPIAADKPAGCDIEYEPIFEQINAARETDDDFLQDDTWGYETRQADWMKVSALCQEVLEKQSKDLQIACWLTQAQGELYGLAGISGGITLLAHLLETFWPVLYPPLDDTEANSADARLGRLSWLDNQLVKQLDNLTLTDDGKLSLSVWQRVQYFEQRAAVNSELRSALISDGYFGMAECDGSIRTTPAEQFNQLLTRAEQVNKALAELQKIMVELLPDAGNSMSASTQRLQELVALIERFRDMVAPGSSQEYGNSNEAIAAGGDAPNGMNTTFLTEDRAHHEMRAIAIGQMINIANYFRQNEPTSPVPYLIERAARWANMGMAEWLEEMMSENTSALQEIMRVMKGPEINREQNEZ

SEQ ID NO: 431 - protein, 232 aa, Photorhabdus luminescens
PVVIVPPCAHRSPSLAAGRPPINTVGLPMTTVSGGPTHTSIEPIVAAGNPPISTVGTPGGIIGPPTCGTGGTAGETIGQICISPTRAAGIGIIVLLIMWLHGVDSFCVPDPAMAAIALVDHVPVEKIAQRTAFVVLVVRHKGEISGTTYRLMPPVTATVVDRPLPNPGRSCCLHSKKRKAPDMRSGYQTRLFAPVRTVHDATDHRHQPASAALVAITTVVLASDRVRKHRRZ

SEQ ID NO: 432 - protein, 669 aa, Photorhabdus luminescens
MLLGQKNRFLQVIGNLSDIVALNKIEGEEHLSRPYSFSAQLYSNADWDKLESHIGKPLAFRLGEAPNHRIVHGILTELQQQGFSDGQFCYQARIEPWLKMLTLTHNLRVYQRISVPDMVCDIFRKRGFNDVELALKSRYPKLEYCMQYKESDFDFVTRQLEHAGIFYFFRHEERRHVLVLADHPSAFINAPLAVLPYQSKMGDQQGYGLRAWHIHRTMIPGTAEMNGYNVKSAAAISASAKANSGYSTNPKLSIYDDRRQEERNQLETQATLCMEQWESQSYYARAVNSYPSLQVGHQFTLKGHTSADGRYAVGHQRLKAENNLEEGELLFSSQVTLFPANNVFRPRPSVTRPYISGVLSALVVGPTSEEIHTDEQGRIKIQFHWDKEHKKDDDSSCWIRVSQFWNGAKFGAQFVPRVGNEVLVSFIDGDPDSPLVTGTVYNGVKMPPFALPGQKTQSGITTRSSAKGTVEQGHQFCFEDKKGEEFILLHSQKDMRLKVKNDFSAQIDRNVLWEIQEKRDTQIKKGNDTLILSEGNALTEVKKGDKKQTLDRGNFTTTVSAGSYELEVSSGNAKINVGQQCTMTANQGIELKVGASTLSITPAGITIKAPSVTVEGSGKLALKSSGMAELTGTTVKVEGSAMAQLKGGIVQVDATGIAMVKGTLTKIGZ

SEQ ID NO: 433 - protein, 349 aa, Photorhabdus luminescens
YPPLATSQWEADMAIENKMRLVGGRFYQNVRRLLKRCRQREETAIIPDDVVQFSSVLTLDAPEREVESLLPPQEGDEQYRMAVHHFGLLGTLGALPLRYTEWLIDRRYRYGDESAQAFIDIFTHRLLSLRFQAWQKYRLYINTELQNHAELQNHAELQNHAEWQNYRALPAVIPAVAGQLMADTTQRSHPACVGLLATPVRSMVNLQQLLQRELGMAVSIQPFKGRWQYAEQAHCCCLGRSLLGDNPMLGRAYWDIQSGFHIQLGPFAARQRAAFMPGNEQYRKLTQWVWQFAGPLLSFSLELLVQHSGQGNILNGSRQLGWDGCLGDTGESNIQRLYLAECTGPYANZ

SEQ ID NO: 434 - protein, 634 aa, Photorhabdus luminescens
VEFSSTNKWCFLSHGTVPHIPIQFHGINNKMMLLPQKILTYYNRELSYLRQYGAAFSQRFPKIAKRLGFAEGVSEDPHVERLVESFAFLTAKIHQRIDEDMPELSNAMLEVLAPQFLRQVPSVSLVQFQQDLLTSGVTGMMTVARHTPLISQPVGDVTCRFRTVYPLEMLPLDLTHAELIPDPYDRDFILTLNFTLWPGASFQAQHIRLYLHGAPMLTHSLYELLSAQVKQLECRLGERTFNLNRRGVQVVGFDPQDNLCADDPLINPVHHLFRDYFSFPEKFLFLDIPLPDAGLITRSLGELQYRFRLKDCVALRRIERMSDKVSNETFRLNCVPIINLFPHHAEPIIPLETEHEYLVQPDARRPQSMEVYTIDQVEIVSRQQEQLSSKPVPSLFGIGHTQSDEQFSLFWQATPRPSLRHNDLGMNMFIGFSDSSGEHLKPETDVVILSLTCTNRDIPRQLSNGHPDGDFESESALPGVKILGLIRPRLPVRPQPNSALNWRLVSQLNLNQMLLSGPQGVQCLKETLELYNLLGDPAISRLIAQLQQIAIAPVSARLNPADPYSLARGLEVTLTFQAQAGEFVDFYLFCSLLERFIAMYTPINSFTQTVTQLETINNSTRRWPRRSGRLTWLZ

SEQ ID NO: 435 - protein, 500 aa, Photorhabdus luminescens
MHSEGSMEQSVVEQQELKTTETSGDFLDQIIDNTQAIRREADRDRVKSQLDQFLAEVTSGSLVVSGDLVNSIDERIAAIDALMSAQLSLVLHHPEFQRLESSWVGLKGLLDQSETDNTQIRMLNATKTDLIKDFKSASDFDQSMLFKNVYEYEYGTFGGEPYSAFVGDFDFDNSPEDLYLLEQISHVAAAAHAPFISSVNAGMLGLNDFGELPRPRDLSKLLATSDYLRWKRFRESDDSRYVGLTLPRVIGRLPYGAKTIPVEQFCFEEQVKEGDSGSYLWINAAYALAGRMVAAFEQYGWCAAIRGVEGGGLVEALPAYHYTSVSGENVLQCPTEVAISDRREKELAELGFIPLVYYKGTDYAAFFSVQSPNKPRKYNSDLANANAKLSTQLQYIMTTSRFAHYLKMIVRDKVGSFMSRGECQSYLQNWINQYIVGSDTVGAEIKASHPLREARVDVVEVPGSPGTYRAVAYLRPHFQLEGLSMSLRLVADLPPSSAAZ

SEQ ID NO: 436 - protein, 184 aa, Photorhabdus luminescens
MNTQRKLDKVRPPRVQITYDVELGGAVEKKELPLVIGVIGQFAEQSIPMRERRFMQVDKDNFNAVMEGLSPSLELQVESALPGQSGFMNVDLQFKSMADFTPENLAKQIEPLRHLLEVRGKLSDLKGRALSNEKLRDRLAEILAEHADKLPQANEEAETAAIENRADDVTPENSNIPENNNAQZ

SEQ ID NO: 437 - protein, 295 aa, Photorhabdus luminescens
EGCMSPKNDFKPFSIRNDSNIVSQERYEADKSLQEGFPPDNISTHVLNKTLRQSSTIASVVANFIATQSGDDVLDDGDIDKLTTQLNRALKQIATDGKVPNSRKINGKALTEDINLNASDVGAYTRTEVYTRSEVYTRAEVDRLIKTTSEIPVGAPIPWPLPHPPIGYFTCNGSAFNKLQYPKLAEAYPDGRLPDLRGEFIRGWDDGRGVDAKRVILTSQEDAIQKITGTFTTIRAVVINAAGAFSLGDSTHRGNTLDGGDYGRVVNFDSSLVARAATETRPRNIAFNYIVKAEZ

SEQ ID NO: 438 - protein, 603 aa, Photorhabdus luminescens
KNGNLSCKNGRDRLHFEESEVDMSNIEIIQREIITIFAETFGLSKEEIKLEIPLVELGAESLLLFEALEPIHKQFGVKLSVRQFFAELQTVRQLSEYILMVGKNRVVEDNHSVTQPVLSDQEKRSEQSDTSDIPPINKERFFQWMLRSAPSIESEERKKYLASFISEYNERTIKSKIHSVAVRKNIADSRSGIGFKLSIKELLYPIVCTKFAGPVVKDIDGNDYIDMTMGFGAHLFGHSPPFVVKALTQQIDNSFGLGTRHEIGLEVAELIKEITGMDRVAFVNSGTEAVMNAVRAARALTRRNHIVLFSSSYHGHWDAVLARAGDYDEANATKPVSVGIPENMVADVSVFGFGSNEAIEFLKTNRTDIAAVLVEPVPTRDPGLSNPDYLRHLRRVTRELDILLIFDEIVTGFRSHPAGIQGLFGIEADIVIYGKTIGGGMPLGVITGRKKMLDSIDGGNWNFNDDSFPAAEPTFFGGTYFQHPLCMTAAKATLQEIKRRGETFTKVLTQRTESFVSRLNQLFLSRRVPIEARSFSSFFRLMHRDNMDLLYYNLLMRGVYIWEWRCWFISDAHDDTHLEKVYLAFVDSLDELEENNLLPRYSZ

SEQ ID NO: 439 - protein, 618 aa, Photorhabdus luminescens
MGVFQYKDFDDTTSKELFSDAKTISGYAYHNLGSGFAEGYYNYGFGLGMPLTLLTAILGSTTSQGITPKLPWNPDAEKQAQDKLNDAGWFTISADELGYQGKTDARGTFFGEKSSHSTAQAEVMGKYDADGNLISIGIAFRGTSGPRESIITDTFGDIMNNVLVALGKKDYSNDYAPNAFGRLLDHVANYAKAHGLTGSDVLVSGHSLGGLAVNSMAESSDTKWGGFYSQSNYISFASPSQYEKGNKVLNVGYENDPVFRVLNGTSVDSFSPGVHDVPRDSATNNIVNFNDHYASDWWNVLPFSIANPSTWVSHVTPFYQSGMQRIMDSTFYDLTHKDSTIVVSNLSNVTRENTWVQDLNRNAEKHTGSTFIIGTDGNDLIKGGKGNDYLEGRDGNDIFRDDGGFNIVAGGKGHNTFDLQKSLKNAEIAYDQAGTLYMRDAQGGITIATDISTIRSKESTWLFLTKQVDSQVRADGLYSNSGLKTKYANSVTGNDGNDTLTSKTSGSWLFGLDGDDTLIGFGNNNVFVGGEGNDVLKSQGNNNTFLFSGDFGQDIIYGYNKTDKLVFLGTEGSSDKSNYLDHASMVDNDLVFTFGQNSVTLVGVSMDSLSVDNIILAZ

SEQ ID NO: 440 - protein, 356 aa, Photorhabdus luminescens
RCLILSEMEIIILAMKIFITSEQKIKLERLHDTTRDGQVRDRIKAILLASEGWSSVMIAQALRLHQTTVDRHISDYLNQGKLKSDNGGSDSLLSREQTDFLINHLSQHLFHHTHEIVAYVAQLWNITFSIPGMNKWLHRQGFSYKKPCGVPHKFDAEKQRQFIEYYENLKVTAKDEPILFLDAVHPTQGTKLSYGWMRKGEKKTVKTTGSRTRLNILGALNLNAIGRTVFQEYQTINDYNICCFFNEIRKSYPDYHQKIHLIVDGAGYNKAHLVKEWAYVSNIELHYLPPYSPNLNPIERLWKVMNEQVRNNRYFADKHEFRDNVFKFFTTTLPDIADSLMSRINDHFQVLKTASZ

SEQ ID NO: 441 - protein, 335 aa, Photorhabdus luminescens
LASNANSTGGLMKTIYSEKLEVFTADYCNYSHEDKNSKSTPVLIEELSDGIHINRLRFELNKDVTEYCEGPPTVSIAFILNGRGKMAIENGDELDIHSGMMIFFYSPKMTRGMNFFGCGSWHILDIRFSLNEIAAQELPPFTQLAAGFEKNASYSDVLMMASPIYPPFMQIVNQIEECQLSGNVRKVYLKAKALEILACVASQVYDCQYNMVNGLQRRAVYNAIKIINSDYHYPWTIKSLSRAVGLNERKLKEGFRAVVFRTFHQYLENVRMTTAEDLLKKGMSVIDVSTAVGYASPSHFSKRFRQHYLINPKAWQAKYAVSHTLLTENIMVGKZ

SEQ ID NO: 442 - protein, 673 aa, Photorhabdus luminescens
RVIYMRKKYARASVLCCLISPVVWAEHSSGATEDALIVTANKREEALNKVDGSVLVKTGEELVQAGITQVQDLERAFPGLQIRSRGNRTYSATTIRGISSPDFYSPSVRIYVDGVPQDHQFLTQELINVERVELLRGPQGTLYGGNAQAGVINIVTRSPQEGPWLNLSGNYSKLKQGGSFSGSIPLIEDLLYGSTSLRWVKEPGQIDAPNRGDKNIDSSKTWLGRGQLTFAPEDSSFSAELSFAHEDLDSHEELYLNDEQFRRKEYDGPIPDLTRRVNSYAFKAEYDFGDSVLTSVTSYQDRDIYRDFIGGKWKEKHHATTQELRLNSNFSNGITTVLGGWFSDEKNKHHTSGYPGYYGDAANTIKGKSLALFGEVKLPFASQWDLTLGGRLSHEKSQIDYAGRSGMAAIEAFDNQVSSKEFTPKTALGWQLTPDTRFYLSATKGYKPGGFNNIVSSANDSKPYNTETSDNYELGWHTSFFDNAVTLDSAVYYIRSKDKQIYVGPIGAQFIRNVGKAESKGIELSSQIKPMKGLKFSLGGSVGKSNFTDATDAENGINYDNKRLPYAPDVMLNASFDYLIDQTLLPGNLYLNAGARYYSKSYFNEANTLEQGGYTLYDASLSLEMAHGVNVKLYGENLGDKKYRVSSFTVGPNTLSMINKGLNVGLDVSISLZ

SEQ ID NO: 443 - protein, 427 aa, Photorhabdus luminescens
RLECWAGCEYLTMTHNISHPRHISLLLLTLAGVYTLQSTIGMLTLQSMPAFLRSHGVTPDKIGLLYLLMLPWAFKFLWAPIIERYRKSGSGDTNPRRIMICGNLLITLLFCAMSLAKPAEHMPLIIVGLFLITICLTVVDTTTDGHAIDRLSPKHRPWCNVMQVGGGYLGSIIGSGLFLYLVSLYGWHIGAGVLAIVILLMSLPALFLRETQVEKAPTVLKAPVAPSLKNALRRAPVRQALVLILLCMIGTRLSLGMLSPFLIDRGVDLTQLGIIAASGGALAGLSGVLLGGIIVRKFGAVQTLLSVILLESIVLAGIFWLARQPEAPLSLLSAAYVFITLITAAKFVALYTQMMSLAAGAQSGVDFALMQSADMGIAIICSVLGGLIVTKAGYSALFVLALLFTFIALFWILRKFHNFHKESVNAZ

SEQ ID NO: 444 - protein, 600 aa, Photorhabdus luminescens
MRNHDTSAQSSPEQRAADAGVIKELWYMMRPYRTLSYVAIALAILSAGLQILPAAVAGLITQSIYDGQYDTLLNYGVMLLGFTFAAMLTFSGSTFFAHLVAADVQADVRRNISSKLKSVPLGFFMLTDSTEIKKMMLDDVEQLEDGIAHIIPEMSATLFGPLIALSVMLAIDWRLALAAFAPTLGACLLFVYIQIKVQTTTQRFYAAQNRIASTMGEVINAIPVVKTYSGGKVALQRAEKAFTALTRIIDVWVEKVQVKSSRFFVLSSANLLFVLPLAVWLLNRQEITLFELTFFILAAMAFGNIASSMFAVMTRLQQQEALITRYRWLMNQPELAPCTQSQTPADHSVALHNVSFSYQDKQGNALNNISFSIPAGSSLALVGASGSGKSTVASLIARLWDPQHGQVTIGGVDIRNMDEPTLRNNVSFVFQRVFLFNDTVANNIRLARPNASLAEVETAATAAQAHQFIQQLPQGYDTVLNGGVSLSVGEKQRIAVAAAILKNAPILVLDEATAYADPECEKEMQQALNALCRNKTVIVIAHRLPTIRHLDRIMVLDKGQIIEQGTHDELAAQQGAYARQWAAWRGEKTGTGANYHGAIZ

SEQ ID NO: 445 - protein, 626 aa, Photorhabdus luminescens
IKDRLSNKEPMMNWPHSKVHTPDSGLLGGEKKPGQEQIIMGLFNRLQQHLSPKLQRVWFKGLLYKQFDTVAIMAQLAIAAWAITHLGESDNPMLPLITLGLLVILLLLRFTFMARALRKLTIAAYGLGIEIRRSLLQRLVSMSVATIRGLSAGKIALTLSEDVQWQENQSAYTTPQIACQVMMLTLIYLALFWFDWVVAGSALLVLMVGMFILGAIRKKLNEILRLRATMMAEVSEAIVEYAQGMSFIRAAAATTTVEQRFDREIDQLRVAFRRGVFRSIPLLSLFYIIIDTSVVVGILAGALRFNSPEALTLSEILITILLLFATITPLRGIIPLLNITALTQVGETHIAEIEAVATQASGPLAAPDKYDVEVNDISFSYPGTNQPAIQNVSFYAPQGSMTAIVGPSGSGKSTLAYLLLSFYQLDKGEIRLGGNDIHHYQTQALYDTVTMVFQETALFQDTVANNLRLGDPNATQLELEQAARLANIHDTILALPQGYDTPLGVDGGTLSGGERQRLAIARAILKQSPVLFLDEATASLDPENEQLIQQAFDSLTRNKTVFVIAHRLSTITRADQILVMDHGTLCDSGTHDELLARCSLYQSLWENHLGSEEHWHLYPNKPNKVZ

SEQ ID NO: 446 - protein, 2053 aa, Photorhabdus luminescens
DIFMHKDFVSPDSLRQIISGLFTQKNTLVDDNDDLIRKGLDSMQMMALLNQLRRQGYRVTLRELYQKPTLYAWSQLLQRHAPVTHTALKPDVAQPLIADARPFPLTAVQHAYFVGRSPEQTLGGVGCHLYQEFDGIGLEPEPLEAAIHKLIQRHPMLRVRFLPDGRQQGMADAYWKKLTVHDLRSFTAEEQRQALNNIREQLSHRVLQVEQGETFDIQLSLFGENQHRLHANIDLLIMDAASFSLFFTELAALIVKRNLPVIPSDYDFCRYLVQYQAQFAQARQEAEIFWRNRLDTLPPAPQLPLAKEPSLIKNVRIQRRCFRLAPEYWQRFKQLAQQNGVTPTMALATAFAGLLCRWNHAPRLLFNLTLFDRAPLHTEVDNLLADFTNILLLDIPADNLPFCQLAQDAQATFAEAYEHRHWSGVEVLRELKKRGSHPHGAPIVFTSNLGRPLYGENTRDVLGKPSWGISQTPQVWLDFVAFEHENTLNIQWDSNDELFPDGLMDTLFTAYQGFIGNLTENATQWSKELPDLMPKSQYQLRYQINNTTEPLPDALLHEGVFLQAERTPNIVALVTNNKEISYGELSLAARRLATVLQKMSVIPGDRVAISMEKSVGQIVAVLAILYIGGVYVPVPVDQPVNRRRAICESAGIRVVIIDPEQHIDLEKQGDDWSQDVHCVSWHQDEQWPPLANMVKRAVTDPAYIIYTSGSTGIPKGVVISHQSALNTCLDINRRHQVQSSDRLLALSALHFDLSVYDIFGILTAGGALVLINEAQRRDPSTWEMLIARHHVTLWNSVPALFDMLLTYCEGMEVDAPKALRTVMLSGDWIGLSLPERYRAFNPDGVLSAMGGATEAAIWSNEYIVKAVEAQWRSIPYGYPLANQRYRVVGEDGRDCPDWVVGELWIGGSGVALGYFNDEERTSAQFVVDQGERWYRTGDLGCYHPEGWLEFLGRRDSQVKIGGYRIELGEIDAALNQVTGISKGVALASGEKEKSLVAFLELEGDSLCQRINRAPQLSAGYRELFPAMHAITADSSEPQVAMFLLEHLSRHGITFTSPQSLTDCLKHYQPQAEYHDWFARMLAYLCQCKVLVESTPYIYQAGWLPATSNDQAIGIPERWHTVLRDVLTGQQTAVALLDDPQFAPEQQLFVLPETQQWLTGLQQVITILSQRLQRPVTLMEFDARSGRCAQWLAEHITDQHLCYLGFERSQALVNQAQTRLSGYAHASVQYWSKVQGWSKQVPESLQHQADIILLNNVLHREEDPARCLKELVPFAQPGALILAMELQQASSLSLITTELLSPQGIQLRSASQWLLLLPQLLPLLPLQAETPITIGNLSVLLMQTSDSVTIPDREKIKSVLAQHLPGYMIPQRLHIIPRLPLTPNGKIDRKALSQELQSAIKTETAPRQNEMALLNAVEQTVAGIWQRLLNTEQLGCDSDFFQLGGDSLLATRLVGELTQQGFKGELGHLFRNPQLAAFAATLVPLAETSSTECALPKEQNEYQPFPLTEVQQAYLVGRHPGFALSGVGAHFFIEYQIEQLDVQRLNRVLNRLIQRHPMLRTVVVNGQQQALENVPLFSVKQHQFTNITQADTLREQLSHQVLDASSWPVFDFQLAQDDGIVSRLFVSLDNLLLDGLSMQILLAELEQLYLDEQHELPPLKVTFRDCVLRQQQAPAHQRSLQYWQEQVKTLPLAPQLPLRIAPEKVQSPRFVRYSDRLSAYEWSQLKQHAAPYQITPSALLIAAYAAVLSAFSTKPELTLNLTLFDRPHWHEDINHILGDFTSLSLLAWHPEKNWLSSARRLQQQLWQDLDHRHISAIRVMRELVQSRSADAAIMPVVFTSALGTHQGQFLSHSSWMKPVWGISQTPQIWLDHQVYESDNELCLNWDAVEELFEPHQLQNMFNSYMTLLRALAAQPESWHAALEQLMPRQQSVMVENTAVAIAPSLRSEGYDPQICSKIQRLFLSITNHPINAQQNFFEAGASSLQLIQLHSKLQHAGFYHLAVTDLFAYPTPETLSLRCRKDSHDGNRQSITPRQRQQQKRLQQREKRHKGAAZ

SEQ ID NO: 447 - protein, 3913 aa, Photorhabdus luminescens
RSCIMTDLTSHYDNCDPVAVIGLACRFPQAPDSDTFWHNLQHGAECTVPLSRQTLLDAGIPLEVIESENFVNRAAILEKAEQFDASLFGYSRQEAEMLDPQQRLFLQTAWHALEHAGYAPRHVPLKTGVFGSSRVSTWPSWSQFSMTDVGKVKGLQALISNDKDYLATRTAYKLNLKGPALTVQTACSSSLVAVHMACENLRAGECDMALAGGVAVSFPQESGYLYQPGMIFSPDGHCRPFDSQANGTYGGNGVGVVTLKRLSDALRDGDPIMAVLRGSAINNDGNEKVGFTAPSVNGQRNVIIEALQLADVSIDDVGMIEAHGTGTPLGDPIEVDALRSIFSDRSVALPPCYLGSVKSNMGHLDTAAGIASLIKAVLSVWHGYIPPTINVQQPNPALRLEQSPFRLATQGQRWTQALRTAGVSSFGIGGTNCHVVVQSLPEELRRHRVHHAQTSPLLLSAASEFSLRQLAQRYAAALNGAPEHHADLAWTALQGRDFSLPWRLALALTPQSAENLSAFANKKPTQNVFSGQINSESKQLWQFSGQGCQWSGMGKAMYASSPVFSAMLDRCCTACASELALPLKAVMFGEHDAALATTEYAQPAIVAHQIALAAHWQALGLKPDYVLGHSVGEFAAAVVAGIFTPEQVMPLVAVRGKLMQNCSQGGAMLAVFANEEEVLPFVHSLVLDLAVCNGPQHWVWAGTETEIATLAQRLEQQQIRCQRLNVACAAHSAMLDGVLEAFSLRCSQLQPALGEIPLISTLTANIATAAQLGSPDYWRNHMRQTVRYYPAVEFARQQGVALFMEMGADAQLTGIGRRVSLPQESWIAGIQRQNSPETAQQTALMQLYCAGVHLDWPHLFSLTGEKCHAPLYPFDEQHYRFPATKSVQPTTNINAGLDVNALLDPAIEQNPDAATLRELYTDALVYQCHGRDTEQGFSAIDTIRAGRLQPRWCPLLEQLLTYCVQQGYYREVSGPTASKMYCPDRPLPYAKRRLLESRLFTAFPALIYAGERLFALLSDRCDLPRQFVSTQAATNSWLPAPQPCPNTHYALHWRTINTDNPRSSTAYTLRSSTVNDEIVNHWRQAGIDLQPESGNILLLLTGSDVLELCDQVITELKRDEEIPLTVVTCGAQPETTLSPENINPAQYAVWALLRVAVEEYPHRRIQAIDIADINDADALSLALGYLSEHNRWLRVRGNQASVPVLQRQSLRLSQQPMSIPHQGWHIVTGGMGGIGQISVRWLLAQGARRIAVFARRQHADWGTFVQESSLNTECEIRWIKVDVTDTPALLNAVQMLAQEDGIAGAIHAAGIADHTRLAELEPQCLSQMLSVKALSASALQTALKQHNAHYLLLHSSAASMLGAQGQGAYAVANAYLESLALTAPNPLIVKALVWGVWGGVGMARERRLVEKLAQDGMLPFSVNEGIWHFNQSLRSASPCYLAIRLDEHHPDISRRLQADTDHNHPVAPPAPSHSVDNTLYQDSEERLNWLRQRVAALLRLEQPERLESQQDLLQFGLDSLLFLELNAVIHQQFGFRLTAELAYQNMNLEGLNRLIGDALPEQQITGSQPEIIIDSAQRHAPFPLTPIQHAYWIGRTQAIDFGGVACHVLFEWDLTLDRFDIPRFEKAWNALIQRHGMLRMVVDEDGQQRILPETPWYALSQDDLRMLDETACQQALVQRRHTLSYQVPPAEQWPLFEVSVSLLPNARCRLHMNLDLLQFDVQSFRIMMDDLQRAYHQKPLIPQVFTFRDYVMAEQAQRASKEWQASWAYWQHQLPSLPPAPRLPLNPQLPQRRQPQFTTYEGRLAQSDWQMLKQRWQQWGVTPSAGLLTLFAHTLEWYSRHPLFTLNLTFFNRQPFHPEVQDLIGDFTSVMLMDFDLRKATSLRASMEKTQALLWQRLSHNYVNGVEVLRELGRQQNGETQSRQPLTPVVFTSMLGMAQEGVAIKQSITQLLGDPVFVLSQTPQVWLDHQVMEVDGDLLFNWYCMDDVLAPGVIEALFAAYNALLVQICCQPDCIEQYDLHIPPSGHTRYDFWPQQPELHQAEQYLRAKPEIRLAEIQPRQDDTQGYNFWLVAEDNLSLSLPEPLAINTDKLPLPELTEQQAFERSWQHIEQQALFGLSQTLLRHNLFTYPQQCHSRTEIEQHLQLAPQYQRLLTQWLTLLNNQGLIEKTADGYRCLQPLNRVPAPTAKLDNAVWCQTISRYIATCIEQHDALLAGRSNALELLFADKQITASLYSENPALRCLNQTAAEIVRQLSQVSEHFTVLEVGAGTGATSAKVLEHNAQSIERYHFTDVSPLFLDDARQLLNHYGETVKFALFDINQRIDFSQHPASGYDLIMAVNVLHDATHLQNTLQRLSRLLKTGGWLLIIESTKRESAMQLASVGFIEGINAWSDDRGDSALMDLADWRQCLEKSGYRVSLEWPGQDGPELHQQLILARAERQARLNVSEIAAQFSTLPYSLHVQQQEQLPLIVAAKESVAQRSTPEAVQPETEDDQLHDIEQQVITLWCSLLPQPIQRHSDFFQSGGDSLIATRMVVQLRRQGYEQANLQQLFEHPKLSEFCRTLRTIETVETTLATQAVPIETKPASEQTLPLTALQYAYWLGESQLFQFGNGIAHFYAELAINDLDLPRFITAWNRVVSHHAQLRGYVKDGQYHILPEVPCYTPTVIDCRNMMPAQRETKLADARDILRTKGVPSDNWPLFDLTLYRTDDRTHLLHLTIDLLVADGKSLTLILRDLQRGYQEPNWQPEPPAATISDYIQALEDEKTGEAWQQSRQYWLNRLPYLPDAPELPLKDHQSQELNQQCLTGYISPQQWQRLQQRAAEYRASPSQVMLTLFTHILAVWSNSEHFTINVLHGNRLLMPQHCDTLVGNLSTTSLLEVDLRHITGFSDAVSQIQKQWLADLQHALFDGQLVLREKNQHRHNLNAGMPIVFNDTTGTAGRGPSGLGTLNLFGAQTPHVYLDCMLISGSEGGVIIQWAILPQLFQPQVAENMFAHYQASVAALLEPDYQWSAPLPEWLPVNDRILCQNSNATTRVFPSHTLCSLIEQAVNRYPQRIAVVDAYRQIDYRTLWSQSLALAAHLQTQEHQHSSLIGVVMEKGWEQIVAVMAILLAGRAYLPIDASYPQQRIHQLLASGEVDTVLTQPKFAQQMSWPDSVQVISLDELLLNRLPKNTGGQRLSAHPEDLAYVIFTSGSTGKPKGVMIDHQGAVNTILDINQRIALNEHDSVLAISELTFDLSVYDLFGTLSCGAKLVIPSPGDSRHPDKLLTWLQQESVTVWNSVPAFVQLLEEYARDYPHSLNSLRWVLMSGDWIPTSLPERLSALHPALNLLSLGGATEASIWSIAYPIAQVDPNWRSIPYGKPLANQTFYVLNATLSPCPVWVTGELYIGGQGLALGYWADLEKTAQAFITHPQTGERLYRTGDLGRWRPDGNIEFLGRNDHQIKIRGYRIELGEIEHRLCEHPDIQQALAFAHTTSTGALQLVAGLRLSDETPLSTELLPVLPHWLQQTLPVWMCPQRFIILDAIPVSDNGKIDRRALATLVEVAAQEVNLASSVALSVTAQAVLNLWQSVLEQQAIGVHESFFTLGGDSLAAVRLMVKINQTFNRQYPLSLLQTYDTVHSLAEFIEHQPESLCQGVILNKGSVEQPALFIVHPIGGHLLGYRHLAASFGDQRMIGLAFSPDNLTPDTPSVAALAADYISQIRAFQPQGPYALAGWSFGGLVAYEMAHQLRAMGERISQCILIDSFAPNVRADLTLNETFCHRHFLLDLQGQFPGLTLDDHVIAADTETFLNTLHAALPQSAQIDSSLTALYDVWHHNLNALLDYCPPQTSQPFWLIRAAQALPDFMDYLDPTTIASIDLGWQAFGPVHVTQLAGDHYTLFQHQHVGSLVTCMKDILNSVSTTNLVKENIZ

SEQ ID NO: 448 - protein, 620 aa, Photorhabdus luminescens
HVMYKDCPQIGDEELLSMQQSALWFIDNDTPGDSKYNISMAFRIHGSFQIDAFRYAANQLVAKNATLRSTFVNVNGEPKLVINEHLPPALEVFDATNLSQKALEDAVQSFHSIPFQLEKLSCLRFGIYVVSAEEYVLHMCVHHIVSDFTSLGLMLDQLEHYYLAGLGEDDDSWLPPAEDFKDYAVKERKYYQSEAAEESKAYWSECLKQPPDVLQWDSFWRKGANDKSSVLFSIGEETTKKIKRLASKIGGSVFTVMLAAWSAYIARETKTADIVMGVPVSMRHSVHRHIIGCLFNVLPIRLSVDQTFHHFLLAAKERLLSALDNRNFCLSQMVEHLAAERNDGRNPLFQAMVNMLGHVEQSRWVALEMAGDSVQVSWAGRTISPFRVCQQEGQIDIELLFVDAGSHLRCEFKADKHFFSHSGLQIFAERFELVVEALVTAPDEQLTTQCFTADPYIHHRRMYKTGDLAYWDGERIHFCGRVDDQVKVSGSRIEIAEIEDCLNRHHAIADAAVIVESYEGLDRLVAIFVPVNKDNLPEESAIRDHLKAYLPIYMLPSRMMLADELPRNAHNKIDRRALNGLIEAGQLTDISSLRPAPMLPVDSRLPDIDLFDSGDPSIEZ

SEQ ID NO: 449 - protein, 366 aa, Photorhabdus luminescens
MIKPRRVLIVGSKFGELYLNAFLQPQSGLELAGILAQGSARSQQLACDFNVPLFRSLDELPDDIDIACVVIRAEVIGGKGDQLTQALLARGISVIQEHPLDAEAIKKHQLTANKHDAMFWVNSFYSQCHAGRSWLHAARQITHLSQQRPVSGYLTTSRQLLFSALDLLLQACHCPEQMEIVYVGQRSGAFHCFELSFEGTTVTLNVQSYLDPRDPDMHNLVMHKMTLIWPVGYLTQEASYGPVIWTPVLHAPDHLNNEQSLYLNASQPDDNYLYQATSQILCPATKNWMTAFECDGAKGVAFLLNTLGSVLNGALCPPAFAYDYQLRLAGLWQQILRIMGEPVTQDLSPPVWIEPAKLMLTKEECZ

SEQ ID NO: 450 - protein, 259 aa, Photorhabdus luminescens
MIRPCLTTHGKPKYTLLICPFAGGSTSAFRHWSTLENSDIAVSLVIYPGRDSRMTEKAATSIVPLAQSLSDLMVSFTPAQRENLILVGHSMGAQVAFETCQRLEQQNCSPKALVLSGCHAPHLQSRRQLSGLPDHEFIEQLIDIGGCSPILREDPGLLALFLPMLRADFLATEHYHRFIQTDAVKLQTPTLLLYGSEDKEASAIEVQQWQQWLADGEQHRSYRHKEIVGDHFYITQEPENFIRHITQFIQYVYLQEFAZ

SEQ ID NO: 451 - protein, 998 aa, Photorhabdus luminescens
EFYSSHYTIYTICLFTGVRIMAPFSIPGKTLTMTPDYLWNGKTLDQQLAGWSGIWGDKTALIYQEQQLTYRELHQSAERLASGLFRRGIRRGDNVMVQLPNRISFVVTCFALFRLGAHPVLLMPTQRAHDVHALCQIARPVAYIIPDCFHDFDYREMAREIAAFCPDLKHIIVDGEAEEFTALASIDDKPVNIPAPSYGDIAVLLLSGGTTGTPKLIPRTHDAYTYDFVLSARLCAVNTESVYLAVLPVAHNFTLGSPGILGILSQGGSVLLSDTASFDEAMPLIEQHKVTHLALVPALARLWEQARDWEQSDLSSLRCLQVGGGRLTPELAGQVIARLGPLQQVFGTAEGLLCYTRLDDPHEVIINTQGRPLSEEDEIKIVDANLQPVVPGEVGELITRGPYTITGYYRAEQHNTVAFTTDGFYRTGDLVRMTSDGNLIVEGRIKEQINRSGEKISTQEVETLLLQHPDIDDAVVISVPDELLGERTCACLPNNGNQPEPVQIAAFLQQKGVQRHKIPDQWLFVPYWPLTTVGKIDKRRLVQMAQAEHGRPMQQYHEQTVVITSTPLDLITHLLSEGEAQPYMLYEVKGEWSLGIGCAATISADASGQLIDSQGNRHPYDISTLSQKLEQALNALPIQDWRAYGRTLFEFSHMTYGLPLAQQNEALIKITIPQHELRITPGQVLIRTLEESQLTILREKISQVDQLGTPVFPWTKDREIISTSDAAKRYQDNVANAVKDIASGHYQKVILSRRVELGSDIDMPHSYWLGRQANTPARSFFLRDEDFSVYGFSPETVVEADGSGWVSTQPLAGTRALTHDKDQDQRLRADLLSDPKEISEHAVSAKLALEELAPICQADTLCVSEFMAIRERGSVQHLASRVKGLLQTDKNRWDAFIALFPAVTASGIPKKTSLQAISRYEGEPRRLYSGCVMLLDSSGKLDAALVLRSLYQHQGRCWLQAGAGLVRDSKPEREWQETCEKLDCIMKYVRPCSGKKEZ

SEQ ID NO: 452 - protein, 394 aa, Photorhabdus luminescens
LEAINMFSRRDILKASAIGAAAASMGGMIKTAVADEQHNTAAAGNSKPSTDAKSLYKYKFTDSKKRVLENGWAREATVEQFPISEGIAGVDMMLEPGGVRELHWHAVAAEWAYMLEGHARITIIDPEGRSEVADFGPGDVWYFPKGHGHSIQALEDGAHFILTFDNGHFSEFGTFSITDWITHMPKEVLEKSVNMPASVFSKIKQGEAYIVGGAIPPKLPLPADDGGLNDAPLTHRYELLKNKPFFENDAGSVYRASSKEFPISTTITGLIETIKPGAIRELHWHPNANEWQYYISGKGRMTVFSSHGHAQTAKYGPTDVGYVPLGFGHYIENIGNDDLQVLIVLDNGIYQDISLSDWLAKTPSYLLADNFNNNPSDWVDRPKDKLVISRRRSZ

SEQ ID NO: 453 - protein, 340 aa, Photorhabdus luminescens
WRNIMVIQLTPDDRSGYPPVEKQIAGDIVRILNFKQTDEGHTASYGIEYRAKKIILAYALAVSGIHNVSKLPDDYYKNKETAERIYQEYMSNLSSALLGENGDQISKDMANGFYKNELDFEGQYPQNIWNVPELENKPLSAYSDDDKLLALYFFSVQEIPLEENQQSNAARFFKLIDFLLTLSAVTSLGRRIFSKNFYNGLESKSLENYIERKKFPKPFFRPPQRLPDGRIGYLAGPTEAPKWRVSFKELKNNKSRNGFSNMEGAAKQKYSSFIKEVQKGNAPQTAAKSIGTASGSNLEKLPNNLYSVRLSQKDRVTFTQNDTDNTMTVHSVGTHYKNIZ

SEQ ID NO: 454 - protein, 366 aa, Photorhabdus luminescens
PGLPQKFQTSFYLFKRQKMRILTIDLLKIVSIFFVVISHVTLFFLLRNDNDVVLYFLRQAGQLGVSLFFMCSGYFLLNNKHENQVDYIINKSKGILTVLLFWLIFYYLYDTYFISKFTTVPTVNFLNYVNVSGTTSDATHLWFIFAIVSLYILTPLMRNTFNEANAKGIKKILIIMLIISNLTLLNALTDYKFSFSLIPFNILLPFQSEGLISFLIGGYIGLTKPKIKAFSCKHIILMVFFLISLISLSIISSKMGIAFFYGKFYNVFLQASSVCLFLFLVNLNIREIPFLIDDISKNILGIYLVHNIFVIEIHNEFVHNFLLTKFNYINVYIYIIAYSLLAFILSYILCVLLRKSKITSKIITIZ

SEQ ID NO: 455 - protein, 363 aa, Photorhabdus luminescens
WTVFLGIILSSAFPGILPALRRTALLLIQRHSGNIAGTSNSSLQQVPPYRFPIMLKRASKAVKQLIQLGDRLFRATENEINAEQQVLQQSQVIKLSAFAIELQQQAIEIAQASKAALEASKNMAQQRYEHYYGLYEENLSGLEISAIALKTTSEITRMAAVPFHIMSAAVETLPNIFGLAVGGGNYAAPLVRTALVAEITGLTLGMTADRLQDGANYQQRRQDWEIEWKQAQSEINIIDKQLKEQELLIQSAQISLREAQAQRNAAVELYEFITTGFLVVPTYQWLMNRLSILYAPAYDAVLSLCLMVEAGWRYEVGDYQQQGFLSRPMLGIIPIGAFWRANHYNWIYSKWKRLGYSVTNAVZ

SEQ ID NO: 456 - protein, 261 aa, Photorhabdus luminescens
LSTTRFFIKADAWNNSYRGFLAGESLQLDLQQMEAAWLQRHERCLNIKKTFSLLSTVSSIKEITDQIDKKQEINFTLDARAFDKNYPGHYLRQIKRVSVSLSLENAGSEPIATPEICAILTQTSSSTLVDTDINGVNWLYDPTRKAGNNRNIKTNLRAQQQIALSSIHEDDGGVATENWLCTLMFDDDRYLPFEGTGAISTWNLKFPDKQVIDQVLKNINGGWKLKDILIHLHYTARDGGNQFSKQVADKLAEEKNGSETZ

SEQ ID NO: 457 - protein, 603 aa, Photorhabdus luminescens
IVNIHIINLVKGSIDMDKSLYNSESTLKSYLGIGNEGVSDNLLAVLKSNCVNYQSSVKKFIELLEYIQNNNIRTKPFNELVALHELVAPHDCAVVSMLSIHYNLAIGTVANLGVQTPYVEDLYQKLCSGRAIGVYLATELAHGNDLIAIETQANYLPEKGVFMLNSPSPNAYKFMPNTMPCELPKVAVILAQLNVSGKKYGIFPFLLPLSVNGKLTPGVKITPLGDKPGFYLDNAITSFDNVEIPFEGLLAGNMITLTREGKVSLHIKELRERFSLITNRIHSGKLCMAMISVTAAKSVLHITSTYGNKRQTFGYSGAMPIINYSHFKEGIAWDTLSTITHTLYLRELTRKVSTILSESIKNFKFSDELLIEIITTKSLCTWRTQEILINCRERCGAQGLFTVNKISPYLISNFGTITSEGDNLVLSLKAGGMIILNKMKEINKASFQHNLFPILHDYMNFLYKKLNGLIASNNKKINLDILNKHSGDFLELSQTYAVLSVVTTTIDAYHDNNDDDLCMIIEGYLLDWIHRNMSNLLRSEVINLQESKKIDERRIEYIRQHADRINDYIPSFGVDKAGIETPISSDDYISWYANNHHQLKNNZ

SEQ ID NO: 458 - protein, 213 aa, Photorhabdus luminescens
RFNFVSARRACNGKVNIMRVQLGQLYDLRYSLSVDQLCVGEVLMPLERLAPAHLKVAIEYLLHKYSVLRARFVGSGMNMKMDFVPPSRELLHQVFEVREQTDSPCDRRRLISNYIAEVRAAMNLANPPLLRYCLFDGNCARDQRLVLIFNHLVCDGISSRILWRDLSKAYRMSVNGQPLALENATNYEQFCAELYEQHRQIVKGASGCFWEGZ

SEQ ID NO: 459 - protein, 223 aa, Photorhabdus luminescens
KISTLKTKWRKIKSYNNYTQWISRCIATARERIPGSIDNDVTGVSECSQQIGNLKDDGYISIFPCEKLTLIIRSWIMAKELFTATVKSVAGLKVECTSRDFSFYLDEPRNLGGTNQGMNPVEALLCSLGACKCIVAKAFAKLHKINLIDIHVDLEGELDTDGFTGRNKQAKLGFSKIVTKFHIKADNSEEEIHAFVDFINKTCPVHDTIENAPSFVTEIYCEZ

SEQ ID NO: 460 - protein, 403 aa, Photorhabdus luminescens
VKNRTFGSTFIIAGTTIGAGMLAMPLATAGVGFGVSLIMLVSLWVLMSYTALLLVETYQYESPDTGLGTLAQRYLGSSGKILAGFSMMFLMYALTSAYISGAGELLTVSLNKWLNLSLPASVGVILFTVIGGGVVCIGTRSVDMVNRVIFGAKIIFLVLMLGMMMPHVQHINLLTMPLEQGLILSSIPVIFTSFGFHGSVPSIVKYMDGDIRRLRWVFIIGSAIPLIAYILWQLATLGSINSSTFVNILAENAGLNGLLHSIREVVASPKTELAVQMFANLALATSFLGVTLGLFDFLGDLFKRKNSVAGRMQTGLLTFVPPLIFALFYPKGFVMALGYAAVALSILALVLPSLLAYKSRQQNERRYRVPGGKPVLLLVFACGIAVIAIQIGIVSGMLPEVGZ

SEQ ID NO: 461 - protein, 652 aa, Photorhabdus luminescens
QPFLLVGKGYVIMTKQFTSHLNIDALFLGPKSENTVFFREMMEYAVSEHMHWRSDFHPEDPALVTSVDRYAPDYRETLYRTEGILNQLSAKLKNTSVPWFSPRYMGHMNADTLMVSNLAYVMAMMYNPNNCAHESSPTTTELEIEAGLDLCRMFGYDPRRAWGHITSGGTVANYEGLWVARNLKTMPLAIAQHPQSRDLVANKSEQQLLNMSSSDILDLTDELKKRGIFEEVRELSCRGVGIKQGMFGKVLVPQSKHYSWMKAMDVLGIGQQHIVPLPVDANYRTDVEKMREITFSLIEQGEPILAMVTVVGTTEVGAIDRVDEVIALRKECEERYGVSFYVHIDAAYAGYASAMFLNEQGEFMEYDELIRRYRELAIIPEDIIWPKPEIYQSFRAMCQADSITVDPHKVGFIQYAAGAVCMKDKRTVDLISYRAAYVFEDVDTQQDQAVNRRVVLGASIMEGSKAGAIAAAIWAAHRLVPLNISGYGKVIAAGIVTANWMVKKLLTTEPLVVDKRRFEIHAMPNPDFHMVNFTFKEQGNDDLIHHNRLNKRMYELCSYASGRTYTNDFLTSSTSLGYEEYGDTPWHYVASCGFDQKEWQKVHRLYVLRAAVMTHCLRNADDFDEYWERLQKIFIHKLTQFIDEEEKKKVAZ

SEQ ID NO: 462 - protein, 332 aa, Photorhabdus luminescens
LPQYMLAISIIKPGGPEKLHLVQVPLPRPGKGYLLVKVAAAGVNRPDIFQRMGSYPPPPDASPLPGLEIAGEVVAKGEGCERWNLGDKVCALVAGGGYAEYCLVHDSVALPIYGLDFVQAAALPENFFTVWANVFQTGQLKPGENLLIHGGTSGIGSVTIMLAKAFGAKVITTVGSDEKAKVAHSLGADFVINYHKEDFVDRVLKITGNHGVDMVVDLIGGDYVNKNYKVAAKFGRIIQIGMMKGNPENLNLMPLMLKRLTHTGSTLRSRSVEEKAEIAKELEKQVWPLLKSGKVTPLICKVFDLKDAADAHRMMEAGDVIGKVMLVNVSPZ

SEQ ID NO: 463 - protein, 246 aa, Photorhabdus luminescens
MGTTTKELNALAVKLKSGFDQPELVRARIINLADHFINVLKNKDSESISQLLTLPDDEFWSEVKGRANYIEIVANITQEKKEHEEFIETRNAFLAHLGEYGGVYKSSKVADILGVTRPTVNKYGENHKLIVLNWGIENLYPVFQFSVNKKTSNKGYLTGVPEMLANLGPVSGVKKCGFFLRKIKTFNLGIELAESTTVLDILRNGASNDEIAQLIKLAQMFSSADSIPYGFQEGSRRQGSESPGAZ

SEQ ID NO: 464 - protein, 257 aa, Photorhabdus luminescens
MDRMLEGKVVIVTGGASGIGAGIALAAARHGAATVIIGDITDQPREGGTPVFQRLRALGTQAIFHRCDVTSRSEMDALVDIATPFGGVDLMACNAGIALATDGPQINADDFHKLLTVNLDGVLFGAQAAAEQMIKLGKRGSIVATSSMGSIRTGQLTTAYSTSKAGVNMMVAALADAFGPSGIRVNAVCPGLINTALPLSSPEVAKMFDGLRERMPLRRLGEPEEVGNAVVWLGSDLASFITGVSLLVDGGQTVVLZ

SEQ ID NO: 465 - protein, 523 aa, Photorhabdus luminescens
FQDHDRSVEMTMNRRAFISTVATLAGAGVLSSALPNLSLLARTLTAADAPANTIDKLRPTLLEDAQHRASRLGLDPRIWSWHKDAAAGVMPANYYEASLADWPALGNLPGDQNCEVVVIGGGLLGASTALHLAEAGVDVILVEKDNIGSGASGRNGGQITPGLARWEAKTILEKLSFDEAKRLWRFASVEAMNLLDELRERYRFECDRKYGHITVAVHAGHMGPLVANADARRQLGDTAMKVIGPHELQEEYVRSGIYHGANIDSIGGQVQPLALLRGLAYGFARLGGRIYDSTKVKGIKQDTGGTVVETERGTIRASKAVVLGVHGSTGEFISGPSTTVPFFSYVAVTPPLPVDVKELIPSNLPVYDTQLQVDYYRAVRNNRLLFGGQGTGNSWSPRDVNNYLLGRIRTVFPQLEKAELEYSWGGISDLTLNGATDARKSNDRVPVYMVHGWSGHGVVQTVRIGKAISDDLTRRNDDFTMLTSIDHASIPLGSYLSPVAIPLAKGILGVISTLNPADIVSFZ

SEQ ID NO: 466 - protein, 426 aa, Photorhabdus luminescens
MTESMLAKRRSAAIARGVGVTTQVYAERAENAEIWDVHGQRYIDFAAGIAVVNTGHCHPRVIAAAREQMEQFTHTCHQVVPYENYVALAERLNRLVPGNFAKKTVFVTTGAEAVENAVKIARAATGRSGVVAFSGAFHGRTFLGMSLTGKVAPYKMGFGPLVSDVYRVPFPVGLHGISVEQTLNALENLFKADIEPTRVAAIIIEPIQGEGGFYPAPPELLKALREIADCHGIVLIADEIQTGFARTGKLFAMEHHEVVADLTTMAKSLAGGLPLAAVTGRAELMDAVVPGGLGGTYGGNPVAIAAAHAVLDVIEEEKLNVRATQLGEQLKQRLHELRPHVPQIADVRGLGLMIAVEFNHADSQEPDANFTNAVRQKALECGLILLMCGVHGNVIRFLPPLTIQNDVFNEALNILESVLLDLTKQZ

SEQ ID NO: 467 - protein, 263 aa, Photorhabdus luminescens
HRTSVMIQNRSPRDLVSRAHHELFTDRDVGALDRYFAPHFIEHSPLVKEGLAGLRELVWTHPKLHHETYRVLQDGDLVAIHGRFTGLDDWPLVGFDLYRVADGLIVEHWDGLVPQAAPNVSGRTQLDGPTEAGDDHDREKNRELVVNFFTRTLIEGHYEEFGNYTNGELFRQHSPDIPDGTAAVISFLEQLRDEGQGLHYTKIHRTVADGQFVLTHSEGSIAGARHSYFELWRIEDGKVAELWDAITPVPEDAKALHRHGIFZ

SEQ ID NO: 468 - protein, 477 aa, Photorhabdus luminescens
MPVPTLRHFINSQYVESKSSEYFDLISPVTGETYARSPNATIADVNEAYASAKEAFKIWGRSTPSARQQALLALADAVEKNSERLIEAQSRNTGQLKHLIASEEVAASVDHIRFFAGAARFLEGKATAEYLPDMTTSIRREPLGVVGQVTPWNYPLMMAVWKIAPALAAGNTVVLKPSDTTPESTLLLAELAAPFFPTGAFNVVLGNASAGALVVSHKTPAMVSITGSVRAGLQVASSAAANLTRAHLELGGKAPVVVFADADMDKAVETIATAGYFNAGQDCTAASRVLVHESVYDTFVAKLVAAAKATRFGYPEDEEALYGPLNNARQLEQVKGFIARLPAHACIETGGRQAERSGYYFEPTVITGLEQHDEAIQTEIFGPVITVQKFRDEQDAIEKANDVKYGLASSVWTRDHGRALRLSRELDFGTVWINTHIPLTAEAPHGGFKSSGYGKDLSAYGFDEYTRIKHVMSSNDZ

SEQ ID NO: 469 - protein, 508 aa, Photorhabdus luminescens
MNEMNTIKKWWVLTAVSVALSLVAIDMTVLYTALPSLTHSLGANTTEKLWIVNIYPLVVSGLLLGAGTLGDRIGHKRLFVYGLIIFGFSSLIAAYSYSPEMLVVSRALLGVGAAIMMPATLSIIALTFEDEDEKSFAIGIWTAVASGGAAIGPLIGGVLLEYFWWGSVFLINVPLVILTLILSWLFVPTAKTDSSHPWDLIGSLQIMVVLISFAYAIKEFAKREPSYIGILITSTLTIGFLTLFIRRQKRSVHPLIDFDLFKSPAFSSAVIAGLVASACLMGLNLVLSQRLQLVLSLTPLQSGLYFLPFSLGAIVASPVSGWVLPRLGSARFLITSLLMYAIAILALMASFSAPLPLQIVCFFALGTCLGATMTAASSTIMQAAPPNRAGMAASVEEVSYELGGGLGIAIMGSIMSFIYSYFIEIPVDSPIYDVAKDGIDGALIAAKEMAPDAGQALVSLAKSAFDDAVFSVMGAASLFLLMMAALVWFNFRRSSLSNTSHAAIHRQZ

SEQ ID NO: 470 - protein, 537 aa, Photorhabdus luminescens
MMNKTLRNISLFTGIIFFNLALSHAAIIPAGTLLSVNQDIVRNNGSEPVSLDVHKVENDVEFNIVHDFFSGLIRAGSDGKIIPDLAVSWETKNNKVWLFHLRKGIRWSDGSPITAHDVVFSWRRLVDPKIASPYGSYLGNMHVVNAKDIVAGKKKTDELGVKALDNLTLEVTLEQPVSYFLPMLAYPVMVPISQKAVEKYGEKWTHPDVFVSSGPFKLSEWVVNEKVVGVRNSQYWDSAHTVINKVTYLPIASETADINRYLAGEIDITKNIPSILFKSLKAKLGNQVHITPALGVYYYDLNNQKAPFNDFRVRQALNLALDKEIIANKVLGQGQEPAYNHTPPNTGGVNLGQPDYASWTQQARIEKARKLLNEAGYNRDNPLKFKLLYNTSEEHKRIAIAATSMWKKSLDVDITLQNQERKAMLDVIHQGNFEMVRYARIADYDNPASFLNNFVTDSSNNTFLYSNHAYDNLINKAKATNDRKYFQQAEDILAKDVPAIPVYYYIGVRLVKPYIGGYYMSPLGFVSTKDLYVIKHZ

SEQ ID NO: 471 - protein, 278 aa, Photorhabdus luminescens
MQSNILVTGGKGKTGRLISELLTQNGITHRIGTRTPESSNEIAFDWMRPDLAEAAFSGIRSLYIVAPTNTSDHGSVVPPLLEIALEKGVQRFVLLSASSLASGAPMMGKIHAWLEANAPEWTVLRPTWFMQNFYEQRHLVTINEENAIYSATGDGKVGFIDALDIAQAAVSALTSNLTINKDFILTGPETLSYGDIASALSKALGREISHRNLTTNELASRLQQNGLDETYSKILSAMDSDIASGTEDRITDGVKALTGVNPCSLDIFIQRECPRWRZ

SEQ ID NO: 472 - protein, 200 aa, Photorhabdus luminescens
MYKHKVKVMALAATIITALSNGTWAHGYIDSPGSRAFLCSAQGNEQNMDCGLVKYEPQSLEAKKGFPQAGPEDGHIASAGIGHFGALDAQTEDRWKKIPITAGEIEFQWEIMIQHKTSSWEYFITKLGWDPNKPLTREQFNSTPFCFEDYQEKMPSSRVINKCTLPEGYQGYHVILGVWTISDTLNAFYQVIDTTISPAZ

SEQ ID NO: 473 - protein, 371 aa, Photorhabdus luminescens
MKRKTGFFFDEHCFWHSTGMHVMTLPVGGWVQPSSGTAHAESPETKRRLKNLMDVSGLSHSLHLSSASPIDEQTLRKIHPEEYLKQFKRVSDNGGGMLGIEASLGPGSYEIAKLSASLACAAVEAVLSGELDNAYSLSRPPGHHCLPDKPMGFCFLANIPLAIEQAKARFDLKRVAVIDWDVHHGNGTQHIYWDRSDVLTISIHQDGCFPPGYSGEDDIGEGEGTGYNLNIPLLAGAGHNSYIYAMTQIVLPALERFKPELIIVACGYDANAMDPLARMQLHSESFREMTQLVQQAADSLCDGKLVVVHEGGYAESYVPFCGLAVLEQMSGIRTEVKDPMLDSIRLQQPRAEFELFQQQQLDKLKEKFGLZ

SEQ ID NO: 474 - protein, 309 aa, Photorhabdus luminescens
MSKYLSIDDLNSCFQQQESKLKQLYEQLNSYSLLAAHVFILPDVEKGCEHEPVTEIIVNEMTGNDARNIGLSHYQKLFIYHNNQNISSKAAVRLPGVLCFSVNQQQYRSALLLIEEINKLKAELEHIVTVQSGVDKEQRFEFVHSQLHGLITLNAYRTITPLLNPDSVRFGWANKNIINKVTKDQILQRLEKSYNSGRAVSPYSREQWAALVAKEIIDIKKLPDDVVLKIKRPVKVQPIARVWYAEQQKQVQYACPLPIIAFYVNYGDNQPKIGRLANYDANAIVHRYKPKAKPLELIIPRLHLYREIZ

SEQ ID NO: 475 - protein, 465 aa, Photorhabdus luminescens
MAATRIEKDSMGPIEVPADQLWGAQTQRSLEHFRISQEKMPVALIHALALTKQAAASVNMDLGLLPQERGEAIIAAAKEVLEGKHPTEFPLAIWQTGSGTQSNMNMNEVLANRGSEILGGVRGSERLIHPNDDVNKSQSSNDVFPTAMHVAAVIALSEHLIPELKILQKTLADKAEAYKDIVKIGRTHLQDATPLTLGQEISGWAAMLTHNLKHIEDSIPHVCELALGGTAVGTGLNTHPEYAVRVAKKLAELTNHSFVTAPNKFEALATCDALVHSHGALKGLAASIMKIANDVRWLASGPRCGIGEISIPENEPGSSIMPGKVNPTQCEAVTMLCAQVMGNDVAINIGGASGNFELNVFRPMVINNFLQSVRLLADGMRSFNEHCAVGIEPNRDRITQLLNESLMLVTALNTHIGYDKAAEIAKKAHKEGLTLKQSAMKLGYLTEAEFDEWVRPEDMVGSLKZ

SEQ ID NO: 476 - protein, 391 aa, Photorhabdus luminescens
MLKMINQIQHYSWGSKTALMDIYGVENPDNLPMAELWMGTHPKSSSLVANPETGKPIALNELIASDPEKYLGKKVSDSFHRLPFLFKVLCAAQPLSIQVHPDKKSAEEGFAKENIAGIPLDSPERNYKDDNHKPELVYALTPFRAMNGFRPLNEIAQLLKFITAAHPKIPFFIQTPNEQNLACLFSQLLNMSGKQKQLALGVLKSALNSRLGEPWDSIKKMTAFYPDDNGLFIPLLLNVIELEPGQAMFLCARTPHAYLEGVALEVMANSDNVLRAGLTNKYIDIPELMANLDFVSKPTNTLFMLPRQEKIAKNFPIPVDDFAFSIYSLSEQSITLDNNSASIVFCVEGQTVIQSGEHQLRIFPGESVFISAAEKAVIIHGDGFTARVFNZ

SEQ ID NO: 477 - protein, 516 aa, Photorhabdus luminescens
MKKSLVAVGIIVALGAAWTGASWYTGKQIEQRIDQSISHANAEMKKAFPETGLMLQSKDFRRGVFSSDVRLVLTVKDGVKNAEIKPGEEISIKSVIDHGPFPLAQVKKLTLIPSMASVHSELENNESLKPLFEITKGKSLFTSDSRVSYSGSVISDVDIIPVDFEKNGAKFNFSGAKLTSDLSRDLKKISLAIKSDQLTINKNDENFLVKGIDLNLDNKKGKFDIYIGDQSIKIQQISLKGIGNEDMMLSGVKIDSNIGEDETNLKGKITYSLDGLKLKNIDFGSGQFAITADRLDGEAMRKFTQAYNDATAKSLSSDDISSDAADTAIIDAVLSNLPILLKNNPQFGIDPLTWKNTKGESTINYQVSLKDLPKDKSSLSSMKTEEAIRTLIQNMSLNVTLPRPMMIEFSTQSMIMNGMDKAKAEHNAEQQIKQFEQLGQLFKIATVDKDAISIKFNYADGNVEMNGKKMPLHQFMSEYNLSDPSDDEAPEQIVPEGDTHDSGKVKAEGTVQPAQZ

SEQ ID NO: 478 - protein, 334 aa, Photorhabdus luminescens
VIDIKLPLTDLHRHLDGNIRPETILDLANQHNIQLPANDLESLLPHVQIIENEPSLVSFLQKLDWGVAVLADLDACRRIAIENVEDAINTGLDYAELRFSPYYMAMNHKLPVEGVVEAIIDGIRSARQNNDIDIRLIGILSRTFGEQACTQELTSLLAHQQHITALDLAGDELGFPGHLFQSHFTKARDAGWHITIHAGEAAGAESIWQAIRELGATRIGHGVKAITDPVLMDYLVENRIGIETCLTSNLQTSTVNSLLDHPLKQFLEKDILASINTDDPAVEGIDIRHEYEIAAPAAGLSIAQIRQAQINGLETAFISDTEKQALRMKAANRZ

SEQ ID NO: 479 - protein, 324 aa, Photorhabdus luminescens
MTWWQKLKIDSFLMILVTVVVIATFFPCEGEIKVWFQRLTTAAIALLFFMHGAKLSRQAIIAGMAHWRLHLVVFLSTFVLFPIIGLGLNLLVPEIMTSTVYWGFLYLCALPATVQSAIAFTSVAGGNVAAAICSASASSILGVFLSPILVGLMIHTQGEGSADTLEAIKAIILQLMVPFIIGHLSRPLIARWVEKHKKLLNMTDRSSILLVVYVAFSEAVVEGIWHKIDGYSLLTIGVVCCVLLAVVLVINTYIARWLGFNKEDEITIVFCGSKKSLANGVPMANVLFPAATVGVMLLPLMIFHQIQLMVCAVLAQRYAKRLKZ

SEQ ID NO: 480 - protein, 441 aa, Photorhabdus luminescens
MGTLLSESIQQIAEQLRNWRRDFHHFAESGWFEFRTATIVVDELHRLGYSLKMGKDVIKADARMGLPSKQALQAQEQRAIKQGALTEWLPHFSGGFTGIVATLDTGKPGPTLAFRVDMDALDLNEEQTHVHRPYAEGFSSCNTHMMHACGHDGHTAIGLGLACILKKYESQLTGKIKLIFQPAEEGTRGAKSMVEAGVVDDVDFFIAIHIGTGVPQGELVCGSNNFLATTKIDVTYRGVASHSGAKPEAGKNALLAAAQATLGLYAISHHSEGSSRINVGVLQAGIGRNVIPDYALMKVETRGETNEINAFVYRQALNIIEGAAKMQGVEYGIQLMGAAQSSQPSPVWVDFIYQQAQQYIPELSSVVKSRQQAAGSEDATYFMEHVKSNGGQATYLIFGTALSAGHHNERFDFDENVMTTAVKTLATIALNLPDFGVHHEZ

SEQ ID NO: 481 - protein, 211 aa, Photorhabdus luminescens
LDQFKRGSIMTNRNVIWLVRPVGYQAILKRCPGCEVKKEFYPAGTFRVNAQKKVLDVWSIYKCEKCDYTWNIDIFSRIHVNKLESNLYERFLHNDQDEIRRYAFDYRVLAKNRAELGTAPDFIIEGKKLQDIAQIPAAEITIQLEYPIPIRLISILTKKLALSRSRVEKLVGQGAIQGVTETELNKKLKRDITLSVNVNNLLQEYDNYGVZ

SEQ ID NO: 482 - protein, 346 aa, Photorhabdus luminescens
MRELLKVGLVGYGYASKTFHAPLIAGTAGVKLAAISSSDAEKVKSDWPNIPVVSRPEDLFNDPDIDLIVIPTPNDTHYPLAQKALAAGKHVVVDKPFTITVEQAESLKQQAEKADLLLSVFHNRRWDSGFLTIKSLIKENRLGKLKYFASHFDRYRPIIRQRWREAAGQGSGIWYDLGPHLLDQAIQLFGKPQSITADLGMIRPQAEAVDYFHVLLNYPDIKVVLHATTLAAAESAVYTLHGMAGSYVKYGLDPQEERLKAGERPPHADWGYDIRDGIVTLSHGEELVTKHVPTLPGNYSAYYAAIRDAIMLGKPNPVTANEAIQIMKLIEAGIQSAEQQRTVAIZ

SEQ ID NO: 483 - protein, 211 aa, Photorhabdus luminescens
MTSLWIAIGALSALGLIFGLILGFAARRFQVEEDPIVENIDDILPQSQCGQCGYPGCRPYAEAVANNGEMINKCAPGGEQVMLKISELLGIDPQPLDGDANLQNPARKVAFIDEENCIGCTKCIQACPVDAIVGATRAMHTIVEDLCTGCDLCVAPCPTDCITMIPVATTTSNWKWDLKTIPVRNIPVQPSHAISIKSIPIKNIEAEHHVZ

SEQ ID NO: 484 - protein, 853 aa, Photorhabdus luminescens
MFNLFNLLNKNKIWDFAGGIHPPEMKLQSSQSPLRITPLPEELIIPLQQHLGTEGELLVKVGDEVLKGQPLTFGTGRTVPVHASTSGTIIAIEPCITAHPSGLKELCVRLRPDGKDQWGERIQTPDYQSLDADTILNRIHQAGIAGLGGAGFPTAAKLQSGRHGLKTLIINAAECEPYITADDRLMQEHANELIEGIRILEHLLKPEQILIGIEDNKPAAIKKLKTVLKGDKSIIVRVIPTKYPSGGAKQLTKILTGKEVPSGGRSSTIGVLMQNVGTVVAIKRAIIDGEPLIERVVTITGEAVTSPGNFWARLGTPVQFLLQLAGFAPQSEQMVIMGGPLMGFTLPDLNVPIVKISNCILAPSHQEMDSNTTEEACIRCGLCVEACPARLLPQQLYWFSRGQEHEKARDHNLFDCIECGACAYVCPSNIPLVQYYRQEKAEIRALDQENRRSTEAKIRFEAKQARMEREKLARDERHKKSAVQVDNKDKSAVQDALSRVKEKQANAGKVVAIEPGQLPDNAAVIAARQARKEQLRARQAEKQAVENMSITPSEPTSAEDPRKAALAAAIARAKAKKAAQNQSETPSPEAREPETTTSEKQDLHKDAVAAAIARVKAKKAQTQPLTETQAETPPAEETDPRKAAVAAAIARVKAKKAQTQPLTETQAETPPAEETDPRKAAVAAAIARVKAKKAQTQPLTETQAETPPAEETDPRKAAVAAAIARVKAKKAQTQQLTETQAETPPAEETDPRKAAVAAAIARVKAKKAQTQQLTETQAETPPAEETDPRKAAVAAAIARVKAKKAQTEQLAETQVETPPAEETDPRKAAVAAAIARVKAKKDAQEQQKISIEZ

SEQ ID NO: 485 - protein, 330 aa, Photorhabdus luminescens
MLWVVLAAIPGIAVQTYFFSYGTLFQLLLAVITALLAESFALSLRKQAIMPRLQDNSALLTGLLLGISLPPLAPWWLIVLGTAFAVIIAKHLYGGLGQNPFNPAMVGYVVLLISFPVQMTGWLPPMDLLATQITPLDSLMVIFTGQTPDGTTLQQLQQGFDGISQATPLDSFKTGLLTHHIDDVLHQPILQGSLAGIGWQWVNIAYLVGGLILLNRKVITWQIPVAFILVLGLCALTSWLIDPSRYSPPLLQLFSGATMLGAFFIATDPVSASTTPKGRLVFGAMIGLLVWVIRVYGGYPDAIAFAVLLANITVPLIDHYTQPRVYGHKZ

SEQ ID NO: 486 - protein, 210 aa, Photorhabdus luminescens
MLETMRRHGITLAIFAALTTGLTAVVNSLTKSTIAEQAALQHKSLLDQVIPPALYDNDIQNECYLVNANALGNNLPHRLYLARKNGHPVAAALESTAPDGYSGAIQLLVGADFSGKVLGVRVTEHHETPGLGDKIETRISNWINVFSGKTITSNHDQHWAVKKDGGEFDQFTGATITPRAVVNSVKRTALYLQTIPEHLSSLESCGEKSZ

SEQ ID NO: 487 - protein, 233 aa, Photorhabdus luminescens
MSETKNLFIQGLWKNNSALVQLLGLCPLLAVSSTATNALGLGLATTLVLVCTNIAVSSLRRWVPNEIRIPIYVMIIASVVSTVQMLINAYAFGLYESLGIFIPLIVTNCIVIGRAEAYAAKNPIMPSAIDGLAMGLGATFALFVLGAIREILGNGTLFDGADLLLGNWAKVLRIEIVHMDSPFLLAILPPGAFIGLGLMLAVKYLIDEKMKTRAIKEKSRAITMSPESESSIZ

SEQ ID NO: 488 - protein, 213 aa, Photorhabdus luminescens
MNKQKRIEILTRLRDNNPKPTTELVFTTPFELLISVLLSAQATDVSVNKATAKLYPVANTPQAILNLGVDGLKEYIKTIGLYNTKAENTIKTCQILLEKHAGEVPEDRAALEALPGVGRKTANVVLNTAFGWPTIAVDTHIFRVCNRTQFAPGKNVNEVENKLLQVVPAEFKVDCHHWLILHGRYTCIARKPRCGSCIIEDLCEFKEKIYPEZ

SEQ ID NO: 489 - protein, 648 aa, Photorhabdus luminescens
MFQNNPLLAQLKQQLHSQTLRVEGLVKGTEKGFGFLEVDGQKSYFIPPPHMKKVMHGDRVTAAIHTDKEREIAEPETLIEPFLNRFVGRIQKKENDNRLWITPDHPLLKDAIPCRPTNQVTHPFQHGDWAVAEMRHHPLKGSRGFHAEITGYITESDNHYAPWWVTLTRHNLERDAPAMTADCQMNDGDLERIDLTSLDFVTIDSATTEDMDDALHIAKQDDGSLKLSIAIADPTAYIAAGSELDQIAHQRAFTNYLPGFNIPMLPRDLSENLCSLRPNARRPALVCQVSILEDGQLGDDIAFFSTWVESKAKLVYDEVSDWLEKTGTWEPASEAIKTQITLLKEMSDRRNQWRHQNALIFKDRPDYRFILDENGYVLDIVVEQRRTANRIVEEAMITSNLCAAKILRDKLGFGIYNVHMGFEPLQIEQVVELLQENDIDAKTEELLTLDGFCKLRRELDKKPTQFLDSRIRRFQTFAEIKPEPGPHFGLGFDAYATWTSPIRKYSDMINHRLLKAIIQKTDVEQPSEETCLQLAERRRLNRMAERDVGDWLYARFLQPHAGTEQRFTAEIIDITRGGLRVRLADNGAVAFIPAPFLHAVRDELQCSQETGTVIIKGEVAYQLNDIIDVRIDEVRMETRNIVARPTAZ

SEQ ID NO: 490 - protein, 379 aa, Photorhabdus luminescens
RLNSSFYHSCKISLNNWRQYMPITPTHPGVYIEEDASLSLSVRSSVTAVPVFAVANSNSLLSKHPFIRINSWLEYLTLKSGQFNSNDKLDISLRAYFINGGGYGYLVKTNDLANQIPKLDDVTLLVAAGEDIKNAVSTLCQSGKGLFAILDGPTTELNSNGSSQNDYELSPFAAVYYPWLTAEWGENKASVDIPPSAVMAGIYSSVDNSRGVWKAPANVVLQSGVKPKFKVTDDLQGTYNTGKAINMIREFPNTGVTVWGARTLDDSDNWRYIPVRRLFNSAERDIKNAMSFAVFEPNSQPTWKAVHRAIDNYLYALWQQGGLAGNKAEQAYFVQIGKGITMTDDDIKQGRMIVKVGMAAVRPAEFIILQFTQNVAQSZ

SEQ ID NO: 491 - protein, 431 aa, Photorhabdus luminescens
MTSATYATPGVYIEEDASLSLSISNSPTAIPVFIGKFFDKDGNQPAKGSCIRITSWLDFISQFSLSPAVSVKATNVGGNAAKTYTYAATVTATSLSAFAVQHYFSHGGGVCYLLPLITTDESELAKLPDLIEKQQEITLLVCPETDVTLKQKVYGAVNSLLQQKVGYFLLADSTDGENKPTTQPDKTAVYYPNLETSFTYSQPADADIMLDGYGGVETLAKLKTASLGEYTKAKKAVDDKLKSTKITLPPSAAVAGIYAATDASRGVWKAPANVALNNAKPSEPITDDKQGTMNEAGINAIRAFSGKGTLIWGARTLDKTDNWRYIPVRRLFNAAERDIKRAMRFAVFEPNSQPTWKRVQAAIDNYLYQLWQQGALAGNKPQEAYFVQIGKGITMSDTDIQQGKMIVKVGMAAVRPAEFIILQFSQYVAQZ

SEQ ID NO: 492 - protein, 283 aa, Photorhabdus luminescens
SPALIWAGFCLFTINREIISHKGMKMRFFNLLSAIFVLLIVGCAKQPEVTDSLASLSTLEEGASCILPATPPKDYDYVAKGDRYGQNATASTDYFKLAISYSPAFCKGKAKNIERLKKSNKLAEAQREYEKFELQCFSENKFSWVIHGLWAQTCDSKSMAQCRDWSDVRKHPRLCKGDLPPLDYQVIKPYLCASPGADLLQSEWEKHGVCAFTTPDQFFSKQQELFDGLVLPSDRPSNEQLIKFLQKNNPSLKGKTIQINRDELYICYSKNFDVIDCPKRELZ

SEQ ID NO: 493 - protein, 400 aa, Photorhabdus luminescens
HRVYSIIEEMIMTTETKQPGVTITESRISLPPNNEFIGVPVFIGYTQENPSNKTAVKLNSLTEFTQAFGESGLMYYSVRHFFENGGQQAYALSLGDYQSSTHFQLLITTLQQAWVKQAIAAESEITLIVVPDTTRFNDPDTQKSLWQQAWQSILELCKSRRGIMGLLDAPDDPTLAADCLADFSSSDRQWGAVYWPKLKSTYQEEDKHIVLSPTAAIAAVIQRNDHQKGVWTAPANVALAKVISPVRSYIEAGVLLNLNQKGTSLNLVRSFPGKGIKIWGCRTLDNTPGSPWRYIQIRRLVSYIETHITQLGRAFVFESNNAITWMKFKGQAHNWLRQLWLKGGLRGTQEDQAFEVLLGVNESMSETDILAGKMIMKIRLALLIPAEFIELSLTFDIRNZ

SEQ ID NO: 494 - protein, 237 aa, Photorhabdus luminescens
KHYVKQEVLMSLIERGLSRLTLSAFKDREGKVSVGSLQAMYNPDTIQLDYQTRYQQDESVNRASQSSRYVLSQPAGLSLVLLFDASMPGNNTPIETQLATLKSLCAVDASTKVPHFLKIKWGKMRWENKGYFACRASSLAISYTLFDRDATPLRASATLSLVADESFVIQATERQLKSPPATAVSVTDMLSLPLIALGAGASLAGGIDYLSLAWQNGLDNLDDFTPGQTLQARGDTZ

SEQ ID NO: 495 - protein, 548 aa, Photorhabdus luminescens
LYPRTDPTSSGGYMKIPTVTLKIGGKTLNQFTVISLTTNHHINGIPSANITLGIAGDANPIFDTKTQAELASCRPNHEVIVQMQKTVLFKGIIVRQTLGLKGQDSIITLTAKHHLQKLTHSFHSQLFNKQSDEAIIKKLFNQNGIQTTIKQAPQLKTVHEQMVQFRCNDWAFLKSRLTATNTWLLPGNESVTLITPKALNKSTVHTLHRHTNNAQDIVLFEADLQWNNQYSPKTVSIRAWDITQQKLSQAINSQNSKLGSHKLAVDSIAAPADKEWQWAYSYPLDNEQAKHLAQGIMDNLRSHNISGSFEIEGNHRYQPGDILALNGFGQGMDGQGIITGINQIINQKQGWRTRLTLGMRPDIEPPVPQVKELHIGIVEKYQQDSQSLGRIPVKIPALNLTQGVLFARLGKPYASHESGFCFYPEPGDEVIIGFFECDPRFPVILGSMHNPKNKPPLEPSEKNPVKTLVIKQGDKQQALIFDNKENTVALNSGENKVSLQQDKDITLNATKNLITQAQEINIQAEKSLSATGKSGVDIKGAKINLTQZ

SEQ ID NO: 496 - protein, 1369 aa, Photorhabdus luminescens
PSYCTKLSAIYSNNRWYNMGLTELKNKLAAIVPETDFKLDERSTLDILNWLKEYAAKIPFDQDRNKFWDSFYFIQENTPEKLADIYQNINKADGHLPAHQAFILAFLKLLETTKVLFNTFPARHRDLYYRELLGLKPRNAQADNVALGITLNPDNAEYLIPKGTLFDAGQDSAGNPLQYASDADLLANQGKLTDLRWYRKDNDSWKSAILLSDSDNIELPENGIRLFSPTPNDVPVLSGYLITSSLFAMSKGVRSIRVTLANEWMGNPNNITAQISSGKHWLSLLVEKAGSNLKLILSLSANDESISPPDALDNMEFNVPVLKLGTVQGPILPKITDIEISISGNSNVRYSSDGSIEKTGATSFPFGQSPLPGSGFNLIAPEWYGTENATVTITPQWVGLPITGFKNWYKGYNPEPENNAFKVTGYLVTPQEKNKLKEASTQKEIEAQPLFDGTNKPQGKSLSFPLPAMNYPIADSQSPNDWPAFIRIELAEQDFMHSQYWQNPTDKNQPYTPQISSLKIEFSAEIKTGQYSVYPLTPFGWDKANAETLPLISNTFYLGFTDVLPGQTLSLYWQLDGIKERLLSWFYLNQENTWSPLDNLVHDQTRNLFNRGGLSTLLPHDASNQASQMPKGRHWLKAQILQTSQAILTDLYWNRKDNDGWKSATPLRLSNNMKLPTNGIQIFSPTSNDIPVLSGYLITWPLFTFLKKGLNITLILGSKWEGNSENIAAKISSGNHWLTLSVEYLSDTDSIKLQLPDDDNNDPISPPDALDNMTFDTPLLKLTTTQDFTLPWIYKICINSNIVLSASDNSEAKITRFPFGQSPSLDSSFSPKVVLPEWVNSEYVSNTTFTITPQWVNLPTENFSSWYKGYANKPTNNNVFKVEGYLVTPYREEKKLDEILSLFDGENAPQGKSLTFTLPDKYYFYSNNHETMSIKIKLAEQDFMHAQYQQRPTGKKQPYTPQLSELQVEFSATAFHQQFSIYPLTPFGKDQAGENITALTHDTFYLGFTDIAPGQTFSLYWQLKGLKDLSLSWFYLSQKNTWKLLNRSTYNQTDNLFESEDQSILLPQDASNQTSQMPSGRYWLKAQIEQEKKQVKIVPPDYPRIKGLLYNATTATLINTVTVEQDYFIRGLAANSIKQPVNSSVAISEVAQPWASWNSRPKEDEQTFLKRVPARLSHRNRALNWGDIVTLLKERFISIFDVKYPSTNELTKIPAPEKRKLIVIPDNRYKDNGDSLRPELNQARLTEMVEWLDRLSSPWTTIEINNPTYVDVPISYELIFASGVNPDYGRHQLQQELSRIYMPWGENTAIGVTPGNRIDYYQLLATIQQSPWVERVTSLTLKKGSPSTDVIGKSVEADDDEVLILVWKZ

SEQ ID NO: 497 - protein, 1024 aa, Photorhabdus luminescens
SGNKNPKRRSSQMNNRNMLFPIVKDDIAFETLLAQAKTVIEQQSGQCWNDMGENDPGITLLEACCYGASDLAYRHSLPLKDLLTPTQEEQTSRDGIFPKEFGPQQILTCGPITEEDYRRALLDLHSNDKNDGYFFFNDAQLIREPENQRYTYWYNQQERQYSFIIKNRYNNSTQLKLTLRGNYWLYLLPSRETEKIQDNKIQAQKKLENFLRDNRNLGESVSKIIWLEPIDLPLKIDIQLDDDVKDITDIFAKVYTTAEQMVLEKPLRYTTQAMKEMGYSNEEIFNGPYLRHGWIPQLPSIKDYTKSKELNLSPLVNQLLRIKGVKKVTRFTLDGHNERIAKLPNDNWSWTIVHGYYPRLWGNDPLQSITSPNSPLTITAKGGVKIIVSKQDVEEKLIVEPLIETQPELLDWGKYRKILDYYPIRNKLPACYGLQTNTQQQIQLHQFMLPFEQTLANNCADLALLPKLLAFKQRGDTVHGAQWPFKENTVAQNVHQNIKPHLINQMNNEAKINNNDKNYTKELVILDYLLRYFGAQCATPLLSQDSNSQEDFLSTQREYLSQQPSLAYQRNNIRIDKVSALQKRIAARLGLGGECFKETPELDKLPFYLIEHRQLLPIKPNEKFNNDQTPDNLEIKNDQVMITQTDTAGHLMQGQVINLEFREGYNISKFLNLMITEVTGDTFTINTNNNNDLRNNLDKLQNAFKQRNSLHWCNSAVWIEDMDYQLVYDSEKSQEETENRRWITLNDQNSFPAMIENNDEITIRTKSDYELTTQIVQLDSANNRILLRKDINSKNKFPPREYISHYCLSYTRYDYIYGEERTCKLISTDTTSNENELWITIRKQPDDTPYNSFPFDIFEADDEITLKFDPDYELKTQVKEFDRIEKRILVEKNIDQINDFPLENNESHSYWYFSGKRYIQSDHFSFVVSIVLNRERIRSGTTDFYKLESWVKTEILAELPTHISLVIHWLSSEEFKKFASTYKLWQNNGAPLGDHAYKILETLTLGKKPSASIEAYSEEIIASZ

SEQ ID NO: 498 - protein, 477 aa, Photorhabdus luminescens
MVSEPNLLNRIIITITANNTQVAKKVLHGSLLNQSNINKLINSHFNQYIINKNIYLETLTLNLGEINLQDFNSLFPIRLNARLSQALNQYQVNNQTDIEKFIHYLQQKNSIPNKIEDIKNSEITDINIKQLINQLPHIQKNWTLLLAKSCLSEHSLKKLLAIRDPSLLIVINHKLSENIITPQHQEEPVSSWQLILNALRYIQQHNAQEIPDPDAKIISRITTELNNGAINIASIITLFHQTATRNSPLNNWLKPLWQTAPVSQYCKKYLSVEEYQYLSEYFIPKHGDKNKSSKKPSVSSEPVLSPEYSPSRQVNNAGILVLWPILPALFNQLGLLEKQEFIHRQAQFSAVVFLDYLIWGTEKAPIEHKGLNPILCGLMADENIESAPIEPEKQLATEQWLDTVITQLPAWKKLSRNDARQLFLQRPGKLRIDKQEISITIQQQPFDALLTDWPWPLNIAKLPWLDRPLLINWQNIZ

SEQ ID NO: 499 - protein, 694 aa, Photorhabdus luminescens
MNFPLKNNHCMAVESDWIYPHLERIDLLLQRYYYQKRDWYDSLPESFLLTEDEIEQRLVKPLGMPHWLKQSDIIDYKDIENKPITGRLSLLIERFELTEFERDTLLLGLLPHFDSRYHALFAFLHGNSKKQWPSFALAIELFSQRQNDWQLLQNSFLPQTPLINHHLLRLNNHEEPIWLQTQFLTHSAVWHFLSDQRVILPPLITCAYWHSSTSQTWYPQTLYHSLNKILLNEIDEICPLVILKGKQDSARELAVSNIMALHNISTLIVDLAHLPDEENTNTKPCLLTDAIREARLHDACLLIRNFSLLAEEKQIWLSKLSTLLNQSKLRVVCLVEPGDSFVWIQHLPMVQIEMPVATLAEKKAILTENLPNNADREINLTQLCQRFSFTPETLPLILKEACQYQILRQPEDQLKEIDLRKALNFRAQQNFGKLAQRITPKRSFNDLVVSEGLTQQLREIIATINYRNQVLNTGFQEKIGYGTGISALFYGESGTGKTMAAEVIAGYLGVDLIKVDLSTVVNKYIGETEKNISRIFDLAEADSGVLFFDEADALFGKRSETKDAQDRHANIEVSYLLQRLEDYPGLVILATNNRSHLDSAFNRRFTFITHFTYPDEILRKQMWQAIWPKQLNLSDELNFDHLSKQTDLTGANIRNIALLSSILAANDNSEKIDNKHIERAIILELNKTGRLFFZ

SEQ ID NO: 500 - protein, 309 aa, Photorhabdus luminescens
TFNKIGVDMTNIIDPNNAIIAVNTALHEILSQHLNTSNQMIDIRFDLPEINSTPAKPTVSVFLYDIHEDLQLRSAEPKSYNPITSSLLSGWVNINYNYLITYWHSNQPSGDGSNPDSQPNNQAARVMTAILNALVNNRQLPKIPGAYTRVIPPQENLNSLGNFWQALGNRPRLSLLYSITAPVKLQNIKDIIKPVSQISTSVDQKSNLDNSQIDQALFNKLCSNLGGTEDVRLALAKMNLATKPTKENNEKQNNQNVILEVSGIIHLDYLPRVKGILTTWKNSHRAVVRINDIGIIVSEDKYDQLIGIZ

SEQ ID NO: 501 - protein, 597 aa, Photorhabdus luminescens
YLSQTYTQWISRCIAAARERIPGSIDNYVTGVSECSQQRSNLKDDGYISSRKLTGDNMVYEYDKTIERRRNPSIQLNNNEKSSEQALELSQNNPLLHDLITSNNLRKEAAVFAKRIGPSYQEILDELEHLHHLSGNEQLAAGFELHRRITHYLEEHPDSKRNTALRRTQTQFGDLMFTGTLQKIRHSLLEMAETRPEMASHIYQIAREEVKGNTPGLTDLMVRWVKEDPYLAAKTGYQGKIPNDLPFEPKFHVELGAQFDDFKKWLDTAQSKELLTHTRLDEQNKQVHLGYSYNELLDMTGVESVQMAVYFLKEAAKQAEPGSTKSQEDILLHRFANPTYLAQLEHSRLAQIEAIYHSSHDTDVTAWDQQFASDALTQFNHQLNNTVDLNSQLSLLLKDRQGLLIGESHGSDLNGLRFVEEQMEVLKAHGVTVIGLEHLRSDLAQPLIDKFLASGNEPMPAELAALLKTKHLSANLFEQARSKQMKIIALDNNSTTRPTVEGTQHGLMYRAGAANNVAVERLRQLPAGEKFVAIYGNAHLQSHEGIDHFLPGITHRLGLPALKVDENNRFTAQVDNINQRKRYDDVVELPRIQLTSZ

SEQ ID NO: 502 - protein, 332 aa, Photorhabdus luminescens
KINLEVIYMEHEYSEKEKPQKCPIQLRDSIEHDKEDINTTTPLELNSQYTNRKRAGLRERFSTTLQRNLPGHSMLDRELTTDGMKNQESRFSPAMIMDRMMHFGVRTRLGKVRNSASKHGGQVTFKFAQTKGTFLDQIMKHKDTSGGVCESISAHWISAHAKGESIFDQLYVGGQKGKFHIDSLVSIKQLQMDSYLDDEQSTMTEYWLGTQGIQPIMQKNDVDEHSSKVVGQTGNKGTTDLLRAILDTGDKGSGYKKISFLGKMAGHTVAAYVDDQKGVIFFDPNFGEFSFPSITSFSRWFTDDFWPKSWYNLEIGLGQQFEVFNYELKKSZ

SEQ ID NO: 503 - protein, 652 aa, Photorhabdus luminescens
MVNNVLKVSTLTLLVACNVHAATVDLRVMETSDVHSNLIDFDYFKDKPTEQFGLVRTASLVKAAKAEASNTILVDNGDLIQGSPLADYVAAKGLKKGESHPAHQLMNTMGYTVGNFGNHEFNFGLDYLKKAIAGAKFPYINANIMDAKTGKNYFTPYIIVDTPVKDREGKNHTIKIGYIGFVPPQIVIWDKVNLDGKVVVNDITETAKKFVPQMKKAGADLIIAIPHSGFSKEPYKAMAENSVYYLSEVKGIDAIMFGHSHGVFPSKEFADIKGVDVAKGTVNGIPAVMPGQWGDHLGVVDMVIDNEGGAWKVTEAKAEARPIYDKVNKKALVERDSELAKIIGQAHQGTRGFVGKLIGKASANMYSYLALIQSDPTVQIVNDAQADYTRHFIQGDPDLADIPVLAAAAPFKVGGRKNAPAEFVEVEKGDLTFRNAADLYLYSNTLAVVKVTGADVIEWLECSAGMYNQIDPNSTQPQYLLNWSGFRTYNFDMISGVNYKIDLTQPAKYDVDCQIIHQGANRIKELTYQGKPIDPHAKFLIATNNYRAYGGKFAGTGEDHIAFSSPDENRAILAAYIVKMSKQKGIVTTKAENNWSIMPIKTDKKLDIRFETSPSEKAAKFIKAFSQYPVKYLENDEIGFAVYQIDLTEKKZ

SEQ ID NO: 504 - protein, 367 aa, Photorhabdus luminescens
GDCITMKINDSYKKKPHSNDLIELEKVLDLGKLSGKSDTVEQFEKKIAELFEVDDVVCCSSGTSALIASLMAEDICADDEVLVPCYTTIPTTFPILSVGAKPVFIDTKTSHTTELSIDDLLSKINDKTKAIIAVPLWGYPVNYDEIAEVCNSRGIIVIDDAAQAHFSTFKTGRLVGTFSDYGCFSLHDKKILSTGEGGFIIPSSPQRTKRLREIVNLGNLNGLSFGLNFKLGSLQAALGISRCTRVYDELTIRRENAEKIKEGIVSTRFEEIDCLGQPNYYNLVLKDKDHRDLGNVHEVLKDMGFETDFLKYGEAKYKFGILNKFYDGSIEKGDTVLKNLITIPTHPDLSQEGIDYIIEILEKVSCZ

SEQ ID NO: 505 - protein, 261 aa, Photorhabdus luminescens
QEILLSMNNTKILSELSAKGWVCVDTPSYLGHSDDMFTNYIRDTIGMHTFGFRSEILGDVASILSPKEGIVQSRKKLRGHTDASFLPFDTEWKKVRGLSIIPNYVALLSICGSDVGTTVCHIEEILYHMNDDEICELSSPNYVFEWQKSFVMESNELDSSWKPILHFSDGFFQVRFSNSIKTYKTEKAKKCAIKLSSLYQRLCLKIALKTDQLLIVNNRRCIHGREFISEESFSRKLHRYYLYEKEDLVVKTDIKGIVLPZ

SEQ ID NO: 506 - protein, 372 aa, Photorhabdus luminescens
FLFHSIWLFLRGEETMKKSKVIDSYYNYCLNGWLPEASKKYISVLNKESAFQEKILSMFVYATGQSSEEYCHIENEKREKSIVLNDIAKSSELKNSVLVLKGLSVERFYHESASRFAFDADLVVLEDHLPLLDALLIKHGYDIYFSTIWIKDVVTEKVYKSFRYTKGKDDDRGFEIHVDHYPIDDNGSRILLQSLYSGCYNTILRGTYVNVVSDLNSILIILIQIYNKDYLTIRDFVDLLILLENSDFKACEHIVRTLISSHGLGPAIAKLRQYIEANEIDVSKYPSGADIVKMVSWELSTPDVPQFDKKCVALISDDPTAKSRELFDRGTPTRFYRLFKNEKVDESNSFKMETNIGCFYGQVTGDFVVYEZ

SEQ ID NO: 507 - protein, 472 aa, Photorhabdus luminescens
SHVQSCNGGTMSFNVIEYLYYSSNNFSQSIFYRDHPIEITYGEFLSKVVYFSDYFSEVIEKVVAIDIERKDINMYSVFSAMWKNKNTIVPLISDWDDEYKERIINAVKADIRLNQDLSVYHIKHKVDRNDSVIIPAKTAYILFTSGSTGLPKGVPITHLALKHYIDNIYEELEIEKGIERLTNTFSPAFDLFYHDLFLSWKSASSITPVETKKIGQLLNKVENNKLTYWFSVPTLAQMLISLKPKSHQLSSLKVSLFCGELLRKHVVTSWAQISNCQKIFNLYGPTETTIACMISDVGIEGPPSLGRALGDMSYKTEHLSGNLYKLLLSGPQIFNGYIGTSKNSFVKIDGKVYYDTGDLVTILDGEVYFEGRIDRQTKIMGHRVDLQGLEEQLRVKNNNPLVFVVLYYDKNIDCNTGITIFYQPKNEGEIFDCGFIKNVKVKGIFCIESVPTLISGKVNYKKLELWAKNQIZ

SEQ ID NO: 508 - protein, 295 aa, Photorhabdus luminescens
ILNNMMNTKYDLLKNILYKESGINPDYLDIYKKGFNSRDAVKYFLVKKPGELIRNPINGAPVLTFMSYEQYFNSLGVNITYDDLSHYSLEKNCFRVINPWGFVGIQIGESALFSLGVYNPKDMEINGRNYKVYYDFVHPEYTWKGNNKFELFDCPKGESFICTSYNTWQGDFTGKLGVNNFQDLYEPNKQTTIIYAIWASGINKLCNLIGMKFDLVNLVKYINNEKKFPFEVSESGILSAIHLVGPYKLFEVIGNGGFITDEIGTSAFSYIESFSFLEIDPMFNHVMEELCHSMZ

SEQ ID NO: 509 - protein, 396 aa, Photorhabdus luminescens
VMDYYLNRLSNRVTFIDRRNSEFYKWLSTTPEFHIYGDDAKEKLNSNLFRLSKICPELFIHYTITTDLRVKPVGEVKIKIMAYEDYEHEILSDYNLIKPLTLFLKETTNGLSFFFVVNHFLSDALSNGMISNLLSGEDTNWDLYEKNHIKNFVSSKLGKKSRNNKYNLDFIKEYCELKINNSEKSRFPIRDMKLESSTSVLRHKVLRSTSDNMITAHLIKAIASSFDEYFGGEHLYIGLNQHGREPTYSIDPRYTLGWLNEIRPLIIKKSENGYCVNDIKSRVLMSTLYGGDTNTLLASNTEYGEVGIQFPSICLNVINKKWFTGKINTQYKHKILVNDRGACRIMHIGIGLIIDSECCDLTLDFSSLDYEEHYIRGLFYLLIENFNNSHNINFKZ

SEQ ID NO: 510 - protein, 266 aa, Photorhabdus luminescens
LYEGEIMKISVIIPTINRPSMLLNAVNSVNSQKFLNKEIIIVNDAEKSIGNIFLHLPNVTVIESNLGKGPGFCRSIGCKHASGDYITFLDDDDIMLPSYLERLHDEILNNVDKSCFYWSSVKVLDRVSESCVSQFDIKFPIEYDSFSDLAVTALRIGTGYGLTCAREVLKDIGYFNPKYRYIEDTELVVRLLKNNIHPVPINQIYIEVNKHSSNQLTSSKFNEKRIKECYKLLCEQSDFFDKFPTAKAQLNRQILKLENELYSIYZ

SEQ ID NO: 511 - protein, 364 aa, Photorhabdus luminescens
LLNKEVYDMNTIVTNSKILYTLTSLCRTDYENVNKSQLIDIMNHTEFPWDRFLSVVNRQKIVGIVYKSLSEMKLLHLVPYRVASAIKYIYLATTKRNQVLMDELITILTAFKEEEIDIRPLKGSVLLDLIYTDYGTRTLNDLDFFVSKNDLKRLPKIMNNLGYIQGEYNVNDKTLTELSREDKLMWKVKMFNLPPFCKIHPEPTVDIISIDFTFGLSFSDNKDINEKILSTYSILNNKKTLSNIDFFIHLCTHLYKEASNEAWENFAQDINLIKFCDVREYYYFLSQKIDNDDIISRVNELGVEKAFSFSILYSSILYNDNNLIKLLERINYSKYNFQEVYTQNNEINKIKLNSVSESILLVKZ

SEQ ID NO: 512 - protein, 293 aa, Photorhabdus luminescens
MPIIAPIPRNERRQMKKIIQNTRDKDYARRLMAILMLHRGESVSLVAKTLCASRSSVYRWINWLTLYGLEGLKSLPVGRPAVWNLIPLYPLLSFLLQYSPQQLGCLRSRWSLEFFIIKINELLNIKLSISTFYRYLHKMGIVWRRAAPTLKLPDPEYHEKMAKITEALSTCSEKHPVFYEDEVDIELNPKIGADWYLKGQQKRIVTPGKNQKHYFAGCLNVQTGKVTYADGLNKNSHLFINVLEELERQYCHAETLTLILDNYSIHKSRRVRDWLACHPKFNCCFYLFIHPGZ

SEQ ID NO: 513 - protein, 364 aa, Photorhabdus luminescens
VPSKCSTILKSYLTVSTIQSIIQALFSYHVSSIFTDNLEVSLLCSTYLKYTSPLYLFSSLSLIIDTINRCHKKPSISTKITILEVIIAVFLNWVMIYGNLSFPEMGIIGAALSTTIARIIRTIVGSYILVKIYTYKYFISTIYLNSFKPLVVDYFSKFLPILLTNIIWSLGIATYQFLIGKLGVDYIALHSVISSIESAFLAISWGVATSSGILVARRLGYGYSIAELDRYLKKQKLSVYLYSLVTSVTFFIVLYYFSIYYNVRYDFTYLLFFPLIFLLKCISVYYLTILQNCGDTKNNLKLNFICQWLVSIPISTVLIIHLNCTYISILAMLTVEELLKVVFLHVRLKNLSWIDDVKLARGCZ

SEQ ID NO: 514 - protein, 971 aa, Photorhabdus luminescens
LQMKWYVKEALAINQAIPYEESINIEAGFGPTGLPHIGTLCEILRANLIKTELEKAGRTVNFYLISDDLDPFRKVPLNIPNAEQLTPYLGQPISKVPDPFGNFTSFSEMAEYQLMKLATEYEIECQLVRNSLAYQNGDYNDEIKLFLQNFLVLNQICKESTGSLRQRTYSMIMPISERTGAVLEHIIVTDVNPASGEITYYIPGDEVINKPGYEYGVEIREFYKNEILDQEQTISVLNGKSKLQWKADWGMRLLARNIHFEMHGEDLLASADVARQIAGALDRPIPRFYKYGLFLDDSGKKISKSKGNSFSLDDIRHLLTRDAIRTYLSKEPQRSSKFYVALAPHLNDQVNISQKDGKRLSFSKIARILHASKPASKLAAENFLNRYKKPGESISDQELEISYHYYIRTCENENQGLQNIKEEKYFSAIANSINSGEISTKDQLFQHIITTYEDHFSDDKSSQIWPLLYRGLFGDTKGPRIKTWLDLNCMQHILTHFSHPYKNPHKTPYKNPSQKNEENIVNNEINKSQKERLLKNSIEENKTYMTKLYSKINFTEIRKKCDELSSALQKNSEALVEALSGYQCKNVTEDEILRSIDVLNNIENNREYFKKKIYGVTSFLPLNQPIYASVCFGFIPSLMAENVCIRPPTAMHTHYKKFEAVINLSEFSPTLSISYEDKELFLSQRVKITDAVIFTGTPENALKVRKHFRKNTLFILNGAGHNPLIISKDADINLAVESAKRVVLYNQGQDCAGPNAILVHNDIYDLFKQRLISDLQNIEDRVGPYSDYKNIVGPNSDIDHSIKIASLFKVNRPYCTYGGEVNPINGMIKPTVFEKELSLGGNYKEFFAPVFFLQRYYQDQDLIHYFSDPLYSANAMYISLFGTSDYIHHQLSERLHLPDSILSNTDLHREEHGYLPYGGQGPAASCLWYEGNRINGSTLPQRDIYHYLIEPFDTPPTPKSEKRHCVQAGIZ

SEQ ID NO: 515 - protein, 356 aa, Photorhabdus luminescens; identical to SEQ ID NO: 52

SEQ ID NO: 516 - protein, 1647 aa, Photorhabdus luminescens
IINLINLEDYMSHFEYDIENKNDTYQLKENEYTAVNGKYWEYKRDENENKPFIHLLKGNQDYPTWITSDIKEMALYIIENLLSYNKYSTTLQQTLKQAVDAVFNEYSEIKYSELLNNINNIFNLFFIKNYNSSDIDTAINILISKIEIHEKLASINKDKVDSDQTKVDIWQDLEINAEEPLLKIYRQAFSTGDIDDEVYSDALLTFMSDGNVALNDKEKSDYNQRIKDKEDLFKSYKEGIEKVNSLISANNINPGIPIIHPEINQSISIGDDILLALLAKEEVALKKQHRTEYSQKDILDLQTLQAAKYHLLVLSSLGALLYQIAPKIGKMTQGHGDYRDIIFAQDQAELLFKKNNIHYDTDHVLYQESKHIEMEGCIILTAAIIYRMRKENANVEQALKYSTLETIKLFENDKQKLNPFNKNNVKPAGYFSFIDFKKRDKFDSQYNFNEQFNVYKNKYSDYESILLSKLILSSPAAQLTTEEIVNPPEEAFLYSVEQGMGNVAMIKMYQGNWLVVSTIQGGVKARKYSQQQVDSQPTLRAMSRPNALFLIEQKIEIGMGILMANRMVRTGKRLFPIGYERAKTLSGFSETSRYKYSYDAFWNDYYGITSGMNVGISFTGSPKFNFYKEDNLLSVTTTIVQKGLNDIAIKSKQALDITSGWHIAATILIPFYNVIYKATTDSEYTLTGEDVGSIIFDTANVLLVVATLGMSLTESMAAKVTQTTLRLRQAGLTGRALITAVIRTLPEHGVITLRQSSRILLGGLIDLIEPLPIRSTLTLTYRGVVSAVGVIKNSIKLEKSFADIFSKSTRGLGKLKNEWQVSNISLNRMVAHANEGIYKGIYSIRPANVETAIKQNYYIKESGANYQVKWDETNHTWRVANPAYPQQFSYWPAVKLDKNGHWITHTDVSNKFLILEQSKKIDQELEAARSNINNDKILDAFIHINTAFKNHEKYDIDKLSDITDTLTHFLEKSLKLGDKQALLNTEIVNIQQAWIREVNLPLQNNLLPKNLSISAEKINAIKTELPYLLREIYPVGNQLPNASAINKMALAIEEIPNTPMPKYSSGNIQKTIQYTSIESNRVNIPPIGITITGNDLFINQVTHVLDEISEIPSGNIVIQELEKQGLNIQPPTMDAIVREKNGQFYAHNSAGSSIAFDPENHLIGTEEKLVEEPWRSREPAIALYHEMLHIYYNRYPTWFTSIDNKIIDQKVSGGFSLLEESRIVGTKYYANDKNTLFDFSNSGYLLENNSALLTENRFRAEYAIFKGESEYVIQPYYGKGDSQIPLTSTRISTNESSRNVMGVGSGKPEKMPDESATDYRNRVKEWRKANKKPGADIDIGSGDMRKRKAQFRIEILQKEYPQLEPQKIELGGAFELWTVPNEPANRLMLSSHGYFFSDSAMTQVPAGKTIQFLGPHGQTLLESPENPLNSPFDVTLGNSGLTVQPYATIKAGNTASLANVRIGDKTFTVNDIQNMATNDIENYLLATGVEANTVNHGRVRNYGIKYYEKMPDEEVKAAVWKNRTDSTNINKYDALLVSPEAGNRKKLSDIFTLLKTNERMAKYDEITFVACREELNRINMKSVHDTGLGGGYEPKLQPTVVLSRSKRSATLTPDGAIIYSVIAVNLHYNLITEKIVGIAPFLLMDNZ

SEQ ID NO: 517 - protein, 450 aa, Photorhabdus luminescens
MEKHPVEQSPKLDFSNLDFVKFGEYLSEYNIVDKQGRYLHWSQLKWRVPGKEAEHIWYAVKFCRDQLKKSTGLFDKSGNEFSFCIHDSLEPKLHKIVQLGAGKVAALAGSQASDNIQQNYLVSSLLMEEAITSAQLEGAATTRADAKKMLEEELAPSTPDERMILNNYMLLKLADKRKQEPLTRDLMLEFHRIATNGVSENENIPEEFRCSNDIYIGNDDNPLFYPPNYEELENRLEELCTFANENHNGEDGRRFIPPVIKAIILHFMMGYEHAFKDGNGRTARAIFYWYMLKNGYDIFEYISISKVIKEQAKEYGMSYLYVQKDYGDLTYFIDFNVNIILNAFDELQEYLKVKTKEFYEIVDVLENSKYKSKLTFIQKDLIKKGVKEPGRLFKVKSVQNVYDVSENTARKLLRELEAMNIFFPIKIRRTTYYIAPADLRSRLNKISKSZ

SEQ ID NO: 518 - protein, 461 aa, Photorhabdus luminescens
SHESTSSPARPTNPTFVSETLRQWPRSSIRRRKKMTTQNFQYRSLGRLQVIYRGRGEQWVLGHLAESTVSGRYLFEYTHEALDNGIEFSPLQLPLSTETYANFEHFQDWLPGFIADSLPDGWGRLLMDRFLRRNHVDPGRISVLERLALLSDNTMGALTYQPVLPLPEDQEDKYSILNLTGLAQQIRQEVTGQDSEALRELFLLGGSPHGARPKAQVEYNPSTGQMKTTAFPESEPWLVKFPAAEENPWVCALEEAYACTARIAGIDFPTSRYFRLGGELAAFGVQRFDRENGMRVPVLSMAGALHADFRLPCMDYIDILRATGSITRSVVARETQVRRMVFNVLMHNRDDHVKNFSFILNKSNEWVVSPAYDLTFADGPGGQHQTSVTGYGTDITRTMLLKVAKDAGIAPARMNNIIDEVADVAANFAHTARDVTDDIPTNELHQVTDCINRNLSYLKRZ

SEQ ID NO: 519 - protein, 214 aa, Photorhabdus luminescens
QFKSIFSVKRLTMENDRSTMKNMEGEQAPNIRENMLDVVEELIYTRGIAATGIDLITRTTGSSRKTIYRYFGTKEGLIEEVLRRRDERWMRGFTSSIAEYKTPKEKLLNIFLVLQRWFASDDFRGCAFINTSGERPNPDDPVRIIAKEHKEKVFTYVLSICKEISPDSSVDLARKLLLLIEGAITTAHVMNDTHYALEAMNIAEALLSKYDVNZ

SEQ ID NO: 520 - protein, 249 aa, Photorhabdus luminescens
MTSHTLTSFGRQISSPVIVALDYDNQDTALAFADKIDPQDCRLKVGKEMFTLHGPQFVKLLHQRGFEVFLDLKFHDIPNTTARAVAAAAEMGVWMVNVHASGGTRMMTAAKEALLPYGHDAPLLIAVTVLTSMEQSDLQGIGIDMTPAQQAERLAKLTQACGLDGVVCSAHEAQQLKKVCGQHFQLVTPGIRPTGSDVGDQRRIMTPEQAVLAGVDYMVIGRPITRAADPAAALRQINQSIAGVINARZ

SEQ ID NO: 521 - protein, 390 aa, Photorhabdus luminescens
MLELLFLLLPVAAAYGWYMGRRSAQQDKQQNADRLSREYVAGVNFLLSNQQDKAVDLFLEMLKEDSSAFEAHLTLGNLFRSRGEVERAIRIHQSLMESASLTFDQRLLATQQLGRDYMSAGLYDRAENMFAQLVNEKDFQENAFQSLLTIYQSTSDWKKAIDIAEKLVKSGKHDLREKIAHFYCELALQEMSGDDLDEAIGYLNKAVQADKNCARVSIMLGRLFMARQEYNKAADALKSVLEQDKQLVSEVLPILQECYQHQNQIDEWENFLKRCVEEDCGATAELLLADIIEQQKGHEVAQTYINHRLERHPTMRLFYRLMDYHLAEAEEGRAKESIILLRDMVGEQIRTKPNYRCHKCGFTSHSLYWHCPSCRSWDSIKPIRGLDGQZ

SEQ ID NO: 522 - protein, 207 aa, Photorhabdus luminescens
LNQHMNNKMQLKRVAEAKLPTPWGDFLMVGFEEIATGQDHVALVYGTISGNEPVLSRIHSECLTGDALFSLRCDCGFQLEAALAQIAKEGRGVLLYHRQEGRNIGLINKIRAYALQDNGIDTVEANHQLGFAADERDFTLCADMYKLLGIQAIRLLTNNPKKVEIMTEAGINIVERVPLITGRNPKNAYYLDTKARKMGHLLSEQNZ

SEQ ID NO: 523 - protein, 892 aa, Photorhabdus luminescens
MSFDLKKVCVSTLSAASKQYDYYSLPLVAKHLGDISRLPKSLKVLLENLLRNIDGNSVVVDDLKAIVDWQNTGHADREIAYRPARVLMQDFTGVPAVVDLAAMREAVQRLGGNVEQVNPLSPVDLVIDHSVMVDKFGTEKAFEQNVQLEMERNYERYLFLRWGQKAFNRFRVVPPGTGICHQVNLEYLGKTVWHEMHNGRELAYPDTLVGTDSHTTMINGLGVLGWGVGGIEAEAAMLGQPVSMLIPDVVGFKLTGKLREGITATDLVLTVTQMLRAHGVVGKFVEFYGDGLADLPLADRATIANMSPEYGATCGFFPADGITLSYMRLTGRTEQQIELVEAYCKIQGLWRNPGDEPVFTSSLELDMSTVEASLAGPKRPQDRVALARVPQVFQSSVDLEMNKSQGKAISAPVNLDNQKYELEEGAVVIAAITSCTNTSNPSVLMAAGLLAKKAVEKGLKRQPWVKTSLAPGSKVVTDYLELAGLMPYLEELGFNLVGYGCTTCIGNSGPLPESIETAIKQADLTVGAVLSGNRNFEGRIHPLIKTNWLASPPLVVAYALSGNMKKDLTKDPLGQDQQGNDVYLKDIWPDSKEIAKAVEQIKADMFHKEYAEVFDGDETWQSLDVASSATYHFQLDSTYIRHPPFFSEMTAEPEAITDIHGANILAILGDSVTTDHISPAGNIKADSPAGRYLQEHGVEPKDFNSYGSRRGNHEVMMRGTFANIRIRNEMIAGVEGGYTRHIPSQTQLAIYDAAMRYQEEKTPLAIIAGKEYGSGSSRDWAAKGTRLLGVRVVIAESFERIHRSNLIGMGVLPLEFPQGVNRKTLNLQGDETIDIEGMNNLKPGQIVPVKMTYSDGHQEIINAQCRIDTKTELDYFHHGGILHYVIRHMLKZ

SEQ ID NO: 524 - protein, 276 aa, Photorhabdus luminescens
MDIKNTITNNQKHIAKINEANTFFHIDDAYFSIENTNKYNEKDGLVQFIIAKQLSDKPEVIDKTNSLSQTLIALSSIATNYVNKYAEKYGEQYKTDMDFWTKVVNKLPLMGTSKVESKNYTDSLNGLSISKSFLNFIMNVVVFENTDMLPDFAKFLTKQGETIRLGIRKNKGFYSTVTLTIAIDTLIVGEKTVYIPKLKLYRVNFDSTNSNFLSSCASNENINIDFEYSSLISVLDYEALENPEIKASFDNFINKQRKTSIEESDDFFSGEFDPIZ

SEQ ID NO: 525 - protein, 304 aa, Photorhabdus luminescens
MLWFKNLMIYRLNRETSLSADELEKQLSPLAFTPCGSQDMAKTGWVPPMGSHSDAFTHVANNQILICARKEEKMLPSPVIKQALQAKIEKLEGEQHRKLKKTEKDSLKDEILHTLLPRAFSRFSQTYIWIDIANNLIVIDAASAKRAEDNLALLRKSLGSLPVVPLTFKNPIELTLTEWVRSGALPTGFALMDEAELKAILEEGGVIRCKKQDLVSDEIATHIEAGKCVTKLALDWEERIQFMLSDDGTFKRIKFSDTLREQNDDIDREDFAQRFDADFILMTGELSALINSTIEALGGEAEKZ

SEQ ID NO: 526 - protein, 325 aa, Photorhabdus luminescens
MKLQQLRYIVEVVNHNLNVSSTAEGLYTSQPGISKQVRMLEDELGIQIFSRSGKHLTHVTPAGEEVVRISREVLSKVDAIRSVASEHTYPNRGSLYIATTHTQARYALPPVIKGFIERYPQVSLHMHQGSPTQIAEAVSKGSADFAIATEALHLYEDLIMLPCYHWNRTLVVTSDHPLAGKESVSIEELAEYQLVTYTFGFTGRSELDVAFDKVGLKPKIVFTATDADVIKTYVRLGLGVGVIANMAVDPVQDNDLVCIDMRDKFSYSTTKIGFRRSSFLRSYMYDFMWRFAPHLTRDVIDQAVALRSNEDIEVMFKDIKLPIVZ

SEQ ID NO: 527 - protein, 867 aa, Photorhabdus luminescens
MGKALVIVESPAKAKTINKYLGSDYVVKSSVGHIRDLPTSGSASQKSSSSSTDKSKKKVKKDEKAVLVNRMGVDPYRGWEANYQILPGKEKVVAELKSLAEKVDHVYLATDLDREGEAIAWHLREVIGGDGDRFSRVVFNEITKNAIKQAFDNPGELNIHRINAQQARRFMDRVVGYMVSPLLWKKVARGLSAGRVQSVAVRLVVEREREIKAFVPVEYWQLHADLLAKGEISLHMEVTHQQGKPFKPVNSEQTQAAVSLLEKARYKVLDREDRPTSSKPSAPFITSTLQQAASTRLGFGVKKTMMMAQRLYEAGYITYMRTDSTNLSQDALDMVRDYISDNFGDKYLPEAANTYSSKENSQEAHEAIRPSSVDIVAEQLKDMDVDAQKLYQLIWRQFVACQMTPAKYDSTTLTVQAGDFELRAKGRTLRFDGWTKVMPVLRKGDEDHTLPVVEIGTELDLQQLIPSQHFTKPPARYSEASLVKELEKRSIGRPSTYASIISTIQERGYVRVESRRFYSEKMGEIVTDRLEENFNELMSYDFTARMEDQLDQVASNKVEWKGVLDEFFTDFSEQLDVANKEPEEGGMRPNPMVITSIECPTCQRSMGIRTATTGVFLGCSGYALSPKERCKQTINLIPENEILNVLEGDEAETNALRARRRCKKCGTAMDSYLIDSQRKLHVCGNNPACDSYEVEEGEFRIKGYDGPVIECDKCGAEMHLKMGRFGKYMGCTNETCKNTRKILRSGEVAPPKEDPVPLPELPCEKSDAYFVLRDGAAGVFLAANTFPKSRETRAPLVEELARFKERLPEKLRYLADAPVVDAEGNKTVIRFSRKTKQQYASSEKNGKATGWSVFYVDGKWVEKDKKZ

SEQ ID NO: 528 - protein, 277 aa, Photorhabdus luminescens
MAISQYDIHTSHAVISVADTGGDGLPVLLIHGNSSCKEVFRHQINCFGDEYRILAIDLPGHGASSNAVDPRRTYSISGYALCIIEVLEKLAIDKVAVFGWSLGGHIGLELIPRFPGIVGLMICGTPPVSPGAENVSLGFKPSRFMAISGKASLTEEEITDYTLALYGENALCEPFLRAAVARTDGLARQYMSEASVSPDVMDQRLLVETNPTPLAIVNGVEDLFVNIDYINGITYKNLWTGQVYNLLNLGHGPFWEAPELFNRLMAGFFSDLTLEVZ

SEQ ID NO: 529 - protein, 349 aa, Photorhabdus luminescens
VEYLSLYGLFLAKVVTLVLAIIALAILGIGIGMRKSSLKGELKLVDLGESYRDKQRQMQRARMTEAEGKIWQKEFNKQQKLESKQKKSDAKTGHKGLQKPCLYVLDFKGSMDAHEVDSLREEISAILAVADAKDEVLLRLESPGGMVHGYGLAASQLARLRQKGIRLTIVVDKVAASGGYMMACVADRVVAAPFAIIGSIGVVAQIPNIHKLLKKNDIDVELHTAGEYKRTLTVLGENTEQGRKKFQEDLNQTHELFKSFIHTHRPSLDVESVATGEYWYGSQAKEKGLIDEIGVSDDLLIAQIDNCEVIGVSYTRRKRMVERFTGNAMESIDKLLLRWWQRGEKPLLZ

SEQ ID NO: 530 - protein, 1787 aa, Photorhabdus luminescens
PNAQAARLSLIMIFILLPRRRSSMELLHHSQATNFTGAMMGGVDPRTGLFTPQIPITQLGGNDLWGPDLAITLTYNPLTYLNTGYGLGFSDNFTRYDTQTQVLTLATGEIYHRVEKANEVVDGQAWTFHHAKPAHFKVKKEKDAFWVLYKTGSREKLTQLDRANPVAVVSEIYAPSGHKLCVKWNSFVNHNYNYWQLMEVCDAMETLLKADLATTEKIEFTVWPGSPESYTVTLNMTNDLLQTVISASELTWHLEYETEGAHKNILTKVTTPSGLIEKVVYHETGHTLPTPKCIQYYPNAWGPGIIRQDPKSSTTATVEHFPYVTQHHIIAGSGSPDQVIRYVFSPENFLGQKNKNMKDPIPLPQQDNAYLANSEYKYTSTEVREYNEKRYCIHREYNKFHLLVSETETVEVTPSRPQKLKETIIKYYADVGKSFDDNKQPPQFLMPNTVETIWHNPESSASTTQRRKETTQWEYNAQCNLISMTLPDNTTTKTTYYAPDGEETTDTHCPAEPNGFERFIKEIAVEAPSPLTKTKITILRKVTYNYKSYDTYSPPKNNQASVVKSMVLPLSETHYSRRDCCADHLEKVKINTVSFYENTQNAFLNGRVEQRNSYLFENGNQTRSYTEDYSWSNENKNGASCIKCKTTGSGKCGTPPVSHEQYWSRSTGRLIFQKDAQDNNTVFQYDTIGHLISSTINADTAYEKTVKYAWSYSNKRVTVTQTDIHENRYITEMDGLGRPLKKSYSPAGYQGKQFDMERYQYNPLGQLCQAISCDHMLFENKSEKKCSSMTVSLEYDDWGHNSRLRYSDGTSVKNTFDPIKMTSEHQRVSNDESQSSGIIRTTYNQFGQITATERLTTSRIQQGCWHYLRDELGRLVSINANGNTTLLAYDAFDRVIKQTFADGTTISMAYENGVSVRMSATPLGINQTPVILGTQILDGLGRVIDMESGGRKIKLDYEGASPVPDTVTYVKGPTSGDKDIVLHYEYEPKLNNAVTKITAGQDDVDQTFKYDPKTGLLTEAIEEYKNKNDEMISSKLIFDYTLSGQLASEKLVSYNKNNRAYMHFKTCYSFSFANRPTAIKSTINGPRYIINKYSYDNQGRLETVRNNDIEINLKYDKLSRHVCQSTEYLFDTINNKITTSLTLDDFGRETKRTIRRHNGLKNNKGITDIHISQTFNEQDKITNKELLHGTKQISKEVYTYHKRGGLETYTLMELVGEREITQCSDYKYDHLGNITQHSITTEGKTITSTYTYGNGNIQDPCQLIDVSTCTGNNSSSSLRFTYNQRGALVCENDENNTKIRTWTYDSLGRIDTTVDALHKVETRYLFDATNRLIIKRSEKNGTPYHHDLSYCSNSLVHDNYFYGEKRDNAADRKYNKVGGICLGFSQTPCHQTPTSVASRYTETATDGKGSVIATFQGEDVQHIAYSPWGVTTEQAMVTAGQQPPHNTAIEEPRFNGEQWDTASASYLLGNGYRAYRPDLMRFTAPDSWSPFGAGGINAYAYCGGDPVNLNDPSGHISGWGWANIITGGIGLLLAPFTYGGSLELGLGVNAARGLTALDAASGVTAIASGALENKNPETSRRLGWMSLGLGLPSMVIGGYSLAQWVNVRLTNSFRTPYHYPTSLGEVNLSRKSSDWVNARRSLNSGENWHSEVGLNGRTIWGSDTKIRGLDIKYPLEQISRRPSNGDIVLLSGSHGVQNGDNWLINGSRRGSLLHFPFFKSDMTVYGGSWKGRTVHVRNLATMSEIDFGTLLNNGNSHIILGYCYGRNDQALRYHRNLLSVTSYIHNZ

SEQ ID NO: 531 - protein, 206 aa, Photorhabdus luminescens
QEHSMDKQFKEVIDKLIQAETDGLRNLALIDVEYPRQLAHYVATAFFDVYHDKQKLSAERAKVIEHVTVAVRAGQHDHAWHAQKALTAWAETFYHRHHDHLHRDDTLDTWDREAETLTLQLREHAADQLAGLALTLKELGERYPGDSAWILARYKALAGTFVLMHYKIKELLPLLGASLPNHKFDPNFDAIGWSLFDDIRRQLLPZ

SEQ ID NO: 532 - protein, 335 aa, Photorhabdus luminescens
MNTIALIGIDLGKHSFHVHCQEPSGKALLRKKFTRTKLMEFLADCSPATVVMEACAGAHFMARRIADLGHEAKLISPQFVRPFVKSNKNDFIDAEAICEAASRPSMRFVQPRTEAQQAMRALHRVRESLVRDKVKTTNQMQAFLLEFGISMPKGIAVIKRLSTVLAEHPLPPYLAQILLRLQAHYHYLVGQITEIETALSQEIIQDDTGQRLMTIPGIGPITASVLSSQLGDGKQYSRSRDFAASTGLVPRQYSTGGRTTLLGISKRGNKTLRQLLVLCARSFMQQIEHRQGKLADWVKQQLERKHSNIVACALANKLARIAWAITTQHTVFVAZ

SEQ ID NO: 533 - protein, 213 aa, Photorhabdus luminescens
MNYSKVDIDLWDRKEHFLHYRNVVQCGFSLTAKIDITHLLSSLVEKQYKFYPTMIYLISTVVNSYSEFRMAIKDEELIVWDGVNPAYTIFHKETETFSAIWTEFNSDLAEFMKNYSADYETYKDDLCFFSKPELPENHFHISSVPWVSFDGFNLNMASVMDYFPPIFTMGKFYQNGNQTQLPLAIQVHHATCDGFHVGRVINNLQELCNDFIZ

SEQ ID NO: 534 - protein, 255 aa, Photorhabdus luminescens
MLHYQPKHDLLQQRIILVTGAGEGIGREAALTYARYGAQVILLGRTTHKLEAVQKEIKQAGGAPATVYTMDLLTATAEECQAFAGDLAQYYPHLDGVLHNAGLLGAVAPMAEQPVQLWHDVMQVNVNATFMLTQALLPLLLKSPDGSLIFTSSSVGREGRCGWGAYSASKFATEGMMQVLAAEYKHTSLRVNCINPGGTRTNMRTRAFPNENSAKLKTPADIMPLYLYLMGSDSLHKTGISFDAQPGRKAGPAEZ

SEQ ID NO: 535 - protein, 311 aa, Photorhabdus luminescens
MSGKIQKSEKLQKILARSGHGSRREIEGYIQQGRVSVDGKIATLGDRLEVQPATKIRLDGRILNIKESQKTVCRVLAYYKPEGELCTRHDPEGRPTVFDRLPKLLGSRWIAVGRLDVNTCGLLLFTTDGELANRLMHPSREVEREYAVRVFGEVDDAKLKQLAKGIQLEEGPASFRTIAFKGGEGMNQWYNVTLTEGRNREVRRLWEAVGVQVSRLIRVRYGDIGLPKGLPRGGWTELGLEQTNYLRQLVDLNEETVSKVAVGRDQRRLKANQIRRAVKRHAQVASRPSAGKRPGSSRQKAGRTTAPKGRZ

SEQ ID NO: 536 - protein, 436 aa, Photorhabdus luminescens
STRWRSRKITSTFNAICRFELFFKVALLSLFQPYIPYGFQDASQWQGSNLKDNGYIALSPLLAIISTYFSANDNVKASHDNPINPIRYSMNSATKGYQPPFSITAKMIQLVAEISENIGRLSTEQEQIKALRLRRINRIRTIHGSLAIEGNLLDASQITAIIEGKRVIAPISEIQEARNAILAYEKLNHWHFTSEQNLLEAHYVLMKGLLDNAGSYRHSGVGVMDGEKVIHMAPQANRIPKLMGDLFHWLDSTDIHPLIASCIFHYEFEFIHPFADGNGRMGRLWQTLILNHWNPLFEFIPVESLVYEHQAHYYQAINLSSQLVDCAPFIEFMLHMIRDAILTSTHQATHQATHQATHQATQQVKQLIMVLKGEMNRGQLQSALGLKDRNSFRLRYLQPALAEGLIEMSHPEKPSSPLQRYRLTEKGVNLKNHHKZ

SEQ ID NO: 537 - protein, 1722 aa, Photorhabdus luminescens
MVILYPKPDRRCSGHLLVSITDFLTLKLNKRDSTMSKRNNSVARGTSYLLIYLTAIQPLHPAIAAGITPDNNHTQVQNQSNVPVVNIATPNDAGISHNTYKAFNVDTQGAVLNNATQAAQSQLAGQLNANPNLHGKAAELIINEVTGSGQSNLQGQLEIFGNKANVMIANPNGITCDGCGFINTSSATLTTGKPQFDKQGALEALEVKTGQITIGGKGLDGKATDYVDIISRATELNGKIQANNLSLTQGANRISLKDGTVKPVAGEGAKPQLAVDTKALGGMYANKIRLVATEEGVGVNLKNLISDQRDITLNANGKIELGNIKAKTDLNVIGKETHIAPNINVQAGRDIILENTTLDNKGSVTAGRDMRIFVNTVRNSGNKALLQANDNMWIQKNAQGDKSHLIENRSATIKTNKGDLVARSHKMLNIRDLYLLSNIKPEKNDFLDFSNVDDLSDMSNWFFIENYDSSLISSGGNLYINSDSLLNINSEIHGKGDVFLTGNHFTSTKFINTENLYNGNTYPHFIINSSHPVFNNPYYKYRNRQENDREIHVLDRNNADIKQQDWNLLRNNPSNETKIDSFTNKTMLSSGRNLVIDFLGEVKITSNKELINENELNTPDWKEKTLNLLNSETDDIKVKNNLILNANGFTLKSARLNAEKDINIISSDANFVELTDSKIISKSGDLSILSTYYKAPYEFFDKLLFPSAINVLSTVLKGHNVSLISKNSGISAYKSTKISFGPEIDDRSNIINASGDLTFYSGTNLNLNFINYFTKNKNTNLTAIRDIKINISKTSIDSSESISINGGINLDIGDVKLTAGKEVILNSAQDSKLWGVPITANSISISAGKDLNVTNSALNATENILMNSGGDLNLSVAYYNVGAMIKEGRISQITSVNAGNELTLIANDNIKLEGSSLISKGDMTLTSGGYTYLKSAVDTENTNSRSSITHKEVRLDSDKNLTILTGEGLLFQATKLLAKGVIDIAAKGGYLYAQAQEDVTEYTTSSTKRKWYGKKKTSTTTHHSVTNKVTEFIADGDINLLSRDDSTYEASKIETNKNARLTSTHGKINFKAVKDSSFEQTISQSKGFFIKNRDSGHRAETWVLPSVHIGGKLTIEAANGISADIKTQKGQSLQAVLAALGNTSETAWLKQLSQRQDVNWNEVQDAYENWDHKSQHLNPVVSAVIAITVAVVTAGAGVTVAAANGAAGAASGAATAAGASAATAATVNTATYGAVSAGISSLASTAAVKLINNKGNLSKTLKDMGSSDTVKSTITSMAMGGALAGFDNVMGWDKAANGAQIDPAKATLPKLSNGDWSKVAQRIAGQSIISSSLGTAINGGSFKDNFTTALLANIGSQINAEGAGLIGANGQVLDLPGKAISHAAVSALAAEIGGGDAKGAAAGALAAELAAITLDKTFNDPMKIQAGGKIIGSVAGAIATNSAKGANSGANAGEIVILFNHLNSMNAYNLARELQEANKQGTPTEAIWNKYNKLGATQRAEMLSHCAGNGGLCTLTYQAEMEGGIKTADAISGLRWMFGLSAEDTHRLSQFVTTENQNDLGLLYNSLPAWEKGALIAKEAVESAGIGGAIGGKASVASIVGKSRHVGNTIGSSKTKETQIWTETKKKEPVANAYGHWDKHKSEFPEYQNSKQYVEATHNFIKNPPKGTLVKTRANGDTLYYNPKTNIFAVKNVDNVPKTMFKPNPVDHGYETNLDYFNAQKZ

SEQ ID NO: 538 - protein, 389 aa, Photorhabdus luminescens
NQGILKMSVVNFSDKPVDGANVHTWPKSPDRDLIACGRDAYAEKTVQEALNGDPDKAVKLSELNDILAACEPFNFKGVTLYAKDPVLALIKALSEKSAYLVDDSYPPKQWQSGGVDKHNRIKDFIESPGMFIKGIEMIDMGQLYLGNCGFVSTIGAIASHPEGHNLLFSAIYPPVYNPTGIYSIRIINQSTVGYLLIDDDLPRVSFSAMEDKNEFWYYLIEKAFAKLHGSYENLGGGNEIYFGIESTANTSINQGNQDRIWDEKFIDIFKIKHHVTYQGTGSSTDLVSGHAYLILDAQQWNDIKLVRLHNPWNVVKYKGPYSPDAAEWENIPADVQNDIFQNNRFEGKSFWMPYDLYVKNLPKISDMYLSKIIPDSLKSIANPSPIQEZ

SEQ ID NO: 539 - protein, 207 aa, Photorhabdus luminescens
MSQFFYIHPDNPQPRLIGQSVDMLKKGGVVIYPTDSGYAIGCHLEDKDSMTRICRIRQLDSHHNFTLMCRDLSEISTYAYVDNSAFRLIKNNTPGNYTFILRATKEVPRRLMNDKRKTIGLRVPSNPIALALLEQVGEPLMSTSLILPGNDFAESDPEEIKDNLGKQVDLIIHGGYLGQQPTTVIDLTEDTPVVIREGAGNITPFLZ

SEQ ID NO: 540 - protein, 287 aa, Photorhabdus luminescens
MTNSATELVTIYDLHSHTTASDGLLSPAELVERAVAMGVNVLAVTDHDTTDAILPAHEYINQHDLPLKLISGVEISTLWQNMEIHIVGLNIDIQSNAIIELLNKQSELRKERGIEIGRKLAKVGIPDAWAGASRLANGGQVTRGHFARYLIEIGREPTVAKIFKKYLAKGKIGYVPPQWCTIEQAIDAIHQSGGQAVIAHPGRYDLSTKWLKRLIVWFKQHGGDAMEVAQCQQAPNERKYLGQLSREYDLMASLGSDFHQPCSWIELGRKLWLPGDVVPIWRNWSLZ

SEQ ID NO: 541 - protein, 623 aa, Photorhabdus luminescens
MVNKYTYTSSKSMSDISDIVGEPLTAWNNQAGGQVYNVIFNSGVYTNTYWVERWHIPDPTAKEGTPHNAWKYIRPATEDEIKQHGNPTDGRIDPTEDIPSPVLQPDAITEQTYQRPDVNFKPDGSAGNLSYTASRVCRPMYNEYESDKSRPKLSAYITDWCQYDARLDGKNEDADQRGRGFDLSTINVAAYDKLIFSFLGIYGDTGVKGDKIKEVADGWNSQSEIKITEGHIVPLDPYGDLGTARNVGLPKESANTNINAGTFLPFYQQKKASGLLGGLRELQKTARLAGHKLELAFSIGGWSMSGYFSVMAADETKRGVFVDSIVDFFARFPMFSCVDIDWEYPGSPGEDGNVYDPKDGEHYALLIKELRESLDSRFGREDRKEISIACSGVKTKLATSNIAELVKNGLDNIYLMSYDYFGTGWAPYIGHHTNLYSPKDPDPSGASDLSAEVAINYLHQELGIPLEKIHLGYANYGRAGKGANLETREYNKTGEALGTMEKGSPEFFDIVNNYLDSEHTLATGKNGFVLMTDTNADADFLFSETEGHFISLDTPRTVKQKAEYVATNKLGGIFSWSGDQDCGLLANAAREGMGYIAKSNDETIDMGPLYNPGKPYYLKSIGZ

SEQ ID NO: 542 - protein, 1370 aa, Photorhabdus luminescens
KRKEMMRMSNLIEAKLQENLRDALVDYYLGQIVPHDIDFQSQREGIKNVDDLYDFLLLDTQVSSKVKTARVAHVTQSVQQYINRIVLNLESGLSMTQEEADNWQEFANRYGYWSANQQLAIYPEVYVDPTLRLTKTEFFFQLESALNQGKLTDDVAQKAILGYLNNFEEVSNLEIIAGYEDGIDIADDKIYFIAKTRTQPYRYFWRTLDAKQRNNQTDELNPTAWGEWKLINVPLENAYNGIIRPIILNSRLYISWFEVSEEKQDKDNSIKYRTKLNLAHLAFDGTWSTGTTVREDLLDHSMKELIAVLDRTGDAERLALVAFVRLKGSDQGTPYDYDEVFTYVCDNLLMEATDLPKSTSTLSDLDAYGAALVWFYFREPLNGGPEEYKQLVLYPVNNNMKWPIAEPPIFEGQLGTVNDFKLDATYVDGTLNMYLTSTSTYVYDFSRSKNILYCIWLEDSKGERCWLDYKILTPEDYDPKLSVTLNRCDRNDVTVVTGFSLPSETGDVAGKIKTKLSVGKLLRGKIQIKQTKQTQYLQFPKEEQPEEQRESWYSDKAIRLNTLFAKELISKASQKLDKVLSWETQNIHEEPITGNVSKPIDLKGANGIYFWELFFHMPFMVAWRFNVEQRYEEASRWIKFIFNPFESNDEPALEQDKPRYWNSRPIIDEPKRLRSLIEPTDPDAISASEPIHYRKAIFNFYVKNVIDQGDMEYRKLQPTARTLARLSYATASSLLGARPDLQLASSWQPITLEDASYKKNSAVRALEMISYPLPYAPVVHDKTIRALDNDLFMKPINEELTALWDKIENRIYNLRHNLTLDGKEISMDLYDSKISPRGLMNQRYQKVVAARNASRMNFRVPNYRFEPMLARAKSGVDTLIQFGSTLLSLLERKDNLSFESFQMVQNNDLYRFAVDLQQQDININQASLDALQVSKQSAQERYEHYKSLYDENISSTEQQVIELQAQASSALLASQVSRTAAAALDLVPNIYGLAVGGSRWGAALNAVAEIATLKYQSDNTKAESLSVSESYRRRRQEWELQYKQAEWETKSIDQQINIQQLQVSAARKRLVQVEAQQQQSQALLAYFSSRFTNESLYTWMISQISGLYLQVYDAVSSLCLSAQASLQYELGLGEQNFIDGASWNDLYQGLLVGENLKLALQRMERTYVEQNSRKLEIIKTISLKSLLGEEWETKLQTLKSHNQITFNLDETKHFVPDYTGLFNRRIKSVSVTLPMLIGPYEDICAKLSLSGVSSYTTKADLKTVEKMLKEGTRAETPYTVRSIQPNQQIALSTGINDSGMFTLNFDDERFLPFEGVGVGSSWNFQFTNTSQDLESLTDVILQIRYTAQEGSASFGSAVKALLSKENPDLZ

SEQ ID NO: 543 - protein, 1174 aa, Photorhabdus luminescens
MDKYKSISREKQDITQVSPLLAAVAEVKSSKLPSGYRLLNAVEKEDNSTITLVNTLQRLGYRSIFDIAEVSKQRFIKRHNESLSGHAEVIFDKAVSAANQLVQSYRQRQLRDYDGALLTKASHQARYSSYSNNDVNDKEKLPDYSSLFPEPWDSFCQPNAIESLDSPVNYLLDLYKFVQQIELDGSNNAVGLEQRRADIPDLLLNSDNLYKEITAISIVNDVLSKSAREYIDQTGQAEKPVNQVLGETRFPFTLPYSLPSQQINKGLAEQETELGTIIQQVNQQFPWHILTEKRDQALLAYTQLSKEQMTLLTEKSPFAQNFLSREQLINSYFSTSTTEVLPEHDVVKHAYIIHADENVTGPTLLSDNVDKAYDEIVVTCENKAKETIKVKLRGENVLTYNRIKARMEPFDNSSPFSRQLKLTYVESDNSDIGNLDNGPFFGEMTVYAAIPGENTNNSSVNIEGINFLTMTYRFAIAKQGTAQSELLPEAEQFFQDNYGVSADESVKLKEILSFGQQTGSKVTDLEHLFNSGDFRPLVSPNVVFSNPIFDSGQTSEHFPAPYHYGGIYINAGQLDALSIVRTDSGREIDAVSDFRYDRMNRFIRLQRWLALPYHQLDLLVISAIKAESNNTDLAISNNTLRSLGLFRHLSTQYKVLPEAFAGWIYRITPFAISNNIPFFDQLFNQSKLFDQPLILDGKEFNYTENQGDGAKTVKQLCAGLAISLSTFQVIAPIVENALKLSSGKLVRNLDVVSRLYRLVTIPRLFGFSAEDGLILADILTDKSEYLANIPALGEKDDILSIIAQMEVLTSWLTKTKLTPIKLSLLLGKTQLPVVPTSGMLTFYKGISEGLTDNVCLQESDFNRQEINNIDWWTVLSGENGIFDKENGLIKDIPLIWGKTDEESLRKEIEDIVTNISPDDNQINIVVQIILQAKTAQESLLSSAIAGEYGVSRDIVPLQLRWLGSSVYSVLKMVLDNTPEKVEDIKTEFLDLTYSLLVYTQLINALSIGNNLLLLRLTNPKWLGLNIDETTEIALSLDEIFLLNRYQDLLENAKQNEDKVQEYFTFANSEILPKTEEDDNNYKCAQLLAEILDWSPDEIYLACDKGGLERKRAITLSQIDWIRRLQQFSVKTHLSVEPLLGAAALDVNSDFEAFQSIGEAVMAALKAQGDDENVZ

SEQ ID NO: 544 - protein, 546 aa, Photorhabdus luminescens
DMSENEPKADSQLVYETDPYKVKNSEEGAAQKTYRLNGFDPKTTDGALSYTPTRLAKTVFNIYEQKDDFGVFCYLTDWSIYDARFIDTASEDDFKKNGGRSSDLMRFKGDKDKGKPFQRIIFSFAGIIGDPGEKKATIIAAAGKNGWKMGEDEQDILENHEGKPIPIDPWADVGAYLNCGFTGWKGDVWDLYEQAKAQGVLGGLRLLKEENPDLEISVSVGGWSMSGAFYKVCRDEKLRQRFVEGVKDLYTKFPMFTHIDLDWEYPGSAGESNQFDEDDYKYFAELIKDLKNSNISNLKGISIAASADVEKIKAAHIPELIAAGVNEINLMTYDFFTLGDGKLSHHTNLYRNKDDQYSKYSVDDAVNYLISLGINKKFIYIGYSGYTRNARTAELESKDNEQLVGKYTDGTSTVGSFEYSVIEWTDIIYNYVDYENQIGRNGFAVIHDPVAKADYLYNKDLKVFMSLDTPRSVRDKGRYVKEKGLGGLFIWTGDQDNGLLTNAAHEGLGRKAVKKVVEMEPFYFEGELPSYDKPKEKQCEACKLNZ

SEQ ID NO: 545 - protein, 525 aa, Photorhabdus luminescens
MTDKQPKITVIEQEAAYQPDPTQLFNQLCGERPATLLLESAEINSKKNLKSLLIIDSALRISANGNQVTFDALTENGRNLLPILANKFSSDVQSEITHNALQVIFPPINHNIDEDNRLKAVSVFDALRALLSLAEEPSPYNSSSAEAIFVGGLFSYDLVAGFEPLPAVKTVQRCPDFCFYLAETLLVINHQNKNARLQISLFSDSQAEEQRLKQRLKTLVALITEPIEPVQQISLPTMKVSYNRDDKSYAEMVAQLQQYIRQGDIFQVVPSRRFFLPCPAPLHAYQKLKYHNPSPYMFFMQDKDFCLFGASPESALKYDASNRQIEIYPIAGTRPRGRNAAGELDADLDSRTELEMRTDHKELAEHLMLVDLARNDLARICEPGSRYVADLTKVDRYSFVMHLVSRVVGTLRHDLDTFHAYQACMNMGTLTGAPKVRAMQLIAHYESERRGSYGGAVGYFTGKGDMDNCIVIRSAYVEDGMATIQVGAGIVLDSEPLAESEETRNKARAVIRAIIEAHQAEETFZ

SEQ ID NO: 546 - protein, 333 aa, Photorhabdus luminescens
MQAIFNKLFNAQTLTQQESQQLFAAIIQGELSEPQLAAVLISMKLRGEQPQEIAGAAQALLANALPFPRPDYTFCDIVGTGGDGANSINISTASAFVASACQIKIAKHGNRSVSSQSGSSDLLAAFGIALDISAECARSALDEIGICFLFAPHYHLGFCHAMPVRQQLKTRTIFNILGPLINPARPPLALIGVYSPELVEPIARTLLVLGYQRAAVVHSGGMDEVALHAPTKVAEINDGEIIHYQLNAEDFGLQRHPMSALKGGSPVDNHEMLSLLLQGRGKKAHADAVAANVALLMKIHGQEDLRHNTQQALETIHSGRAYERVIALATRSZ

SEQ ID NO: 547 - protein, 313 aa, Photorhabdus luminescens
INRRLHMVNKANFAQLIELAMQVPGRSHMRPVIEKELLHYDILYCLDTNGLLDQLTFQGGTSLRLCHGAPRFSEDLDFSGGVNFNRNQLQAMKKCLEHYIGKRYGFEVSVKEPADLRNEPEYAGLNIDKWQVSIVTAPERKDLPKQRIKIEIANIPSYSQEPKALMTNYNFLPDGYADTLVLTKSLDEVMADKLVSLVNTQHYVRHRDIWDLRWLKQKGATLRMDWVNNKIIDYRISGYSDKLANILTRLPAIIKGDAFRNEMQRFIPQDVQERTLHKEKFFTFLTTEIADMLQRVQNSLNSCSTSENEFNMZ

SEQ ID NO: 548 - protein, 455 aa, Photorhabdus luminescens
MQATILQKIVNDKAEYLIHRKQQQPLESFINAVVASNRHFYQALNSEQTVFILECKKASPSKGVIRQDFDPIQIAKIYQPYATAISVLTDEKYFQGNYEFLRLVSDAVHQPVLCKDFIIDPYQVYLARYYQADAILLMLSVLDDQQYITLSELAHSLNMGVLTEISSEEERARAVALKAKVIGINNRDLRDLSIDLNRTKQLAPQLPEETIVISESGIHQHQQIRELSHYANGFLIGSALMAQPNLDLALRQLILGENKVCGLTRPQDAKVALQAGAVYGGLIFAEHSPRKINIQQAQQIINAANLKYVGVFQNQSSAFISHTARILSLAAVQLHGAEGEVYIEELRKILPENCQIWKAIDMSKDEFHTKAGNVDRYLLDNGKGGTGQSFDWQLLEKQSLANIMLAGGLNEENCQQAAKYGCCGLDFNSGVENAPGIKSSHKLNKVFQLLRCYQZ

SEQ ID NO: 549 - protein, 397 aa, Photorhabdus luminescens
MSKLNPYFGDFGGQFVPQILIPALEQLEAAFIAAQQDPEFQQEFQDLLKNYAGRPTALTLCRNLTKGTKTRLYLKREDLLHGGAHKTNQVLGQALLAKRMGKNEIIAETGAGQHGVATALTCALLNMKCRIYMGAKDVERQSPNVFRMRLMGAEVIPVHSGSATLKDACNEALRDWSGSYDKAHYLLGTAAGPHPYPTMVREFQRMIGEEAKSQILAREGRLPDAVLACVGGGSNAIGMFAEFIPETSVRLIGIEPAGLGIETGKHGAPLKHGKLGIYFGMKSPMMQTDEGQIEESYSISAGLDFPSVGPQHAYLNSIGRADYVSITDDEALEAFKTLSREEGIIPALESSHALAYALKMIHQAPDKEQLLIVNLSGRGDKDIFTVHDILKSRGEIZ

SEQ ID NO: 550 - protein, 269 aa, Photorhabdus luminescens
MERYEQLFKQLESRKQGAFVPFVTLGDPTPELSLKIIDALITGGADALELSIPFSDPLADGPTIQNANLRAFSSNVTPTLCFELLTKIRAKYPDIPIGLLMYANLVFHHGIDEFYRRCKDTDIDSVLVADVPMSESRPFRTAAMKHGIAPIFICPPDAEDELLREIASYGRGYTYLLSRAGVTGIERRGEKPLNHLVNKLREYHAAPPLQGFGISEPKQVKETLASGAAGAISGSAIVKIIEENLSQPEIMLKELTEFVSKMKSATQLZ

SEQ ID NO: 551 - protein, 4560 aa, Photorhabdus luminescens
RRETMNKHLYRIIFNKARNMLMVVADIATSGQGSTVRRRSRRQSPQCLCRLTALRLSLLLATGCISLTAQANIVADGQAPGNQQPTILNSANGTPQIDIQTPNAAGISRNTYSQFDIDKRGVILNNSHNAVQTQLGGMVAGNPWLAKAEAKIILNEVNSINASKLNGWIEVAGQKANVIIANPAGITCNGCGFINAHRATLTTGQAMMEQGRLKGFDIDRGEVRIEGLGLDSSQQNYTEIIARSVVINGKLHAKDLKITTGRNIVDAAHQNIEKKSADGSENPSFTLDVAALGGMYANKIMLVGTEFGVGVRNAGHIGATAGEVRLTVDGLIENSGTIAARSNTIIKAESIQSASGSTLSAGIDNKGKATLPGSLTLTAKQHIQANGKNLATNTLEAQSKKIDLSGSQTSANNIQLTASQQEISTANATVTADRFTAKAPGQFNNDGGTLVAREINLTTPDLSNNQGKINQTGNGELVLNTQTLNNQSGTLLNEGKRLAITTRNLDNRHGKIANNGNDLNLTVHEKADNTEGGTIQLAGKGKLSLNTHQWIGDGGELLSNGELDIQAHNLQLNKKAVTTADKITIKTDTLSHQSGVMQQNGKDKMSLTAKTLNNQNGEIKGNGNLKINATTLDNSKGKIVATGGSTELIIEKNIENVDGRIETKTELTTKSQALNNHQGSLLAQRIDSQTKGHKFTNTAGQVIAQEKLTLNSGELDNTSGLLQSDSDMIVNTHGQKLTNTKDTKNGDEKEIKKGTILSKGNLELRTGDINNTAGIISAKGKTTLNAGNVDNTDGQLLSQQMAELTTQALDNTRGQIQSESSLLLDTQNQALTNTDSGKTGGIIAKDSLRISSGNLTNNAGVILGHGIHIDTHEQRLSNQKGTIASKKNLQLDSGELDSTSGQIKSDGDMTLDTHGKKLTTAKSSDTGGVTSKGALTLKTGEIDNHDGTITGTGTTTITGGELHNQRGKLVSKTGPLTLTVNNTDNSGGLLQSAGDLTLDTKSGLLTNTNSGKDRGIISIGNMKLTTQGVNNDAGLIHAGKNLILDGQKGTITNSNSQPNQGIRSSGDLTLTASAIDNHQGSVEADKQLTVTSGIVDNTGGLLKSGTTLSLNTQGQKLTNAQSGEKRGIRSGSDLKLEAGEIDNTAGLIDAQGETSLTSQNLNNTSGKILSRKKADLTTQTVNNQSGLIQSATSLKLDTQQHELTSTDGGIIAEEALELATGKLINDRGSIRGDQILINTHQQALNNVAGTIFSKKNLKLDSGELNSTGGRIESTGDMTLTTGDIDNQDGVIIGTGTTTVTGGELKNQGGTLASETGSLTLTVKKTDNSSGLLKSAGDLTLDTQGELLTNLNSGKTGGIISAGNVKLTAQGINNDAGWIHADKNLTLDGQQGKITNRNSQPKQGISSQGELTITAGAIDNQQGRIIADKQLNVTSTGAVDNTSGKMVSQHQQLTMNTGELNNTSGLLQSKTTLYLNTHGQKLTNTQSGDDLGIRSDSDLTLEAGEIDNTAGKIDSQGKTTLTSQNLNNTDGKILSKGKADLTTQAVNNQRGLIQSSASLKLDTQQHELTNTDSGKNGIVAEDALELTTGKLINDRGDIRGNETHINTHQQALNNLAGTIFSKKNLQLDSGELNSTGGRIESTGDMILDTHGKKLTTAKSDKTSGVISNGTLTLTTGEIDNQDGFIKGTGTTTVTGGDLKNQGGTLASETGSLTLTVKKTDNSGGLLKSAGDLTLDTQGELLTNLNSGKTGGIIGTGNVKLTTQGINNEAGWIHADKNLTLDGKQGKITNRNSQPEQGITSQGELTITAGAIDNQQGRVIADKQLNVTSTGAVDNTSGKIVSQHQQLTMNTGELNNTSGLLQSKTTLYLNTHGQKLTNTQSGDDLGIRSDSDLTLEAGEIDNTAGKIDSQGETKLTSQNLNNTDGKILSKGKADLTTQAINNQRGLIQSSASLKLDTQQQKLTNTDSGKLNGILALDSLKLITGELINDFGYIRGDETHINSHQQTLSNLTGTIVSKKNLKLDSGELDSTGGLIKSDGNMTIDTHGKKLTTAKSGDTRGVISEGTMTLTADEIDNQDGFIKGTGTTIVTGGELKNQGGTLISEKGSLTLSVNQTDNSGGLLQSAGKLTLDTHGHSLTNKNSGDRGGIRSQDDMLITSGDLHNQAGTITNRKIATVNNLQNTIVGTQQIKLITQAFNNQQGKVHSDGNLNLNTQGQRLNNTGDKDKSGEFSAQGDLTLDIGELNNDASFIAADGKTKITSTTLTNKKGLIAGNSGLEIHSQTLTNSNGSLKSANTVNIDTNGQLLDNQHGRIIGDDNTTVTSGKLNNQHGHIQGKKLTINTGQADTDNQDGKLLSADTMNLNTLQLDNRRGQVKAIGDATINAPKQTNNTGGLIHSDQQLTLKTAELINRETNHPDQGTEAQDLIIEAQQIDNTQGTLQGANRLQAIINQSLKNEQGLISGGKQLTIEDKTQKLTVNNQQGTLTGSEKVKIKANALSGDGQILSQGDIEVKLKQDFHNTGNIAADGKLSLETDGNIINDSTMKAEQAYLEAQNLTNTQTAEIRAKQTEVNVRNTLTNTGLIDGELTHLTANKVLDNTGTGRIYGDQIALKSGTLNNTAKDGKAAVIAARDRLDIGTGTLNNRNHAQIYSVGDMRIGGQLDENLAATSQAGRLSNHAATIEAGGSLKIDAAIIKNTNNGLVTDIVETEKSQRHEAVLSGRTARYDWSQVNTSRRNKYGVHRAVMPDGSGSEEFYEYRYTRTINETQIKESDPGKILSGGNMTINSAMLTNDDSQIVAGGILGGDIDELHNNATKGERIITDEGSEIRWYAKKKKRRFRGTKTSQGKDWDHYNPAPITETIDLKALAWQGNTRPNSTGITIDDRQTSRVQSTPTGINLTSRMAEAGEVTFTNATINAITLPNRDIPTDRPLLSPTGQQTEQLLSSGAVALPSRDALTEHPTLSPTGQQTEQVLSSSAVVLPNRDALTEHPVLPPVQQTERVLPPVTVTLPNSGPLDERPLVLPTGQQFELTLPSDTVQGQSVEPLIRIVAPDTRLPANSLFVVQPGSDSHYLVETDPKFTQYKKWLGTDYMQQQLTHDPVLAHKRLGDGFYEQRLVRDQITQLTGQRYLAGHNNDETQFKALMEAGVAFSKQQQLTPGIALSPSQMALLTSDIIWLTNRTVTLADGTKQTVTVPQVYARVNKGDLTSDGALLSGKNVTINSRRDITNSGTISGREVTQLAASNLTNSGFIQSGKVDLTARQDITNLGGQIRGRDRVSAQADRDITSASTLRGAGADRWQDRPAGIYVQNDNGTLSLKALNNIHLTASDVENAGKDGQTEITAGLDLTLDTLRTHRTENSDWGSDNYRHLTQQHDVGSQITTAGNLALRAGNNLNATAANVNAGQQLTAQAGNNITLNTGTASSDLIEHSKQTSKGLLSKSSVETHDEVHERRAQSTTLSGDRVTLQTGNDLNIIGSNVAGTQDVHLAAGNQLTITTADEARHETHFKQEKKSGLMGTGGIGFSVGKASQKSTTDIDSNLNKGSTVGSSQGNVTFSAGKQLNIHGSDVVAGRDTQLSGQNIHITSAENSHTAITKTEQKQSGLTVALSGTAGGALNSAVQTVQTANNESDSRIKALQGTKAALSGVQAVQAARLADAKGGDDKANNNLVGVSLSYGRQSSRSEQKQHQTTQQGSSLMTGDNLTLTASGTPNQHGDIRIQGGQLQAGKDLQLNASRDIQLSSSQNTEQTTGKNSSRGGSLGVGFTAGPGGTGINLSASTNHGKGRESGNGVSHNETTLDAGQTVTLNAGRDASLKGAQVSGEQITADVKRHLTLSSEQDSNRYDMKQQNVSAGVSVTLGPQPGGSLNLSASRDKIHSNFDSVQEQTGLFAGKGGYQVKVGEHTQLDGAVIASTADKDKNTLDTGTLGFGDIKNKADFKTEHHSASISTGGSAGGMFLSNLAANTLGGANREGHAQSTTHAAVSDGTLIIRDKDHQQQDVTALSRDTDHANNALSPIFDKEKEQQRLKQAQLIGEISAQVIDIASTEGAIIATKAAHAKLENISDPDREAAIKVLKDKGKTDITPALIKDQIYKTAYNAALNESGLGTGGKYHSALQAATAAIQGLAGGNIGQALAGGASPYLAGVIKDLTTDPKTHQVDVVTNTLAHAILGAVAAEVSGNNALAGAAGAAGGELAARELMKHIHGENAKVSDLSEEEKQTISTLSTLAAGLAGGIAGDSTGSAVTGAQAGKNAVENNALASRNLGDCRTLSPEACGKAKELSQRILDKGLPSVEDMRGKLASCQDDSCRKGVWTEYRQASDATINSLKQMALNGELSREELAFINHELGKELAVSGYRANDKIGRSEQSSWLNGGSGPLSGFFNTELRQKELEKSGLSKADAAQYVKEEQRNLLLLETAVGAIGGAASNKIQAKPSSVSSKNNVDKSVPAEATQVQPNQTANKSSTTTQTDVAKYFGQDRKYWSAEPVPFKGNKVYQRNDLFDPSRIDPKSGKTNVELMRAGRAPIGNDGKPVNLHHMLQKQDGPIAEVTQSFHKDNHKVIHINDKZ

SEQ ID NO: 552 - protein, 569 aa, Photorhabdus luminescens
RPKNYMTRAGCQRIMKKKVIIFTSFLIVTTDVKAAEISDQQLIHQQERQKALEAQLAPPPADIRLSVPETAVPSTFPVDTPCFPITRVVLEGTEHFPHWLPLKRLAQQGENQCLGTQGINILMTRIQNRLINHGYVTSRVLAPSQNLNSKTLKLMIIPGKIGHIRYTAESGNYIQRITTFPPREGELLDLRDIEQGLENLQRFPTVQADMEIVPNEQLGESDIVLNWRQSRHWRLASYLDDSGSKSTGRYQGGLTLYLDNPLALSDLFYISGGRDIRSPSGRSSKNYTIHYSLPVGYWMAGITASNYDYNQKVARPTKDDKYSGESKNLNVQLSRILHRNAGQKTSVNGEIYRRTSKSFINDLEIGVQRRETAGWKLGLSHRHYIGSATLDAGVTYQRGTRWFGAQPAPEEVRGEATALLKTTQFSAALSAPFTLFSQPFIYKTQYLRQISARTLTPQDQFSIGNRWTVRGFDGERTLNGDHGWYSRNELEWQTPLNGQSLYMGMDYGEIGGPGNEQRLGKHLAGGVLGCRGSLKGVSYDLFAGIPLSKPDGFQTSSVTTGFSLYWQYZ

SEQ ID NO: 553 - protein, 215 aa, Photorhabdus luminescens
MIKAKLKFRLHKTAIILICIALLVFLMQGVSYFSRSHQQAQMDQFEELAKTLAKQVAFSLSDYMESGSKDLNNERILANLHHLTTNSRILDASVYLNNGTQVAHSGENVSVRDRLSLDGKKAGSYFNYQIVVPIPGKDEPKGFLRLTLDTHKLATESKQVDNTTNLLRIMILLALAIGFILAHNLLQLTPSRWQQSPYLLTANSKSSANGEEEKZ

SEQ ID NO: 554 - protein, 326 aa, Photorhabdus luminescens
MSNNLAYHYLPEEVHKWPGLPLSLSGEEVMPLDYRAGDSGWLIYGRGLDKQRISNFQHRLGAAIVIVSSWRIDDYQVVRIAGNLTARIKRLADECRLDVVPLGQIPRLRSPGLLVMDMDSTAIQIECIDEIARLAGVGDKVAEITERAMQGELDFSDSLRERVAQLAGADADILRQVVENLPLMPGLTSLVRKLQSFDWHVAIASGGFTYFADHLRQNLRLVAAVANQLEVKNSQLTGKVIGPVVDAKYKAATLVKLAKKLDIPLEQTVAIGDGANDLKMIRKAGLGIAYHAKPKVYAQSKVTIRHADLMGVLCVLSGGLKHEERZ

SEQ ID NO: 555 - protein, 461 aa, Photorhabdus luminescens
VAKAVKRAFVCNECGADYPRWQGQCSACHAWNTITEVRLAAAPSSRNERLSGYAGDAGVSRVQKLSEISLEELPRFSTGFKEFDRVLGGGVVPGSAILIGGNPGAGKSTLLLQTMCQLSAQMKTLYVTGEESLQQVAMRAHRLGLPADNLNMLSETSIEQICLIAEQEQPKLMVIDSIQVMHMADIQSSPGSVAQVRETAAYLTRFAKTRGVAIVMVGHVTKDGSLAGPKVLEHCIDCSVMLDGEADSRFRTLRSHKNRFGAVNELGVFAMTEQGLREVSNPSAIFLSRGDEVTAGSSVMVVWEGTRPLLVEIQALVDHSMMTNPRRVAVGLEQNRLAILLAVLHRHGGLQMSDQDVFVNVVGGVKVAETSADLALLLSLVSSFRDRPLPRDLVVFGEVGLAGEIRPVPSGQERISEAAKHGFKRAIVPYANMPKKALPGMEVFGVKKLADALSVMDDFDZ

SEQ ID NO: 556 - protein, 419 aa, Photorhabdus luminescens
LIKQGGDMGQFDYLKEAIKQTGYTLQQVADASGMTKGYLSQLINDKIKSPSAQKLAALHHYLRLQYPVQNKTVGVVFGKFYPLHTGHIYLIQRACSQVDELHIILCHDEPRDRELFMSSSMSQQPTVSDRLRWLLQTFKYQKNIHIHSFDEQGIEPYPHGWDVWSDGMKAFMSKKGIHPTYIYSSETQDSPRYKEHLGIETILIDPQRSFMKISGRHIRQDPFRHWEYIPTEVKPFFVRTVAILGGESSGKSTLVNKLANIFNTTSAWEYGRDYVFSHLGGDEMALQYSDYDKIALGQAQYIDFAVKYANKVTFIDTDFVTTQAFCKRYEGREHPFVQALIDEYRFDLVILLENNTPWVADGLRSLGSEQDRKAFQQLLEDMLKSNNIEYVNVDSPDYDQRFLRCIELIQQLLAANPKZ

SEQ ID NO: 557 - protein, 247 aa, Photorhabdus luminescens
LNQIATIEAIDISYGFSNSKANQKTISDITLSIFPGEFTLINGDLCSGKSTLLAMISGLLPLDGGKILIADNELGRLNNFELDRFHLMNCGFIFQRINLSNELTVLDNLLLSLSCGITTSHQEAIVRATKALNIVGLKHKKDIYPKELRDNEKQRLAIASAIVKSPRYLFADEPTRHLNNYDCQTAIDILGFIAHNQRGTVVVASQDNRLIKHADRIITLKGGKIIHDTYLTHNIMNKTMSLYLNNZ

SEQ ID NO: 558 - protein, 596 aa, Photorhabdus luminescens
GYNFLMSIEGIMTKVFSFNKNHRDLSAGHNSCLKTVNGVNGLPKSIAPGFPDLDNEFNQMGITHVRLHDGFGIGDIDNYFQVDRKNNQNQMIVNVSEENKPAAKKLVADIANVRSLFPNAALGMRNHDVSLALKDANYEMTDAYLRDVLNNQADLNPDNIQRQLLFRIGRSLDGGYEIPEDFDIYAILVKTLVNRYGVNYASIGLPRKISYWEIWNEPDLLFFWNTDDPQKYYQLYEKVVRLIKTVDPDAKVGGAGISFSNHAGGHYIDGFFRYCRDNHVPLDFFSWHGYVDTGDPQNIIDMGNTIQKSLHTYGFTKTESICTEWNSSPFGSRNTFTKVQSPKNAAYIASSLIYMQYTKVDLAHYYRGDGLSFGLFNDQPNPKNPSVRNFCTYSAQSFGLFAKILKTPYILSGQKDFSTGLTVLAAENKSGNKINILAANYKVDKSFSDGNVAPVPADLYRQYYLDTNRTLDQLTDTCSKNRWFGGVDPTTIQSNNAVVQKDPVQQLPLDSLLRPKTRDYTHSDQGVTVVIDHIGCKKFKVKAYRIQQGGSLEKITPPEVTNQINVSIANNKLTLIDKGAKPSTVTLYSLELIHHZ

SEQ ID NO: 559 - protein, 556 aa, Photorhabdus luminescens
VAQYVYTMHRVGKIVPPKRHILKNISLSFFPGAKIGVLGLNGAGKSTLLRIMAGIDNDIEGEARPQPGIKIGYLPQEPKLNLEYTVREAVEEAVSEVKHALTRLDEVYAAYADPDADFDKLAKEQGELEAIIQSHDGHNLDNQLERAADALRLPPWDAKIEHLSGGERRRVAICRLLLEKPDMLLLDEPTNHLDAESVAWLERFLHNYEGTVVAITHDRYFLDNVAGWILELDRGEGIPWEGNYSSWLEQKDARLAQEAATEAARRKSIEKELEWVRQNPKGRQAKGKARLARFEELNSVEYQKRNETSELFIPPGPRLGDKILEVENLTKSYGDRVLIDNLNFSLPKGAIVGIIGPNGAGKSTLFRMISNQEQPDSGTITLGETVKLASVDQFRDNMDDKKTVWEEISGGQDIMRIGNFELPSRAYVGRFNFKGIDQGKRVGELSGGERGRLHLAKLLQVGGNMLLLDEPTNDLDIETLRALENALLEFPGCAMVISHDRWFLDRIATHIIDYQDEGKVTFFEGNFSEYEDYKKRTLGAEALEPHRIKYKRISKZ

SEQ ID NO: 560 - protein, 647 aa, Photorhabdus luminescens
LISGRSVIMAKWQCLTMAIGLIFISVAVNADSLENQRQRYQQIKQAWNVSDRAEVARLMPTLKNYPLYPYLQYRELAQDLSLATPTRIRDFIDRHPNLPPARSLSSRFINELARREEWRELLAFTSTAPKSITARCHYYFAKWATGEEQIAWQGAKEVWLNGRSLPDSCDKLFDVWQQTGHLSVKLILQRISLALKAGNTSLVSYLAKQLPQGYKSISEGLIKLQNDPVTVTDFADHTGPTDFSRVATLAAFSRFARQDPEQARVIIPSIVRVQKMTASERQRLKDIVAWQLMGDVSDEQEKWRDDVIRDSQSVALLERRVRLALGHADERGVAQWIKLLPLENQDKEEWRYWRANILLAQGNKSEGEAILRQLTEGRGFYPMVAAQKLNVSYPLMMNSAKKPDAAIASIPEVQRVRELLYWQMDSLARIEWSYLVASQDKLKQQQLARYAFDQKWAALSVQATITGKMWDYLEERFPLAWRREFSHFTANKGISQSYAMAIARQESAWNPQANSPVGAIGLMQVMPETAQDTVKQNGIQGYINSSQLINPLTNIEIGTAYLESVYQRFGNNRILASAAYNAGPTRVDRWLSNSGGRLDAIAFIESIPFSETRNYVKNILVYDVFYTYFMGKSSNVLTDAEWQRRYZ

SEQ ID NO: 561 - protein, 216 aa, Photorhabdus luminescens
MLQVYLVRHGESEWNAARRIQGQSDSPLTETGEHQARLVAQRVKSESITHIITSDLGRTRRTAEIIAKVCGCEIILEPRLRELHMGVLERRNIDSLTSEEEKWRKKVLDGTPGGRIPKGESMDELAVRMRAALENCRNLPVGSRPLLVSHGIALGCLVGTILGLPAHAERRLRLRNCSLSRVDYQHSPWLASGWIVETAGDITHLDTPALDELQRZ

SEQ ID NO: 562 - protein, 292 aa, Photorhabdus luminescens
MDQTGIIRDLLRWLDNHLDQPLSLNNVAAKAGYSKWHLQRMFKDITGQAIGSYIRARRLSRAAVALRLTSRPILDIALQYQFDSQQTFTRAFKKQFNKTPALYRLSEEWCATGICPPILLDKRYIPEATYLTLKEQSLVGIEQTCSYTLEQWSSFCTEMRHNFWTYYLKNAEVLPPVLYGLHHATPNPEKEDEQTVLYTTAVEPQYAQFDVAGSQPVTLPAGEYVSFSYYGTKDGLQDFLFTVYGICLPMLNLTRRKGYDIERYYLTNTNDRDKEAANHIIEFQYLIPIQHZ

SEQ ID NO: 563 - protein, 239 aa, Photorhabdus luminescens
MQTPHILIVEDEIVTRNTLKSIFEAEGYIVYEATDGSEMHHILSNNDINLVIMDINLPGKNGLLLARELREQANVALMFLTGRDNEVDKILGLEIGADDYITKPFNPRELTIRARNLLSRTMNLSNVSEERRQVESYKFNGWELDINSRSLISPAGEPYKLPRSEFRAMLHFCENPGKIQTRADLLKKMTGRELKPHDRTVDVTIRRIRKHFESTPDTMEIIATIHGEGYRFCGDLEAZ

SEQ ID NO: 564 - protein, 820 aa, Photorhabdus luminescens
MRVLKFGGTSVANYQRVLSVADIAEKKFSQGGVALVLSAPAKITNHLVAMIEKTVAGQEIITHMHDAEQIFVDLLQGMARAQPGFAYERLKMMVEQEFAQLKQVLHGISLLGQCPDSINASLICRGEKLSIAIMESVLQARGHKVTVIDPVENLLAQGHYLESTVDINESTKRIASLNIPDDHIVLMAGFTAGNDKGELVVLGRNGSDYSAAVLAACLRATCCEIWTDVDGVYTCDPRVVPDARLLKGMSYQEAMELSYFGAKVLHPRTIAPIAQFQIPCLIKNTANPDAPGTLIGDGQKDESTPVKGITNLSNMAMINVSGPGMKGMVGMAARVFAVMSRKGISVVLITQSSSEYSISFCVPQRELERARQALSEEFYLELKEGVLDPLDVMENLSIISVVGDGMRTLRGISARFFSALARGNINIVAIAQGSSERSISAVIDNEVATTAVRLCHQMLFNTDQVIEVFVVGVGGVGSVLIEQIRRQQTWLKQKHIDLRVCGIANSRAMLTDMRGICLDNWPQCLSEAKEPFSLSRLIRLEKEYHLLNPVIVDCTSNQQIADQYASFLRDGFNVVTPNKKANTSSMAYYHQIRKAAEKSKRKFLYDTNVGAGLPVIENLQNLLNAGDELVQFNGILSGSLSFIFGMLDEGMSLSQATLLAKEKGYTEPDPRDDLSGVDVARKLLILARESGYELELDDIDVEPVLPASFDNRGDVDAFLERLPALDQVFSQRVAEAKEQEKVLRYIGVIEDGCCRVKIAAVDSNDPLYKVKNGENALAFYTRYYQPIPLVLRGYGAGNDVTAAGVFADMLRTLSWKQGVZ

SEQ ID NO: 565 - protein, 310 aa, Photorhabdus luminescens
VIKVYAPASIGNVSVGFDVLGAAVSPVNGALLGDCVTVRAAKSFSLRNEGQFVGKLPEKLEHNIVYQCWQLFCQHLGKQLPVEMTLEKNMPIGSGLGSSACSVVAGLMALNEFAGLPFNESQLLAMMGELEGRISGSIHYDNVAPCYLGGLQLIMEQGDIICQPVPSFDEWLWVMAYPGIKVSTAEARAILPVKYSKQDVIDHGRFLAGFIHACHTRQPALAARLMKDVVAEPYRTQLLPGFANARETAKRVGALACGISGSGPTLFSICNDIATAEEIAEWLQQHYVQNDEGFVHICRLDLAGARQIGZ

SEQ ID NO: 566 - protein, 433 aa, Photorhabdus luminescens
MKLYNLKDNSEQVSFAQAVKQGLGKQQGLFFPQDLPEFSREEIDHLLKLDFVTRSGCILSAFIGDEIPPEQLATRIKNAFTFPAPVTNVENDVATLELFHGPTLAFKDFGGRFMAQILAQVAGEQPVTILTATSGDTGAAVAHAFYGLNNVQVVILYPQGKISPLQEKLFCTLGGNIHTVAIDGDFDDCQALVKQAFDDQELKQALYLNSANSINISRLLAQICYYFEAVAQLPEDQREQLVISVPSGNFGDLTAGLLAKSMGLPVKRFIAATNVNDTVPRYLEDGKWLPHQTVATLSNAMDVSQPNNWPRIEELFHRKSWPLSELGYGVVNDDVTKETIKELAKHGYISEPHAAVAYRVLRDQLQEGEYGLFLGTAHPAKFKESVEQILGEELPLPKALAERADLELLSHYLPADFAKLRAFLMERAPKSLZ

SEQ ID NO: 567 - protein, 259 aa, Photorhabdus luminescens
MLITISPAKTLDYESPLATEEYSQPELLDQSKRLIRICRELTPAQIASLMGISDKLAGLNAARFGEWHADFTPLNARQAILAFKGDVYTGMQAESFSNKDFDFAQNHLRILSGLYGVLRPLDLMQPYRLEMGIKLENKRGKDLYAFWGDLITEKLNEALEQQGDNVLVNLASDEYFKSVNTKKLAGKIIKPVFLDEKNGKYKIISFYAKKARGLMSQFIIQNQLTQIDRLVEFNLDGYAFDESLSKGNELVFKRPEQHZ

SEQ ID NO: 568 - protein, 405 aa, Photorhabdus luminescens
GMENKNRLLSSDIISIFGTGISEIALLSLVYSITKSEIDTSLMVSVRLTASILVFVVIGGLTARFSMRAICISSDFFRAVTIFLAVFVNNIYLLFFISFLLSFFSGLNISIRSVAYQAFVSSEERVAFISKQQFYYGLLSISSPLIAGFLINITSIRFLFIIESMCFILSIIFLFFIGEWGNKIKKNDAVMKYGGLEYIINNDTQRNILLFRISILTAMVSYQVISTYIMTSSYTTIISLFNGLYSFSFSDLIAYFSFLASVSILFGSYFSSYYFNISKLKKSFFLGSLLIAIGSILWAMPLSRIVLLFYTLGTMLIFIGLSFLRISLYTSGQELTPEKYFARIISSSDAIARSYQSVFGIIIIWLIPLLGSSVLFVFFAMCSLSSVFVAKKISADVENKLTLKZ

SEQ ID NO: 569 - protein, 586 aa, Photorhabdus luminescens
RFIVTKIFSLNKNHRDLSAGHHSLLKEVNGLNGAPKSLMPGFPDLDDQFNQMEITHIRLHDGFGIGDMDNYFQVDRVNDRNQIIVNVPEENKPAAKKLLTDISNIRSIFPNAAAGMRNNDISLALKEANYKMTDAYLRDIMNNQAELNPDNIQRKIMFRIGRTGDGGYEIPEDFDIYAILVSTLVNRYALNYARIGLPRKITYWQVWNEPDLIFFWNSNDPQKYYELYAKIARIIKAIDPDAKVGGAGIGFVDRAQEDYLDGFLRYCRDNNVPLDFFSWHGYVETGDPQNIIDVGNKVQKGLHTYGFTGTESFCTEWNSCPIGTKNTYTKVQGIKNAAYIASTFIYMQYIKVDRSYYYRGDGSSFGLFNNQPNPENPSVKNFCTYSAQSFYLFAKMFETPYILSGNKDFSTGLTVLAAENTEGNKINILAANYKVDKSLADGNAAPDYLYQQYYLDTSRTLNQLTDTGSKNKWFGGVDPTTVRVDNAVVQHEPVKPFPDNNMLRAKNRDYTDSDQGVTVVINHIGYKKFKVKAFRIQEGGSLAQMTPPEVTDQINVSIANNKLTLVDKGAKPETVALYSLELEDNZ

SEQ ID NO: 570 - protein, 318 aa, Photorhabdus luminescens
MTDKLTSLRKLTTVVADTGDIAAMKLYQPQDATTNPSLILNAAQIPEYRKLIDEAIAWAREQSDSREQQIVDASDKLAVNIGLEILKLIPGRISTEVDARLSYDSERSVAKAKRLIKLYNEAGISNDRILIKLASTWQGIRAAEQLEKEGINCNLTLLFSFAQARACAEAGVYLISPFVGRILDWYKANSDQKEFAPHEDPGVISVTEIYQYYKQHGYDTVVMGASFRNSGEILELAGCDRLTIAPALLKELSEAQGEVERKLGYAGEIKARPEPLNEAQFYWEHHQDAMATEKLADGIRKFAIDQGKLEKMISDLLZ

SEQ ID NO: 571 - protein, 369 aa, Photorhabdus luminescens
MNIVAEDIVALIEASLDANYTEVRSVSNRIAKSISADDMDVAKKIKSIVRRKGVPLRSSGYSDSLPVDPKSRMPLIEEHQWSVTPIFLGESENITFNAFIESVKHQKKLIENGLSGRLGLLLSGPPGTGKTLIAGHIASQLNRPLFVVRLDSVISSLLGDTAKNLRQIFDYVPSRNGILLLDEVDAVAKIRDDRYEIGELKRVVNTLIQGLDSLDDSAVVIAATNHADLLDPAIWRRFPYKIRFGMPNLEVRESLWNHFLFQDKGISKELKALSIISDGLSGADIETIAIAARRQAILTNSNIDIVAVIQAIIEGDSHNSIIPYREGLSSDNKKSIVNLLSETKLFTQAEIGSFLKLSRQTISSYLKEZ

SEQ ID NO: 572 - protein, 326 aa, Photorhabdus luminescens
TDNFKLSQGIGIMAEGVRSPLLNPVLSFLDKPVPNTVSGGGKNSKGIIWARLDTQKEKLSKELRCISEDDGIVSHSGKIHLLAKMFDDSLAPSWTPDDLFEPDDLTRIVAPAFDGYLVEISGSRISSLIEKIERAKNGRIKVDISRLESIIGFDKNQVLRGRKEKAVFEAFDDVEKQFNVWVLPFHDKKARVSVKKELEEFANQKIIGFGHSKFDNVFKNEEIQKNGNRYFPRKLDEYLIDGILSFTTVINNLENFNKLISSGIVYRIEPVHHVSAKSVPPGSGKEPIPNLTRILDKKLTRSLFQEQSFGVHQKQLRGGNRLWTTZ

SEQ ID NO: 573 - protein, 295 aa, Photorhabdus luminescens
MDNLVEIFCDVDDFCRFFIPQWEQFCLDSGHRLRRRQGHMYPSEIMTILILFHMSHYRDFKHFYLEHIWKYHHKDFPTLLSYPRFVSVAPSVLVPLCSYLTQLKGKPTGIAFIDSTRLSVCHNIRIPRHKVFAGIAKRGKNFMGWFYGFKLHLVVNHQGEILALKVTPGNVDDREPVRELSKELTGSLYGDKGYLSQELADDLAKTDVTFITKKRRNMKASMQAEWDKIMLKKRFIIETINGQLKTLSQIEHSRHRSIKGFLLCVLGGLIAYCLKLKKPSLKVFYSEDDFSMTDZ

SEQ ID NO: 574 - protein, 493 aa, Photorhabdus luminescens
IEEAITESFLLRRRFFNDGLSRIRVNLSNLKNIPTVVIVDGGCSAVSYLPFNVMSITPLVDQHDADLRHGNKVTSVICQGSAWNNNLALPELECKFISVQAINKKGVSIQPTTEQFINYLRDVANETKGVSQVWNLSFNESEPYYSNEEISYLGHEVNRISREFNILPIISIGNVSRSNNIRLCPPADCESALTIAGRCADENGMATTPCSMSLRGPAPAGMKKPELSWFSTLRMIGGVIDTGTSYSTPLISSIAAHAFKSLKEPTPDLVRALLINKAERCAHDLRLGWGSPWKEGNNLPWYCDEGTVTLAWNSKIRAGFAYYWNDIPLPTEMLEDGKIKGEIILTAILKPLVSELGGENYFATRLQCSLQSISNDGKVKNLLGTMKESKEKELQSRQELAKWSPIRHHGKSFSGVSVDNTKLRLYARIFTRDLYQFDMSSHHELSEQEVSFVLTFKSHDKDSGIYNSMKQRLGPKVEVGIIEKNIDIDNTIZ

SEQ ID NO: 575 - protein, 358 aa, Photorhabdus luminescens
MPQIAFNPIEHPHRRYNPLTGQWVLVSPHRVKRPWHGQDEQPLIDNIPNYDEQCFLCPSNTRISGDKNPAYQGAFVFNNDFSALMLDSPDLPPSCHPLFKAQGVRGLSRVICFSPDHSKTLPELPVKHIRQLIDTWNEHIEILGKEYLWVQVFENKGEAMGCSQPHPHGQIWANSFLPNEIERKDKQLRAYYQEQSSNLLMDYIQAELADGERVVVDTTHWLAVVPYWAAWPYETMLLPKVHVRRMNELTDQQRDDLAVALKKLTSRYDNLFHSAFPYSMGWHFAPFFEQGADIEHWQLHALFYPPLLRSATVRKFMVGYEMFAEKQRDLTAEQAAQLLRAVSDIHYKEQQCSLSSGZ

SEQ ID NO: 576 - protein, 397 aa, Photorhabdus luminescens
VADTIFESNVMKTLINRVENVFDLVFHYMPTHIIQAPGRVNLIGEHTDYNDGFVLPCAINYQIVVAAAKREGNIIRVVSVDYGNQLDEFDISQPITFHESKMWANYIRGVVKCLLSRGYIFNGADIVVAGNVPQGAGLSSSAALETVIGQTIKNLYHLVISQTEIALNGQQAENEFVGCHCGIMDQLISAQGKKEHALLIDCRHLTAQAVSMPKDIAVMIINSNKKRELVGSEYNIRRAQCEQAAALFGVKALRDVALDEFEKRNVELDSIVARRARHVITENERTLLAAKALAESDMPLIAELMAQSHQSMRDDFEITVPEIDTLVDIVQQAIGKQGGVRMTGGGFGGCVVALVPQTLVDVVKAAVEQHYFALTGLKETIYVCQASEGADLVETWZ

SEQ ID NO: 577 - protein, 354 aa, Photorhabdus luminescens
LNASMTQDIARDGKKANLVCLSNASGFSIVLMDIGASWLSCRVPLSGEKREVLLGIATLKDFYKQTSYLGATVGRYANRIANGCFNLDGKTYQLQVNQAGNCLHGGIEGFDKRRWTITARDAYSVSFTLQSPDGDQGFPGNVVVTVRYVLTNDNHVIVDYLAHTDAATPINLTNHAYFNLLGADAGKTCLSHHLEVKSDGYLPIDENGIPLGQLALVDNTGFDFRTPKAINSHFMLDKQQQIVNGYDHSFWLQATRLDTDYAISVTSPDEAITMKIFTTKPAVQFYSGNWLGGTPNRDGGRYENYAGMAFEPQFLPDSPNHPEWEQESCILRPNQRYKHRTCYQFEIHNAYTHZ

SEQ ID NO: 578 - protein, 320 aa, Photorhabdus luminescens
FQFRTGHFDVHVLRTSCICGDIWQVNIGLLCRRELNFCFFRGFFQTLHCQWVITQINALIFLKFVNQIVDHTAVEVFTAQVSITVGCQHFIGFFAVNFINFDNRNIESTTTKVINRDSTVTYFSVQAISQCSSGWLVDNTFYFQTCDTASIFGCLTLSIVKIGRYGDYRFSHWLTQIIFCRFLHLLQNFSRNLRRSHLLVFHFQPCVAIICRNNFVWHDSDIALRFFVLETTADQTLNSKQCILRVSNSLTFSRLTNQSLSILGISNDGRRCAITFAVFQHTSCRAIHNSYTRVGSSQVDTNNFTHLNASKEIRNQSSCZ

SEQ ID NO: 579 - protein, 637 aa, Photorhabdus luminescens
MGKIIGIDLGTTNSCVAIMDGTTARVLENSEGDRTTPSIIAYTQDGETLVGQPAKRQAVTNPQNTLFAIKRLIGRRFQDEEAQRDVAIMPYKIIAADNGDAWLEVKDQKMAPPQVSAEVLKKMKKTAEDYLGEPVTEAVITVPAYFNDAQRQATKDAGRIAGLEVKRIINEPTAAALAYGLDREVGNRTIAVYDLGGGTFDISIIEIDEVDGEKTYEVLATNGDTHLGGEDFDSRMINYLVDEFKKDQGIDLRNDPLAMQRLKEAAEKAKIELSSAQQTDVNLPYITADATGPKHMNIKVTRAKLESLVEDLVKRSMEPVRVALQDAGLSVSDVNDVILVGGQTRMPMVQKVVADFFGKEPRKDVNPDEAVAMGAAVQGGVLAGDVKDVLLLDVTPLSLGIETMGGVMTSLIVKNTTIPTKHSQVFSTAEDNQSAVTIHVLQGERKRAGDNKSLGQFNLDGIQAAPRGMPQIDVTFDIDADGILHVSAKDKNSGREQQITIKASSGLNEEEIQRMVRDAEANAESDRKFEELVQVRNQADQLVHGTRKQVEEAGDKLPAEDKTAIESAVAELEKVAKGEDKADIEAKIQALVQASAKLLEIAQQQAQAGATADAGDSAKKDDDVVDAEFEEVKDKKZ

SEQ ID NO: 580 - protein, 298 aa, Photorhabdus luminescens
MKDLLRTDMLTTFIHVARSRSFSAVARLQGMAASSITRQIDNLEQVLETKLFFRSTRGLSLTDAGEILFARAQGIINDLVDIQAELAALNGEPQGVLRVACLPTFGRQHIIPMLAELFTRYPKIRIELDQTERLTDPVRDRLDVVIRIGELKDSTLYSKRIATQTWIICASPGYIQRHGTPTTLTELDEHYLLDKHHDPAGICWSRYRSVINFSDNNRIFRSDDFETLRMATVSGFGIALLPNWVVSTDIRSEKLIPLFDDPDGRKEDIYLLRALAHPPAKLTVFMSLLQKRLAKIIZ

SEQ ID NO: 581 - protein, 310 aa, Photorhabdus luminescens
GLLFFIFNFFEFSVYNIVIFLRTVTSICGCTSLSLLLSNFQQLSGSLNQSLNFRFDIRFIFAFSNFFQLSYSAFNRGFIFCWQLVTRFFHLLTRAVNQLICLVTNLYQLFKLTIRFRVRFCITNHPLNFFLIQTGRSLDSDLLFAATIFVFSGHMQNTVSIDVKSHVNLRHTTRCCLNTIQIELAQRFVITGTFTLTLQHMDSYRRLIVFRRREHLAVFGWDRGVFHNEGSHNATHCFDTQRQWCNIQQQDIFHITGQNTALYRSTHCYRFVRVHIFTWLFTEEVSNHFLYHWHTGLTAHQNDIVHIRNZ

SEQ ID NO: 582 - protein, 373 aa, Photorhabdus luminescens
MAKRDYYEVLGVSKTASEKEIKKAYKRLAMKYHPDRNQGDKEAESQFKEVKEAYEILTDDQKRAAYDQYGHAAFEQGGMGGGGADFSDIFGDVFGDIFGGGRRQQRPSRGADLRYSMELTLEEAVRGVTKEIRIPTLETCDICHGSGAKAGTSPVTCSTCQGAGQVHMRQGFFTVQQPCPHCHGRGQIIKDSCHKCHGHGRVERYKTLSVKIPAGVDTGDRVRLSGEGEAGAKGAPAGDLYVQVQVKSHHIFERQESNLYCEVPVNFAMAALGGEIEVPTLDGRVKLKIPAETQTGKMFRMKGKGVKSVRGGVQGDLLCRVVVETPVKLNERQKELLRELGESFGGAGEETNSPRSKSFFDGVKKFFDDLTKZ

SEQ ID NO: 583 - protein, 436 aa, Photorhabdus luminescens
KMKITNKFLLLTIPLILLYNNVTVAAENNCHSYDTLLPRGPETPSVSSACDTVFPEWGGLRKEMADRGFYANFQLLTNLTYDISRSWKNTPSPNYMGQHLTTGNIAATELTYDLSRIGFTDKAQLRLGLTYAYNNFKNNGQDGHPFVSAFSINQPLLNDRVILNYGYTTLLSHFYGLFLGSSTASSALGPTSVMLSQAGLTISKPSPSIDIRFLSENKRWYDHIGVARSQSSEGLKTDSKYNTYGLRWKLPSAGTLVINELGYRVNANETENMIWLRGGSVFNKTPYFNYNNSEYENYTYSHYIAATHQITKPDTSMPFRGWYIDGKANYAPKDRNLFNADISLSLFSIGPFDSRPNDMVTFGLAYNKFSDDAKNYFARNGQLAESYSATASVAYSYRVYNGIYWTNSLSYTHHPSVTPKEDDAYNLLTQITFSLZ

SEQ ID NO: 584 - protein, 474 aa, Photorhabdus luminescens
MKKQFPNNFLWGGALAANQVEGAHQIDGKGLSTSDMQPHGVIGHSIERNLGDFHIKDIGIDFYHRYPEDIALFAEMGFKCLRTSIAWTRIFPEGDEEIPNENGLAFYDRLFDEMIKYNIQPLITLSHFEMPYGLVKKYGGWGNRKTIAFFDHYARTVFERYQHKVKYWLTFNEINMSLFSCFTGAGLPENSKIQDIYQALHYQLVASANAVKACHEIIPDAKIGNMVAAAPYYPLTCHPDDILESLKKNREWLFFFDVQARGYYPSYMPRLFKEKNITLDITDEDKIALKETVDFLSFSYYMSSCATTNLEIIKTSGNIINPVKNPYLSSSEWGWQIDPKGIRYLLNMLYDRYQKPLFIVENGLGARDVIQNDGSIIDDYRIKYLNDHLFQIREAIEDGVQLLGYTSWGPIDLVSASTAEMSKRYGFIYVDRDDQGNGTLERRRKKSFNWYKAVISSHGNTLQAPEVENENNQZ

SEQ ID NO: 585 - protein, 481 aa, Photorhabdus luminescens
MRYESLAKKIVSAIGGKENISSLVHCATRLRFKLKDSSLANSELLKQTKGIITVVESGGQYQVVIGSHVGDVYDDINRYLQDNTEKTEVKQSVTSPQGIKQDNAKGLKRILDVTIDIISSIFTPLLGVLVAAGLIKGILALSDVFNWMSIDSGTYKILYATGDAMLYFMPILLGYTAGKRFGGNPFITMVIGAALTYPTMTEAFKLSQTTPAVHLNFLGIPISFINYSSTVIPIILSAWFSCLLEKKFNSWFHSSVKLFATPFLCLLITVPLTFLVIGPVATELSNGLAAGYLFFYQLNPVIAGLLMGALWQVCVIFGLHWGLIPIMINNMMTQKKDMLSPLLQPAIFGQAGATLGVFLRTRDKNMKTLSGTALISSLFGITEPAIYGVTLPLKRPFIIGCIGGALGGAIVGFYSGTAYNVGGMGIFAFTSFISPTGIDSAFWSVILGSLGSFIFSCIATYLFGLPSEVKVSPITSGTKNZ

SEQ ID NO: 586 - protein, 285 aa, Photorhabdus luminescens
LLTIVKLINNNVVLAIDENNNEVILMDKGIGFNRKKGDRLNVQDVAKVFTVEKNDRINQIIATIPVSVIELTEKIIALGKDLLGKSLNDSLLITLSEHLNFAFERVSKGYQIGNVLQWEIPHLYPLEYEVGKQALIYINGQIEKPLPPIEASLIALHFVNAQYEGQTMGDTLKLTNLINKTVKLIHYYFHVNLDTTSVNYSRFITHLRYFLIRQNKNEHSSAIEMDFSLQELIEEKYFKSYNCAVKLIKYLREKYQWKVPDDELIYLVIHIERVVNDSYKSRELZ

SEQ ID NO: 587 - protein, 351 aa, Photorhabdus luminescens
FRLFSGNRLEVEDKMRDEDFAKEIIIFTGGQENINKSWHCVTRLRFNIIDDSKVDIVAIRKMQGVIGAHFHSGQLQIIIGNRVVEIFSEIIKQLKENEGNHYGLKKGFISHILDVISGIFVPVLPAIVGAGLLKGGLIFFYMMDWVSEQSNEYKLLYILSDTPLYFLPVLLAFSAARKFKTNEFIAATLACILIYPTLSHLVSSSGGGYFSVFGITIPANHYSYTAIPIILGVWLLSYIHRWVDRFIPTVLKIILTPLLVLLISAPILLIIAAPLGNTIGLYLEKWLLILFSVAGPFAGLLLGGLIPILVITGMHYAFLPSVFANFKSLGYDFMLLPISFASILHKLVRHZ

SEQ ID NO: 588 - protein, 218 aa, Photorhabdus luminescens
KYLLLVYRAWCHYLFIYKKIAITLFLILLGIFSSFLVAFISTLLMKLESNVDSIVLIKPRFSKKKKIILRSPMTGTTESLSRVPDDTFSEKIIGDGIAIIPTEGVVKSPFNGKVSMITPTGHAIGLISDQGVELLIHIGIETVGLQGAGFNLQIIEGQRVVAGEVLVNFDLEFLQENKIQIISPIIVTNSEEYHSIMPTKRRRVIGCKDDLLVINRCZ

SEQ ID NO: 589 - protein, 389 aa, Photorhabdus luminescens
VTAIIRQFLKLEAAGGLLLIITAIIALIMANSPLQGIYQQFLNISVAVQFAALEINKPLLLWINDGLMAVFFLIVGLEVKRELLEGSLAGRDKALFPVIAAIGGMVAPALIYLLFNGNDEFTRQGWAIPAATDIAFALGVMALLSKRVPTELKVFLLALAIIDDLGVIVIIALFYTKTVSLVALGLSAAMIALLVWMNWRGVEKTSAYLAVGAILWVCILKSGVHATLAGVIVGFLIPLRGQNGHSPSELLEHGLHPWVAYLILPLFAFANAGVALNGVTLNGLTDILPLGIAVALFLGKPLGIFLFSYISIQIGFAKLPQQINLKQIFAVSVLCGIGFTMSIFISGLAFEGVDESFSVYSRLGILMGSTIAAFMGYGLLRMVLPKKKZ

SEQ ID NO: 590 - protein, 305 aa, Photorhabdus luminescens
MRVSHLNFNHLYYFWHVCKEGSVVGAAEALYLTPQTITGQIKALEERLGGKLFKRQGRGLVPSELGQLIFRYADKMFMLSQEMLDIVNYSRESNLLFDVGVADALSKRLVSQVLKTAVVEHEQIHLRCFESTHELLLEQLSQHKLDMILSDCPVDSSQQEGLFSVKLGECDVSFFCRQPIPEKPFPECLEERRLLVPGRRSMLGRKLLTWIRNKNLQVEVLGEFDDAALMKAFGMYHNAIFVAPSLYTNDIFIDNDIAEIGRLDAVQEEYYVIFAERMIQHPAVQRVCNKDFSALFNVLSKKRTZ

SEQ ID NO: 591 - protein, 300 aa, Photorhabdus luminescens
MTTPIKLNQLRAFVEIYRHGSIRAASRFLLLSQPALTKSIRELEDSLGAKLFIRSNQGIHLTGCGKSFLQRACLILEELRIAQEDIQQRVGLIGGVVNIGVAGSIARTIMPKVITQFHRDYPTVKLRVVEGQLLTMLPQLRQGELNFTVNTYYPGSLDAELSFEKLMEKEYKVIVRKGHPKVNATSLDELIDCDWTMPTPKGTYYRRLFEMFTSLDNPPVFSVTCETLMACMSLVSESDFVTIVAVDVVDETLFNQQFVALNLKEELPFATFCLVQRRDTKLTPAGEHLARLFRMYCRDZ

SEQ ID NO: 592 - protein, 457 aa, Photorhabdus luminescens
IFHRNFYLYISYITNNTQHLIALSFLHSMQNNFARSFYSHYLKIVPELFHHNSGQMLSIPMSNTAIKPNPISSISLILLSTACGFAVANIYYNQPLLPTIGTSFNVNGSISGWIATLTQIGYAAGLLFFGPLGDTISRRKLIFCLLIGNIISLILCATAPNFTCLLTSSLIVGITSISAQIIIPAVSGWVIPEKRGQAVGSLMSGLFAGALLARALSGAVGEYFGWREMFILAALIDICLFFLIWFVLPEIETPHTMTYGQLLISLGKLVKQQPLLREAALSGFLLFAAFNTLWGSLALLLSQPPYGWGSDIAGLFGLMGIVGMLASPIIGSLTDRFGGRTIVATGALLVTLALCLISGTSHNILFLFAGIILLDLGSRAGLVANQTRLYTLLPEARSRLNTVFMTCYFAGGAIGSSLGAVAAWHFSWYGVAFSGGGCALLAALWVLFNPNSRKQIZ

SEQ ID NO: 593 - protein, 315 aa, Photorhabdus luminescens
MELIRGIRNIRTCHRGCVLTIGNFDGVHRGHQALLKHLKHEGQRLGLPVMVMIFEPQPLEFFAKGHAPARLTRLRDKAKYLAQCGVDYLLCVKFDRNFAANTPEAFVSRLLVEKLGVKFLAVGDDFRFGQSRSGDFAFLQRAGESYGFDVTSSESFCDDGLRISSTAIRQALQNDDLVLAETLLGHPYSICGRVVHGKRLGSTIGFPTANLPLKRLVVPVHGVYVVEVYGLGDQPLPGVANIGTRPTVSGQGQQLEVHLIDTQMDLYGRYIDVVLRKKLRNEQRFASLDALKQQIANDLVAAKEFFKQLPVSCIZ

SEQ ID NO: 594 - protein, 938 aa, Photorhabdus luminescens
MSDYKNTLNLPETGFPMRGDLAKREPNMLKRWYKDELYQVIRKAKAGKKTFILHDGPPYANGSIHIGHSVNKILKDIIIKSKGMAGYDSPYIPGWDCHGLPIELKVEQIIGKPGEKFSAAEFRAECRKYAKEQIEGQKKDFIRLGILGDWERPYLTMDFKTEADIIRALSRIIANGHLLKGAKPVHWCTDCRSSLAEAEVEYYDKTSPSIDVRFNAVDAVAVCEKFGVQAPEQPVSLVIWTTTPWTLPANRAIALHAEFNYQLVQIEGECLILAADLVESVMQRAGITSWTVLGHCAGSALELLRFKHPFMGFDSPVVLGDHVTLDAGTGAVHTAPGHGPDDFVLGQKYGLEVANPVGPNGCYLPGTYPSLDGMFVFKANDVVLNILSENNALLHLEKLQHSYPCCWRHKTPIIFRATPQWFVSMDQNGLRKQSLQEIKGVQWIPGWGQARIEAMVENRPDWCISRQRTWGTPMSLFVHKETEELHPRTIELMEEVAKRVEVDGIQAWWDLEPAELLGDDAANYVKIFDTLDVWFDSGSTHASVVDARPEFQGNAADIYLEGSDQHRGWFMSSLMISTAIKGKAPYRQVLTHGFTVDGQGRKMSKSIGNTISPQDVMDKLGADILRLWVASTDYTGEIAVSDEILKRSADAYRRIRNTARFLLANLNGFDPEQHSVKPEEMAVLDRWAVGCAQAAQADIAKCYDKYDFHTVVQRMMQFCSVEMGSFYLDIIKDRQYTAKSDSLARRSCQTALYHIAEALVRWMAPILSFTADEVWNELPGKRAQYVFTEEWYGGLFGLAAGELMNDAFWADLLAVRGEVNKVLEQARADKHIRSSLEAAVTLYADNELADKLNSLGDELRFVLLTSQVVVADYEQAGEDAQQSEIGSLKIAFRKADGEKCPRCWHYAKDVGLVAEHAELCGRCVTNVAGNGEERKFAZ

SEQ ID NO: 595 - protein, 318 aa, Photorhabdus luminescens
MQILLANPRGFCAGVDRAISIVERALELYGAPIYVRHEVVHNRYVVDNLRKRGAIFIEEISEVPDDAILIFSAHGVSQAIRAEARSRNLTMLFDATCPLVTKVHMEVARASRKGKEAILIGHAGHPEVEGTMGQYNNAEGGMYLVESPADVWNLKVKDEDNLCFMTQTTLSVDDTSEVIDALNARFPNIVGPRKDDICYATTNRQEAVRDLASDADVVLVVGSKNSSNSNRLAELAQRVGKPAYLIDSAEDIKEEWITGISLVGVTAGASAPDILVQQVIERLKSLGADSVQELHGREENIVFEVPKELRVEVKEISZ

SEQ ID NO: 596 - protein, 344 aa, Photorhabdus luminescens
MDKRVVFAVAGSGKTSRLVASLDEEKRFLIVTYTESNYSNLRGKIINRFGYFPANITLYTYFKFLHGFCYRPFLRSDKNTIGITFKLPLAYPRYALTDDRRYVSTNRQVYANRLAKFIEQSHLVGAIIARMEKYFDAFFVDEVQDFAGHDFNLLLAISAAELNVSFVGDFFQHTFDTSRDGNVNASLHKDYTVYEAKFKKAKLLVDTDSLKKSRRCSKSVCDFITEKIGIEIEAYDRRESVIRYEDNPEAVLALYRDPETVKLFYREHHKYSCHSQNWGASKGVDHYHDVCVVLNPANVRAWKKGSFRDINAETRNKLYVACSRARGNLTFIPESLLKAYKQSZ

SEQ ID NO: 597 - protein, 527 aa, Photorhabdus luminescens
EGNLVAIIRRLVLKNFKRFKNLELEFDPELNILVGGNEAGKSSVLQAIDIALNASRSKVESLGLETLFNMECISEFLKGERKIVELPELLIEVYLDGIEGHHELDGRNNSKSIDHLGIKLVCKPVDKYTQEIQTILAERHDNFPFEYYSIRFLTFTDETILPYKKPLQHLLIDSSQINSEYATREYTRTMYTTHASVVERNHHSFEYRKAKSEFKRVVFKTMNDALDIYKFDVRTSPKASVETDIIITEGDIPIDSKGKGRQCFIKTEFALRNREHVLDILLLEEPENHLSHVHMHKLIDRIRGSVKKQLFIATHSSLIATRLNLKKVLILSEENLSQPTSLKDLSQSTANFFMKAPDNNVLELALCKKAILVEGDAEFILMDALYKNCTGGASTDTDGIYVISVDGTSFKRYLELAKLLGIKVAAIRDNDGDYKSNCVTNYADLISDSVQIFADADDARYTFEVCIYQDNTTICEGQFAAGRKKLTVEEYMLKNKTEAAFELLEQKGTELVAPNYIQQAITWIREZ

SEQ ID NO: 598 - protein, 332 aa, Photorhabdus luminescens
MGEKDTLIEQYLNAAKAWYESQRAQNGSINTNVMNVGLVVSRMIADGFPIDDGRLYSEGRSQVRGLSGNTIAKILEQHGETRLFTREGGRTSRGTIHLAVSFRDAMNGINRSSGATLNTNHLSLLLEDFFTNCVRIDYFDKQRITVDIETTKPVSSIISDILDAAAERSDKPTGVVLQHLIGAKLQLRFPEIKIGLDRANAADMQTDREGDFQVGTTAFHVTTAPMEKLVSRCVENKRAGYRPVILTLESKVLAARQMAENVGMSDQISVQAAEIFIGTNIEEIAIYESDRIRKGVAHLIRTYNERISNIEIDKSLMIDEPKWIVKLLSRDZ

SEQ ID NO: 599 - protein, 384 aa, Photorhabdus luminescens
RRNQVNVVPLRRQHDWTALEFFAGIGLARAGLELAGIKTLWANDYDINKKAMYEGQWGGNELLLADVHSLCGDDLPTVDVAWSSSPCTDLSLAGKRAGLRGGRESSAFFGFTRLIAEMKERKPKVIALENVTGLASSHNREDLRAAAKEFNSLGYAVDAITLDARRFIPQSRPRLFLIGAQYPIDGGEQDTCLRPDWLAWLHEDAEIRTFMMPLPKAPDLLSEGLTREIEQMPHNDPRWWGGDRVKRFVDSMAPVQRERLEAFIELPNMTARTAYRRTRNGIPVWEMRAEDVSGCLRTARGGSSKQAVVIMGGGSVKIRWMTGLEYARLMGAGWYSLDNMRDSQVHYGFGDAVAVPVVGWIAKHMLIPHLVSIQMFDGKIINGZ

SEQ ID NO: 600 - protein, 280 aa, Photorhabdus luminescens
MADTDIRVAIVGAGGRMGRQLIQAIYQLDGVALGAALERSGSSLIGADAGELAGIGHNGVTVCDDLTSIVDDFDILIDFTRPEGTLTHLEICRQNGKAIVIGTTGFDEAGKQAIKQASADIPIVFAANFSVGVNLVLKLLEKAAKVMGEYSDIEIIEAHHRHKVDAPSGTALAMGESIAHALGRDLKACAVYAREGYTGERDPKSIGFATIRAGDIVGEHTAMFADIGERVEITHKASSRMTFANGAVKAALWLSGKNSGLFDMKDVLNLELTLKIYFFZ

SEQ ID NO: 601 - protein, 388 aa, Photorhabdus luminescens
LIKSAILVLEDGTQFHGRAIGAEGAAVGEVVFNTSMTGYQEILTDPSYSRQIVTLTYPHIGNVGVNSVDKESLKVQAQGLVIRDLPLLTSNFRCEETLSDYLKRHNIVAIADIDTRKLTRLLREKGSQNGCIIAGKQIDAQVALEKAQAFPGLEGMDLAKEVTTKQIYPWLQGSWKLAGGLPEDKQEQDLPYHVVAYDFGAKRNILRMLVDRGCRLTVVPAQTSAEDVLKLNPDGIFLSNGPGDPAPCGYAIDAVKTLLETEIPIFGICLGHQLLALASGAETMKMKFGHHGGNHPVKDLECNVVMITAQNHGFAVDEKSLPSNLRVTHKSLFDGTLQGIHRTDKPAFSFQGHPEASPGPHETASLFDHFIELIEQYCQKNNRHNTKZ

SEQ ID NO: 602 - protein, 1075 aa, Photorhabdus luminescens
MAKRTDIKSILILGAGPIVIGQACEFDYSGAQACKALREEGYRVVLVNSNPATIMTDPEMADATYIEPIHWEVVRKIIEKERPDAILPTMGGQTALNCALELERQGVLEEFGVTMIGATADAIDKAEDRCRFDIAMKKIGLETPRSGIAHSMEEALAVADQVGFPCIIRPSFTMGGSGGGIAYNREEFEEICERGLDLSPTNELLIDESLIGWKEYEMEVVRDKNDNCIIVCSIENFDAMGIHTGDSITVAPAQTLTDKEYQIMRNASMAVLREIGVETGGSNVQFAVNPKNGRLVIIEMNPRVSRSSALASKATGFPIAKIAAKLAVGYTLDELMNDITGGRTPASFEPSIDYVVTKIPRFNFEKFAGANDRLTTQMKSVGEVMAIGRTQQESLQKALRGLEVGATGFDPKVSLDDPEALTKIRRELKDAGAERIWYIADAFRAGMSVDGVFNLTDIDRWFLVQIEELVRLEEQVAEQGINSLTADFLRYLKRKGFADARLAKLVGVAEKEIRKLRHKYNLYPVYKRVDTCAAEFATDTAYMYSTYEDECEANPNSDKPKIMVLGGGPNRIGQGIEFDYCCVHAALALREDGYETIMVNCNPETVSTDYDTSDRLYFEPVTLEDVLEIVRVEQPKGVIVQYGGQTPLKLARELEIAGVPIIGTSPDAIDRAEDRERFKQAVNRLGLKQPENATVTTIERAVEKANILGYPLVVRPSYVLGGRAMEIVYDEVDLRRYFQTAVNVSNDAPVLLDCFLDDAVEVDVDAICDGERVLIGGIMEHIEQAGVHSGDSACSLPAYTLSQEIQDVMRQQVEKLAFELGVRGLMNVQFAVKDDEVYLIEVNPRAARTVPFVSKATGLPLAKVAARVMVGQSLVEQDATQEIIPPYYSVKEVVLPFNKFPGVDPILGPEMRSTGEVMGVGRTFAEAFSKALLGCNARMPQNGRALLSVREGDKGRVVDLAAKLLKQGFELDATHGTAVVLGEAGINPRLVNKVHEGRPHIQDRTKNGEYSYIVNTTAGRQAIEDSKLIRRSALQYKVHYDTTLNGGFATTMALSADPTEQVISVQEMHAMINSZ

SEQ ID NO: 603 - protein, 204 aa, Photorhabdus luminescens
RKQQMPNIRYPWEFHPQLSEERLSIIAKELLNVLDHTYEQLSTPLDDNYTRGTCTFGRQRQCLIQLCMKGTYDWLKLTNPNMDTTIEIETIPLRFFTDDPENPKKSGFFRRNSVDQLWAPEITIPTIWRFIVEKPQFEGEGAQVHFAGYNEHEEMLSQWTYDNSKISTLHSTDNTPPSAVTIELDPISAAMPDKSRENKRNNKZ

SEQ ID NO: 604 - protein, 205 aa, Photorhabdus luminescens
MLETSLVVIIISTLGMLSPGPDFFLVVKNAIRYQRSAAMMTVAGLIAAITCHMAYCVAGLAIVITTTPWLFNLMKYAGAAYLIWIGINSLLSRGGNSILPDNQPRQIITFKKAFMQGFLCNLLNPKATLFFLAIFTQLLNVNSGVGEKLWYASIIWGLSVIYWPILVILIQSAPVRRGLAKAQKIIDKLLGIVLIGLGVKVALGZ

SEQ ID NO: 605 - protein, 276 aa, Photorhabdus luminescens
MSTYLIGDIHGCYRELRALLTKANFDPTKDTLWLTGDLVARGPDSLKVLRYVKQLGSAARMVLGNHDLHLLGVYAGISRNKPKDKIDTLLSAPDADELINWLRKQPLLQFDDDLKLLMTHAGITPQWDLETAKMCASEVETMFNSSCYPLFLNSMYGDMPNNWSPELSGLARLRFSTNALTRMRYCFPNGQLDMLCKDKPENAPAPLKPWFELERQIPPEYAIVFGHWASLEGQGTPDSFYALDTGCCWGGQLTMLRWEDKQYFTQSSLPAVKQHZ

SEQ ID NO: 606 - protein, 273 aa, Photorhabdus luminescens
MNNRVHQGHFARKRFGQNFLTDQFVIDSIAAAINPQPGQAVLEIGPGLGALTEPVGERMDKMTVVELDRDLAARLQVHPQLKDKLTIIQQDAMTVNFGELSQQRGKPLRVFGNLPYNISTPLMFHLFSYTDAIADMHFMLQKEVVNRLVAGPGSKTFGRLSVMAQYYCQVIPVLEVPPTAFTPAPKVDSAVVRLVPHKSIPHPVKNIRMLSRITTQAFNQRRKTIRNSLGDLFTVEQLTELGIDPSTRAENISVEQYCKMANWLSEQPEMQSZ

SEQ ID NO: 607 - protein, 340 aa, Photorhabdus luminescens
MATMHNNKPIIINKPIVITPGEPAGVGPDLTVALAQQSWPMQLVACADPNLLLDRARQLNLPLQLQEYSADKTPEPQAAGTLTILPVPLHVPAIAGELNQENGRYVTETLAQACDGCLNGEFSALVTGPVHKGNINDAGVPFIGHTEFFADRSGCQRVVMMLATEELRVALATTHLPIVDVPKSITFDSLREVITILNHDLKTKFGLAKPRIYVCGLNPHAGEGGHMGREEIDVIIPALASLRAEGIVLEGPLPADTLFQPKYLQHADAVLSMYHDQGLPVLKYQGFGRAVNITLGLPFIRTSVDHGTALELAGTGQADVGSFITALNLAIKMIQNSNEZ

SEQ ID NO: 608 - protein, 434 aa, Photorhabdus luminescens
MKNWRTLIFGLMFSVSTAFAAPQQMDKIAAVVNNGVVLESDINNRLQSVKRDAQHAGQQIPDEQTLRHQILERLIIDNILLQMAKQMGITIPDQALDSTIANIAAQNHITVDQMKHRIAADGMNFDTYRDQIRKEMLIAEVRNNEVRRRVTILPQEIDALVKQISNQNTNDTELNISHILIPLPENPDQAQMEKAMTVVQKIMSELKHGVDFGKLAIAYSADPQALKGGNMGWSRLQELPTLFAEQLQLAQKGAVVGPIRSGVGFHILKVNDIRGGNPTIAVTEVHARHILLRTSPVMTDDQARTKLQQIASDIRSGKTDFADAAKEFSDDPGSALRGGDLGWTAPDIYDPAFRDALMRLNKGEISQPVHSSFGWHLIQLLDTRKVDKTDVAQKDRAYRMLFNRKFTEEAQSWMQEQRASAYVKILDGNDAQQZ

SEQ ID NO: 609 - protein, 775 aa, Photorhabdus luminescens
MKKCYPTLLATTVWAALYGQYAHADLAAQCMLGIPVYDQPIINGDLNQLPINILADDSRADYPRSAKFIGNVNIKQGNKTLTADQVQLDQTEDKVPLRTVTATGNVHYDDPLIILKGPRAWSNLNNKDTDMYQSDYQMVGRQGRGTADKMKLRGENRYAILDNGTFTSCLPGNDSWSVVGSEVILDREEEVAEIWNARFRVANVPIFYSPYLQLPIGNKRRSGFLIPNASYSKNDGFEFLLPYYWNIAPNYDATITPHYISKRGLKLDNEFRYLTKAGTGTLALDWLNNDEQYVKDKKTNTRTARESDNRWLFYWRHSGVMDRVWRFNIDYTKVSDPEYFSDFSSQYGSTTDGYATQKFSLGYAQQNWNATLSTKQFQIFSKDTSRKAYRAEPQLDLNYYKNDLGPFDLKVYGQAAKFTSVGKNNPEATRWHLEPSINLPLSNGWASMNNEVKLMATHYQQDIPKATENAEYKESVNRVLPQFKSEAKMVFERSTYLNNNYTQTLEPQVQYLYVPYKDQDNINNFDSSLLQTDYNGLFRDRFYGGLDRISSANQVTTGLTTRIYDESLVERFNLSLGQIYYFERPRTGKETIINSKDSTGMMTWAGDTYWKINDSWGLKGGMQYDTRLGNVTMGNAVLEYRRDEDRLVQLNYRFVDRDYIQATAKSAPAFQQGISQVGLVASWPLSERWGLVGAYYYDTKEQQPASQLVGLQYNTCCWAINVGYERKIVGWKDNNSEYDNKWSFNFELRGLSNNHSLGSRKMLQSGIMPYQRAFZ

SEQ ID NO: 610 - protein, 274 aa, Photorhabdus luminescens
MHYWGKLLGLIFGVVSGAGFWGIVIGLFIGHMLDRASVRGNQGFFANNQSRQLLFFSSTFQVMGHITKSKGRVTETDIRLASQLMERMQLHGQARIAAQQAFREGKEPNFPLRETLRQLRRACFGRSDLIRMFLEIQLQAAFSDGQLHPNERTVLFIIADELGISRNQFEQFLAMMEGGRNFGDGGEWQQRQYGGYQKAAQGPTLADACKVLGVREKDDATTIKRAYRRLMSEHHPDKLVAKGLPPEMMEIAKQKAQSIQAAYDLIKKEKGFKZ

SEQ ID NO: 611 - protein, 217 aa, Photorhabdus luminescens
MEAYNPPTDPWLHVLYQDQYIIVVNKPSGLLSVPGRAAEHKDSIMTRIQQQFPAAESVHRLDMATSGVMVVALTKDAERELKRQFREREPEKTYIARVWGRLEPETGLVDLPLICDWPNRPKQKVCFETGKSAQTEYEVLAYEDEATRIKLSPITGRSHQLRVHMLALEHPILGDQFYAHQQARAMAPRLQLHAQELYITHPVYGTPMHFQCKADFZ

SEQ ID NO: 612 - protein, 971 aa, Photorhabdus luminescens
MPFTLGQRWISDTESELGLGTVVALDARMVTLLFPASGENRLYARNDSPITRVMFNSGDVVTSHEGWQLKVDEIQQENGLLIYTGTRLDTLEENISLREVFLDSKLTFNKPQDRLFAGQIDRMDRFALRFRARKYQSEQFKLAESGLRGIRASLIPHQLHIANEVGKRYAPRVLLADEVGLGKTIEAGMIIHQQLLAGRAERVLVIVPDSLQHQWLVEMLRRFNLRFALFDDSRYIEARHDSDNPFETEQLVLCSLDFARRNKQRFEHMLEASWDLMVVDEAHHLVWSEDAPSREYQVVEQLAEQIPSVLLLTATPEQLGQESHFARLRLLDPNRFHDYQTFIDEQQKYRPVADAVTLLLSGEQLNNNQLNLMGELISEQNIEPLLKAANSNSGESETARRELISMLMDRHGTSRILFRNTRNGVKGFPHRELHQIKLPLPSQYQTAIKVSDIMGAKKSLEARAWDMLYPEQIYQEFEGENATWWNFDPRVEWLLGFLMANRHEKVLVICAKATTALQLEQVLREREGIRGAVFHEGLSLIERDRAAAYFASEEEGAQVLLCSEIGSEGRNFQFANQLVMFDLPFNPDLLEQRIGRLDRIGQSRDIQISVPYLENTAQAVLIRWYHEGLDAFEHTCPTGRTIYDHYYEALLNYLAKPNNQDQEKFGEFIDQCRQQHEQLKQQLEQGRDRLLEMNSNGGEHGLRLAEKISEYDNDTELVNFSLNLFDIVGINQEDRNDNMIVLTPSDHMLVPDFPGLPKDGCTITFDREQSLSREDAQFISWEHPIIRNGLDLILSGDTGSCAVSLLKNKALPVGTLLVELIYVVEAQAPKRLQLTRFLPPTPLRILMDLKGNNLADQVEFESFNRQLNAVNRHTASKLVNAVQKEVHAILQQAEGLVETQAKSLIEQAEQEADENLAAELSRLEALKTVNPNIRDDELEAIEANRQQLLLNLNQASWRLDAIRLVVVTHQZ

SEQ ID NO: 613 - protein, 310 aa, Photorhabdus luminescens
KFRWHKHWPLLVSFPLEILALSRCLVMKISVPCPSTSISKSGLIVVRMARSLLYCCYCYVLRCLVYLNAYRDHVMLKLENLTYRYEHLMMRFDLHIQAGERIAILGPSGAGKSTLLNLIAGFQTAEKGSLWLNGENHTSTSPAQRPVSMLFQENNLFSHLTIEQNIGLGLHPGLRLNSTQKQTLQQIVSQVSLEDCLPRLPAQLSGGQRQRAALARCLVRQQPILLLDEPFSALDPALRNEMLVLLEQVCHERQLTLLMVSHNLDDAARIADRALLIVDGNIHYDGLTNTLVAGTVPEAAILGMKTDAIZ

SEQ ID NO: 614 - protein, 373 aa, Photorhabdus luminescens
QVFNGSNLRLARLYHELSLEQVAERVNKTRQYIQRLESGFAVPTNELSNELATVLQVTPAFFETQIQSPVNEEIVHFRKRSAIRVATKLAALAKAELYRRLIVVFEENLNLPSVLFPELKANSPEEVERAAEKCRIDWGLGFGPIENVTRLAEKLGAFVTSFDSVSDDVDALSVPLDRPFIVRNTAKKSPCRQRFDIAHEIGHIVLHGGISTGDRITESQANQFASALLLPRSAMAKYFPAPISGRINWRGLSEFKLTWKVSKAAIIYRAHQLSLLTDTQYKTAFLGLKRKGEAIEEKEDYLIPHEKPELFHRAIKVLINDVCIDIETLAERLKITVPMLLELANDSSLYELNDQANSVNVISMFSYRSRIAZ

SEQ ID NO: 615 - protein, 537 aa, Photorhabdus luminescens
MAKRCQPLIAGWLLPGAIAAGFLLLVALLAFGTLWFNSPASDWYLLIEDRYLWHVVRFTFWQAFLSALFSVIPAIFLSRALYRRHFPGRTLFLRLCAMTLVLPVLVALFGILAVYGRTGWLAQFCKWIGIDYPFTPYGLSGILLAHIFFNMPLATRLLLQSLENIAVEQRQLAAQLGMNEWQHFRFVEWPYLRRQILPTGALIFMLCFASFATVLALGGGPAATTVELAIYQALSYDYDLNRAALLALIQITCCLGLVLLSQKLNSALSVGYSNQQQWRNPQDTLLRKICDSLLIIAALLLLVPPLLAVVVDGLNSGLLNVLRQPALWRAFITSAVIALGAGLLCVLFTMMLLWSSRELYLRHSPHWGQVMEMSGLLILSMPGIVLATGFFLLLNDTVGLPRSPYGLVILTNALMAIPYALKVLDNPMKDLAARYNPLCRSLNIQGINRLRWIELKALKVPLAQALAFACVLSIGDFGVVALFGNEDFRTLPFYLYQQIGAYRSQDGAITALLLLLLCFTLFSLLERLPRPRNAQTZ

SEQ ID NO: 616 - protein, 327 aa, Photorhabdus luminescens
LAALSAPALLLSQVVQAKPVLTVYTYDSFATEWGPGPAIKKAFEAECHCELKLVALEDGVSLLNRLRMEGKRTAADIILGLDNNLIQAAQQTGLFTESQVDTSKLTLPVSWNNKVFIPYDYGYFAFIYNKKTLPNPPKSMDELINSHNNWKVIYQDPRTSTPGQGLLLWMQKIYGDDAPQAWQKLAKKTLTVTKGWSEAYGLFLKGEGDLVLSYTTSPGYHLLSEKNDDYTAATFSEGHYLQIEVAAQLASSKQPELAQKFMQFMLTPTFQQEIPTTNWMYPVIDIPLPEVYLQLSIPEKSLQYRAEEVAKYRNQWIRTWQSAVSRZ

SEQ ID NO: 617 - protein, 689 aa, Photorhabdus luminescens
  misc_feature (680)..(680): Xaa can be any naturally occurring amino acid
MLMRLREIVEKVAMATNLAEALELLVNETCLAMNTDVCSIYLADHQRRCYYLMATRGLRKPRGRAISLAFGEGVVGQVGQLSELINLADVRSHPSFKYLPQVKEDSFRAFLGVPVVYRRQLQGVLVVQQQEQRLFNETEESFMVTLATQLAVILAQAQTKGLFGRYRQTRIKALAISNGIVMAQGWQDCSQPSLDQIFEASTLDHAAERSRLIQALEDAIAECRRLSKRFTVGSQKESAAIFDLYSYLLNDPQLKQDLFSCVEQGSVAQWAVKQVIEKYAEQFSSLQDAYMRERASDLRALGQRLLFHLDDSLTASHQWPEWFILVADELSANLLAEMPQERLAGVIVRDGATHSHSAILVRAMGIPAIMGADIQPELLNNRMLILDGFRGEVFIEPEPLISQEYKQIIEEEKALSRLAEGDVEQEARLKSGERILVQLNAGLSLKYELQISNSIDGVGLYRTEIPFMLHCGFPSEDEQKARYQEMLQLFPDKPVVLRTLDIGADKQLPYMPISEENPCLGWRGIRVTLDQPEIFLIQLRAMLRANADMGNLKILLPMVTSVEEIDEAKRLVDRAKEEVEQMLARQISMPQLGVMIEVPSMIFLLPQLKNRVDFVSIGTNDLTQYLLAVDRNNTHVASLYDCLHPAVIRALKLVFENSQRAGLTISICGEMASFPMGALXLIGLGIAVZ

SEQ ID NO: 618 - protein, 292 aa, Photorhabdus luminescens
MSNSYLAFPNIDPVIFSIGPIALHWYGFMYLVGFVFAMWLATRRAAKPNSGWTKNEVENLLYAGFAGVFVGGRLGYVLFYNFPAFLDNPLYLFKVWDGGMSFHGGLVGVICAMWWFGRRTKRHFLQVADFIAPLVPFGLGMGRIGNFINGELWGRVTLDTPWAMLFPSSRGEDIALAATDPSLLSVLEQYGVLPRHPSQLYEMALEGIVLFIILNLYIRKPRPMGSVSGLFLIGYGIFRVIVEFFRQPDAQLGLFDGISMGQILSIPMILAGILMMIWAYKHQGNKVQEVKZ

SEQ ID NO: 619 - protein, 265 aa, Photorhabdus luminescens
MKQYLDLMTRVLAEGTPKADRTGTGTLSIFGHQMRFNLQDGFPLVTTKRCHIRSIIHELLWFLNGDTNIKYLHENGVTIWDEWADENGDLGPVYGKQWRAWGTADGRQIDQLKTVLEQLKSDPDSRRIIVSAWNVGELDKMALAPCHAFFQFYVADGKLSCQLYQRSCDVFLGLPFNIASYALLVHMMAQQCDLEVGDFVWTGGDTHLYSNHMEQTKLQLSREPRSLPKLVIKRKPASLFDYKFDDFEIVDYDPHPGIKAPVAIZ

SEQ ID NO: 620 - protein, 1130 aa, Photorhabdus luminescens
MFKVYHSNQLDLLKELIAILIGGNPLTDPFAQEVILVQSPGMSQWLQIQLAERIGISANISFPLPATFIWDMFTKVLPDIPKESAFSKDAMTWKLMALLPQLLPEAEFVGLRHYLDQDFDKRKIHQLAGRVADLFDQYLVYRPQWLESWQQGQLIDGLSDNQLWQKRLWLELTKYTHQLQQPQWHRANLYQRFISILENNTEQENSTDFSACLPKRVFICGISALPPVYLQALQALARHIDIHLMFTNPCKYYWGDIQNYAFLAKLSSRKPRHYKSEQELEYFKDPDNAQSLFNGDGEQDVSNPLLASWGRLGRDNLYLLSQLEQSSDIHAFVELEQDNLLHQLQRDILYLEDHAQIGSTKETFENSLKKRVLDPLDRSLSFHVCHSPQREVEVLQDQLLRLLEDNPSLTPRDIIVMVADIDSYTPYVQAVFGNVSVERYIPFAISDRKARQAHSILQAFITLLDLPQSRFTTEQVLALLEVPALANKFDIHEDGLRLLRRWVEESGVRWGLNDDNVEELSLPVTGQHTWRFGLTRMLLGYAMDSRSGPWKEVLPYDESSGLAAELAGQLAEFLMQLSYWRKILAESRALTGWLPVCQQLLETFFVSDNETELVLAMIEQQWQKVIVNGLNARYQESVPLVLLRDELALQFDNEKISQRFLAGSVNFCTLMPMRSIPFKVVCLLGMNDGIYPRSIPPLGFDLMAEKGQRGDRKRRDDDRYLFLEALISAERFLYISYIGKSIRDDTECNPSVLVNELLDYVCQSFCLPGNEKLNVDESATHVRKHLLYLHARVPFAPENFIPGSYQQSYAGEWLPAATEQGAAYAEFCQSIEMAQIQEITLDNLSSFYRHPVRFFFQRCLKVNFVIEETELPEEEPFVLDNLQRYQFNQLLLSALIEQQSPEPLFNRLRAAGGLPFGAFGEVYWLRQQKEMQPLADKIREQQMETLSVDLHHNLGPVILTGRINKVQPDGLLRWRPASLTANDGMQLWIEHLAYCLTGGEGESRSYGRDGNEWRFAPVPSEYAKDYLNQLIEGYQRGISAPLPLFCKSGWAWLSACMNKETGEIDDSDEIQSKAESQLLKAWLGDQGRRGEGDDPYIQRAFRQVDKSFLAKFKQEALSYLLPIARYQNTZ

SEQ ID NO: 621 - protein, 969 aa, Photorhabdus luminescens
REYQIMHKHFVRMITVMFLLFWGTTSYAQTPQSSQLLQETIYKSESDHRQYQGIKLANNMTVLLVSDEKATKSLAAVAIPVGSMENPDSQLGLAHYLEHMVLMGSERYPQSGDLSEFLQKHGGSYNASTASYRTAFYLEVENEALAQATDRLADALAEPLLNPVNADRERNAVNAELTMARSRDGMRVAQIRAETLNPKHPNARFSGGNLETLKDKPGSKLQTELVDFYQRYYSANLMKGVIYGNQPIDKLTQIAVDTFGRIPDRKASVPVITVPAVTEKEKGIIIHYVPAQPQKALQLEFSIDNNSADFRSKTDEYLGYIIGNRSLNTLSDWLQTQGLAESISAGAEPMVDRNKGIFFIYVTLTDKGLAQRDQIVAAIFAYINLLKQKGIQKSYFDEIAKVLNLSFRYGSVVRDMHYIEWLSDAMLRVPVSNVLNAGYLADNYDPKAIANRLAELTPENARIWYISPKEPHNKQAYFVQAPYQVDRITLQQRVKWQQLEEQMSFSLPAPNPYIPDDLKLIKADKSKKHPEMIVEQQNVRLLYMPSQYFADEPKASITLDLRNAEGLNSAREQVTSSLLDYLAGLSLDQLSYQASVAGMNISTGSSQGLQLGVSGYTQSLPALLTSLISNYMAFTPTEEQLAQAKSWYREQIAVSNNAKAYDMAMQPLKRLSVVPYIEQSTRLEALETITVQDIVTYRHEMIKNAALQMMIIGNLTEQQSKVIAESAHNQLANQGNDWWSGDKVVIDKNYPVNFQRVGSSTDGALAEVYIPTGYNRIEGYVYSSLLSNMLQPWFYEQLRTVEQLGYAVFAFNTSVGEQWGLGFLLQSNSKQPKYLNQRYQDFYQNVGNKLKAMPQADFEQYKSALINEKQQPPQTFYAEVARFSGDFSRNNFSFDSRDKMLEILKKTTQQQLISFYRNAVIKHIGLSFISQVIGKSGNLDGYAKLKGWKTYQNVTEFQKRLPVEVRAQZ

SEQ ID NO: 622 - protein, 1203 aa, Photorhabdus luminescens
VITEISVHRLNVLTLPLTGQRLIEASAGTGKTYTIGILYLRLLLGLGKDAAFSRPLSVEEILVVTFTEAATNELRGRIRENIHKLRLACIRNAIEETEPAYQQLLNEIPDKGQAAIWLLAAERQMDEAAIYTIHGFCQRMLAHNAFESGILFEQTLIQDQHPLERQGCADFWRRHCYPLPLSMAQVISQEWSGPEALLAELYPYLQGDMPYMVDAPASDETLLSRHEKITQLINDVKYQWNEAAGELHDLIAGSGVDKRSYSSKHLPNWLNSVMDWAQTPTEDYQLPKALEKFRQSVLAEKTKKGEVPEHSLFVVIDDLYQKPLTLRDLIISRAIIEVRQSIRQEKLTRGQMGFDDLLTRLDDALKGPGSDLLAETIRRRYPVALIDEFQDTDPQQYRIFHTIYGTQPENGLLFIGDPKQAIYAFRGADIFTYIRARSQVSAHYTLETNWRSAYSMVQAVNKLFMRSENPFLFEQIPFIEVSAAEKNRELSFSYDGEEQAALNFWLQPGEGVSIGDYEQTMSRLCSAQIRDWLQAGSEGRALLHKSEGSRPVTAADITVLVRSRKEATLIRNALNLLSIPSVFLSNRESVFDTVEAKDILWLLQAVLSPEKERVLRSALASGLFGLTARQIDKLNHDEKTWDQLVDEFDGYFRLWQRRGVLPMLRAVIANHHIAENLLASYDGERRLTDVMHIGELLQEISLQLDSEHAVTRWLAQQISHPDPQSENQQIRLESDRHLVQICTIHKSKGLEYPLVWLPFICNFREQKRAIYHDRTSFNACLDIFPDDETIELAEQERLAEDLRLLYVALTRSVYHCSVGVAPLIKGNKKKAGDTDLHQCALGYLLQKGVKGDADFLATSLKELSGDGIVISSINETDDHPWQSQSKNDLVLSARQFKRRVQDDWRITSYSGLRNSVVHRGNASAYFAGEESIDVIVQSIAPKLDVDASGERQLVEQPEMTPHTFPRGASAGTFLHAILEELSFSQLPDEKWLAEQLQSAGFDERWSGTLQQWMVDIFTIPLNDEGVQLAKIPLHHQQDEMQFYLPVEQLLRSQMLDTLIRRYDPISARCPQLEFQQVKGVLKGFIDLVFCWQGKFYLLDYKSNWLGEESQFYTRQAMEIAMIEHRYDLQYQLYTLALHRYLRHRLANYDYQQHFGGVIYLFLRGIDKQQPGNGIFNCRPSAEFVDALDLLFSGSEQLEKEKNZ

SEQ ID NO: 623 - protein, 619 aa, Photorhabdus luminescens
LMISLLQQAVNLRLLRSLDLQFAHVLIEDKDPVLLLVMALLSAETGTGHVCLPVNRITPEYFFDGRHREFAEQLWQVAGKPDEQSLRIALENCAAVSDGFQPTPVVLSHDRLYLQRMWQSECQVAAFFSGNQPIDNIQEQQLKVVLDELFMLSEEMVDWQKMAAAVAVTSRISVISGGPGTGKTTTVAKLLATLIKLEPDKKRVIQLAAPTGKAAARLTESLNSAVRKLPLTEEQFACMPDQAQTIHRLLGAQPDSQRLRYDRDNPLNLDVLVVDEASMVDLPMMARLIDALPPKAKIVLLGDRDQLASVEAGAVLGDICRFAELGYSVTRAQQLSRLTGCRLVAGDQQNIPEVRDRLCLLRKSYRFNVDSGIGQLATAVNQGKSRQALAILQQPLKDICFYPLSDDEDYQRLLAETVSGYYLYLHLVAKQAPVKEILDEFNRYRLLCALREGLFGVSGLNERIEQLLHRQGLIRRPVGTFSRGYAGRPIMISRNDSTLGLFNGDIGIMLRDENHELRAYFQLPDGQIKGVQPSRLPQHETAYVMTVHKSQGSEFEHTALVLPTQFVPVVSRELVYTAITRAREKLTLYAHEAVLRQAIQTPTQRRSGLAERLSLQVDZ

SEQ ID NO: 624 - protein, 712 aa, Photorhabdus luminescens
MSTESPHSSPGLDTGLICLAMLARFHNIAISTEQLSHEFSTASQGFTLKELLLAARHSGLKARAVHTTLARLEHTPLPAIAIDRDGQFFILAKLDKEQALIQDPRSARPEVISFEQLEQRWTGQLVLVRSSNGLPGETSRFDFTWFIPAIVKYRKLLGEVLLGSFALQLFALVTPLFFQVVMDKVLVHHGLTTLDVVAAGLLGIMLFESALSGLRSYVFAHTTSRIDVQLGSNLFRHLINLPLAYFQARRVGDSVARVRELENIRSFLTGNAITLMLDVLFSLVFILVMFYYSGWLTLIVVLSLPLYALVSGLVTPLLRKRLQDSFTRNAENQAFLVETVNGIDTLKSMAVEPQAIRKWDNQLAAYVAAGFKTQTLSTIANESVSLIGKLVTVATLWLGARLVIDGQLSVGELIAFNMLAGRVSGPIMRLAQLWTSFQQTGVSVQRLGDILNSRTELSQATRSTVPPLKGQVEFEQVHFRYRADGSEVLRGVNLVIGAGEIIGVVGRSGSGKSTLTRLLQRLYVPERGRVMVDGMDLALADVSSLRRQIGVVLQDNMLFNRSIRENIALSDPGAPLEVVMHAARMAGAHEFILELPEGYDTIVGEHGASLSGGQRQRVAIARALIGNPRILIFDEATSALDYESERVVQQNMQSICKGRTVIIIAHRLSAVRDAHRILVMDRGQIVEQGAHAELLARQDGHYSRLHRMQQGZ

SEQ ID NO: 625 - protein, 354 aa, Photorhabdus luminescens
RLSINKVSEMTKSNSLLNNKVYSKGSKGQLMRNLTASIILAFGLTGSALADTAPASATDNNTTSKTVQIAGSTPATTQATTDTTAPSANQIAPQAVPTTESTQVTPVATDEVAPKIPADEANLSSGFATDLSIWGMYQNADIVVKTVMIGLVIASVITWALFFSKGTELLASGRRLRKERLALTDVKSLDQAAEIAEGFNKHSISRLLLSEVQAERQLSSESTDLNSTKERAAFRLERSVAAISRHMGRGNGYLATIGAISPFVGLFGTVWGIMNSFIGIAHSQTTNLAVVAPGIAEALLATALGLVAAIPAVVIYNIFARMIVAYRGQVGDMAAQSILLLGRDLDLANSKTRZ

SEQ ID NO: 626 - protein, 472 aa, Photorhabdus luminescens
MSATLSLLQRYRHAWRESWHQRKNMDVSPRLAHELQFLPTALELQETPVHPAPRIFTWTILGFAVLALLWAYIGKIEVVAIAPGKVVPNGKTKLIQSSETAVVRAIHVNDGQSVKVGELLVELDPTAASADVSRIQSELLAARIDSARSAAMLDAINQQKSPASLVGTIDNANPEQVLSAQRWLQGQYQEYRSNLELVDAEILQRSAEIQSAQAQVASLRKTLPIATRLAEDYQRLLKKQYVSRHEYLEKEQTRLDLQRQLSVQQASVLQHAAAQDEARRRREAVVAQNRRAMLDLQQEANKKVATLVQELAKARYQETLTSLKAPVAGTVQQLAIHTVGGVVTPAQPLMVIVPADQSVEVEARLENKDVGFVHVGQPVTVKVETFTFTKYGTVDGEVLNVSNDAIEDEKHGLIYSSRIRLKSDHVMVNGQRVPLSPGMSITAEIKTDQRRVIDYFLSPLQQHIDESLRERZ

SEQ ID NO: 627 - protein, 235 aa, Photorhabdus luminescens
RSFISNPENGEYGEPSSQSCPHNLPFSQTFIYMLLQWAQEVIDHATLISFYFCRDRHARRQWDSLTIDHHVIRLQTNAAAIDEPMLFVLDGVVRHVEHFAVNGAVLGKSKSFHFDGDRLTNMDKTHILVFQPSLHFYRLVCGDDDHQRLSRCHHTTDSMDSELLNCAGHRGFEAGQSFLITGLRQLLNQGRYLFVGFLLQVEHGAAILRNNSLTPTSRLVLSGGVLQDTGLLYAZ

SEQ ID NO: 628 - protein, 252 aa, Photorhabdus luminescens
RRTVMTIDRPIQAKFHLPLSIAGEHDALAAALKDHGSQAFLWLERCGVAIRVSHRGDKSILELEVRRTDPGEWLIFQDNALPLTQIDLNIRPLLRQQQIGKRFSTKSDQIDDFATSRLEVADNIAACLTVVDHKEVLARTTCQCVVSTPAIKQCIGITRDQRIVAITGDDVLNARRILYCQRCAANAGNTGQQVDRGIPRNSRRIEGITPSRHAIDRIIQHCAVGLPDHRLDIFVGVKVSVIRGALAAVQTZ

SEQ ID NO: 629 - protein, 393 aa, Photorhabdus luminescens
PSPAMMLRGRSVELAYQLCSVTSCLLPMTEICRSCPSCWNHRRSGLMSFPNTKFPISPLNSKSLSPCPTSTVDIVPLVTIWLLPSPTFTFDIIPLVMIWLSPFPTSTVDISPRVTIWLLPSPTFTFVKVPDALMVLLPCPTVSLSILPTMTFLPLPNVISAKRSITLTLLSPLPATILLSIAFTLIVLLSSPNVTSEKGFLTVMESGSVVTGVDSTAGSIFGTLSVVRGSTGGVLIGFRSISDIRSTFWSKRDLRSTRPVLILVGFSSTGVTLIISRSISIEEILVRLQSIRGMLTGFLGGILIGFKSIGESGKGLSTPRGSTIGVNEPGTVTVGLSRDCVTTGLTVGTKSGVSSAKRKSAASTCEVSRVSRYSNFTFESVPLTPLKTTSTPZ

SEQ ID NO: 630 - protein, 2131 aa, Photorhabdus luminescens
SVEEIISMEKKYTVTYKVAPMGAKYVYQEDKNEHKAGDVHSSAGGHMWYVLNDGSGSEISYGFESRYDEPWGEGRVTNNDNAAYQQTSYETTVELTEFQYNRLKAFSEGPSLVGFDAKHYNVAKNSCVDFVFASLKAVGYNEKGFEGELFPNHNPMHLRDMLQNNGSRIIRDNLSRYIRYSDFYYLDDESGRACLWLRPEDTKITLPMKPLINIDIVSTPKPLRHIQGENKAQQDVANGFIQNSATHKISAVGDMLNKTDFASTQMAGLATGGIRPGEMQLDPNVKPNSYLSEFYKPFYQPGDTSKLDFGLRNAVTLNGLSAMTTFNTYVDPLLLDLSGNGVHMTDIRDGVLFDMDNSGTLKRSGWADRNTGILVIDDGSGQIKNAGQMFSEYYGGKAGINGAAGEKKFKEGFGALASEDANKDGVIDERDPIWSKLRVWVDGTHDAKVDAGELKTLAEWGITQINVRASNKTDVRDGNKVVASGSFTINGKTQEVLAVDFLGDPVSNTLSTQGAGTRVTSTHNDIITTAYASQSETDETLNAEQLGVSNLYGGSGNDTLIAAKTGSWLVGGAGSNTYVGGAGDDVFVISASDDTKNIHGNGGHDTAIIVGNQGVELNMGQASLTIAEGGSGNDTIISGSVNGVFIKGGSGNSTLIGGMGNDVLVGGSGHNTIVGGTGKSVIYAGPQGDTIYASKDGSIIHAGGGDDKIFGGVGDDVIEVGHGNATIDGDGGVNIVSLHGNHGDYQITRTDSGYVVADKVAGRDGTVTLKNIQKLNFSDISAVDLQTPNAMPVEDVLTHDKDGKVFDRTQPHLIAAESLLANDQHLNSQGTLRIANVGDAIGGTVSLTAQGDVLFTPDADYTGVISFKYGVTDAAGNPSASVVDLSSGETAPMRAVATLLTPEVPLDPLAAQQWYLSDANILPVWKDYTGKGVRIGQFEPGGKFATAPEIFDINHPDLAANVDKAWLQTQQTNGTLPNVVSNHATMVAGVMVAAKNNTGGVGVAHDATLGGYYLANDGADLAGLGHMVSFDIANNSWGFANDFALSSFQGGSINTAASLSLNAQYAAANGRGGLGTVIVAAGGNHRAEGGNAQGSLTNNNRFSVEVGAINAQGDLSTLQIGSSPFSNPGASLLVSAPGSNVVSTSYMLKTERGSTFGNDYTSMQGTSFAAPIVSGVVALMLEANPNLGYRDVQQILALSARKINDPSTAWSDNSSHSWNGGGMHASNDYGFGQIDARAAVRLAESWMTQSTAANEFVYSASSGPLGKTLAAGETLTSSIAMNAGLNVEHVEIDFDAQAGRLGDLTLKLISPDGTQSILLNRQGKVPDGMPGASATDLGSSQSGTFKYSFMSTHDLGERSAGNWTLQVSDAHSGLPVTLNAWSLRLYGSKSTSDDTYFYTDEYIQSVVGQANRAVLDDAVNGVAGGRNTLNAAAVSRDTSVNLLTGVASIGGTALTIKNPSGIQNIVTGDGNDTLVAGNADALLDGGRGNNTLAGGAGKDFFVVHHREAGSDVISNFEAARGEIIDLVGFRGKTFADLLLTQQGADVKVDLGKGQSIVLKNQPLAGIGAANFKFQDTFIAPVAYTNSDAATLQPQEGLGTVILKGGGKGVMLTSDAQGQMKFSLNGTIYSHDSAASDVFVVAAQPGARDYKNALRGFRHGIDKIDLRQAGVTDFSQLTIAKSHRGTINGLSQIHGVEVVFNGVSGTDSNVKLLYLDTLDTSQVDAADFLFAELTPDLVPTVKPVVTQSLDKPTVTVPGSLTPIVDPLGVDKPLPLSPIDLKPISIPPRKPVSIPLIDWSLTKISSIDIDRDMIKVTPVELNPTRINTGLVDLRSRFDQNVDRMSLIDRKPISTPPVEPRTTLNVPKIEPAVESTPVTTDPDSITVKNPFSEVTLGDESKTINVKAMDSKIVAGNGDNKVNVMDRFADITLGNGKNVIVGNIDKLTVGHGNNTIKASGTFTKVNVGDGNNHIVTRGEMSTVEVGNGDNHIMTSGIMSKVKVGEGNNHIVTSGTMSTVEVGHGDNDLEFSGDMGNLVFGKDISPERLWFQHEGQDLQISVIGSKQEVTLHNWYANSTERPRNIMAGDGHRLMESDVENLVQAMAAFAPPTPATTMLGDVEQQRLQPVLAANWHZ

SEQ ID NO: 631 - protein, 449 aa, Photorhabdus luminescens
MKERSTELVEGFRHSVPYINAHRGKTFVIMLGGEAIAHENFTNIINDIGLLHSLGIRLVVVYGARPQIEQNLADHHYEPVYHKHTRVTDNKTLELVKQSAGLLQLDITARLSMNLNNTPLQGANINVVSGNFIIAQPLGVDDGVDYCHSGKIRRIDEHAINRQLDNGAIVLIGPVAVSVTGESFNLAFEDVATQLAIKLQAEKLIGFCSTQGVQDKDGKILSEVFLNQAPELIKELEVKGDYYSGTVCFLRSAIKACRRGVRRSHLLSYQADGSLLQELFSRDGIGTQIVMESAEQIRRANINDIGGILELIRPLEQQGILVRRSREQLEREIDKFIIIERDNLTIACAALYPYPEEKIGEMACLAVNPKYRSSLRGEVLLNRIAEHAKQLGLEKLFVLTTRSIHWFQERGFEPAELSMLPIQKQVLYNYQRRSKILMLNLEPQPGFTZ

SEQ ID NO: 632 - protein, 415 aa, Photorhabdus luminescens
MSHSDHNLSRRRLLQGAAAMWLLSVSQVGYAASAKIIAVRIWPASSYTRVTLESNIPLKYRQFVLKNPNRIVVDLEGIQLNHTLSGMGEQIQSRDPYLKLVRVGQFNPKTVRLVFEVKQSVSPHMFTLKPVAKFKHRLVLDIYPAERVNTDDDPLLALLEEYNKGHLAEDLPVEKPKSGKAGKDRPIVIMLDPGHGGEDPGAIGKYKTREKDIVLQIARRLKTLIQREPGMKVYMTRNEDVFIPLKVRVAKARKMRADLFVSIHADAVTNRVARGSSVFALSTKGATSNTARFLAQTQNEADQIGGVSKSGDKYLDHTMFDLLQTATINDSLKFGSEVLKRMGKVNKLHKNRVDQAGFAVLKAPDIPSILVETAFISNLEEERKLKTARFQQQIAESIFAGIKAYFKNGGNLAIZ

SEQ ID NO: 633 - protein, 366 aa, Photorhabdus luminescens
MKYWGKYLLCGTVISLLVGCHSRPTAQGQQYRDGHIAQDLRLVNQPNAQGKPVNAKDFSEQVALISQSAPRLYNRNSLTFDAVQNWMLAGGETSKLHLFNLRAYQMEGVDNYGNVQFTGYYTPVLQARRVKQGEFKYPLYRMPPKSKYRLPSRTEIDNGALSPSLIIGYSRSLIDNYIMEVQGSGYVDFGDGGPLTLLGYAGKNGHIYRSIGKLLIERGEIAQEDISILAIRKWTESHSEAEVRELLEQNPSFVFFKPENYAPVRGASSVPLIAKASVAADKMLIPPGTTLLAEIPLLDREGKFTGQYQMRLVVALDVGGAIKGHHFDIYHGIGGEAGIAAGFYNHYGRVWVLKKAQPTMLMVSQZ

SEQ ID NO: 634 - protein, 397 aa, Photorhabdus luminescens
MAEKKLETLLVNAGRSQKFTQGAVNPIIQRTSSVIFDSVADKRRATQNRGKSELFYGRRGTQTHFSFQAAMAELESGAGCMLYPSGAAAISHAILAFAAAGDHILLTGSAYDPTQSFCDKILSRMNITTDYFDPMIGEEIADLIKPNTKVVFLESPGSITMEVQDIPAIVRAVRQVNPDIVIMLDNTWAAGVLFKALEFGVDISIQSGTKYIIGHSDAMLGIAVANERCWAQLRENSYLMGQIADADTVYMASRGLRTLAIRLKQHEKSSIEVAHWLQQRTEVAAVYHPALPSCPGHNNFIRDFSGSSGLFSFQLKKKLTPQQFTDYLDNFHHFKMAFSWGGFESLILGYQPEEIKMMRQYDISQRTGTLFRLHVGLENVQDLIDDLAEGFGRISTZ

SEQ ID NO: 635 - protein, 271 aa, Photorhabdus luminescens
MQTSLSDAYMQRFAGTARLYGQKALSLFCHSHVCVVGIGGVGSWAAEALARTGIGAITLIDMDDVCITNTNRQLHALKQHIGQPKTEVIAERILAINPECKVTCVDDFLTPDNVEEMMAAGFSYVIDAIDSVRPKAALLAYCRRHKIPLVTTGGAGGQLDPTQIQVVDLAKTVQDPLAAKLRERLKSDYRVVKNGKGKLGIDCVFSTEQLVYPQSDGSVCAAKSTAEGTKRMDCASGFGAATMVTATFGFVAVSHALKKMIAKAQRQGDLZ

SEQ ID NO: 636 - protein, 418 aa, Photorhabdus luminescens
MKKFEPEQFRQQFPALQQFPSQQFPSQQLPSQQQTVFLDSAATALKPQAMIKATQDYYRNSSATVHRSQHHAALEITSRYEQARQQVAEFINAPQAENIIWTKGTTESLNLVVQSYFRPHLQPDDEIIVSEQEHHSNLIPWLMLAEQIGAKVIKWPLGNGKLPDIHMLPELLNKHTRLIAISQMSNVTGGAVDLAAITAIAHQHGCLVVVDGAQGVVHNPIDVQQSDIDFYAFSAHKLYSSNGVGILYGKSELLNAMPPWQGGGKMLSHTSFSGFIPEAVPFRFEAGTPNVAGIIGFSATLEWLKDIDITKAETHAVTLADYTEEQLSALPGFISYRIAGSSLLAFNFTDIHHSDLAAILAEQNIALRSGQHCAQPLIEALGISGCLRASFMPYNNQQDADALIQAVKFGLSLLQDEZ

SEQ ID NO: 637 - protein, 307 aa, Photorhabdus luminescens
MSKRLPPLNALRVFDAAARHLSFTKAAEELFVTQAAVSHQMKSLEDFLGLKLFRRRNRSLLLTEEGQSYYLDIKEIFTAINEATRKLQARSAKGALTVSLSPSFAIQWLVPRLSSFNLAYPGIDVRIQAVDREEDKLADDVDVAIFYGRGNWPGLRTDRLYAEYLLPVCSPSLLTGENSLKTPADLARHTLLHDSSRRDWQAYVRQLDMQQQINVQQGPIFSHSAMVIQAAVHGQGIALANNVMARTEIDAGRLVCPFNDVLVSKNAFYLVCHDNQAELGKIAAFRQWVLAQAASEQEKLGFITNEZ

SEQ ID NO: 638 - protein, 367 aa, Photorhabdus luminescens
MNKIALYCRPGFEKECAAEITDKAGQKEIYGFARVKDNSGYVLFECYQYEDADRLIREIPFRELIFARQMLVVGELLRDLPPEDRISPIVGMLHGVIERAGELRVEVPDTNESKELLKFCRKFTVPLRNAMRQEKILLIRENVNRPVIHVFFIAPGCCYVGYSYSNNNSPFYMGIPRLKFPSDAPSRSTLKLEEAFHVFIPHDEWEERLASGLYAVDLGACPGGWTYQLVKRSMMVHAVDNGTMSKSLMDTGQVKHHKVDGFKFEPSAKNIYWLVCDMVEKPAKVTQLMVDWLVNGWCREAIFNLKLPMKKRYEEVAHNLQKMHLQLKEGGINAQIQAKHLYHDREEITVHVRRIWSAYAASRNDYZ

SEQ ID NO: 639 - protein, 485 aa, Photorhabdus luminescens
MEKYMSLKKKISYSEDVSGSEKANELLKWLQAYIPGKDSNIVVEHEPSKDAAKELIRGDYRWGHQDDDKSKAFQLKYSFLESKPDNMPWHISEFSAFNEAQKAAAKLSIQSWADVANINFVETTDAKEANVTFGFFDVSLTGSYAFAYLPTPEKTQVGTWYNAKSRTFLNNDIDVNGYGRQTFTHEIGHTLGLQHPADYNASDKVSPTYKNSATYFEDSRAYTVMSYFGEKNTGQDFKGIYSSAPLLNDISAIQAVYGANNTIRADDTVYGFNSNTDRDFYTAKDENSKLLFTAWDTGGNDTFDFSGFTQDQRINLNEASFSDVGGLKGNVSIARGVTIENAIGGSGNDVLIGNDAANTLKGGAGDDIIYGGLGADNLWGGEGNDTFVYLSAKESPPLERDWIHDFVSGKDKIDVSLFDLGEAGKGGVKFVREFTGEVGEAVLRYNTVDKVNDFAINLGGEFSYDDFWVKIVGEPILESDFILSZ

SEQ ID NO: 640 - protein, 577 aa, Photorhabdus luminescens
VKLLLPKDEITDVIRARSRVFWAIGLFTAFINLLMLVPSVYMLQVYDRVLPSGNEITLLMLTLITLGMFAMMGMLEYIRSMIVIRIGSQLDMKLNNRVYTASYESNLKNGTTDAGQMLNDLANIRQFLTGNALFAFFDAPWFPIYLLVIFLFNPWLGLLSLGGALVLIALAVLNQWLSSQPLSEASKLSLRSASLASTNLRNAEVIEALGMLPVLRRRWFGLHERFLDFQRIASERASVINSVTKTVRLALQSLILGLGGWLAIGGHITPGMMIAASILMGRALSPIEQLIQAWKGWSGARLSWQRLTHLLEQQPERKPGMSLPAPKGNLAVDKVSAAPPGRNSKVVLQDISFSLDAGDVMGLIGPSASGKSTLARLLVGIWPTQEGVVRLDNADIYQWNKDELGSSIGYLPQDIELFGGTIAENIARFNAVEPEKVVQAAKKAGVHELILALDKGYDTVIGAGGVGLSGGQKQRIGLARALYDEPSLVVLDEPNSSLDEAGERALNEAISQLKAQGKTVIVITHRTSLLSQTNKILLLVQGKMKMFGSSQQVMAALSQRNNSQEHSATKAVAQASZ

SEQ ID NO: 641 - protein, 452 aa, Photorhabdus luminescens
DGDFCPGVDMSDQITPVREEKGLLPLEERHFLRLGWFVIGVGILGFLIWAALAPLDKGVASSGVVVVDGNRKTVQAPASGIISQIKVVEGETVKAGQTLVQLSQVQAKAQVDALQDQLHTTLATEARLLAEQHGDEALIFPDLLQQLHSEPRVNEIIELQKQLFVSRREVLRSDLAGLEQSVEGIDFQIKGLKSSFLNKRMQQAALKEQITNLKSLADEGYFPRNRYLELLREQAELNSSIAEMEGRAGQLEKQLQETQQRIIQRKADYQREVRTQLAEVQVSASEYRNKLDTAQFELTHTSIVAPVDGTVVGLNIFTQGGVVAPGEKLMEILPDQRAFEVETRVAVNLADKISKGLNVDLMFTAFNQNRTPKVEGKVAVISADRLVDPATSQPYYQMRVVVSPEGMEKLKGLDIRPGMPVEVFVKTGSRSLLSYLFKPLLDRASTSLIEEZ

SEQ ID NO: 642 - protein, 459 aa, Photorhabdus luminescens
MMKRNNASLSMGLLILVCVNLFSFPAWALSLTEVYALALENDPIFLAAVKEREGGEEHEKIGRADLLPKVIMSYQQSPKNWQHTEYPRYNLRGGKTTESQDRQYRSYSAAVVLTQPLIDFEIWARYKASQAHTLMSNERFRADFQQLAVRVVNAYVDVAYAQDQIDLVIRQKMAYEKQLELNKKLFTSGEGTLTDVVETQSRYSQAIADEIAAKDDLDAAIRNLQLIVGVSLPVDLPVQRLSNKKRFQILKLLPERYEAWEELALANNPLLSASRQEVKAAYHEVQRNRAGYLPRLELYASHSENESSSDNTIDQKYRTDTIGLRMSMNIYNGGATSAAVRQAAAHYGRTKYDLDAQAGEILNALRRNYNQYLNSEKRISAYEMAVESASLQVDATSKSVALGQRVNVDVLNAEQQLYTARRDLSQAKYNYIKAWIGLLSEAGELKGEHLDKVAKYFRZ

SEQ ID NO: 643 - protein, 255 aa, Photorhabdus luminescens
SHMIHLLIVDALNLIRRIHAVQGSPCIPACEHALRQLIQHSHPTHAVAVFDEENRNHSWRHQILPDYKAGRSPMPDNLQQEMPQIRASFEQQGVTCWHAKGHEADDLAATLAVKVTAAGHNVTIVSTDKGYCQLLSPNIRIRDYFQKRWLDMPFVQQEFGVLPEQLPDYWGLAGISSSKIPGIQGIGPKTAATLLQQAGTLDNLFQHLDQQPEKWRNKLESNQEIAFISREVASLRTDLALKGNLQQLRLTIATZ

SEQ ID NO: 644 - protein, 456 aa, Photorhabdus luminescens
LITHINPLGSMDLLSQLEVDMLKSTAKSDLYRLFRNCSLAVLNSGSQTDNSKELLSKYTDFEINVLRRERGVKLELVDPPEDAFVDGKIIHSLQANLFAVLRDILFVHTQITDPEQQDYSDSENSAYITNRIFSILRHARALHTDEDLNMIVCWGGHSISKQEYQYGRKVGNQLGLRGLNICTGCGPGAMEAPMKGAAVGHAQQNYKNSRFIGITEPSIIAAEPPNPLVNELIIMPDIEKRLEAFVRIAHGIVIFPGGVGTAEELLYLLGILMNPENQEQILPLILTGPKQSEAYFQVLDEFIVHTLGKETRRYYHIIIDNAPEVARIMKKAMPLVRDNRHSTGDAYSFNWSMKINYDLQQPFEPSHENMANLNLYPDQSPEKLAASLRRAFSGIVAGNVKEMGIQSIEQQGPFKIHGDVKIMRHMDKLLKDFVEQHRMKLPGGTAYEPCYEIIKZ

SEQ ID NO: 645 - protein, 224 aa, Photorhabdus luminescens
MEVLNGIMQALWQHDFSKLANPDVLWIIYGILFVTLVLENGLLPAAFLPGDTLLILAGALVAKGVMSFIPTVFILTAAASIGCWFGYLQGLWLGDTKRVKNWLAQLPIQYRQRANELFFKHGLAALLIGRFLAFVRTLLPTLAGISGLNSKRFQVFNWLSGLLWVVIVVGFGYLLNQIPFIKNHQDLVMNILIILPIVLLLSGLSASLLMYWRHKKISATKRKZ

SEQ ID NO: 646 - protein, 283 aa, Photorhabdus luminescens
MSLYRDHQALEQLTLGKTTLYRDQYDASLLQAVPRNMNREPLEIFPDNLPFHGADIWTLYELSWLNNRGLPQVAVGHVSLNAASTNLIESKSFKLYLNSFNQTRFENWQAVEETLQRDLAACAEGEVEVALHHLDHFNNQPISTFTGECIDDQDIEVTEYDFNRHYLQNAAQGPQVEEVLVSHLLKSNCLITHQPDWGSVQIHYKGSKINREALLRYLISFRHHNEFHEQCVERIFSDLQQLCAPEKLSVYARYTRRGGLDINPWRTNSEGFVPATGRLARQZ

SEQ ID NO: 647 - protein, 257 aa, Photorhabdus luminescens
MLEVLYQDDHIVAVNKPAGWLVHRSWLARHETVFVMQTLRDQIGQHVFPVHRLDRPTSGVLLMALSSDVARQLSQQFEHHQLQKTYHAVVRGYVLESAIIDYALVEELDKIADKFAEGDKEAQSCVTYYRPLATVECPVEIGRYPTSRFSLLELTPKTGRKHQLRRHMAHIRHPIIGDTTHGDLRQNRGVAVHYQTSRLMLHASYLELDHPVTGEKLSLTAKWDASWQHLIQQFGWQGIIPDLEYDEASKIENFIDZ

SEQ ID NO: 648 - protein, 207 aa, Photorhabdus luminescens
IRKTITMFNNRAVVLSILLSAANITVSSGLMIWVDTVLKDGSMILNAYIPVFSYLLGLSLGCMTVSFFIRKMNISFFERNIFGFFLLLTTINCILFAKETTFIPVWLDTPHRILWGVISGFIVIMGRNILITAGNEKKTNSDFSILSLALLSLPFSIPVIFSLLGLNSRTSADFFAAFIYSIASIIYFTGFKSYMVPLCNWHHENHZ

SEQ ID NO: 649 - protein, 275 aa, Photorhabdus luminescens
MQQLQSIIESAFENRATLTPATVNHETRDAVTQVINLLDSGKLRVAEKIDGQWVTHQWLKMAVLLSFRINENQIIDGTESRYFDKVPMKFSDYDQTRFEKEGFRVVPPAAARQGAFIARNCVLMPSYVNIGAYVDEGTMVDTWTTVGSCAQIGKNVHLSGGVGIGGVLEPLQANPTIIEDNCFIGARSEIVEGVIIEEGSVISMGVYIGQSTKIYDRETGEIHYGRVPAGSVVVSGNLPSKDGSYSLYCAVIVKKVDAKTQGKVGINELLRSIDZ

SEQ ID NO: 650 - protein, 930 aa, Photorhabdus luminescens
IIKTVNDEALLKSYKATHLSSAISPCSTPYFLSNLTVMIRLSHRFILMSADIATIQAPIPPLSPADFSSEDLRYPVLKQHLEEFQLWLEHAFKAGISAEALISARSDYIDQLLQQLWYAYRFDKISSLSLIAVGGYGRRELHPLSDIDVLILSEQPLTPPQAQNVGQFITLLWDIRLEVGHSVRTLEECLLEGLSDLTIATNLIESRLICGDSSIFLRLQRHTFSDGFWPSTEFFDAKIVEQHERHQRYHSTSYNLEPDIKSSPGGLRDIHTLLWVARRHFGATSIDEMVDFGFLTAEERNELNECQSFLWRIRFALHLVVNRYDNRLLFDRQFSIAQLLGYHGERNQPVERMMKDFYRMTRRVSELNNMLLQLFDEAILALETNEKSRSLDSEFQLRGQLIDLIDETLFIKEPAAIMRMFYRMAEHEEVQGIYSTTLRHLRYARRNLSQPLCELPEARQIFMDILRHPRAVESAFVPMHRHSVLGAYTPLWGNIVGQMQFDLFHAYTVDEHTIRVLRKLESFANENNRPAHPLCVELYPRLPQPELLHLAALFHDIAKGRTGDHSELGADDALAFSLKHGLNSREADLVAWLVRHHLLMSVTAQRRDIQDPEIIKQFTHQILNETRLRYLICLTVADICATNVNLWNSWKQSLLRELYFSTENQLRQGNTPDFRERIRHNRFQALALLRQDNINEQKLHQLWSRCHADYFLRHTPKQLAWHAHHLVQHDSQESLILISTKPTRGGTEIFIWSVDRPSLFAAVVGELDRRNLSVHHAQIFTNRDGMTMDTFVVLEPNGHPLASDRHEIIRNALLQVVLAPHTKTPKTRKLPTKLRHFNVPTKVTFLPTHNERRTYMELFALDQPGLLARVGNIFAEMGVSLHGAHITTIGERVEDFFVLADKDHKALNKKVREELSERLTATLNPKDKIZ

SEQ ID NO: 651 - protein, 266 aa, Photorhabdus luminescens
MAISIKTSEDIKKMRVAGRLAAEVLEIIEPYVKPGVTTGELDRICHDHITNKQQAVSACLGYHGFPKSVCISVNDVVCHGIPSDDKTLKDGDIVNIDVTVIKEGFHGDTSKMFIVGKPTIQGERLCRITQESLYLALKMVKPGIRLRTLGRAIQQFVEANDFSVVREYCGHGIGAGFHEEPQVLHYDADDSGVVLQKGMAFTIEPMVNTGDYHIRTMKDGWTVKTKDRSLSAQYEHTIVVTDNGCEIMTLRKEEEPALSSVLVNEZ

SEQ ID NO: 652 - protein, 242 aa, Photorhabdus luminescens
MATVSMRDMLQAGVHFGHQTRYWNPKMKPFIFGARNKVHIINLEKTVPMFNDALAELNKIASRKGKILFVGTKRAASEAVKEAAQNCDQFFVNHRWLGGMLTNWKTVRQSIKRLKDLEAQSQDGTFDKLTKKEALIRSRELGKLENSLGGIKDMGGLPDALFVIDAEHEHIAIKEANNLGIPVFAVVDTNSDPDGVDFIIPGNDDAIRAVKLYLGAVATAVREGRSQDLAVQAEESFVEAEZ

SEQ ID NO: 653 - protein, 284 aa, Photorhabdus luminescens
MSGITAALVKELRERTGAGMMECKKALVEANGDIELAIDNMRKSGQAKAAKKAGRVAAEGIILAEVAADGKFGALVELNCETDFVAKDAGFIAFGKEVMATVLADKISDIETLKAKFEEQRTALVAKIGENINIRRVSVLEGEQLGTYLHGARIGVLVAAEGANEELIKHVAMHIAASKPEYVNPSDVPADVVDREHQIQLDIAMQSGKPREIAEKMVSGRMNKFTGEISLTGQNFVMDPSKTVGDLLKENNATVTSFIRYEVGEGIEKVETDFAAEVAAMSKZ

SEQ ID NO: 654 - protein, 243 aa, Photorhabdus luminescens
MATNAKPVYQRILLKLSGEALQGAEGFGIDASVLDRMAQEVKELVELGVEVGVVIGGGNLFRGAGLAEAGMNRVVGDHMGMLATVMNGLAMRDALHRAYVNARLMSAIPLNGVCDNYSWAEAISLLRHGRVVIFSAGTGNPFFTTDSAACLRGIEIEADVVLKATKVDGVYSADPAKDSEAVLFDKLSYQQVLERELKVMDLAAFTLARDHSLPIRVFNMNKPGALRRVVMGENEGTLIFHEZ

SEQ ID NO: 655 - protein, 399 aa, Photorhabdus luminescens
MKRLTILGSTGSVGKSTLTVVRNNPDKFKVTALAAGKNIQVMAEQCLEFRPQYAAMADEVSAKELRQLLIEQGCKTEVFFGEQAACDLAALNDVDQVMSGIVGVAGLLPTLAAIRAGKQILLANKESLITSGRFFMDAVAKHNAQLLPIDSEHNAIFQSLPEVIQRNLGRGDLKQYGIANIILTGSGGPFRHTPLEQLAFVTPDQACAHPNWSMGRKISVDSATMMNKGLEYIEACCLFNASAAEMEVVVHPQSVIHSMVRYQDGSVIAQLGTPDMCTPIAYAMAYPNRIASGVEPLDFYSLGTLTFSKPDYERYPCLKLAIEACHAGQAATTVLNAANEEIVKIFLQNGISFTDIAIINRQVVEKLNLSEPQSIEEVLQIDNLARDLAIKTIRSFIRZ

SEQ ID NO: 656 - protein, 293 aa, Photorhabdus luminescens
MDNQPIIRLADGNHMPQLGLGSWASDDQQIAETIHAALDIGYRAIDTAAIYNNEKGVGNALQETDIPREDIFVTTKLWNDRHLDARAALTESLEKLQLDYVDLYLIHWPAPPQDQYVGAWQQLIELQKEGLIRSIGVSNFQPEHIQRLINETGVHPVINQIELHPLLQQRQLHAWNATHNIVTESWSPLAQGGENVFDNQLVQHLTQKYGKTPAQVVIRWHIDNGMIVIPKSTTLSRIKENFDVFDFKLEKEDLTAMTTLDIGKRLGPTPEIFVDFSEFIQLLEQNSANNQCZ

SEQ ID NO: 657 - protein, 255 aa, Photorhabdus luminescens
VILSSDHHQNDLSSLLPKHVAIIMDGNGRWAKKRGKLRAFGHRAGIKAVRSAVSFSAKHNIESLTLYAFSSENWNRPEQEVSSLMELFIFALDSEIKSLHKHNIRLSVIGDIGRFSERLQDRIHRSVKLTANNTGLQLNIAANYGGRWDIVQSVQKIAQQIKDNSLEQQDITEELVNNYMNLSQQPQVDLVIRTGGEHRISNFLLWQIAYAEFYFTDILWPDFDENVFEGAINAFAKRERRFGGTIPDDADVGSZ

SEQ ID NO: 658 - protein, 283 aa, Photorhabdus luminescens
LLKYRLITAVILIPLVIAALFLLPPVAFGLVIIAVSALAAWEWGQFAGLFNQKKRAILAVLFAIGLLALQYTLPDFTDLIGQPQITFILWGGMIWWIVATLLVVTYPSSAVIWKRSILLRLLFGVLTLVPFYCGMMVLRTQGYDDNSYYGAWWLLYVMLLVWGADSGAYLFGRTLGKRKMAPKVSPGKTLEGLIGGLMTAAIISWLFGKYAPVPAMPEKLMLCSAIVVIASVFGDLTESMFKRESGIKDSSQLIPGHGGVMDRIDSLTAAIPVFTGLMLLVFZ

SEQ ID NO: 659 - protein, 452 aa, Photorhabdus luminescens
MMGILWNLAAFIIALGILITVHEFGHFWVARKCGIHVERFSIGFGKALWRRTDRQGTEYVVALIPLGGYVKMLDERVSPVSPEHRHMAFNNKTLGQRAAVVSAGPIANFLLAAVVYWLVFIIGVPAIRPVVADIKPDSIAAQANISSGMELKSVDGIETPDWNSVRFALVGKIGDDNMTVQVISPGSSYSVEKTLDLQQWSFDPDKQDPVLSLGIMPVGPRLDSLVEKVIPGSAAEKAGLQKGDRIVKVGDQEIDVWHTFTSFVSNNPNVPLELSVDRAGHIISLSMTPEARQQSGGRKVGFAGVELRVVPLADEYRIVQQYGPFSAMYQAGEKTWQLMRLTVSMIGKLIVGDVKINNLSGPISIAKGAGVSADSGLVYYLMFLALISVNLGVINLIPLPVLDGGHLLFLFIEKIKGGPVSERVQDFSYRIGAIVLVLLMGLALFNDFSRFZ

SEQ ID NO: 660 - protein, 798 aa, Photorhabdus luminescens
MAMKKLLIASLLFGSATAYGADGFVVQDIHFEGLQRVAVGAALLNMPVRVGDTVSDEDIGRTIHALFATGNFEDVRVLRDSNTLIVQVKERPTIASITFSGNKSVKDDMLKQNLEASHVRIGEALDRTMLSNIERGLEDFYYSVGKYNASVKAVVTPLPRNRVDLKLVFAEGVSAKIQQINIVGNKSFSSDELLNRFQLRDDVPWWNLTADQKYQKQKLTGDLEALRSFYLDRGYARFNIDSTQVSLTPDKKGIYVTINITEGDQYKISGIDLNGNMAGYQSEITKLAAIEPGSLYNGTQVTKMENDIKNLLGRYGYAYPRVMTQPEINDQGKTVKLHVNIDAGNRFYVRKIRFSGNDTTKDSVLRREMRQMERAWLGSDLIELGKERLNRLGYFETVDVETQRVPGSPDQVDVVYKVKERNTGSLNFGVGFGTESGVSFQIGAQQDNWLGTGNSVGVNASKNDYSTYAELSFTDPYFTVNGVSLGGRVFYNDFRADDAELSGYTNQSYGIDGFLGFPINENNSLRFGLNYVHNSLSDMLPQAAMWRYLNSMGEKPDYKSKAEFKADDFALNVGWTYNNLDRGFFPTSGVKSTLNGKVTIPGSDNEFYKVTFDTSAYYPINDDRTWVILGRSRLGYGDGLGGKELPFYENFYAGGSSTVRGFRSNNIGPKAIYMNGKDDPKKDSPSRDAVGGNAMAVASLELITPTPFLDSKYSNSVRTSFFIDSGTVWDTYWNDSAAMKGSGIPDYGKPGNIRVSAGIALQWVSPLGPLVFSYAKPIKDYEGDRSEQFQFNIGKTWZ

SEQ ID NO: 661 - protein, 166 aa, Photorhabdus luminescens
VKKLLCAASFGIALAFSVGAQAADKIAVVNVGEIFQQLPAREAVVKQLENEFKNRASELQRMETDLQSKIQKLQRDGSTMKSSERTNLEKEVMAKREEFAKKAQAFEQDHRRREMEERNKILSRIQDAIKVVAGKEGYDVVIDANAVAYSVSGKNITTSVLKQVKZ

SEQ ID NO: 662 - protein, 343 aa, Photorhabdus luminescens
MSSIRLADLAQQLNAQLHGDGDIVITSIAPMHSANGEQITFLSDSRYRERLGECQAAAVVLQASDLPYCNIPALVVANPYLAYAYMAQIMDTTPIPAQDIHSSAVISPQATLGKNVAVGANAVIESGVVLGDNVVIGAGCFIGKNTRIGAGSRLWANVSVYHNVEMGEQCLIQSGAVIGSDGFGYANDRGKWVKIPQLGSVIIGDRVEIGACTTIDRGALDNTIIGNGVIIDNQCQIAHNVIIGDNTAVAGGVIMAGSLKIGCYCMIGGASVINGHMEICDKVTVTGMSMVMRPITEPGVYSSGIPAQPNKVWRKTAALVMNINEMNKRLKSMESKLEDENEZ

SEQ ID NO: 663 - protein, 251 aa, Photorhabdus luminescens
IFIKTTAFQAFDISAKRCCMIPLSNNVWRNILYHTGTPAHHSMRANLTKLMNRTHTTNDDIITQDNMPPQSTIISNDTTVTDNTVMSNMGINHQQIIITDFRYTATLHSATMNGDTFADTVTITNFNSGWFTVIFQVLIHFTNRSKLKNLIITADFGYSIDNNMRLQLCTFTNFNLRANTTKRPNTNIGTNNRTIFYNSARMYISGFINHGLNLTTASTHHFCFASYFSIDFRYASTTRNPSTLLNKFYFZ

SEQ ID NO: 664 - protein, 263 aa, Photorhabdus luminescens
MIDETAYIHPSAIVEDGAVIGANVRIGPFCCIGSQVEIGEGTELKSHVVVNGITKIGRDNQIFQFASIGEMNQDLKYHGEPTRVEIGDRNRIRESVTIHRGTVQGGGVTKIGNDNLLMVNAHIAHDCIVGDRCVIANNGTLGGHVILGDYVIIGGMSAIHQFCQIGSHAMVGGCSGVVQDIPPYVIAQGNHATPFGTNVEGLKRRGFDKDSLNVIRNAYKILYRNGKTLEEAQQEIAELAENNQHVKIFSDFLANSTRGIVRZ

SEQ ID NO: 665 - protein, 390 aa, Photorhabdus luminescens
LATISSIDSLRPLTIGLIAGETSGDILGAGLIRALKAKVPNARFVGVAGPLMQAEGCEAWYEMEELAVMGIVEVLGRLPRLLKIRKDLTTRFTELKPDVFVGIDAPDFNITLEGRLKQRGIRTIHYVSPSVWAWRQKRVFKIGKATDMVLAFLPFEKAFYDKFNVPCRFIGHTMADAMPLQPNKATARELLGILPESVCLALLPGSRHSEVEMLSADFLKTAQLLKRNIPDLHVFVPLVNAKRREQFERIKQEVAPELNVHLVDGKAREIMIASDAALLASGTAALECMLAKCPMVVGYRMKPLTFWLAKRLVKTPYVSLPNLLSGEELVKELLQEKCQPQKLADELLPLLQGSEKVGALKQTFLHLHKSIRCNADEQAAQAVLELAGKZ

SEQ ID NO: 666 - protein, 1165 aa, Photorhabdus luminescens
LDKYMAEPRFVHLRVHSDYSMIDGLAKTSPLVKKVAQLGMPAFAITDFTNLCGLVRFYGSAHGAGIKPIIGADFYVESELLGDEHASLTILARNNTGYHNLTLLISEAYQKGYGAIGPTIKQEWLINHKEGLILLSGGRMGDVGKFLLRGNQAMVDQCLEFYQEHFPGCYYLELIRTGRADEESYLHAAVALATEKSLPVVATNDVCFIDGEDFDAHEIRVAIHDGYTLADPKRPKNYSPQQYLRSEQEMCELFADIPEALENSVEIAKRCNVTIRLGEYFLPQFPTGEMSTEDYLINRSQQGLEERLAFLYPDPKVRAEKRPEYDERLDIELRVINQMGFPGYFLIVMEFIQWSKDNGVPVGPGRGSGAGSLVAYALKITDLDPLEFDLLFERFLNPERVSMPDFDVDFCMEKRDLVIDHVADMYGRNAVSQIITFGTMAAKAVIRDVGRVLGHPYGFVDRISKLIPLDPGMTLEKAFAAEPQLPEIYEADEEVKALIDMARKLEGVTRNAGKHAGGVVIAPTKITDFSPLYCDPEGLNPVTQFDKNDVEYAGLVKFDFLGLRTLTIINWALEMINARRTKKGLEPIDIAAIPLNDAKSFDMLQRAETTAVFQLESRGMKDLIKRLRPDCFEDMIALVALFRPGPLQSGMVDNFIDRKHGREELSYPDIQWQHESLQPVLEPTYGIILYQEQVMQIAQVLAGYTLGGADMLRRAMGKKKPEEMAKQRSVFEDGAKKLGINGELAMKIFDLVEKFAGYGFNKSHSAAYALVSYQTLWLKAHYPAEFMAAVMTADMDNTEKVVGLIDECWRMGLKILPPDINSGLYHFHVNDDGEIVYGIGAIKGVGEGPIEAIIEARQKDGYFRELFDLCARVDTKKLNRRVMEKLIMSGAFDRLGPHRAALMSSLEDALKAADQHAKAEATGQTDMFGVLAEAPEEVERSYANISQWPEQIVLDGERETLGLYLTGHPITRYLKEIERYTSGLRLKDVNPTPRGQVTTVIGLVLASKVIITKRGNRIGICTLDDRSGRLEVMLFSDALEKYRHLLEQDRILIATGQVSFDDFNGGLKMTARELMDISEAREKYARGLAISLSDRQIDDQLLSRLRSALEPHRSGTIPVHLYYQREDARARLRFGATWRVTPTDNLLTDLRTLLGNEQVELEFDZ

SEQ ID NO: 667 - protein, 474 aa, Photorhabdus luminescens
MSFSRRQFIQVSGLAMCIGAAPLLVRASKNQQTALPVPPLLESRGGQPLFLTLQKAHWTFDGQYKTSVWGINGQYLGPTIRVHKNDDVKLIYSNRLAEPVSMTVSGLQLPGTLTGGVARQISPGSDWSPVLPIRQQAATCWYHANTPNRMAPHVYKGLAGMWLVEDETSRHLPLPKHYGVNDFPVILQDKRLDNFGVPEYQPASDSGFIGNTLLVNGVQNPFIEVSRGWIRLRLLNASNARRYQLQIGDGRPFYMIGTDLGLLPAPIAVQQLSLAPGERREVLIDMSKEDEVVVTAGESAGVLDKLRGLFEPSTVLISSTVLTIKATGLLSLVTDNLPSRLIDDVTPVSSVIRNREIYLDDNTPGINGALWDMNRVDITSQQGTWERWIVNASAPQPFHIEGVQFKLINHNGEAPQPQDYGWKDTVWVDGRVELLVYMNQPSYEHFPFLYYSQILEMADRGSVGQLVTIPVNQZ

SEQ ID NO: 668 - protein, 327 aa, Photorhabdus luminescens
LTKIRNVMSLNFLEFEQPIAELEAKIDSLTAVSRQGEKLDINLDEEVQRLREKSLELTRKIFSDLGAWQIAQLARHPRRPYTLDYIQHIFTDFEELAGDRAYADDKAIVGGLARIDGRPVMVIGHQKGRETKEKIRRNFGMPAPEGYRKALRLMEMAERFKLPIITFIDTPGAYPGVGAEERGQSEAIARNLREMSRLSVPVICTVIGEGGSGGALAIGVGDKVNMLQYSTYSVISPEGCASILWKSAEKAPLAAEAMGITAPRLKELELVDTVISEPLGGAHRDYEAISTSLKAQLLIDLAELDHLTSEELVNRRYQRLMQYGYCZ

SEQ ID NO: 669 - protein, 443 aa, Photorhabdus luminescens
MANIDERLFVTLAKQLGEYKKILVGFSGGLDSSVLLHLLVNWRNQHNQKIQLRAIHIHHGLNLKADQWIEHCQLICDDWQVEFHSARVTIDARQKGIEAAARDARYQVFKSELQKDEVLVTAQHLDDQAETFLLALKRGSGPAGLASMPSIAVFADTLLLRPLLDYSRNELEKYASKHRLNWIEDDSNQDDRYDRNFLRLHIMPLLNQRWSHFPKAAARSASLCGEQEQLLDELLNESLKELITQDGALGIVSLAVCSEAKRNALLRRWFGYHGMKMPSREQLNRLWYEVALARTDAEPRLQFGKYDVRRYKQKLWLVPQWQSLRETILEWDICNTLVLPDRLGELNIADRGIQVRVPADNERVTIRFGVQGMISIVGRQHSRHSKKLWQELGVAPWLRERIPLLYYNEQLIAALGVFVTKESEAAEGRKMLTMNWHKTLLKZ

SEQ ID NO: 670 - protein, 228 aa, Photorhabdus luminescens
VEINVNKKLLTALVAVGVSALMGCKGNSAQQMSSQPVDQTFHGALPCADCSGIDTTLLLDNDGTYILEQTYIGARDGDQSFFESGLWAKDGEKIRLTKSDDQKSYYLSKGENLVMLDIEGNKIESSFNYELQRVKPKKLAGEYSYMADAALFTDCSTGKRYAVTESLDLEQGYHQVGVEGGTPVYVEVEGYYSVRPSMEDGQFDPALIQTGKIHFDKSKSCNMKKQFZ

SEQ ID NO: 671 - protein, 573 aa, Photorhabdus luminescens
MRTSQYLLSTLKETPADAEVVSHKLMLRAGMIRKLASGLYNWMPTGIRVLKKVEKIVREEMNNTGAIEISMPVVQPADLWQESGRWEQYGPELLRFVDRGDRPFVLGPTHEEVITDLIRNEVSSYKQLPLTLFQIQTKFRDEVRPRFGVMRSREFLMKDAYSFHATQTSLQETYDNMYEAYSKIFTRIGLDFRAVLADTGSIGGSASHEFQVLAASGEDDIVFSTESNYAANIELAEAVAPAHDRAVPTEDMHLVDTPNAKTIAELVEQFNLPIEKTVKTLMVHAAEGTSHKLIALLVRGDHELNEIKAEKLSLVASPLTFATEEEIRSIVGAGPGSLGPVNLPIPAIIDRSVAVMSDFGAGANINDKHYFGINWERDLPVPEVADIRNVVEGDASPDGKGTLLIKRGIEVGHIFQLGTKYSDAMKATVQGEDGHNQIVTMGCYGIGVTRIVAAAIEQNHDDRGIIWPDAIAPFQVAILPMNMHKSYRVKEVAEKLYADLRASGIDVIFDDRKERPGVMFADMELIGVPHTVVIGDRNLDNGEVEYKHRRNDEKQMLKLDNVVDYLKQQLGCZ

SEQ ID NO: 672 - protein, 236 aa, Photorhabdus luminescens
MTDFHFTQIGVIHSPYKEKFAVPRQPGLIEDGGGKLVLLPPYNQPDAVRGLEQFSHLWVIFIFHQTIEGGWKPMVRPPRLGGNAKMGVFATRSTFRPNPIGMSLIELKGIEYRKGRVILELGSLDLVDGTPVIDIKPYLPFAECQPHAMAGFAQQAPSTNMEVVFSPAAEQQLISIQNIYPNLRRFISQVLAQDPRPAYRRREQENREYAAHLLDFNVRWKICGTLTEVVSIDPHZ

SEQ ID NO: 673 - protein, 272 aa, Photorhabdus luminescens
MSVKLKTIATISALLGSLILSGCGQEKQDPNHIKVGVIVGAEQEVAEIAKKVAKDKYGLDVELVTFNDFVLPNEALSKGDIDLNAYQHKPYMDQQIKDRGYKMVTVGNSFVYPIAGYSKKIKSLDELQDGSQIALPNDPTNLGRSLLLLQKQGLIKLKDGIGLLPTVLDVVENPKNLKLVELEAPQLPRSLDDQKIALAIINTTYASQIGLTPAKDGLFVEDKNSPYVNLLVSREDNKDAENVKKFVKAYQSDEVDEAANKIFNGGAVKGWZ

SEQ ID NO: 674 - protein, 218 aa, Photorhabdus luminescens
MSEGMMLLLAKGVWETLVMTFVSGFFGFIIGLPIGVLLYVTRPNQIMENSKLYRFLSAVVNIFRSIPFIILLVWMIPFTRLIVGTSIGLQAAIVPLTIGAAPFIARMVENALLEIPSGLIEAARAMGASPFQIIKKILLPEALPGLLNAATITLITLVGYSAMGGAVGAGGLGQIGYQYGYIGYNATVMNTVLVLLVILVYLIQLSGDHLVKATTRKZ

SEQ ID NO: 675 - protein, 344 aa, Photorhabdus luminescens
MIKLFHINKIFQQGARSINALSDISLHVPQGQIYGVIGSSGAGKSTLIRCVNMLERPTSGQVLVNGQDLTILSDSDLTRARRRIGMIFQHFNLLSSRTVFGNIALPLELDNIPKAEIKKRVDELLELVGLTDKHDAYPANLSGGQKQRVAIARALANSPKVLLCDEATSALDPATTRSILELLKDINRRLGLTILLITHEMDVVKRICDQVAVISGGQLIEQDIVSEVFSHPKTPIAQAFIQSTLHLDIPEDYVQKMQSHPAPNLSPLLKLEFTGQSVDAPLISMAVRRFNIDMNILSSQIDYAGGVKFGVMLAELHGENGGVESTIKFLQDHHVKVEVLGYVZ

SEQ ID NO: 676 - protein, 189 aa, Photorhabdus luminescens
VTQGIPAVFLDRDGTINIDHGYVHEIDDFQFIDGVIEAMIELKKMGYALVLVTNQSGIARGIFDEEQFLQLTEWMDWSLADRGVDLDGIYYCPHHPDATEEQYKKSCDCRKPQPGMLLDAQRELSIDMTASFMIGDKLEDMQAATLAKIGTKVLVRTGKPVNTEAEQAANLIINSLADLPKAIKGIKKZ

SEQ ID NO: 677 - protein, 236 aa, Photorhabdus luminescens
MEFHPPLQSATLIRRYKRFLADVITPEGETLTIHCANTGAMTGCATPGDPVWYSTSDNPKRKYPNSWELTETPAGHWICVNTLRANDLVAEAIAQNAIPEFSEYKKISREVKYGEENSRIDLLLQAEQQVNCYIEVKSVTLLQENCGYFPDAVTTRGQKHLRELQHIAEQGQRAVLFFAVLHSGINQVAAAAHIDHNYSSLLEQAQNSGVEVICYQANMTGKGMVLGDKLTFLLKZ

SEQ ID NO: 678 - protein, 243 aa, Photorhabdus luminescens
MLAIIRGIIVILFSIVVCVSGAIYCLFRPRHPDHVMVFGNMFGRLSKIFGVKIIERIPAEAKHYGPSIYIGNHQNNYDMITMSNAVQPGTVTVGKKTLVLIPFFGQLYWLAGNILIDRANRAKAHGTIAQVVEQIKNRHLSVWMFPEGTRSRGRGLLPFKTGAFHAAISAGVPIVPVCVSSITNGRIKLNRWNNGPVIVEMLPPIDTSGYTKEQVRELAEYCHKVMKAKIDALDEELAAMEKZ

SEQ ID NO: 679 - protein, 317 aa, Photorhabdus luminescens
MIKSERPQAYIGRFAPSPSGDLHFGSLITAIGSYLQARACQGKWLIRIDDIDPPREVPGAASRILHALEHYGLHWDGEILYQSQRHEAYCHVLNQLQQQGLSYYCTCTRQRIHQINGFYDRNCRELNLPIDHAAIRFKQRHPVYGFEDKLQGYLNADPVMAEEDFIIHRRDGLFAYNLVVVIDDDYQGVTEVVRGVDLIEPTVRQIALYRQLNLKIPDYIHLPLALNKDGNKLSKQNHAQPIPLDDPRPLLIEALSFLNQSVIENWQDLSRDQLLQKATAHWDLDRIPRQGKIHIDNMNKVTVSHNNHSQKIHSRLZ

SEQ ID NO: 680 - protein, 522 aa, Photorhabdus luminescens
MISYLSRCTIFNRVANFCRNLLIREGKNNRELQAASERPVTGSDRSAQEEYVTLHSNRQAPYQPLSNVEIPREVEQENPHSDLSITIIPREQHRISRRDISENALKVLYRLNKSGFEAYLVGGGVRDLLLGTKPKDFDIATNATPEQVRKLFRNCRLVGRRFRLAHIMFGQEVIEVATFRGPHEQTGSDDKNQSQQAQSGMLLRDNIFGSIEEDAMRRDFTINSLYYGINDFSLRDYAGGLHDLETGVIRLIGDPETRYREDPVRMLRAIRFASKLNMTISEGTAEPISRLAFLLSNIPPARLFEESLKLLQTGQGYSTYQLLREYRLFQPLFPLIQRYFTENNDSPMERIVNQVLKNTDYRLQNDKRVNPAFLFAAMLWYPLIEHAEKLSQEGGLAYYDAFALAMNDILDEQCHSIAIPKRLTTIMRDIWQLQLRLPRRHGKRANKLMEHPKFRAAYDLLELRANVENRNELKELVHWWGEFQQVNASQQRSMISELGSEIVRRRTRPRRHYKPRLSRNGZ

SEQ ID NO: 681 - protein, 264 aa, Photorhabdus luminescens
MKPMTMTDLNQLKKEKRKFATITAYDASFAHLFAEQGIDVMLVGDSLGMTVQGADTTIPVTVEDIVYHTRCVRAGTPYTFIIADMPFMSYATPEQSCENAAKLMRAGANMVKLEGGSWLYDTINMLTERSVPVCAHLGLTPQSVHILGGYKVQGRDEVSANQLIKDAITLEKAGIQLLVLECVPVDLAKRITDELQIPVIGIGAGNVTDGQVLVMHDTLGITVSPPKFVKNFLEEAGNIRDAIRLYKEQVESGIYPGKEHSFYZ

SEQ ID NO: 682 - protein, 285 aa, Photorhabdus luminescens
MLIVETVPILRREIRRWRQEGKRIALVPTMGNLHDGHMTLVDTAKGQADIVIVSIFVNPMQFNRPDDLAKYPRTLQEDCEKLHQHGVNLVFAPADKEIYPDGMEHQTYVDVPELSTMLEGASRPGHFRGVSTVVSKLFNLVQPDLTYFGEKDFQQLQLIRKMIADLAYDITLVSVPTVRDQNGLALSSRNNNLTADEHRIAPELSKIMRSIAEKMAQGERHTEQLLTQASSQLHEAGFVPDELFIRDAETLAPLNTESKKAVILMAAWLGQTRMIDNQQVDLTQZ

SEQ ID NO: 683 - protein, 257 aa, Photorhabdus luminescens
MIQLYWVALKTIWIKEITRFGRIWVQTLLPPVITMSLYFIIFGSLIGSRIGEMGGVDYMQFIVPGLIMMSVITNSYANVSSSFFGAKFQRSIEELLVAPVPTHIVIVGFVGGGVARGVCVGILVTLVSLFFVPLHIHAWWMIVVTLLMTSILFSLGGLLNSIFAKTFDDISIIPTFVLTPLTYLGGVFYSLTLLPPFWQAVSKLNPIVYMISGFRYGFLGITDVSLIITLSVLTAFIVAFYLVAWYLIETGRGLRTZ

SEQ ID NO: 684 - protein, 304 aa, Photorhabdus luminescens
MTYALELTQLTKTYTDGVKALRGIDLNVEVGDFYALLGPNGAGKSTTIGIISSLVNKSSGKVKVFGYDIDTDIVNAKRQLGLVPQEFNFNPFETVLQIVLNQAGYYGVPRKVAQARAKTYLLQLDLWEKRNQRAIRLSGGMKRRLMIVRALMHQPKLLILDEPTAGVDIELRRSMWNFLQELNAQGTTIILTTHYLEEAEMLCRNIGIIQHGELVENTSMKNLLSRVESETFFFDLATQNPILELVGYDYRLLDASTLEVDVQRGQGINSVFTQLSAQGIHILSMRNKANRLEELFVSLVNNKZ

SEQ ID NO: 685 - protein, 217 aa, Photorhabdus luminescens
MKKIEELLANNKQWSESVNEENPIFFKELAKSQKPHFLWIGCSDSRVPAEKLIDAAPGDLFVHRNVANLVIHTDLNCLSVIQYAVDVLEVEHIIICGHYGCGGIEAAIDGTELGLINNWLLHIRDLWYKHSSMLGELPPNERLNRLCEINVVEQVYNLGHSTIMQAAWKRGQKVMIHGWVYGIHNGQLQDLEVTADSREKLELAYRQTISKLTHKKZ

SEQ ID NO: 686 - protein, 389 aa, Photorhabdus luminescens
MNPINFPIDKKDFLENFFEKKPCVFKKIYDDDFIKHSEIENIFNRSNLPSFEGIKLMYNGIIDKTEYIESYNDLGTRRYRYIYSKLYDYLNSGATLVANGIINETKIDQLAKACSSFTDSHPFSSLYLSYGEKSSFKPHWDSRDIFAIQLSGKKRWIIYKPSFPDPVYLHQSKDMENTYPCPSEPYDDFVLETGDVLYLPRGWWHNPLPLGEETIHLSVGIFPPYAHEYINWLSYKITDIDIGRKSLPRSWKQAKDEIDILAKYVIDNITSEDSYNEFLKSFSDEKRVPSKLNLRLFCGKKHHSISKTSRLRINSNNNLSIDEGYIICNGAKVNLDQFSIHLLSKISEIPYISFENLLSFFDHSKQKNIEDLIYKLGYQDILEIIDDLZ

SEQ ID NO: 687 - protein, 323 aa, Photorhabdus luminescens; identical to SEQ ID NO: 421

SEQ ID NO: 688 - protein, 308 aa, Photorhabdus luminescens
RNTNMFTSRLTMLHLLCESKIHKSKLDSLHEHVESLMKQKENIKDKLTSQQNKLDRLKKNTNRYKLLERKGFISKEHITIAENSESDQLINLSLTKKELIDIERTISEKKFELEELPLKQFIEKQEIDRILASVNQEIINIESQTESVIVASSSGFININNFDLGSHVEQSTLLLNIVPNTKKFSINLYIPSQSIGFVKNGDIVNIRYSAYPYQKFGIFKAKVISISRTAIPAQEVKSIGTVFHTLDIANEPIYLVKAELEKQYIEINKIKKALEIGMTLDADILHEKRKLYEWIFEPLITINKNSIZ

SEQ ID NO: 689 - protein, 756 aa, Photorhabdus luminescens
MSEITHDGVERLPLHSFTETAYLNYSMYVIMDRALPFIGDGLKPVQRRIVYAMSELGLNNTAKFKKSARTVGDVLGKYHPHGDGACYEAMVLMAQPFSYRYPLVDGQGNWGAPDDPKSFAAMRYTESRLSKYAELLLAELGHGTVDWVPNFDGTLQEPKMLPARLPNILLNGTTGIAVGMATDIPPHNAREVVNALVMLLDKPQSSLDDLMEHVKGPDYPTEAEIITSHEDIRKIYKNGRGSVRMRAVWSKEDGNVVITALPHQVSGAKVLEQIANQMRAKKLPMVDDLRDESDHENPTRLVIVPRTNRVDLEQVMNHLFATTDLEKSYRVNLNMIGLDNRPTVKGLVEILSEWLVFRRETVRKRLNHRLEKVLKRLHVLEGLLIAFLNIDEVIHIIRSEDEPKPVLMSRFGLSETQTEAILELKLRHLAKLEEVKIRGEQSELAKERDKLQAILSSERKLNTLLKKEIMADAATYGDERRSPMRERDEAKAMSEHDITPSEPVTIVLSEMGWVRSAKGHDIDPAGLNYKAGDSFRGAARGKSNQPVVFIDTTGRSYSLDPRDLPSARGQGEPLTGKLTVPAGATVEHVLMAPDEQQFLMVSDAGYGFICTFSDLVAKNRAGKALITLPENARVMTPLEINNPQDDMLLAITRAGRMLMFPVADLPQLSKGKGNKIISVQSAAENDLLSWLLILPPQSSITLYFGKRKLTLRPEDLQKFRGERGRKGTSLPRGLQRIERVQVETPPSATNTNVTKZ

SEQ ID NO: 690 - protein, 698 aa, Photorhabdus luminescens
MMKLEKIIFWHSHNLPSILQTEIAECGLACLASISSYHGYQVDLSSLRKKFRIPLTGTNLNDIAYYAKELKLSYRAVKLDINEINQLKLPCILHWELNHFVVLKKISKNTITIMDPSIGFRRLSYNEFSNCFTGIAVEFWPNNDFKKKIDKEKVDILSFFKNISGIKRSLVKILLLAFVLEFFALIGPFYMQLIIDHGIVSEDKNLILLLSIGFGVLLVFEQVINIIQSLLTTYISTNLNIQWKANVFTHLMNLPVSFFEKRHLGDIISKFSSIDSIQNTLTSSFFISICNSLVSATTIIIMTMYNFQLTLISIVTIFIYIIIRIIWYYPLKEATKENIVQSAKLSSNFMETMRGIRAIKIFCKENHRYNSWLTLSINTVNSALKSQRLSLGFSFSNRIIFGIQNILIVYIGTSFIFDNTFTVGILISFLAYKTQFESRTISLIDLFISFKMLGIHIERLSDIVLSETELKSNILLKTETIKSNKIEIKNLSFKYEGNNNYLIENLYFDIQPGDSVAIIGPSGCGKSTLLNLMIGNILPTGGEVRIGGVIVNKTHPKIIRDNIGYVAQDDSLFSGSIMENITFFDEHPDTDKAINCAKIAAIHHDIKKMPMEYETLIGDMGTILSGGQKQRLCLARALYKDPKILFLDEATSHLDTENEKIISSNLKMLSITKVMVAHRKETIESANKLIDLTKKCAZ

SEQ ID NO: 691 - protein, 260 aa, Photorhabdus luminescens
LSMWAAVVIVVLVCGYVYTNSHLPSRFKQNKAIGWNAYFEVARQGGFFLITGFCLALTLSCLIFAVMMLLNIPVYFGAKYIPFTFAHDLFNSRLVGTSIFSFLILSFTVLISISASYNAEKDFRNPEKRNGIFKEIASNSAIESLLLESIESGLLLLITLKSRKVYVGMVDEARFHHLDTDTIVIIPFMSGYRDKDTLTFCAEHNYADHYRNEGITLTSKPLSVYQFRHVLPLEQIESLSLFNPETYDKFQEVIKDKSNZ

SEQ ID NO: 692 - protein, 515 aa, Photorhabdus luminescens
MQRRDFIRLSAVMGLSSMLPVWSRFSFAEFYPVLPIPPQLEPDAAGKIAIEIKAGKSSFKAGVVTKTWGYNGDLLGPALKLMSGKPVTIDIRNHLPEESTVHWHGLEITGEADGGPHAMIAPGGSRTVSFTPEQPEATCWFHPHTHGKTGYQVAMGLGGLVLIEDENSINTGLPNQWGVDDIPVILQDKRLNNEGQIDYQLDVMSAAVGWFGDMMLTNGVVLPQHTAPRGWLRLRLLNGCNARSLNIATSDGRQLYVVASDGGLLAEPVAVNELPILSGERFEVVIDASDGKSFDLVTLPVVQIGMTLPPFDQPLPVLRIQPQLFSSRTILSEQLATLPALPSFTGLNRRRLHLAMDSRLDMQGMMMLSQRYGEQAMAGMGMHHGNMSHGDMHHGGELNFHHANTINGQAFSITEPAFDVKQGQYERWVISGVGDMMLHPFHIHGARFRILSENGRKPAAHRSGWKDIVHVEGKESEVLVQFKHTAGVKHPFMAHCHLLEHEDTGMMLGFTVSKZ

SEQ ID NO: 693 - protein, 290 aa, Photorhabdus luminescens
MSQKEIWSETLHANFGQYFSVDKVLYHDKTEHQDLIIFENATLGRIMALDGTVQTTERDEFIYHEMMAHVPLFAHGNAKRVLIIGGGDGGMLREVCRHQYLESITMVEIDAGVVEFCRQYLPNHNAGAYDDPRFNLIIDDGVNFVNTTDQKFDVIISDCTDPIGPGEGLFTSEFYQGCQRCLNEGGIFVAQNGVCFLQQDEAVTSHKKLSNYFADSGFYQAAIPTYYGGIMTFAWASQNPALRHVDLATLQQRFDNASFTCRYYNPAVHVGSFALPQYLLDALFTGCTIZ

SEQ ID NO: 694 - protein, 265 aa, Photorhabdus luminescens
LHKLKLHGFNNLTKSLSFCIYDICYAKSQADRDSYIAYIDEQYNANRLTEILSETCSIIGANILNIARQDYDPQGASVTILVSEEPMDPKDVDNTENPGPLPDSVVAHLDKSHICVHTYPESHPGGGICTFRADIEVSTCGVISPLKALNYLIHKLESDIVTMDYRVRGFTRDVNGMKHYIDHEISSIQNYMTEEVQSQYYMMDVNIYQENLFHTKMMLKRFDLNDYLFNATPEQLSEAEKQEITHLLKKEIQEIYYGRNLPTVZ

SEQ ID NO: 695 - protein, 648 aa, Photorhabdus luminescens
RFCFFILTMKETAVKIRTLNKITLSLLASSMLYNTPVWADSWLLDGNNYHVTVSDEHSKVTQLKFENPKNHDQIIIDNLFEITLKSGEKLTAKDFQITDISKKHNRIVVSLKHGDIQVRNIITVEDKDKYGSFEITITPQENALELSSVSLMPFRTKTPFVHGSIVSSPIVSDSFFIVPGNPLITTEAYKGSASQKIALSIPLEPGKTLSYKTYIGVYQAGQLRRNVNEFLNNARPREYSPYLHYNSWYDIGYFTPYTEQEALTRINQFGQELVTKRGVKLSGYLFDDGWDNLKGDWGFSQAFPHEFKNLKQAADQYRARLGIWLSPWGGYGKPGEQRVSHAEEFGYEVIDGRFALSGPNYYANFHKRVLNLIQQQNVSMFKLDGTGNADRVIKGSSFTSDFDAAIHLIDDMRSTESDLFINLTTGTKATPSWLFFADSIWRGGYDVEFHGTGSKVQQWLTYRDAETYRNVVRNGPLFPLNSLMLHGIVYAKQAKHLDKQSPKDFADQVWSYFGSGTQLQEMYVTPDLLTTEDWDTLANAAKWSEKNKDVLFDTHWIGKDPTDLAVYGWGAWSPKKSIITLRNPADEVKQYYLDLQSDLELPDDQPSVYDVNIDYGENSSLPKLINKTVLITLQPLETLTFSLTPSKZ

SEQ ID NO: 696 - protein, 287 aa, Photorhabdus luminescens
MYLISSRQMLKKALREGYAVPAFNVHNLETVQVVAETAARLASPVILAGTPSTFSYAGTDYLVSICQDAARRHNLPLALHLDHHEELEDISHKVTAGVRSVMIDGSHLPFEENIRKVAEVVRFCHRYDVSVEAELGRLGGQEDDLQVSSADSFFTDPLAAKAFVARTGIDSLAVAIGSAHGLYHGEPHLDFDRLAAICEQVDIPLVLHGASGIPEVMIQQAIGLGVCKVNVATDLKIAFADAVKRYFIQHPDANDPRKYIAPGKQAMQAVVEEKIRICGSVGKLYSZ

SEQ ID NO: 697 - protein, 298 aa, Photorhabdus luminescens
MAFNDTDAAMAAKAENRMAQALATSQVEQDDYQDTIPSEDLTKGDLNRMAWRSLLLQASFNYERMQAGGWLYTLIPGLRKIHKHPQDLANSMKMHMEFINVHPFDVTFLSGLVLAMERNKEKISTIRAVKVALMGPLGGIGDALFWLTLLPICAGIGASLALQGSLFGPIIFLLLFNIVHFGLRFGLAHYGYRAGTSALALLKKHTKKISHAASIVGMTVIGALVASYVHLSTPVVINAGKASVALQKDVLDKLMPNLLPLCFTLLVFWLMKKGFSPVKLIGLTVVIGIVGKFVGFLZ

SEQ ID NO: 698 - protein, 266 aa, Photorhabdus luminescens
MLIDAILIGLLAGLAGVDLFDGLTHFHRPVVIGPLVGLILGDVQTGLLVGGTLELVWMGMVPLAGAQPPNVVIGGVIGTAFAILTHADPKVAIGIAVPFSIAVQGCITLLFTLFSPMMHKCDQMVKALNWRGVERVNYLGITILFCFYFIVAFLPVYFGADAASVMVQKAPQWLLDGLAVAGGMMPAIGFSMLMKIMMKKSYIAYFILGFISVTFLNMPIIAVALGAFAIALIDFFNRSRMEEAAERSVSTTQSHTQSQEMEDGIZ

SEQ ID NO: 699 - protein, 416 aa, Photorhabdus luminescens
ARGTRSFSMNELFSYTEAWLREHHALHTAREIHQQPELWRQLYQNLQREEALWRPFLQPLLSDPELQLQIVLCGAGSSAFIGRTLAPWLREQCGLNVVAYSTTDIVPSPLQYLDPTRSTLLISYGRSGNSPESVAAVKLADQLLPRCYHLMLTCNPGGALARYAEGRSHVCSLNMPQGSHDQSFAMTSSFSCMTLATVLLLGPLTLEQCDEPLMAMIALCEREREQWQTQIKRLACSGFNRMMCLGSSCFTGIAEEGALKMLELTAGHVTTRYDSSMGVRHGPKFMIERDTLVVMMLSADQYRRRYDLDLWHELNHDGLACQIVALSGTQGKGFTVINSEQDDIWLLFPYLIFLQMLAFETSLALGITPDNPCPTGEVNRVVKGVEIYPYHPPYSPRIKCSRSDYVDTEYFNDPNZ

SEQ ID NO: 700 - protein, 356 aa, Photorhabdus luminescens; identical to SEQ ID NO: 52

SEQ ID NO: 701 - protein, 632 aa, Photorhabdus luminescens
MTQSSYNADAIEVLSGLEPVRRRPGMYTDTTRPNHLAQEVIDNSVDEALAGHAKHIEVILHSDQSLEVIDDGRGMPVDIHPEEGVSAVELILSRLHAGGKFSNKNYQFSGGLHGVGISVVNALSKRIEVTVRRDSQIYQIAFENGDKVQELTVIGSCGKRNTGTGVHFWPDESFFDSPRFSVSRLTHLLKAKAVLCPGVEIVFKDKINGTEQKWCYADGLTDYLMAAVNGLTTLPAAPFVGTFSGATEAVDWALLWLPEGGELLAESYVNLIPTMQGGTHVNGLRQGLLDAMREFCEFRNILPRGVKLAADDIWDRCTYVLSVKMQDPQFAGQTKERLSSRQSAAFVSGVVKDAFSLWLNQNVQEAEQLAELAIASAQRRMRAAKKVVRKKLTSGPALPGKLADCTSQDLNFTELFLVEGDSAGGSAKQARDREYQAIMPLKGKILNTWEVSSDEVLASQEVHDISVAIGIDPDSHDLSQLRYGKICILADADSDGLHIATLLCALFVRHFPTLVKNGHVYMAMPPLYRIDLGKEVYYALDEEEKSAVLDRLSRKRGKPNVQRFKGLGEMNPMQLRETTLDPNTRRLVQLTIDDENYQETFSMMDMLLAKKRSEDRRNWLQEKGDTVDIEVZ

SEQ ID NO: 702 - protein, 432 aa, Photorhabdus luminescens
MQSLLQLIRRHKSGEAVGIYSVCSAHPWVLESALRVAKERKTSVLIEATSNQVNQFGGYTGMQPAQFRDAVWQQADRIGLPRDRVWLGGDHLGPNAWQDLPAEQAMKLAETLIHDYVAAGFRKIHLDCSMSCLDDPTPLGDKEVAVRAARLCQVAERCWQQVGGEPPVYVIGTEVPVPGGAKEALAGMQVTTPQAAATTLSVHQQAWQLAGLEPVWPRVIALVVQPGVEFDHHCIEHYQPERAAALSQYIESQPYLVYEAHSTDYQTAQAYRELVRDHFAILKVGPALTFALREALFALDKIDGEWNGEQGAAHLRATLEQVMLEQPEHWNRYYHGTPHQQFIDRQYSLSDRIRYYWPHPQVQQAVNTLMDNLRGRPVSLSLLSQYLPEQAQAVNAGRLDNDPHSWVLDKIRSVLLSYALACEPEVQGVLVZ

SEQ ID NO: 703 - protein, 258 aa, Photorhabdus luminescens
MAVDTVKRREQIIDLLCHEGSVRVEHLSTRFGVSSVTIRNDLRYLEQKGCALRSYGGAMLNQQFAFDRPLQDKGRINRDVKSRIAARAAQFVQDGDALILDSGSTTTQIAPFLKERRDLVVMTNALNIAYELAGFDRMEVMVLGGSVRQNSYSLYGPAAEQQLRQYRFDTLFLGVDGFDLEAGITTPHPGEAHLNRVMCEVAHEIIAVADASKFGRRSFCLIRQAGQIHRLITDSRIPDNYRRALIELGVDVVIADEZ

SEQ ID NO: 704 - protein, 386 aa, Photorhabdus luminescens
MTKRFSVLTGGLLLTASLGAQASNTADQTRLTNTVDKTIHSLMQEYDIPGMAIAVTFHGQHFFYQYGDASKESNTPVTKETIFELGSVSKTFTGSLISWAQVTGAISFSDKASQHFQPLAGSAFDNINLLNIATYTAGGLPLQFPDEIDSNNKMVDWFQHWQPTYTPGTYRQYSNPSIGLAGYIVAQRLEKPYSKLMENQILSPLGLHHTWFNVPAQEMKNYALGYSKENKPIRINPGVLDEEAYGLKTSAQELISFVDANIDPSRVGDSKLAQAIRATHTGYYRVGEMTQGLGWELYHWPVTLEQVLSGNSAQIAYQANKTTELALPEPPTDALFINKTGSTNGFGTYVAFVPQEQMGIVLLANKNYPNEARIKAAWQILNALKZ

SEQ ID NO: 705 - protein, 439 aa, Photorhabdus luminescens
IAKENKMSIQSLGQTFKTTALSPLSNGEVQTPSRNNNVHHHLASHYTSTGLGTQVSPGKVLTTTLKYLTLSAPARKIGTAIQGGHDSHAQSAKGKARYWTGAIIKGLANITGGTSSVTSGAISVGVVGVKNLAESTGRLLASSALGLAGAGAKGVSHLPLGASDRLQAGTRAEQLLNSAKVIAKPAFVAKAEQEPLNAVGAKAVMDAAQLARISCSSSYRDMPAGYSHATLADIPSSILARREDGTGGTGSELTLHVRPSKGENDPLILEGDSWSALKVAVYKSDDTMVLSFVGTQPTKRPGTVKSDVGAALGIKDSAFQDADRLVKAFTKQYGGKVEVLGHSLGGGLAQYAGIKHGIKVTAFNSMGLHVGLRDRLADKLDSANVTHINTSSDPLSQKAEHGIWGLDASSQVGKRYVIEHSGGHRMESVTAGLEALLAZ

SEQ ID NO: 706 - protein, 751 aa, Photorhabdus luminescens
WLFYAVIFLPRNRPALFKRAACNGSFNGFLRYPRLRIMVQLCRVSNMDGLVFTCRIGALPQTTFQVAQFTLQEELSQLYRLTLKVVSSRDDIPLNEQLGDSASLVITRNGITERTINGMITGAEQGNTDGRSTFYIFTVRPTMWLMTLNQDSRIFHLKSVPEILTILLKEHRILFTRDTLYKRHAEREYTTQKRESAYDFWCRLAAEEGIIFWFEEEQTLFCDCHLGMQADIALTYNTHPETDETDTTAYQWSYGEYLCSNGTVQKDHNFLNPKYSLEHQKQSDDSGHHSVFESYGRFQWDEEGKPFTQLRLEQLRNYSKVGTAKTNCIRLRPGKIFTLQSHPIEAMNDRWQVISVTHHGWQPVASNGGGEGTTLTNEVAFIPGNQDWRPPYRYKPLADGDEVATVVGVGSEEIYVNEHGAIRIHFHWNRYDKADDHASCWVRVAQGWNGNGFGFMAIPRVGQEVIVSYLNGDIDRPIVTGCTYNGLNRPPLNLPLEKTRTTFKTRTLGGQGFNELRFEDARGSEEVFIHAQRDMNTQILRDKTTQIGHDQQTEVAHNRTAIIKNDDDEAVQGGQTLEVGQNQTVTIKGQQALSVGKSHQLNVADNQQITVGKHITVHSESGQITIGNAGGQIVIDPMGNIRIEGVSITMTDHIIGKKSAGALFDYSARYTLLSEHSDKPLVNVPYTITTGEGQVIPGKTDALGRTVTVQSEAEENLQLSSPEASPKPKQTLYRVSGNTQIEYVMEFTEKZ

SEQ ID NO: 707 - protein, 467 aa, Photorhabdus luminescens
HADRVCDGIYGEISMAISNSGKMCPAVTSINCTMEIGVFPADEDPCYLAEKAEYALRLPAMIITKLGAIRFLNQVIMSGLIKVEELKHDFLWPYKAEVVFAIRGEQDVPLPMLATSQDSKQRYGDNLPQSSNPFARPSAEDAEKFGVVSIRRPDIILVKEEALRWPGRNATYFDGSVHPDNLKMLIEVKFPGDKLAEDQEIDYIQIATEDRFGVMRISDNRTEEQKQYDEAWRKHYQPDSQHYKNPIPLAPLPPGSPPDDEALPAPPAEGVPGTIPQPLTKNPPLLSTSRWSFLPSYEDWVVLGQEVAGLAENGLNYVLDSTRELLAQFGSWLNQTGKWVCEEIIDPISHQISYAFSWVNEQTGKIVTWTESEIKARWQTVQQGSDITLEELKNISWMQILKEVGEGMLEMVVIIAGVAVVILVTLAVAAALIALVEILAAAAAVSAAALAAVLTILASVTFATASZ

SEQ ID NO: 708 - protein, 386 aa, Photorhabdus luminescens
MENMMETVDYFAQLRSQLAAFTFLNGDGLTISRLGISITLFFKQGYTQEKKQRILACYRRFREEFGTHLRFHSHSLKGLSKYSPENIIKMEEGILARKKNQLCGWVVSDAKNEDEAPKYLMRYLDSREIDGDDGSSYLSLVLPWDYLKEQEGMTRFMAWLDFLCEQLEPDSGDCGYCLVLPKDYYDYFPLEYQLAQRYPALQVNSAVHTAKLQYGHSIRGINWITLLSKRFVNRLGGEFWIRQVLRPYRDVVITSYRDGLIIRAGEYPDLTPLPGSVPESYFAINQLIRPIRVIPREGHSLHFYGEGHFNSTSTLAWYARYDRSPLQVTPLKGDHPALVSGIWQTDSLPGRQYFFAQGAMAFDVEGAETGTTIWHLIREAANMWEZ

SEQ ID NO: 709 - protein, 414 aa, Photorhabdus luminescens
LTQPILEKIMPISPISGHMPLSQIQVPQHATTSPLLEQGNRLFEQSVRRGPLHFQSSSLKHLCAELRQLQNAPSSMQARRVQDAIQHWENHHPKEVMARSTRLAELKQALAEQGTVGRTLQSKVMATGPQVILKQPMPALPQSIAAQITKAQTGCTTTLVSSATAELIKHNQNNQQHIKDSDGRKPVNNMPPPPPPPMADKTQKVKKWVVNTDSKQLQALRYYSAQGYNLINTYLRGGEYVKHQAIETLLSRNYLHSNEPTPQEFDAGMRAYIQDVTEGLNELAITDHKKVYRGLKFDKSELKNLLDQYTTEGNIIAEKGFLSTSPDKAWVNDTILVINLESGHKGRILGDAAHFKGEAEMLFPPESKMLVEKVLNRDDKEFDSHFSNLRLTDDASADTTRIKRIINIKMLNEZ

SEQ ID NO: 710 - protein, 467 aa, Photorhabdus luminescens
HAGRVCDGIYGDISMAISNNDKMCPAVTSITCTMEIGVFPADEDPCYLAEKAEYALRLPAMIMTKLGAIRFLNQIIMSGLIKVEELKHDFLWSYKAEVVFAIRGKKDVPLPMLATSLASKQRYGDNLPQSSNPFARPSADDAEKFGVVGIRRPDIILVKEEALRWPGRNATYFDGSVHPDNLKMLIEVKFPGDVLSDNQERDYIQIATEKRFGVMRIDDNRTEEQKQYDEAWRKLYQPGSQHYKNPIPLAPLPPGSPPDDEALPVPPAEGVPGTIPQPLTKNPPLLSTSRWSFLPSYEDWVVLGQEVAGLTENGLNYVRDSTRELLAQFGTWLNQAGKWVCEEIIDPISHQISYAFSWVSEQTGKIVTWTESEIKARWQTVQQGSDITLEELKNISWMQILKEVGEGMLEMVVIIAGVAVVILVTLAVAAALIALVEILAAAAAVSAAALATVLAILASVTFATASZ

SEQ ID NO: 711 - protein, 386 aa, Photorhabdus luminescens
RRENMETVDYFAQLKSQLTAFTFLNGDGLTVSRLGLSITLFFKQGYTLEKKQRILACYQRFREEFGTHLRFHRHELEGLKKYSPENIAKVEEGILNQKKNQLSSWVVSDAKNLYEAPRYLMRYLDSREIDGDDDSSYLSLTLPWDYLKGQEGMARFMAWLEFLCEQLEPDSGDCGYSLVIPRDYHDYFPLEYQLAQRYPSLQVNSAVHTAVLQYEHSIRGINWITLLSKRFVNRLGGEYWIRRTLRPYRDVEITPYSNGLMIRAGQYPDLTPLPGSVPESYFAINQLIRPIRVIPREGHSLHFYGEGHFDDISTLAWYARYDRGPLQVTPLKGDHPALVSGIWRTDSLPGQQYFFAQGAMSFDVEGAETGTTIWHLIREAASMWEZ

SEQ ID NO: 712 - protein, 204 aa, Photorhabdus luminescens
LMSTLLYLHGFNSSPQSAKANALKAWLYQHHPDIDMLVPQLPPYPEEAAELLENLVMEHAGDDLGIVGSSLGGYLAIWLSQCFSLPAVVVNPAVRPFELLRDYLGENINPYTNQRYTLESRHIHDLKSMWIEPLESPDLIWLLQQTGDEVLDYRQAVAYLVLCKQTIESGGNHAFIGFEHYFPQIINFLGLSSDGEKKLAKNVZ

SEQ ID NO: 713 - protein, 394 aa, Photorhabdus luminescens
QIIHRLITHGENMETVDYFAQLRSQLTAFTFLNGDGLTVSRLGLSITLFFKQGYTQEKKQRILACYQRFREEFGTHLRFHRHELEGLKKYSPENIAKVEEGILNQRKNQPSTWDISDAKNIYEAPHYLMHYLDSDEDDGDDSSSYLSLVLPWDYLKEQEGMTRFMAWLDFLCEQLEPDWGDCGYCLVLPRDYHDYFPLEYQLALRYPSLQVNSTVHTTLDDYAHSIRSINWITLLSKRFVNRLGGEYWIRRTLASYPDVVISPYSNGLMIRAGQYPDLTPLPGSVPESYFAINQLIRPIRFVPREGDSLHFYGAGHFNSTSTLAWYARYDRGPLQVTPLRGDHPALVSGIWQTDSLPDKQYFFAQGAMAFDAEGAEPGTTVWHLIRETENTTEZ

SEQ ID NO: 714 - protein, 211 aa, Photorhabdus luminescens
MIKVALIDDHVVVRSGFAQLLTLENDLEIVGQYANAKEAWSGLLRNPIDVAVMDIAMPDESGLHLLTRLRQKRPDFRTIILSIYDTTAFVQSALDAGACGYLTKRCGPEELVQAVRSVHQGGCYLCADALKALRQTSQKVTALQVLTPREREIFDLLINGINVKTIAEQLYLSHKTVHVHRANILSKLQCDSTIDLVHYALQHQILMGNPZ

SEQ ID NO: 715 - protein, 530 aa, Photorhabdus luminescens
SGPLRSATPDSHGESMNRGSRFGLLSLFLLIFYSLSWLALWTISFYLNDNGQQAALLLPQGLRLALFILLGRRYLPTLLATEITILLWLSSEQLITHNIILLSPFLSLIPTFIVQQFWWRYPLYWQRLSILLAGVAANSVLQAICLGFTLTAGASHLFLTSLTGGVLLSPFVYLIYEYLRQQHLKNMLQPSDPDPQLRPSLLMWCCLFCLLGLSAQIFMSPEIESLLVILIFIPNVFMAYRYGWQGGVLAALLGSLMITSARQFSGAFNDLGELEMFLTIQALLGIGLGIAISRQQQLAENLQRYRELLEQELTARHNLMKKLVHTEEDVCKSIARELHDEIGQNITAIQIQATLIKRTATTPATEMIAEQINNLAQQIHQSTRQLLRQLRPPVLEEMSLEKALHHLIHELAFKERDIDCQLNYQLPQNPTNETVVFTLYRLVQELLNNISKHAKATRIAIILRQHRDVIELRISDNGIGITEDKRKGGFGLQGIEERIRALGGDWQLSNDNGTRIIVKLPTNSDENQAZ

SEQ ID NO: 716 - protein, 447 aa, Photorhabdus luminescens
MEEPGMQATSQEQISQHYRRWRSRLLISMIIGYAAFYLTRKSFNFVMPVMQLELGLDKGHIGWITTLFYLAYGSSKFISGVFHDRTGYRWFMGAGLVMTGVLNIIFAFCSSFSALLIIWTLNGFFQGWGWPPCARLLTHWYSRNERGFWWGYWNISINIVGITVPMLSAFLATTYSWQTALMMPGIIGILLGIWLCYQLCGTPQQHGLPSVGQWRQDSLELRHEQLSHPMPMMQILRDTILTNRTIWLLGCSYILVYLIRMAINDWGNLWLSETHGANLLSANATLSLFELGGLTGALFSGWGSDLLFRGQRAPMILLFALGLFMAVTALWLTPIHHYTLLAVCFFSIGFFVFGPQMLIGLAATEYCHKQAAGTVTGYLGLYAYLGAAIAGWPLSQVVAHYGWSGMFALLTAAAAMMGLLLMPMLMADVSKREHGVASRLSNNKQFZ

SEQ ID NO: 717 - protein, 344 aa, Photorhabdus luminescens
MKLKPLSTLIAAGLVVAAFTNSAQAAGRLIVYCSATNALCETETRAFGEKYNVKTTFVRNGSGSTLAKIEAEKRNPQADVWYGGTLDPQSQAGEMDLLEPYKSPNLTQIMPQFRDPAKRKGNYSSAVYVGILGYGVNTERLKEKNLPIPTCWKDLTKPIYKGEIQIADPQSSGTAYTALATFVQLWGKDQAFDYLKKLNTNISQYTKSGIAPARNAARGESAIGIGFLHDYSLEVENGAPLKLIAPCESTGYEIGGVSIIKNARNMDNAKRFVDWVLSKEAQELSWKKGKAYQILTNTTAKASPLALKLSDLKLINYDMDKYGANDVRKELITKWVTEVKMAKZ

SEQ ID NO: 718 - protein, 734 aa, Photorhabdus luminescens
KWRNKVSQGRITSALRSYPSGYFMFPHQWIASYCCYHTIIKWKEIMSHAFRQKQDAVFWWIALMWLAFALLPSWSLDYGLFESTQDELLAAYGWNGLNISLLWFLLPSALLLRPLTPANRNQPYRHYFDAGYALLCALFVVISAAIIGRGLGYATIFLFISLGAMITLALSRLEWLGGDSFVIGSLVAVIALIGLFILYPSIAIFIPMFTDDAGQFAPFAFISILGQAHIIQVIINSVLLSLAVGAGCTFFGLVLAIYTARIARRSAIIGRVFSILPIVTPPFVVGLGVTLMMGRSGYITEFMATWFGLTNTNWLYGFTGIWLAQVLAFTPMAFMILDGAIKTIHPSLEEAAYTLRANRYQTFFNVFIPLLKPALANAFLIVIVQSLADFSNPLVLGGSFDVLATQIYFYITGSQLDYQAASTLGASLLVFSLLVFCVQYLWIGKRSYVTVSGKSYRGDVQPLPTSLVWGVCAILFIWVVFNILLYGSIFYGSFTVNWGVDYTLTLDNFIKLFGQGMHDGAWPSLLDTLLYAGIAAPITAILGLLIAYIVVRQEFRGKKTIEFTTMLCFAVPGTVAGVSYILAFNDSPFYLTGTAAIVIISMTMRNVPVGIRAGIAGLGQIDKSLDEASLSLRAGSMKTILHVLLPLLRPAILSALIYSFVRAITTVSAIVFLVTPDTRVATAYILNRVEDGEYGVAIAYGSILIVVMLAIIFLFDYLIGEARISRSKAKNTQZ

SEQ ID NO: 719 - protein, 352 aa, Photorhabdus luminescens
MTQQNFVELKNVTKRFGNNTVIDNLELSIPQGHMVTLLGPSGCGKTTVLRLVAGLEKPSAGKIFIDGEDVTDRSIQQRDICMVFQSYALFPHMSLGENIGYGLKMLGQPKAEIRERVKEALELVDLGGFEDRYVDQISGGQQQRVALARALILKPKVLLFDEPLSNLDANLRRSMREKIRELQQQFNITSLYVTHDQSEAFAVSDAVLVMNKGKIMQIGTPQTLYRQPASEFMASFMGDANIFPATLATDYVEIFQYRLPRPANFTTNRQSVTVGVRPEAITLSRNGNISQRCTISHVAYMGPQYEVTVDWQGQTLLLQINATQLQPDVGDNYYLEIHPFGMFILTEKNSGZ

SEQ ID NO: 720 - protein, 1483 aa, Photorhabdus luminescens
WNKKILIEVQDMKNIVAKKLAESVRDGLVGYYLGHISKTDNVPDLKTPDDLYQYLLIDNQVSSQVNTSVVAQAISSVQQYINGIMLNMEPGYDYQYEDKVKTWNNVLSQYNIWAGFQQLSNYPENYISPILRHGKTSDFKELEDNLNKGKLSDEVVQEVILNYLNKFEEISNLELMSGYINATKELAPAQAEYYFIGKMNITPGQYYWRSLNMANRNVQDVINPTAWKEWEKIGIPATGEVIKIRPVVINGRLHIVWLAHEADNSKEENYYSINLIYRKFNGEWSLPNKLRTFTGDKSKINDSFELIALMDLRAEPVLVISAICKPVKTENNTSGEKNYPYSCNLLFNEVPVPLVGEKSLDLYIYQQIKSNPTQDLTQSNMLSAYFGDAYKLVDKPVYLESGSYPGLATKKMTLFAEMGSGKLRLSGNNSLSIGKEIIRSVACDINLKSKSSEAGKVNISLADGAKENNGKITVSVAVTINDNSYASGDYFYIMFNSSQSGYPELNVNFSEWGQKQGNVYHFTKEMEVPLSGLQEAKVFSSELNKSGGKLVASGEGTPKIDIDHSGSREADFCLWHTNGGSDSLLYSERQLLNGKSIISTVELDLDKINGKDSSVFLKLGYKKEGEDADLGYNHYEVKLSKTSYPNLLLTYNKKTQAQYLDITELQFKYRSIRLNTLFGKELISRANNSIADVLSWEAQNIKEPLIPGGGENNDSALNGANSIYFWELFFHVPYLVAYQLNASQQYQDAQNWLHYIFNPGVKNKANGSPSYWNCSLLEVSQDNSVQLKRLQDPDAIAYADPVHYKKAIFQMYVQNLIDFGDSFYRFLTNDGLNNAKLRYLQAQQLLGQRPDFDLVSHWLPLELADVTSSKNNKLREFESNIDLDILIDLPATKVSAYTVVDNAIFRVPLNNDLLWYWDILSSRFYNLRHNLTLDGKPLSLPLYATPVDPKNLLALLANGGSLLAAGSTGILNIPPYRFRALLPSVYHAVDTLSHFGDLLLSTQERKDCAEQEELNQLHLKELAIFAISLQKDAVVIAEKGKEALLKSQQTLQQRIDHYKALYDENISTDETYALNLQGTAKIISSVEEGMLTAAGAASLIPSIAGTSFGGQQWHMPLVCTAGITRTASLIMQMASDTLSVKAGYNRRREEWEIQYKQAESELEMLKKQIEQQEAQISAANTTLQQSQAQLQKEQDMYQFFTVTRVTKSSLYQWLNDQMMSLYRQAYDAVLSLCLNAQACWQYEMGDFATQFIVQNSWDDNHNGLLVGEKIKLNLLKMESAYLNRNERRLELTKTISLKNLLSGTKKWDDIQSELKTGEGVTFILNEKLFDQDYAGHYLRQITSVSVTLPTLMGPYQDIKATLTQTKCYTLKTPDINGVKYLLSNKEGDNKQIVTNLRASQQIALSSGINDSGTFNLNFGDDRYLPFEGTGAVSDWKLTFPSAATDNIQRDILDNLSDIILHVRYTAKDGGEAFAGQVRELLKZ

SEQ ID NO: 721 - protein, 982 aa, Photorhabdus luminescens
MTNDISPLLKRLGDKYNFTDKIIESGYKSIFDIIRTPRHLFLEKYNSNHQVADIYDTANSYAIQISHKFRQQHYIHNTYTSRQVDRKFLRQRYVHNTYARSYSSLSLKEVPQYQSLFQDNWQQYCPNGAPEANNSPVAYLAEIYKLAMDIESNADAEAIKIDERRADLAHLMLDEVSINQEISALSLVNTMLSQRLEAMLKQQGKTNLSSYDLLANVRYPFQLPYDYAQNQINLTFDNRKLFCLKMMQQTDKSYPYFLKSNLNTANGEFVTPLANQLGISQQKIINEPLKPSNKQFYRDNYGVNSAGLLELLSIFTAQTALSVAEVEQLLCVKGISTNKGGTLEQNNVRLSQNVLNLGLPAAPYHYGAVFINGPKAKESDFLHLYREFVSNDNLPQAVNKLSGVNHERFDRLNRMIRLWKWIKLPVDKIDLLVTATMRAEGDANKQLQMNENTLRMLGIFHHWSKKYHISPDDFAALIYQITPFSMGKDIPFFDQIFNLSSLFDAPLVIDDREFYSEKKQDDNIINKLCAGLKIKEKDFSLLAPLVAESMGKKSLTCSLSVVSAFYRIVQLSRILGLTPQEGVVILTLIGGNKVLKQVTGMPYLSQSGNNRQTDILDIMIAMEQTIEWLRINKLSVGTLQLFLLPANEVIMTGNAAQVAFINQVGLHRNSEILTLESLSSNILPALDDNDNLIDWLTPRQTVLNAVSHQKYGLVKHNVNIIDEINKTIKSILLDDKIKVSITEQWAAIINQAQSAQNAISASMLANAFQLSQPFPLFILNWIGSSSYDFLLKSFELFDKKNLQPEMISQDYLILMYDLSRYISVIKTFRLSTVMLHHFSEHPEWFGCQNTQLSLSVIYYFSRYRDWIKLVASLDNAEDKILRYLELVNTNNQSNDKTNMVKILTELLSWQRDEVLSANSHIIGKEDNTAKTLAEIDIMMRLKFWSEEMALSMHSLLATININAHSSYQDYKQVGIAMVATLZ

SEQ ID NO: 722 - protein, 770 aa, Photorhabdus luminescens
MATEDSIIDDFNGKTKTLGWDIIAAYDRTKINMLFEQQYVRKVSEGAHFSPIFWESENKKIKFDNLILGVPLISFENSSIEGSQATVKLNFISGTIIELYDDGRVKNYQRITPNNNYHMTITVDLIAATGSVDNNGKVVVEFKKGILGVVNVINDAPAEVKEFFRNWLKDNDVTYELGILKLDNMVGLVPQMFKIRTQPAPGANLYGSDNYGHGAVLLFIATNYNPNGGVLPTSSSNFPYLIPDNRSAMLIISNKTLFENILKPQYERLLPSPTGVNLELVKLDSQADDSASYLKITNGYAESDEPVQYEGGGYKVWTGLSKGETNIWLEKVKIPYSGMYIKPEKEKIIFSGEDNNGHSYHFIQTFGVFYDSAISGGWNDSKIDFYIDGSIDITPHVKSNDEIELKLNNRMSTRYDKQDEPVWGIHFYPKEKFVNKTAEVVKDIVENNLSNVAKIKLDSISLFAVNHLLFPESNYLEFDKVYVPGDMVLFGDISPTSTAFRINDLQLTIPLKAKHKFTTNTKATVNWSITPAELGSINANTGDYMAPTKIKGNNQIVTITATDPNTNAKASAVVILVPSSVSISPSFVVINENDVNKNANFTVYGDKKVNWRVETGTGYGVVDANGKYTPPAAFPAGYNMVTVTAVADNGDLDKVNILLISKNTKAEFTINPSYNQELLTPDAVMKFSSVGNDLTSPSEWSLMPERGNIKVGEPEVTKDEFGNDIEKYTATYTAPSDITCSEIVLLRVTHKNKPNRAGYALITLEPKISZ

SEQ ID NO: 723 - protein, 280 aa, Photorhabdus luminescens
LESQFELPVVEGTTAKILQITDTHLFASKEDTLLGINTYRSYQAVLDAILKQNADIDLIVATGDLVQDQSLEAYRHFADGIARLPAPCVWLPGNHDYQPAMVDALAAAGVSPSKQILVGKHWQLLMLDSQVQGVPHGELSEYQLEWMKNCLDRHPERYAVILLHHHPLPSGCTWLDQHSLRNSHILAQYLQSYSRVKAMLCGHIHQEMDLDWNGIRMMATPSTCLQFKPHCTNFMLDTVAPGWRYLELSVADNGEFGLTTQVYRLASNEFCPDLDSDGYZ

SEQ ID NO: 724 - protein, 323 aa, Photorhabdus luminescens
MKNISVYDDVIAAARRIEAYAYRTPVLTSRTANEMTGARLFFKCENYQRMGAFKFRGAFNALSQFNDEQRRNGVVTYSSGNHAQAISLAARILNISATIIMPFDAPVAKVAATEGYGGKIVFYDRYTDDREQISRELSEKQGLTLIPPYDHPHIIAGQGTAAKELFEEVGELNALFVCLGGGGLLSGSALAARHFSPECKIYGVEPETGNDAQQSFRQGKIIHIDTPKTIADGAQTQHLGQYTFDIIRKNVDDIFTVSDEELVDAMRFYAERMKMIVEPTGCLSFAAARKMCESLRGQKVGIIVSGGNVDIERYCSLLAKQPZ

SEQ ID NO: 725 - protein, 211 aa, Photorhabdus luminescens
RVMAMIDSKTKTHFTGTRKKTYTLLINAALALFEQRAIPSVSELAMHAGVSRATAYRYFPTQSDLIDAIVGASLGPILTWKPASEKTEERITELLDFAYPRMFQYEGALRAALLVSLQQWAQGCLSEGKQEKKLVRGHRKDILAMVVEPLKGHFPPDILENVIRSFSLIYGSEVFLVMKDIWQMDNAEIIEITKWMAKAIINQAHRDSELZ

SEQ ID NO: 726 - protein, 415 aa, Photorhabdus luminescens
VVSTREVFIIIMKKSQGYVYIATIFDTKRTEIFYVRDLIKKAGLAVRTVDLTTQSDSPQRGADITAQTVAEHHPQGKEAVFCGDQGQAISAMSVAFNLFLSKQPDVLAILGLGGSCGTALITPAMQSLPVGIPKLMVSTMASGDVSGYVGVSDISMLYSVTDVSGLNRISRQVLKNAANQIAGAVYFHEENTIEDKPAIGLTMFGVTTPCIQLLTRELEQQYDCLVFHATGSGGKTMEKLAESRLLYSLLDITTTEVCDYLFGGVLACDADRLGAIARTQIPYIGSCGALDMVNFGHLNSIPERYKYRQFYRHNSQVTLMRTIPEENRQMGIWIAEKLNQCEGKVKFIIPEGGFSALDIKDGPFWNPDANQSFINAFEATLIETENRQLIKSPHHINSPDFCQQVIKEYRQMMAZ

SEQ ID NO: 727 - protein, 415 aa, Photorhabdus luminescens
MATLPIKKSSPSLFGGAMIIGGTVIGAGMFSLPVVMSGAWFYWSIATLIFTWFCMLHSGLMILEANLNYRIGSSFSTITKDLLGNGWNIINGITLAFVLYILTYAYISASGSIIQHAMREVSIDFSPGFAGFLFALVVAFIVWLSTKTVSRMTSIILGAKILTFFMTFGGLVYNVKPAVLFNTTEVNPTYWPYVLMTLPFCLASFGYHGNVPSLMKYYGKEPEKIKRCLFIGTSMALVLYLIWLIGTMGNISRPDFVEIIAKGGNIDVLVQSLSGGLNSSALGLLLTLFSNFAVASSFLGVTLGLFDYLADLLKFDDTKLGRFKTALVTFLPPMVGGMIYPNGFIHAIGFAGLAATVWAAIVPALLARASRKRFGSPMYRVWGGNVMIGLILLFGVLNAAAHILSNFNLLPVYSZ

SEQ ID NO: 728 - protein, 467 aa, Photorhabdus luminescens
MKRIPEPFRIKMVENIRMTTRAEREKALEEAGYNPFLLPSDAVYIDLLTDSGTGAMSDRQWAGIMMGDEAYAGSRNYYHLCDKVNELIGYQYTIPTHQGRGAEQILFPTLIARKKAQGGATHPVFISNFHFDTTAAHVELNGAKAINVVTSKAFDTTTYYDWKGDFDIDELEKTIAEHGADNVVAIITTVTCNSSGGQPISLANMKAVYEIAKQHDIPVVIDSARFCENAWFIKQREKGYENKSVKQIVKEMYQYGDMLTMSAKKDPLVNIGGLCCFRDDEDLFNEVRTRCVPMEGFVTYGGLAGRDMEALAIGLEEGMNEGYLAYRINQVAYLGNRLRDAGIPIQYPTGGHAVFVDAKLLLPHIPGEQFPAHALNNELYLEAGIRSVEIGSLLLGRDPKTGKQKPSPMELLRLTIPRRVYTNDHMDYVVEAFISLKERIPQIKGLTFTYEPSVLRHFVARLKPIKZ

SEQ ID NO: 729 - protein, 447 aa, Photorhabdus luminescens
MHQTDVTERSLFSLSWPIFIDILLHLATLLINTYMVSHVSTSYLAAMAVGNQVFDLFITIFNFISVGCSVVIAQYIGAGKRDKASQAIHISIAFNFLLGFSCALITIFFGYKILSIMNMPEHLMEDGFNYLHILGICLIPEAISIILAACLRVYGKSKPAMYVTLIANLLTVIGNMIVLYGFFGLPKYGLEGVAWSTVFGRIVAVILLFCLLSYGLRIKFTLAGFLRWSQGMLGKILYIGLPAAGENVVWILQYMAAIAFIGLMGEISLAAQTLYFQLSLFVMLFGIATSIGNEIMVGHLVGAKRFEDAYIRGINSLKIGCIVTIGVVTAFWLLRMPILHFLTQDEAIIKLLLPLFLLSVFMEPIRTANIIMVNALRASGDARFPLYAAIFFMWCIAIPVGYFLGIKMEMGILGIWIGFFCDEWLRGLTNIWRWKSKKWQTKRLDIZ

SEQ ID NO: 730 - protein, 259 aa, Photorhabdus luminescens
MISKETFEIFPSVDIVDGIAMTSNSAIRLTRGESSTLRRPLGTPAEVALAWQNAGAKWIHVVDLDAASGRGSNSHLIADVLAAVDINVQVCGGIRDETILRKVLATGCQRVNLGTAALENPDWCAQAIAEYGDKIAIALDVKSTSEGYQLATHGWNVSKGNLWDLLERLDKQGCQRYVVTDVERGGMMSSPNFTLLQEVCAKTSSPVIAGGGVSSLDDLRALADLSTIGVEGAILGQALHIGKVPLEDALAATQSPRRZ

SEQ ID NO: 731 - protein, 418 aa, Photorhabdus luminescens
GSSRRCPCCNTITETLNMSESLSPTLDLRSIGLLGELRGVPETDYLTKEVMALPGLLTEKPAFVGSRGAAYYEQKSCHELLMTAKYYTEYIAQLECSDKLCTAPSKYILADHSLAKLLRIVDSLLSSPQTVNEDIVSFIDGIKECAKVVSSTLMGTPFTFSPSPIHDLKLPLATEHKMPRPFIEGDNHLLTLAAAQIDKCPNSSVVGIMLGGSAAAAVTAAAWDSELNLVKVSRYDDTSHKSSHLWGRKIPSGRTVTIIDDNCGTGDTLRQAIDLVMAQTGQRPKARAVELHWEKLLRTRVYGHADRVFNPETLDVLTPWCFRHHQVLNRLIDQPFADDKYVHTTTADWVAYSYSLLSVLHDTLTNSTWAAKLLRFLLNLKAQTPLNYEQPIDAFKALAHQCPECSARKNSFEKGVNZ

SEQ ID NO: 732 - protein, 222 aa, Photorhabdus luminescens
LIMTTAHIIWDWNGTLLNDVNVSLSATNFALAEMGIDPLTLEQYREYYCVPVQTFYKQVIGREPSSSEWSVIGKIFNFHYRPGIQKASLTEGVSQLLASRYETGATQSLCSLMEHNELVPMLDNHGIGKFFTQIDGRNTPLLTTGKSEQLANHLKKLNVAPEQSVVIGDATDDAIAALAAGTHAILYTGGTHSRVSLETAGVPIVDTLSEALLIADSLIQKZ

SEQ ID NO: 733 - protein, 420 aa, Photorhabdus luminescens
MLTAVVGLQFGDEGKGKFVDYLSGNINNIARFNGGANAGHCVQHGNLRGSFSQLPASLNKKNLYICQGALISLPILVKEIDFIKKEDIDSHIFIDPRCHIVLPLHAELNRASEKYKGKQKIGSVGVGVGACVEDKANRHGIRLIDTFDKEKLRSKLEFLWSIREKQINHVFNAQASLDFEEMLETTHQYGKRIEPYFTFTNEIIGDLLNSGEDVLLETSQATFLDNSFGTYPYTVAYQTLVQTCFAMIGIPAQKMHIVGVMKSYMIRVGNGPFPTELSTEQADYIRERGNEYGTVSKRPRRCGWLDLSLIKHAVKLNGVIELAITNVDVLAGLDEIKVAVAYEIDDKLVCCDNALLQLDRAKPIYKTFKSWSTLNSSYTDLTELPIELIDFLSFIQDYTGVPIKYISYGPDRNQTLVVKZ

SEQ ID NO: 734 - protein, 214 aa, Photorhabdus luminescens
MHKKPLTPVMLDKQDIEIIAKKSLYNGFFKLTNYRFRHRLFAGGWSEEVSREVFERGHAGALLPYDPRRDEVVLIEQIRIPAIETKATPWLLEIVAGMIEEGEDVEQVVRRETMEEAGIEVKRCRPVLSYLSSPGGTTERISVMVGEVDATTATGIHGLSGEHEDIRVHVVSREQAYHWMEEGIIDNAASVIAIQWLALHHEKLKKEWNSDNSZ

SEQ ID NO: 735 - protein, 399 aa, Photorhabdus luminescens
SQRFEQMGHLERRRMLNTERLWGCHVENPVPTLIGLGISLLFLLTALPLQAAERYQDCEIELVQMVRHVTGYATVPNNKDKRDYSRDEIVGYTTSGPLDWSTTCRVPAGTQFMAYTVESGTNPLISSSSPSHVRVGRSGDFMVDIGQSSLSCQTHGLSGTYRSASLTGRSAGVNIPCVPDANGLVDVSVRTVTGAIYPDSDGNFNAKAGGSPLSVGAIGWIPAAISGSNGRLKPLWTTVILSSVKKPSTCAVVLTPSSVDWGTVKRAGKQAGDPLAPARQIGISSTCSGDDAVFQNSRLLYRIDGPFVPGKPHALASSIDQVAFAFFDFANKPLSLSTGHRGAGQSARYVKLGDDSYTASTQLSVVPILLKTDGAGGQAKAVAVISVWSDINFVEPSAZ

SEQ ID NO: 736 - protein, 882 aa, Photorhabdus luminescens
AMTINILFSSVRPTGSQCSPGQPGSFRLRPVYVCLLCSLTATTLPTSAREYFNPAFLMGATGEQEHIDLSAYENAGYVAPGRYLVDIYMNQDKVDNREIEFRLVDDHLQPVLTVAQLEEYGVNIRGLPAFQGKASDSPITDLTKQIPHASTILDFARLRLDLSVPQAAMQPHHSGMVDPSLWDNGIPAFLMNYTVNGSEGRYDGQEAGGGSRSRNLFASFRNGLNLGPWRLRSTQTYSYNRQRNGGPAGFSPSTQIQWQVSNTYLQRDVQSLRSEFTAGEIYTGGDIFDSIPLRGMKLVSEEAMLPESQRGFAPEITGVASSNAQVTVSQNGYTVYQTTVAPGPFRFTDLYTTGDSGDLTVTVKEEDGSSRVSTLASSSVPMMQRPGGIKYELTAGQYHGGNLTDGSRSPVFALGSLIYGLPHNITLYGGGLAAGNYQSGVFGSGVSLGALGALSADVTFARAQLQGVKGQENSWQQGQAYRVKYAKNLISTGTNIDLAAYRYSTQHYYSFSDVNSMGYSLNEYQVPWALDRRQNTWQLSLHQTLGRWGSLYASGTRNDYWNGRTDNNLNLGYNAMLMGISYNLSYNIYRMEGAGNWSENRQVSFNMQVPLSLFGSSSALRGVYSRYTASRDSQGNLTQQTGISGMLWDNRLNYNLQQGWGNRGQQNSRALSLSYQGSQGNVNLGYNDSTNSHHFTYGASGALLIHPYGMTLSRSLGDEAVLVRAPGAKGVTVGDGNVQTDWRGYAVLPGGSVYHKNTINLDPSTLSEGIDIDQTSKNVYPTRGAVTLANYQVRSGSQLLLTLIHHGKPVPFGATATLEENANQAGSGIVGDNGRVYLSGMPPAGRVKVKWGNGAAQQCTTRYQVPPDTPGQLVQADAVCLZ

SEQ ID NO: 737 - protein, 296 aa, Photorhabdus luminescens
IRPCFIQRWKVKRVSNGNGRAPGGSMIYPFCFALLLGGLLKVQAAENPGLSFSPMQLSYVANDSPRGVTLSMINHTAQNYLVQGFVSPMDPDTGRFDTQTGQVPPFIVLPPLKRVEAGEQFSFRIRQLGGQLPSDRESAFVVSLRAIPGVAVPDMGAPERQTGKDSQVQVALQMNIRLFYRPQGVPARDNATVAKQVKFSLQGTQLRVENPTPYFLTFSVLKVGGQQADDRTRQAMVPPKGIQNYSFQTHSFQTHLFQTHSFQTHSFQTHSFTAGRSGSLVWRFPGDSQDRHVPLZ

SEQ ID NO: 738 - protein, 250 aa, Photorhabdus luminescens
VETGRVRPAWYRLVLLVFWLGLGMSGMESCRAAGISLNKTRVIFTQGERAQTLTVVNTTPQAWLVQVRIMEDQEKIAPAFVVTPPLFRLEANSQNSLRILPTFNQPLFPVDRESLGYVQMNAIPATQQMTDESVREQASMSVGMRIKFFWRPHSLPLLPEAAYGQLRFQSQPDGIKACNPTPYFLSLDSLTLDGQALDLNRYPSMIAPQDCVTYVGQVSQSSVSWSMINDYGGASNLFTAKVVTANVARZ

SEQ ID NO: 739 - protein, 243 aa, Photorhabdus luminescens
VMSVKRLMTAMIVTGLLGWPVTSAQAEGVGINTTRIIYPADSRATTASVSNTSKEAVYLIQATVSSTSTGDKTAPFLVTPPLFRMEPDSQNQVRIIKTGPSLPADRESLFWFTAKAIPLSSESDNRSQRNVSGGIQFAIANTIKLMYRPSGLSVSPEQGFGSLRFKPTAAGIMVTNPSPYYITLTSLKVGGQEVMTQQKVNMVSPFSDLPLLLLKGGRYPAKVSWTVINDFGGESTYQGEIPZ

SEQ ID NO: 740 - protein, 390 aa, Photorhabdus luminescens
FGERRMLNTERLWGGEAENPVPTIMGLGVSLLFLLTALPLQAAETYQDCGTELGNKVSNVSGYAMMPNNKDKRDYSRDEIVGYTTSGPFDRSTTCRVPPGTQFMAYTVGSGTDSLISSSSPGSVRVGKAGDFMVDIGQSSLSCQTHGSPDTYQSASLVKGNAGVNLPCVPDANGLVDISVRSVTGAIYPDRDGNFNAKPGGSYLSVGSIGWASTAVSGSSSIPTPLWTTVILSPVKKPSTCAVVLTPSSVDWGTVKRAGKQAGETLASARQIGINSTCSGDDAVFQNSRLLYRIDGPFVPGKPHALASSIDQVAFAFFDFANKPLSLSTGHRGTGAEARYVKLGDDSYTASTQLSVVPVLLKTDGAGGLARAVAVISVWSDVNFVDPSAZ

SEQ ID NO: 741 - protein, 882 aa, Photorhabdus luminescens
AMAINTLFPSALRTGNQRAPGQPGSFRPRPVYLCLLCSLTATALPASAREYFNPAFLMGADGERSHVDLSAYENAGYVAPGRYLVDVYMNQNRVDSREIEFRQVNGHLQPVLTVAQLEGYGVNTRGLPAFQGKADDSLITDLTKQIPHASATLDFARLRLDLSVPQVAMQPHYSGMVDPSLWDNGIPAFLMNYTVNGSEGRYDRQGNWGGSRSRNLFASFRDGLNLGPWRLRSTQTYSYNRQRNEAAAGFSTPAQTQWQVSNTYLQRDVPSLRSEFTAGETYTGGDIFDSIPFRGMKLASEEAMLPDSQRGFAPVITGVANANAQVTVSQNGNIIYQTTVAPGPFRFTDLYSTGSAGDLTVTVKEENGRTRVSTIASSSLPVMQRPGGVKYELTTGQYHGGNLTDGSRSPVFAMGTLVYGLPHNITLYGGGLVAGNYQSGVLGSGVSLGAFGALSADVTLAHAQLQRSKDQEESGQFGQSYRVKYSKNLLSTGTGIDLAAYRYSTQHYYSFSDANSMGYSLNEYQVPWALDRRQNTWQVNLRQTLGRWGSLYASGTHNNYWNGRTDNNLSLGYNAMLMGISYNLSYNISRIRGEGHWPENRQVSFNMQVPLSLFGSSSALRGVYTRYTASRDSQGNLSQQTGISGMLWDNRLSYHLQQGWGHSGQQNSRALSLGYQGSQGSVNLGYNDSADSRHVTYGTSGALLIHPYGLTLSRSLGDTAVLVRAPGAKGVTVSNGNVQTDWRGYAVLPGGSVYHKNTINLDPSTLPEGVDIDQTSRNVYPTKGAVTLANYQVRLGSQLLLTLTHHGKPVPFGATATLAGNAAQAGSGIVGDNGRVYLSGMPSAGHVKVKWGNEANQQCTTRYQVSSDTPGKLVQADAICLZ

SEQ ID NO: 742 - protein, 271 aa, Photorhabdus luminescens
IRPCFIQRWKVKRVSNGNKRAPGGSMIYPFCFALLLSGLLKAQAAENPGLSFSPMQLSYVAKDSPGGVTLSMTNHTAQGYLVQGFVSPMDPDTGRFDTQTGRVPPFVVLPPLKRIEAGGKFSFRIRQLGGQLPPDRESAFVVSLRAIPGVAVPDTHVPERQTGKNSQVQVALQMNIRLFYRPKGVPARDNAAVAKQVKFSLQGTQLRVENPTPYFLAFSVLKMGTQHVDDHTRQTMVPPKGIQTYSFTAGGQGPLIWRFPGDNQDRHVPLZ

SEQ ID NO: 743 - protein, 251 aa, Photorhabdus luminescens
QVSGGVVETGRMRTTWYRLAPLLFCLGLGMAGTEPCQAAGISLNKTRVIFTQGARAQTLTVVNTTPQAWLVQVRITGDQEKTAPAFVVTPPLFRLEANSQNSLRILPTFNLPPFPVDRESLGYVQMNAIPAAHPMANEHARDQASMSVGMRIKFFWRPHGLPMLPEQAYGQLRFQSQPGGIKACNPTPYFLSLDSLTLDGQALDLNRYPSMIAPQDCVTYVGQAGKKAVSWSMINDYGGASNLFTANVAGZ

SEQ ID NO: 744 - protein, 458 aa, Photorhabdus luminescens
MKKLLSIFIAMSLTGLSSMSQAEDLLQVYKQAKEGNPELRKSMAERNKAFEKINESRSPLLPQLELNTGYAYNSGYRDQRDTESNTLNAKLGLTQTIFDMSKWRLLNLEEKTAGIADVTYQSSEQKLILDSATAYFKVLRTIDTLSYIEAQKAAIYRQLDQTTQRFNVGLVAITDVQNARANYDDVLAQEVASRNELDNALEALRQVTGIYYPRLASLNIDHFKTQKPEAVDILLKEAEKRNLSLLSARLGQDLAREQIKAAQTGHMPTIDLGASTNVSNSQNHAPGRSNNYSGENSVGLTLRLPIYSGGATSSRVEQAQYGFVSASEQLESTYRNVVQTVRSSFNNISASISSIDAYKQLVVSAQSSLDAMEAGYQVGTRTIVDVLNATTKLYDAKQKLSNARYDYLINQLNIQHALGTLNEKDLVALNNSLGKQLSTSANSIVQGTGTPVTSARNZ

SEQ ID NO: 745 - protein, 279 aa, Photorhabdus luminescens
SNLSLINAIRHQEHIAVELDREVQFLLYVTPKQTFSGDSVKRLMTAMIVAGLLGCPVTSVQAEGVGINATRIIYPADSHATTASVRNSSKEAVYLMQVTVSSTPEGGKTAPFLVTPPLFRMEPGSQNQVRIIKTGQALPADRESLFWFTAKAIPLSPESGNPSGKQITGGIQIAMANTIKLMYRPSGLPVAPEKGFGSLRFKPTAEGITVTNPSPYYITFASLKVGGQELMTQKQKESMVSPFSALFFPLKGVNYPAKVSWTVINDLGGGSSYQGEIPZ

SEQ ID NO: 746 - protein, 272 aa, Photorhabdus luminescens
MKKLFSVCLVFLSLFSSSAAASIFSYITKSEGVPTNAYYTFVIERWDQENDFTPNPCYGYSACWISVNHRHFADGYSGQPYRIFNTRVERFKTMKQVQAEILKYTSFPITGVAKHFGPAIRSHQECVGLFYETDQNGFHGRLLPGSLCGVAPPPIGFCQVSEGSVELNYGSIDEAKLDGATQTGNINVTCNVDIKIIVIATGLNGEFVPLRNDGSLKAKLLLNDSKGEDGVAVFVPAGGNVPVTVKSILQKNGRVEAGPFSGSGTIILAMPZ

SEQ ID NO: 747 - protein, 206 aa, Photorhabdus luminescens
RAKPGGTTMNIKRIGYGLTLAIWLIPVIESQAAEKRAADIEGLHGELHVFGELTEAACRLDMTSAWQEVNLGVTPNSDLRRSGDKGTPIPFTLKFRDCLRTKGAVHDMRTGNLTWSHLQPVVTVSFVAPADRDYPHLVRVSGISGLGLQITDTANNDIRLGERGRPRFVAAGQDSLEYYVTPVRTPRALGIGQYRAVVDFRVNYDZ

SEQ ID NO: 748 - protein, 250 aa, Photorhabdus luminescens
MKLKNTINVVTIAILSLSVISESMAAIALDRTRVVFNGGDKSTSMDISNQNKELPYLAQGWIEDEQGNKINGPLVVTPPVQRVEPGAKSQVKIQSLPTIAQLPQDRESLFYFNLREIPPRSKKPNTLQIALQTRIKLFYRPKAIFASRTDLDNPWQEKMTLTRQGDRYQVNNPTPYYITVVDAASQLKGKTVVDFKPLMIAPKSNVVLSGSAGALGSAPVLTYVNDYGGRPQLIFSCSGNHCQVAQRSSZ

SEQ ID NO: 749 - protein, 839 aa, Photorhabdus luminescens
VVSVRCVLKPLIVLVLLALMGTHAVYAEEEIEFNTDVLDVQDRARIDLKEFSRAGYIMPGDYQMAVRLNNSELPEMPVTFMVPPDDPKGSVACLPPELVKQLGLRAEWESKMTWWNNNQCLEIKTLPGMTVRGDLSSDTLYLSMPQAYLEYHSPDWDPPSRWDEGIFGMMFDYNVNAQIAKPAKGSENQNVSANGTTGINLGAWRLRADWQSQYNHVTGRAGSTEKNWDWSRYYLYRAIPHWQAKLTLGEDYLNSDIFDSFRFTGLSLVTDDNMLPPNLRGYAPEVTGVAKTNARVTIRQQGRVLYETQVAPGPFRIQDINDAVSGKLDVRVEEQDGGLQEFQIDTANIPYLTRPGRVQYKLAAGKPTNWKHHSEGSGFGLGEFSWGINNGWSLYGGILGAGNYNALSLGIGRDLMVFGALSFDVTESRAHLPDEDQTLTGGSYRLSYSKRFEEYDSQVTFAGYRFSERDFMSMSQYLDRRYHDGDAESNKELYTIMLNKQFTHIGTSIYLNYSHQTYWNRSNNDRYNLSISRYFDIGSYKNINLNLSAYRNKYEGKNDDGMYMTLSLPWGNSGTISYNAMANREGNSHTVGYYDRINENSNYRLAVGSSIDGKAAANGYLTHYGDRAQLTTSASYQDGRYTTGALSIQGGMTVTPKGAALHRINMPGTTRLMVDTDGIGGVPVKGFGAITHTNMFGKAVISDVNNYYRNSASIDLNKLPDNVEAIRSVQQATLTEGAIGYRKFQVISGEKAMGMIRLSDGSSPPFGATVLNKDQREIGIVSDGGNVYLSGINPAEKLDVRWDGELQCVIELPQELPKVEEMASLLLLCQLADDNKQPZ

SEQ ID NO: 750 - protein, 180 aa, Photorhabdus luminescens
MRLNKLVMALGLGVALAAGSVNAANPSQGHGTVTFTGSITDAPCSITPETVDQVVPLGSISSASLQNGGRSSSTPFKISLDNCTTETISTVTTTFVGAKSSIVGGDGLLGIEGVAKGAGIAITDAGGNKIKLGTPSPAVALHDGDNDLHFAAYLQGDTSPDAVVPGNFTGIANFQLTYQZ

SEQ ID NO: 751 - protein, 191 aa, Photorhabdus luminescens
MKKRKFLTRYEINAILEKARQGCHAERDYCMLLMCFIHGFRVSELCNLTLSDLDLNSELIHVRRLKGGLSTTHPLIPEEIKALNQWLNIRKSWRESDSEWVFLSQKSGAISRQQVYGLLKRYGKQALVNISPHPHMLRHACGYALADLGRDTRLIQDYLGHRNISHTVIYTASNVKRFFKIWEAPAKGLDZ

SEQ ID NO: 752 - protein, 240 aa, Photorhabdus luminescens
TYLVFRQYQPEKFNKILTIDSTHGKNHLETIRRLVMNEKFYQLKITLTDSKPAIWRRFVVPASISFDRLHDVIQIVMGWQDSHLHEFRIGKLRLTEMPESPSDSKEEDLYRLIDLIKQKGRSFTYLYDFGDGWEHEIILENSQYPANDLPLPFYCLDGARACPFEDTGGIDGYENLIAILNDPDHEEYTEMRQWISELLELDEDEDFDFEQFPINNINAFLALYYRWSRDRYHLLWDWEZ

SEQ ID NO: 753 - protein, 298 aa, Photorhabdus luminescens
IVYHDMIYINQVFCEIMNKRSLRKTPRNRYSIYQKDLHRISQDELTDSTLLEGDQYSYTELGDSVLKKMEDSILLSDIDLSIFAYWTPEFDPDHSAFGPYFMDHYNLKGYSFDICDNGSLVSTTALSIAGNYLSSGSASKILLLGMEQNTIPRNISNGFPIPTQSCAIAALLTTEKSDENKWILLKTGQVSEWESAESLDAFGMLRNILHQLQLDEEDTILLTERTGYFFKKIRFQMEAEDRKSSIKFAFFKPEVTGMNALLLLADKTLTPLNRRNILLVEHDMESLRIAWSVLQKIZ

SEQ ID NO: 754 - protein, 237 aa, Photorhabdus luminescens
HGLSYKKFRNIIMFNISYPFESKKEQRFHWLMEQLAQTVFSTSNQIVVRNGFAVVSEEQWKNSELCFLDEKQYSWKERNTVTILPVCNSMKRQRLLLCKLEVKDGDIASQEIAKKYVNYQCEMIRMQLIWIERWTSILLDHTAQRKIGSVSLLSISSIRLRLAQVIQRQLLLSQCVGDIKEEIPSQFAEHAAEEIEEMVNILIKTTGGRALLQQGLVEMQHIFSVLNQVYLREFHGZ

SEQ ID NO: 755 - protein, 251 aa, Photorhabdus luminescens
SYFIKNHRHLKSGYTTMTIKRTKDINHDTFRKAWRNYRLAPVAIAVSAVFMLSACEKSDETVSLYMNADECSQANPSQSEQCTTAYNNALKEAEKTAPKYATKEDCIAEFGEAQCTQTPAQAGLGTTTSSTSTNGEAQAQQQQSGSFWMPLMAGYMMGRLMGGGSAPSQPLFSSKSATSPANGQFVDSTGKSYGPATAGGRSMTVPKTAMAPKPATTTTITRGGFGDSVAKQSTMQRSASSGSTSRSVGGZ

SEQ ID NO: 756 - protein, 363 aa, Photorhabdus luminescens
GSSMVNFDSSIACTHYGKKWLELAQLFRSLSLKVLDDKDTVLSHLDAPLFDQLYMDRSSSCLERTKMYEVLTYGDPNVLLSCPGPSLSGIIVRELGSTKQQDYFFEYVAQHKARTCMAVTEPGKGSDAGNPSSLLSDNFELNAEKWLVGNGLDATIGTMVVRTGTGPYSIGVILLTPETLSHPKVFRQLLPVAGLQGAGLSHLYFDKIPISEEHILGLHRRPLERGMHSVIKTFYRMRPCVCAMALGSAQSLLDFAISHIRNVKARELHSSLQIEIEAIRNLNYRAASRIDDDILDGAAVSLAKACSTEFVEKVVHIMPQLVGTELFLTDIWLQKTITDIQGYEWMEGSLDMQRLNILAGSIZ

SEQ ID NO: 757 - protein, 473 aa, Photorhabdus luminescens
LDLYSLLNILNKLVIDMTMQSIFQRRHFQRYQWLKLLSDLWNTSITLWGTMVVSAVAVLINISIISHNSPNMLYVIGLFLPLNYMMMSIHEGLRVPALRYSSHLRSANFSLLGQRLLLLFLAMLALMAILIFNVWYFQSGISYLFHIESSQQDEVMNFIIPMLFIGIMIGFATLILSTLFGLGFNRCGSLLGISGTVLNIGATYLTEIYWHKGLQSLIWGAIFGSSYLISVGSILLYRQGVVISWLGMRDQVIQVIKDISTMALPVMGSFSLVFIFLFSFNYLVSFYDAHEIAGFSIAFRIQSFIILPAIALGTAMAIHYNNSLSKRNFVRANQVFLIGLSLTGVIYIFISVAVFFLKVWLVKFFTLDELIAEAALRYLNCVSPSYFSLGIVLGLMTALEQIGQGLRVLLINITLYSLEIGIAALLGLKQEDATRLYLTIAIFNWISALYIFSIFNKKSDFNIKYSSGDIHSZ

SEQ ID NO: 758 - protein, 533 aa, Photorhabdus luminescens
FNYQDDYMNYNLVEIIRDAEMAYPQKTALIFNNQNYTYKDIWRQICAIAAGMRLNGLQQGDKVVICLGNHINSIAIFFAAQKLGACPSIIAFDTPEEKIKFILNNSGASFFFTSSIIAATLLKYDYFYFSNINLIIDKVENIYAENNLINFDDFISDPISEANIPLQAISVDLASIIYTSGSTGEPKGVMLSHQNMMAATRSLVNYLEYHHDDTVMAVLPIAFDYGLYQIILAFFVGGTVVLESNNTPPPVVLRHIQQYRCTIMPGLSSLYSLLDIYASKGSFDLSSIRLVSNTGMALRKQHVSMIKRLFPTAKIFSMYGLTECKRCTYLPPDDLDRKPDSVGIAIPNTQIMVVDDNNQPCTAGEIGQLLIRGETVMQGYWRNSEATEKRIGIHPIYGDRCLYSGDYGWLDEEGYFYFVGRMDEVAKIRGRKVIFSEIEKVLFGHDSIIEAAVIVHSGEESSEDSIIAFVATQTQEKLLESDLKHFCSNLLELHQIPSVFIQLSRLPKNANGKFDKHQLRQRYQSIIQERFAZ

SEQ ID NO: 759 - protein, 374 aa, Photorhabdus luminescens
TSITSKVPIYNSGAVRMKRHHVILTSCAIVAVIFAGISINVVAVRGLNSTEEKDSKISVTQKGPQPILVETAQVTSMNWQDRKSVIATVKSIRYLSVRAEISGTILQIAPAGGQVPINGVLYHFDDRVERFQLKEKEAHLDMTQKNTKRADLLVNKAISQAAQQAEHVNLAHAVSEVEKFKNTLRKMMVTAPFTGVASLHDLTPGQLIQEGQTLFSFYDPNDLYVEFSIPETDIRALSPGVQINVNDTVAGFTGIANITLVNTEINPINRTLTLRAKLEKGHFRHGASVRVTYPASAPQMTRVIPKVSVRYSAYGQSVFVVKDNRVQIRSIVTGDDNEGVVQVKKGLEKGELVVTAGQMRLYPDAPIRQETHQZ

SEQ ID NO: 760 - protein, 1014 aa, Photorhabdus luminescens
MKIIGLFLRRPIIVTTFSGLLFIAGLFSIGYLPVGLYPSVDADAISVSAFYPGASADLMDGRVTSEVLSAVSGIDDINYVTSTSETGRSKVVLHLAMGSDTQKVLTNIMERVNTISHFPDDMESPQISRQEADRVPDFALSFTSETMQAAQVSDFLHRVVKPRLESLKGVGNVEILGSEYAMRIWLDPERMERHGVTAIDISKSLKLENAQANGGALHDSKLRFQLVPETGLSTISDFANLSIMTATNISPVRLKDVADIELGGSQPEIKSIFNGKPATIVLINWQQGSNPLLAADDIYKTIGELKSSFPYDLQSNVLIDSSEYIGGAVHEVFITILLTCCAVTLVIFLGAGTLRAVVIPVIAIPLSLIGVCLVIHLCGFSINTLTLLAMVLATGLVVDDAIIVLDIALHRMRMGDTPYQAALKGGNEIATSLVTMTLTLAIVYLPLAFIGGIVGKLFSEFAVTLAGAVIISGILALSLTPVMCARMLSTNHQHSLMVIRVEKMFARLRRSYERVLIRLVKTGNFPLWLWATTLAGVIILFIILPHALAPKEDQGSLMVIAEGPSVIGTDYIEQHTPILENIYSTLPEIANFNYVIGVPKDNQLLSFVRLINWSERQRSTIQLQPELQNIIAKIPALQSVVILPSSLPGVGGLPFQFVLKHEDKDYANLDALSDLMLREMRASGLFLFLKKDLKYDTPQIHIRLDREQLAKVGISASDVGYSMNLAYANTKLQPFIYEGRTYNVIMALKKTERAAIQSLLDLQVRSLDGNLIRLGSLVTQNPEVGPESLNTFQKQAAVTLQGVLAPGVGQSEATEFALQLLHNLKSQGVSYDLSGETRQSKEEGQRLLVTFAIALVGIYCLLALQLTNYLGPLIVLLGSIPFSVLGALLALSWFDVPLDMFTQVGMLTLVGLISKQGILMVQATDSLHKKGGISIYYATVRASASRLRAIVLTTLTMILGALPLLFASGPAAESRFELGLVIIMGMLVGSCLTLFLLPSLYIFVHKKTSGATSZ

SEQ ID NO: 761 - protein, 323 aa, Photorhabdus luminescens
KNEWSHIVSLIINDIGVYLPEQKIGLERVPIEPQLSEDAIKIYQRFYGLNHIAISKISLEEMMYRAAQDTLTRNGIAIESITLLIHAHTAPETWTYPNNLLSRLNRRLGLRNATCFSIHSNNCASNLNGLQVIQNHLIGNSGQGYALLLTADLTFSGILQQIPNTTLCGDAATACIISLGGDGAKMKALEIDYYGQHSKGSWQTAEEQVRFETHYAGRLANVMERCLKQSNLSWEHIRWVFPHNVNLISWRDATQKIALPLSKVYLDKLPELGHCFGADIFINWHFARDTLRLGDYVMVATVGLGAVFGAAIFQLVKEDIKSZ

SEQ ID NO: 762 - protein, 523 aa, Photorhabdus luminescens
IMRVFEHLGEWLHDSALKYADYQALSINNDVYSYRELHELASLLARGFSLSQGKYCALLGKRNVGIFAGIVASLCYGKTYLPLNEDQTPESLSLLSKITDFDLLVTCAEEQKLLHDLLKHIDKPLVIILSDSKQRPNWCNDYPRHYFLAHADLAKIPTAQMKTDNPGAYLMFTSGSTGNPKGVEVAHTNVTRYVSNTIALYQPTCADRFSQICPLGFDVSVHDLFVPWAIGASTHVFDAKNSLMLGTFVRDKHLTFWASVPSIILYFQRSRQLEPGSFPNLRQSLFCGEPLLQSMAKSWHMAAPASHIDNIYGPTEATVAICGYRWSPEPTETNELIVPIGTPYPGTKLKIGRQRQNAGDVGEGELWIGGEQVVSGYLSSNTMQADNFEYDGSCYWYRTGDWVKRDNDGIFHFLGRCDDQLKVNGQRLERLEIESMLSKAVGVDDIAVIGWPVIAGNCVEGLVFFISWHEKSNLELRKICQQLMPRSMWPTRLVIGAIPKNRNGKTDYKQLKTKLAEGRVSSZ

SEQ ID NO: 763 - protein, 321 aa, Photorhabdus luminescens
EMAIKWRLIQMLNRVNDILHIIGSGVMHYNWLSSLGTISATLWYPAYAGSGTVKRYRNILHAKSEESAIPMGTNWPLIVISHGSGGSCFDQSYLAEFLSTQGFAVLAVDHQDIQDARYRWMNLTTRPQRLVYACDALLLEALGERIDFSRPLVIGHSAGAYDVLVMCGCQPCFELEPELSSVLNELSCFAVEQCLVKGICAVILLAPALSNLFLANTLNEMLLPTLILSGERDTMKLLGSPTDYATHLPHVEHHILFGAGHYAFVYEFSPLLKALNSVVSGGDYVPRKELHYKIMNYISAFITPFNTEEIISLPREPIHAZ

SEQ ID NO: 764 - protein, 321 aa, Photorhabdus luminescens
HHLTQRKLYLCQGNRFMLDPINHYRQHTEVTLAASYSSQLDDLPNDVEGLISIVQNLLIHYQTEKDKLNPDIISMRNTEIDSRCVSLMLKKLLLLDDSSFSNPRPPEKRLLSTCRDFSVLLCSFMRHKNIPARVRYGFAHYQYNDECPMHDHTLVEYWNGTRWLYAESRLNFLSKPLLGANPSDFPRHLFFSGAEIWRHIRQGTMNERIFSGYRFDDGYGQWIVRNLFFLDLASLAGYEPLIWDSWGILLEENPGARVTDVQQLNFLDRMALLDPCLPDECNELITSFNNYNELSYQGKVHSFSPVSGAYCVDLHARWSKZ

SEQ ID NO: 765 - protein, 316 aa, Photorhabdus luminescens
IIHMMTLETITSYVPQKRLKVEREYQRLGLTQNEARVFSRMYELTHCPVEEGSEEEMLLKPCKELFQQVPHIKQEVVLLVYAHTGTISSVWGQNMASLLVRCLQLPNAVAIGTSSNNCVSIFSALSLAKHYLQNALPNSKALIVVGEIADSFELRIVPNVAVIGDASAAALLSLNGQGSSILAHSIHTYPKYSQGIWLPTNSAAYRDFTANYQLRLQSVIQDVLQQADITMDDISYIIPHNVNILIWRQAAKFMNIPIEKIFLKNISETAHCFGADMLINLHALKNSGALHSGDNILLISAGVGGLFGASLLLYSZ

SEQ ID NO: 766 - protein, 387 aa, Photorhabdus luminescens
MKRIAITERPDWHEKAIEYGFNFHTMYDKPYWCEEAYYQFSLAQIEEIEATTAELHQMCLQVVEKVVDSEELLTKFQIPKHCWDFVRSSWITSQPSLYSRLDLVYDGKSPAKLLENNADTPTSLYESAFFQWIWLEDQMNAGLLPAHADQFNSMQEQLIERFAQLRDEHGFGLLHMACCQDTEEDRGTVQYLQDCALEAGVPTEFLFIEDIGLGEKGQFTDLKDQVISNLFKLYPWELMFREIFATKLEDAGVRWLEPAWKSIISNKALLPMLWKMFPNHPNLLPAYFADDNYPAMDSYVIKPLFSREGANIRIIEKGKEIASVDGPYGKEGMIVQQFHTLPKFGDNYTLIGSWLVNDQPCGIGLREDSELITQDLSRFYPHIILDZ

SEQ ID NO: 767 - protein, 421 aa, Photorhabdus luminescens
IMNIENRITQKSLSMKIAETFVIKDDCLEIGGIPLTRLETQIGQTPFFAYSRKHIDQQVCLLRKYLPEKISIHYAIKANPFVPLIHHLSQKIEGFDVASANEMALALNTGVSPEDISFAGPGKTDTELKRAIAAQVLLNVESLNELRRIQILSEKLGLCARVSLRINPDYNLNSSGMKMGGGPRQFGMDVVYVPEALMFIRDYPDSLVFEGFQIYPGSQNLCAEHLIEAQNKALNLVIELSHSAPSPVRRFNLGGGFGVPYFQGNTELNITEVGNAMHKLVERAEKFLPEVEIILELGRYLVASSGIYVTKIVERKISHDMTFLVTDGGMNHHLSASGNLGQLIRRNYPAIIGNKIKGEKRETVNIVGPLCTPLDILVHQGDMSVATPGDLVVIFQSGAYGLSASPNNFLSQTNAVEVLVZ

SEQ ID NO: 768 - protein, 255 aa, Photorhabdus luminescens
SVILGMSRLTGGVGNSGNVLCINFLSRRVLMYLSKIVLRQSSQTANILAKLSANGVYTSHQLLWKLFSTDEKRQFLFREEIGIMGLPVFYVLSKTSPQTESPLFEVETKAFYPQLKEGQRLAFKLRVNPTICITDPSGKRQRHDVLMHAKFQAKQQGETEQGKIKAMMENAARNWLLNHRRMQQWGIQFDNLLDIEGYTQHRSVKKQGQKIQFSSVDFQGLLTITNGELYLEQYAKGFGRAKAMGCGLMLIRTVZ

SEQ ID NO: 769 - protein, 292 aa, Photorhabdus luminescens
KAKCAILIWFTVLVPMTAINSTHSLGKELWPNCLNLLHSNGGKMKAYLVFRLYGPMASWGQPAVGGERPTELYPGRSAILGLLGAALGIQRDNESELAKLQKSVLIAIKQTVPGSLMRDYHTTQVPTHNNNVVHQNRKSELRSDKLNTILSNRDYRCDGIWIVAITLTEHACFTLERFRDALLKPVFILHLGRKSCPLALPLSPKLITSSALKMALDISFPPLIHSDSEDKLWLGANGIVTYFWEGNKDEIISSNILISHPWDEPINRGRWQFRQRTMYQLSIEEGVDVFVZ

SEQ ID NO: 770 - protein, 358 aa, Photorhabdus luminescens
FIGFSLIEFRMIIMSQFIQLHLLTSYAPSNLNRDDLGRPKTAKMGGFERLRVSSQSLKRHWRTSELFEQVLSENIGIRTKRLGIKVFEALIKAGVKEKSARALAMTIAGVFGKTKKDALEIEQLAHISPEEQQSVMSLIAVLAEENRAPTPEELNLLKTKQTAVDIALFGRMLASSPAFNVEAACQVAHAISVHSVVIEDDYFTAVDDLNDGKEDTGSAHIGELGFAAALFYSYICINKTQLIKNLDGDEALANKAIKALTEAAVKVSPAGKQNSFASRAYASFALIEKGEQQPRSLSVAFLKPINDSDQGSSAINALESQMRNIDLVYGTCADDRYKFNTFTGEGTLAELLEFAAQZ

SEQ ID NO: 771 - protein, 542 aa, Photorhabdus luminescens
KIKAGGVMNLVQDPWLPFRLRDGSEKVLPINAICDHDVMDFALPRADFQGAACQFAIGLLQTVFAPEDKYQWHALYETSPDKKVLQQNFNKVIHAFNVTGIGPLFMQDFDPLQTVKSTTVAGLLIEAPGANGLRLNTDHFIKRGIGDVMSLEMATLALFTLQINAPSGGVGHRVGLRGGGPLTTLVVPQQTDATLWQKLWLNVISRSEWHYSEPDLTSAQVFPWLAPTKVSVNEGTEIHATDVHPLHMYWAMPRRIRLIVEKGENICKISGKYSEFTVSEYRAQNYGGNYTGNWSHPLTPYKWDPKKLTPPLSIKGQPGGVTYKIWDALVFTSHESGQRCAPVVSHFYSLCCHFAELRRVMPRLWVFGYDMDNMKARCWYSVTVPLFFVLFEQQEKILYQVKELQKLAINMIWLCRNQIKAAWFEKPVDVKGDTSFIDLTFWQQSESLFFSVVHQLIDNANSDAPFLTPEQAKHWLNTLRYLCRDLFDEYVALSELGNERSIAKRMKARQQLIIGLYGQKALKEIKTFITNHHIHSGKEEVZ

SEQ ID NO: 772 - protein, 906 aa, Photorhabdus luminescens
MEMPIYFQYWGKAKRVLEIDSADYHLLPYHCLDVAAVGMQLLSLERSLTRDLASFLALSTQQLRSMVSFILALHDIGKFASAFQKLLPGLAVGLHRPDCPKEYDGRYFCHDRIGLYFWENIKAELLNRLVNIEGAEHREQREMFDTLMVFIDCVLGHHGRPIDKTGYRAIKHFTEPHNFNAAALFAHHLVELFQPEFPIEKLQSKEWRRRLEQVSWQFAGIAILADWIGSDSHYFTYQSKPMPLTDYWKHAQAMAKKAVMAINLGRPPVVKPFISIQEYYGFAATPLQQWAESIPVDDSPQLFILEDVTGAGKTEAALALTHRLMQAKAADGFYFGLPTIASSNAIFSRIAQHYQQMLLTEDDSKPNIVLAHGTWGMNNQFHEPVLALGHPDRNDGKTDIAASAQCNQWLADPRKQALLAPAGIGAIDQALLAVLPRRYQSLRLFGLNRKVLIVDEVHAADEFMFNLLENLLALHLYQGGSAVLLTATLTFKQRQRLTDIWLNVGGLSSQLLQKNDFPLATKISLNAILPVIEQPLSSRKDVSREIKVDFLNSVGSCVEKVLAAIVQGQCVVWIRNTVDDAIEAYQTLRSLLTEPERCLLFHSQFILQHRKEIEDHVLTIFDKNSHGELRRGKALITTQIFQASLDTDADVMISDLCPIDDLIQRAGRLHRHTRDSDGIYRWGIKDSRPTPILFIHAPEWREQPGSDWLSHNFRNTQYVYRSPVRLWLTMRILRKLGAIRMPAETRQLIDAVYGHAYEQAPEVLKYQENELIDEERSQAAKAKSYWLQWQLYGYCDRSADHWYEDDSDINARYSDIETVEVLLLKKGDSGQLVPWVNSAEFSVSLSTIKLSRNKYADKLAPIPTKLIPALNALQQRYYQVRYLQPWLPDQDPNFTYSSTIGFCERZ

SEQ ID NO: 773 - protein, 485 aa, Photorhabdus luminescens
LRHNRAILVAQKWRDYLNCAIIAPCSYWDLLFAMSLMTDIYETLCIASQPMSVSDLLVEHPSVPRRTVQRWLGRLVENKKVQILGEGRNRRYVIATEETSDSVADRSDNFPSYIPLSEDSQDILRYIDQPIKARTPVGYQREFLESYEPNVTYYLSVPIRNQLWRIGDTKQISQPAGTYGRAILDRLLIDLSWASSYLEGNTYSRLDTVKLIEYGKIAVGKNAIETQMILNHKAAIELLVDGIEELDFNRYTVLNLHSTLSENLLSNPVYEGRIRQHQVEIGKSVFRPLSGEAHISEILDSLLGKARAISDPFEQSFFMMIHLPYLQPFADVNKRTSRLAANLPLIRSNLCPLTFVDVPEEAYSRAMLGIYEMTRVELLRDLYLWAYERSAREYLAVTQGITTPDPLRLQYRNVIKQIVYRVVATPEMDSIDVIDKLISDELSQSERDTLKALVIEELRRLHEGVLARYGLRPLQFEKWKRKHRZ

SEQ ID NO: 774 - protein, 348 aa, Photorhabdus luminescens
TRNKMEGTLIICVDSILRFRSDYDTTIAVPMLSVQEQLGKNDPFFFLKYFRNKVLIEKGVTISNIFLAIEPWQAMLSTWLEIDISAYIAEIRKPSQEEPIFDWISIQRITSVHRVYQRKDMKDNEKLSEYFNREHTPTKYFNIESVCMASGYRKGDKEHYSISEYIHEIKNIPVIASDRQILIGYDDNNTDILNDKCFGIYDNRNIKYIQGTTSFAFYELMEAIFNDGLFYNSPQTACHSLEMIKEMLEIIDRGNMNHEKDNKECILQQENNSGNINGGNNDRELNVEFYDGAFDPLIEHIETEREYWNYIKLLCHSYGHLPVRIGTINEAKVPEYRFYNNIIDDESZ

SEQ ID NO: 775 - protein, 386 aa, Photorhabdus luminescens
YYAQPTPHASANGLFTFPDRRHEIRRYCKSDEYFAVHSKTLYETRLLSMPDSDGIRGLGMASSDTSSLSSTPSEKILAEAAEWLTILHDSHASEADRNACAAWCAQSPEHAQAWEHAQCLLARLHHLPPHIASPLLNNKQPLSRREAIRKLTLMLLIPAGASSLFWRSDQFQLLTGDYHTQTGQIQHWSLPDNSQLTLNTQSSTDVHYDDTQRLISLKLGEIYIETHKDNRHPARPFKVQTKQGVIVALGTKFSVRQQASHAQVEIVEGAVRITPDNGLPHILHAGEATHFTQFTVAPQHTRSITSLSWLQGMMVADNLPLATVVTELNRYRSGIIRCDDAVAHLRVSGAFPLRDTDLALHMLLQTYPLSIRRLTRYWITLTSPSZ

SEQ ID NO: 776 - protein, 875 aa, Photorhabdus luminescens
KSYGELTMLYQKLTMPYPVDCQDSQPRWQKKSLVALLLPLILLPTRSLYATTPADTLYSVHIPPGSLGNSLSHFAAQTGTALSFDPNLTNGLTAPSLNGSFSAHQGLVQLLTGSHLQLSQRTDGSYTLVKMTKKMTNKGVIVLNPLTVAGNRGYSGNEPLRFGSTTIKGKDIEKFGVIHPVDIFKITPGVLSGEARSSGSLDVNIRGLQGQGRVLTTVDGASNQTALYRGYQGVSNRSFIDPDFIGRVDISKGPTGKGGMGAIGGTVEIKTIEASDILLDGQKAGVRLKGSLLNNHSNPDDYQRNDWPSPSKTSLFDAKNRTGSIVFAIAEPSYELLFGVSQRKRGNYHSGKHGPGAKERGMPGYLCESDPQDCRIPQFSEQMAGYSLYAMGDAVPNTSEDSQSLLGKGKVRFGDGHEISAIISHYQNLYGESYVADMANLSQTFMILEQGPLTRLNMNRHSLNYKWEPASNPWINLDIGVWQTRVNDRPRTANNTLGDKKFMRTVGVNLSNTSLFDLSMQDIELNYGASFIRERTGPSAGKWKYAVNREGERKEGHFFLSGNYMLADRLTLMGGWDYKSYQIEDDSPARPGSSWLPQLTSGKVNNKRDHAHGYWVGTKLELNHETALHAKYAYAPRFPSMVEGIRGYMMNVDDHIKPEISKNIEVGLTSRFPDIIAQNDSFDIAISYFDNRVKDYISRSWMDDYWSMYISNIKEAKFAGLELASVYHSDHFDARLSMNYYTKVKFCTENDGCIARSLPSDYATNHIPPKYAVSLDLTQRFLNDNVSVNARVSHYGQRSVPAGKPRRGSAPLLAPIIWRPATVADISLTARINKHVEFELGVDNVFDKYYIQPLSLGYIPSPGRTFRAGITTYFZ

SEQ ID NO: 777 - protein, 356 aa, Photorhabdus luminescens; identical to SEQ ID NO: 440

SEQ ID NO: 778 - protein, 338 aa, Photorhabdus luminescens
MPIIAPIPRNERRQMKKIIQNTRDKDYARRLMAILMLHRGESVSLVAKTLCASRSSVYRWINWLTLYGLEGLKSLPVGRPAVWNLIPLYPLLSFLLQYSPQQLGCLRSRWSLEFFIIKINELLNIKLSISTFYRYLHKMGIVWRRAAPTLKLPDPEYHEKMAKITEALSTCSEKHPVFYEDEVDIELNPKIGADWYLKGQQKRIVTPGKNQKHYFAGCLNVQTGKVTYADGLNKNSQLFINVLEELERQYCHAETLTLILDNYSIHKSRRVRDWLACHPKFNLLFLPVYSPWLNKIERLWQSLHETVTRNHGCQYMWQLLEKVKTFLNSCPYRNSREZ

SEQ ID NO: 779 - protein, 381 aa, Photorhabdus luminescens
KIIFNEDIYMKKEPIKTSNPDNTESSDANEVEIENPTIAASGIVSVANTSDGRIEVFGVGGDNAVWRNGQTTHTGASWTGWSSLGGSVTSKPAAYLNSDGRLEVFVRGSDNALWHNWQTTPNASWSGWQSLGGALTSNPAVYINADGRLEVFARGLDNTLWHIWQTAPHSNPWSSWYSLGHVITSNPAVHINADGRLEVFARGADNALWHIWQTAPHSGYWSGWHSLGGVLSSDPVVARTVDGRLEVFVRAVDNALWHIWQTAPNSSQWSNWASLGGTITSAPAVIKYFDNRLVVFARAIDNALWHIWQNDTHSGSWSNWGSLGGGLSSGPDVVENANGYIEVFVRATDNALWNIKRTSPSSWSSWASLGGTLIDASAIKZ

SEQ ID NO: 780 - protein, 381 aa, Photorhabdus luminescens
AKEIISNEDTYMQQESINTSNPDNTESYVKKDEVEIESTATGLSEIVSVANTSDGRLEVFGVGSDHAVWHNWQLTPYSNSPWSGWLSLNGNVTSKPAVYVNTDDRLEVFVRGSDNALWHNWQIAPNLGWSGWQSLGGSIASNPAVYVNTDGRLEVFVRGSDNALWHLSQTAAHSNPWSSWQSLNGNIIGNPAVHINSDGRLEVFVRGSDNALWHISQTAPDSNLWSNWESLNGSISSDPAVIGTVDGRLEVFVRGSDNALWHNWQTVPHSGPWSGWVSLNGNIISAPTVARNWDNRLEVFVCGADNALWHIWQTVSHSGPWSSWASLNGNIISAPTVAQDADGLLEVFVLGSDHALWNIRQTTSPSWSPWLSLNGSLISTZ

SEQ ID NO: 781 - protein, 379 aa, Photorhabdus luminescens
YLKRIYIMKKESINTSGPDNTKSSISDEIEISNEISWTALSGVISAANNADGRLEVFGVGTNNAVWHNWQTVPNTGSSWSGWHSLNEGATSKPAVHINSDGRLEVFVRGTDNALWHNWQTVPGAGWSGWQSLGGQITSNPVVYINSDGRLEVFARGADNALWHIWQTAPHAGPWSNWQSLNGVLTSDPTVYVNASGRPEVFARSNDYSLWYIKQTASHTYPWTNWQSLSGVITSNPVVISNSDGRLEVFARGSDNALWHIWQVAPNAGWTNWRSLSGIITSDPAVHINADGRLEVFARGPDNALWHIWQTATSDAWSEWTSLSGVITSAPTVAKNSDGWLEVFARGANNALCHIQQTTSSWSTWTSLGGNLIDASAIKZ

SEQ ID NO: 782 - protein, 386 aa, Photorhabdus luminescens
LFSESAKLFLTRIYMQEEPTNIPRPDNAELLVASEVAIENAAIALSEIVSVVNTSDGRIEVFGVGTDNAVWHNRQTAPHSGSSWTGWISLNGKVTSKPVVYINTDGRLEVFARGTDNALWHIWQTATNAGWSNWQSLGGTITSNPAVYVNTDGRIDVFARGTDNALWHISQTAAHSGPWSSWQSLNGVITSNPAVHINSDGRLEVFARGTDNALWHIWQTAPDSNQWSGWDSLGGVITSDPVVIGTADGRLEVFARGSNNALYHIWQTVPHGGPWSNWASLNGVITSAPAVVKNSDGRLEVFARGTNNALYHIWQTVSHSGPWSNWATLNGTITSAPTAVEDADGRLEVFARGTDNALWNIWQATPSWSAWVSLKGSLIDASAIKZ

SEQ ID NO: 783 - protein, 388 aa, Photorhabdus luminescens
ILKIIFKENIHMKKEPIKMPNPDNTEAYVAGEVAIENSAIALSGIVSVANNADNRLEVFGVSTDSAVWHNWQTAPLPNSSWAGWNKFNGVVTSKPAVHRNSDGRLEVFVRSTDNALWHNWQTAADTNTWSSWQPLYGGITSNPEVCLNSDGRLEVFARGTDNALWHIWQTAAHTNSWSNWKSLGGTLTSNPAAHINADGRIEVFARGADNALWHIWQTAAHTDQWSNWQSLKSVITSDPVVIGNCDGRLEVFARGADNTLRHISQIGSDSVSWSNWQCLDGVITSAPAAVKNISGRLEVFARGADNTLWRTWQTSQNGPWSNWSSFTGIIASAPTVAKNSDGRIEVFVLGLDKALWHLWQTTSSTTSSWTTWALIGGITLIDASVIKZ

SEQ ID NO: 784 - protein, 429 aa, Photorhabdus luminescens
MKQNTSGFLERMGIPSTLSWGYLGILAFMIGNGIEIGWLSPYLVDNGLSIQDISTLFSIYGISVAISSWFAGVFFEAFGAKRTMLLGTIFCVVGTTGFVSLGLKEISYPLLLIAQAIKGFGYPLFAYSFSVWIAYRSSVVKLSTAYGWFYFVFSGGMQVLATFYASWAVEELGHINTLWTTLIFIIVGAFFALVLNRDNIKPQSNNNTLGNIKEVLKGITILKEHPKLFISCILRIINSLSQYAFPVYLPVYMISQGFTTTQWLSIWGTAFTSNILFNLVWGIAGDKIGYKRTIIWCGGVLTGVASLLLFFAPQFVGANYAIVLICGICWGAGVAGYIPLDAMSANMVEKDKGAVMSVLNLGTGLSVVIGPAIVGLFINSLGSSGVTCIVATLYFFGALITNFLDEPERVSKTIIQPDAITMNKFPNSZ

SEQ ID NO: 785 - protein, 852 aa, Photorhabdus luminescens
MINTETFDTHTPMMQQYLRLKAQHPDILLFYRMGDFYELFYDDAKKAAKLLDISLTKRGQSAGNPIPMAGVPHHAVENYLAKLVQLGESVAICEQIGDPATSKGPVERKVVRIVTPGTVTDEALLQERQDNLLAAIWHDNQGFGYATLDVTSGRFQISEMIELETIAAELQRSRPVELLYPESFEHMALIENFHGLRRRPLWEFELDTAKQQLNLQFGTRDLVGFGVDKATLALRAAGCLLQYVKDTQRTALPHIRGITMERQQDTVIMDAATRRNLELTQNLSGSTDNTLASVLDLCVTPMGSRMLKRWLHAPVRDRQILENRQQAIATLQEIGLELQPFLLQIGDLERVLARLALRSARPRDLARMRHAFQQLPDIHQVMDSSDSPYIKQLQKNIGRFDELQELLEKAIVETPPVLIRDGGVIAPGYNSELDEWRTLADGASNYLEQLEIREREKLGLDTLKVGFNGVHGYYIQVSRGQSHLVPIHYVRRQTLKNAERYIIPELKEYEDKVLTSKGKSLAIEKALYEELFDLLLPHLAELQTSAEALAELDVLANLAERAETLNYICPTLSDKPGIQITGGRHPVVEQVLREPFISNPLSLSSQRRLLIITGPNMGGKSTYMRQAALITLLAYIGSFVPAEKAVIGPVDRIFTRVGASDDLASGRSTFMVEMTETANILHNATEQSLVLMDEIGRGTSTYDGLSLAWACAENLANRIKAMTLFATHYFELTTLPEKLEGVVNIHLDAVEHGDTIAFMHSVQEGAASKSYGLAVASLAGVPREVIKRARQKLKELESLSNHATASHVDTPQLALLTEETSPAVEALENLNPDSLTPRQALEWIYRLKDMVZ

SEQ ID NO: 786 - protein, 254 aa, Photorhabdus luminescens
VFDKNLLQPIYHFLQCETPNLWVDKAKQPENLPVLLRDHLLCELKAAQSAMFLIRKYAVDQRSEDTLLAWFKPYEDFAYKKIGDLNSLRGQNQATKQITAKANSLYSQDLIDKMVLLIKEELHHFYQVLEIMDARDINYESITASRYAKGMLNHIINHEPYTLVDKLIIGAYIEARSCERFAKLAPHLDEDLSKFYISLLRSEARHYQDYLSLAQSIANEDITERVNYFGRVEAELIQNPDSDFKFHSGIPVIZ

SEQ ID NO: 787 - protein, 356 aa, Photorhabdus luminescens; identical to SEQ ID NO: 52

SEQ ID NO: 788 - protein, 257 aa, Photorhabdus luminescens
MPALFIGHGSPMNVLEENRYTNVWRELGERLPVPRVILAISAHWYTNGTLVTAMTQPKTIHDFRGFPQELYETQYPAKGSPELAALVQEMLEPVEVYADHHQWGLDHGTWGILVKMYPRANIPVIQLSIDDAKPATYHYELGKKLAALRDEGVLILGSGNVVHNLRAMKRQDPNAEPYPWAESFNHYVRDNLTSYEQPYPLIHALDREDGLLSNPSPEHFLPLLYIMGTWDRKEAVSIPVDGIESGSLSMLSVQVGZ

SEQ ID NO: 789 - protein, 333 aa, Photorhabdus luminescens
MSQNTLKVNELYDDADLDESGIEADDFDEKLLKNDGDDLTDFENDLDVLQGMSQRVLDATQLYLGEIGFSPLLTAEEEVFFARRALRGDVLARQRMIESNLRLVVKISRRYSNRGLALLDLIEEGNLGLIRAVEKFDPERGFRFSTYATWWIRQTIERAIMNQTRTIRLPIHIVKELNVYLRTARELAHKLDHEPSPEEIAEQLDKPVDDVSRMLRLNERIISVDTPISGDSDKALLDVLSDENETGPEGTTQEDDMKKSIVKWLFELNSKQREVLARRFGLLGYEAETLEDVGKEIGLTRERVRQIQVEGLRRLKDIMQTQGLNIEALFRTZ

SEQ ID NO: 790 - protein, 332 aa, Photorhabdus luminescens
MNSGSPMKKIQRIVTCLLMGVWLVGCTNTPTRPAPITSIDQKQNSGSRYPVISSGNSAVSTPMPSSPSSMGAADSNLQGRIVYNRDYDSIPKGSYNGNTYTVKHGDTLFYIAWITGSDFRDLASKNNISEPYSLTVGQTLRTGSSGMLTTYNHNQIQTTLVDSQSTNAYPANSGKQKSVKMLPRATTSTVSNTYLESPTTTASSGNSAVSSWMWPAEGKMIESFSDTQGGNKGIDIAGSRGQSVFATAGGRVVYAGNALRGYGNLIIIKHNDDYLSAYAHNDTMLVREQQDIKAGQKIATMGSTGTSSVRLHFEIRYKGKSVNPLRYLPQRZ

SEQ ID NO: 791 - protein, 209 aa, Photorhabdus luminescens
MLSRAMKNLLTQLRQQGIEDERLLAAISAVPRERFVDEALAHKAYENTALPIGYGQTISQPYIVARMTELLQLTPDAKILEIGTGSGYQTAILAHLVKHVFSVERIKGLQWQAKRRLKQLDLHNVSTRHGDGWQGWPSRGLFDAIIVTAAPPYIPQELMLQLTDGGVMVLPVGEHTQILKSVKRHGNGFHSEVIEAVRFVPLVQGELAZ

SEQ ID NO: 792 - protein, 255 aa, Photorhabdus luminescens
MLRILLSNDDGVTAPGIQVLAAALRENYHVQVVAPDRNRSGASNALTLDRSLSVNTLENGDISVLGGTPTDCVYLGVNRLVLPRPEIVVSGINRGPNLGDDVIYSGTVAAAMEGRHLGLPALAISLNGELHYQTAAEITCRLLQMLQTTPLRAGNILNVNVPDLPLEHIKGFRVTRCGSRHAAEEVYSMQDPKGNMLYWLGPPGDKHDAGPETDFAAVEQGYVSITPLQVDLTAYKAQALVRDWLAKAEVDGECZ

SEQ ID NO: 793 - protein, 351 aa, Photorhabdus luminescens
LMVLAELNWLYGQPEATGILKASPEDFIVCEDLGFSPDGEGEHLMVHIRKTGCNTQFVADSLARFAGIPSRSVSYAGLKDRHAVTEQWFCLHLPGKQEPDFASFQLEGCEILTTARQKRKLRIGALKGNSFTLILREISHHQLVENRLRLIQQGGVPNYFGEQRFGRDGQNLIQAQRWANNEIRVKERSKRSFYLSASRSAMFNAVASARIALKQQQQVIKGDALQLTGRGSWFVADETELPLLQQRVIDGELQITAPLPGDGELGTQHQAADFERQYLQPYESLWELIKRERVEGCRRAILVQPQNLSWQWQDNDTVKISFWLPAGSFATSVVREIINQDQNNVTNIVEZ

SEQ ID NO: 794 - protein, 244 aa, Photorhabdus luminescens
MNNLLLRSSADIIALVPAAGIGSRMNSDCPKQYLSIAGKTIIEHTLSALLDHPRIRHVVIVLNPTDTQFQSLEVVSDSRITTVTGGEQRADSVLAGLNHLAHVTGNDNCWVLVHDAARPCLHHDDLDRLLQLAEADEQGNMACGGILASPVRDTMKRGRVGQIIDHTVERQDLWHALTPQFFPLMLLRDCLSKALSQHANITDEASALEYCGYQPVLVNGRSDNIKVTCPEDLALAEFYLSRKZ

SEQ ID NO: 795 - protein, 211 aa, Photorhabdus luminescens
LADIENLPLENVVWHPHQLTRAQREVENGHPALVIWFTGLSGSGKSTVAGALEQALFQRGIKTYLLDGDNLRHGLCRDLGFSEQDRQENIRRVGEVASLMVDAGLVVLTAFISPYKAERKKVRELLEPGQFIEVFVDTPLEICESRDPKGLYKKARAGEIRHFTGIDSVYEVPDSPEIYLPGQQSVETSVTQLLVELKKSGIIRSRIHHGZ

SEQ ID NO: 796 - protein, 458 aa, Photorhabdus luminescens
LHAQQEKGLLRFLTCGSVDDGKSTLIGRLLHDTRQIYEDQLSTLQNDSKRIGTQGEKLDLALLVDGLAAEREQGITIDVAYRYFSTEKRKFIIADTPGHEQYTRNMATGASTCDLSILLIDARKGVQEQTRRHSFISTLLGIRHLVVAVNKMDLMEYRQEVFNQIKQDYMNFAGQLPTNLDVHFVPISALDGDNIVTISRNMDWYEGPTLLDILETVDVKKEASKQLLRFPVQYVSRPDLDFRGYSGTLSSGILRKGQKVKVMPSGICSQVERIVTFDGDLDFAVPGEAITVVLKDEIDISRGDLLISADDEMMVTRHALVDVVWMSEQPLVQGQNLDIKVAGKKSRGKVENIQYQVDITHLTQRVAVDLPLNAIGSVEFSFEEPLMLDSYQQNSDTGGIILVDRLTNVTVGAGLVREIQTDVYEGPKEFSEFELELNRLIRRHFPHWGARDLLGGKZ

SEQ ID NO: 797 - protein, 303 aa, Photorhabdus luminescens
MDEKRLTHLQQLEAESIHIIREVAAEFENPVMLYSIGKDSSVMLHLARKAFYPGTLPFPLLHVDTGWKFREMYEFRDRTAKNYGFELLVHRNLQGEAMGINPFVHGSAKHTDIMKTEGLKQALDKYGFDAAFGGARRDEEKSRAKERIYSFRDRSHRWDPKNQRPELWRNYNGQINKGESIRVFPLSNWTELDVWQYIYLEQIDIVPLYFAKLRPVLEREGTLIMVDDNRIDLKPGEVISQRKVRFRTLGCWPLTGAVKSDAETLPEIIEEMLISTTSERQGRLIDSDQSASMELKKRQGYFZ

SEQ ID NO: 798 - protein, 471 aa, Photorhabdus luminescens
VDYLPIFVELKGRLVLLVGGGEVAARKATLLLRAGALLQVVAPELCSELQQRYQAGELEWYQGEFQPEYLDGIFLVIAATDDRILNHQVFSEADKRSILVNVVDDQVHCSFIFPSIIDRSPVLVAISSAGKAPVLARLIREKLEALLPSSLGTMAKIAGKWRERVKQRLTSMRQRRSFWEQAFNGRFAMLVANGQIQQAEKQLEQQLEQSDLQGELALVGAGPGDPGLLTLKGLQVIQQADVVLYDHLVSSDVLDLIRRDADKICVGKRAGNHSVSQEETNRLIVKFARQGKKVVRLKGGDPFIFGRGGEELQVAASAGIPFQVVPGITAAIGATAYAGIPLTHREHSQSITFITGHCREKGNELDWPALARGHQTLVIYMGTVKAALISHQLILHGRAEDTPVAVIGCGTRLEQQVLTGTLLELEQLAQQAPSPALLVVGEVAQLHHQIAWFGQQSIAKISRPAVVDFAZ

SEQ ID NO: 799 - protein, 218 aa, Photorhabdus luminescens
MNQTLLSEYGTSSERVEHAINALRDGKGVMVLDNEDRENEGDIIFAAETMTVEQMALTIRYGSGIVCLCLTEERRQQLQLPMMVENNSSPFQTAFTVTIEAAQGVTTGVSAADRITTIRAAIADNAKPSDLNRPGHVFPLRAQPGGVLVRQGHTEAAIDLVSLAGFKPAGVLCELTNDDGSMARTLEVVQFAKLHNMPVVTIEDLVIYRQAIEQKASZ

SEQ ID NO: 800 - protein, 245 aa, Photorhabdus luminescens
MSQFSLSQCVSMTAEQQEQSLAEINLRLEMMDAHQRVNWALENLPGEFVLSSSFGIQAAVCLHLVTQEYPDIPVILTDTGYLFPETYQFIDKLTTQLKLNLQVFSAEHSPAWQEARYGKLWEQGVEGIERYNQINKVEPMNRALKNLRAQSWFAGLRRQQSESRSKLPVLAVQRGVFKILPIIDWDNRRVHQYLTKHGLEYHPLWEQGYLSVGDIHTTQKWEPGMSEEQTRFFGLKRECGLHENZ

SEQ ID NO: 801 - protein, 577 aa, Photorhabdus luminescens
MNDKQHGPFIVEGKLADSERMKQESNFLRGTISEDLTNGLTGGFEGDNFLLIRFHGMYQQDDRDIRAERAEQKLEPRHAIMLRCRLPGGVITPQQWLGIDKFAEENTLYGSIRLTNRQTFQFHGILKGKVKLAHQLLNQVGLDSLATANDVNRNVLCTSNPIQSELHQQAYEWAKKISEHLLPRTRAYAELWLDKEKVATTDEEPILGSTYLPRKFKTTVVIPPQNDVDLHANDLNFIAIAEGSKLVGFNVLVGGGLAMTHGDKNTYPSMASEFGYIPLEHTLAIAEAVVTTQRDWGNRTERKNAKTKYTLERVGVETFKAEVERRAGVKFEAIRPYEFTGRGDQIGWLKGIDDKWHLTLFIENGRLLDYPGKPLKSGVAEIAKIHKGDFRLTANQNLIIAGIPESEKQRIETIACRHGLIDDKTTVQRKNSMACVSFPTCPLAMAEAERFLPEFVTHVEQLMNKHGIGDEHIVLRVTGCPNGCARAMLAEVGLVGKALDRYNLHLGGNRIGTRIPRMYKENISSQAILSIMDELIGRWATGRQPNEGFGDFLIRTDIIKPVLDSARDFYDWQEAVZ

SEQ ID NO: 802 - protein, 601 aa, Photorhabdus luminescens
MSIKPPSISLLPVSPEQLVRLQSEIGDFSPTQLAWLSGYFWGMVNQQPQVQAVVPAVPAQETITLISASQTGNARRLAEQLREDLLAQKLNVNLFNAGDYKFKQIAQEKILIIIASTQGEGEPAEEAVALYKYLYSKKVPKLNDTVFAVFGLGDTSYERFCQAGKDFDNRLNELGAQRLLERVDGDVEYQQVADQWRKQLTGILKQRIPTETGTEITSAQDRSVNEVFSTSYTKQAPLTAALATCQKITGRGSDKDVRHIEIDLGDSGLRYQPGDALGVWFENDPELVDEVLNLLWLQGTEQVEVNGQKLSLREALISHVELTQNTSVIVEKYAVLAKDEKLLSLIADKQALQQYAHNKPIADMIREAASQPEAQQFIDLLRPLTPRLYSISSSQAEMENEVHLTVGVVRYEIDGRARTGGASGYLADRLQENSDIRIFIEHNDNFRLPADPRTPVIMIGPGTGIAPFRAFMQQREADGAEGKNWLFFGNPHFTEDFLYQVEWQRYVKDGLLTRIDLAWSRDQQHKIYVQDKLREQGEAVWCWIKEGAHLYVCGDANRMAKDVEHALLDIIAEHGGMDTEQADEFLSELRFERRYQRDVYZ

SEQ ID NO: 803 - protein, 224 aa, Photorhabdus luminescens
MFYPINEIFQTLQGEGFFTGVPAIFIRLQGCPVGCSWCDTKHTWEKEVEKQRTLETILLKTSESNEWSKASPKQITALFVQQKYTARHVVITGGEPCLYDLIPLTEELESLGYQCQIETSGTYHVKCSAATWVTVSPKVNMRGGYRILQQALQRANEIKYPVARERDIEALDELLATLNDNSSRIIALQPISQKEEATRLCIETCIARNWRFSMQTHKYLNIAZ

SEQ ID NO: 804 - protein, 462 aa, Photorhabdus luminescens
MQNNETQLKRGLTGRHIRFMALGSAIGTGLFYGSAAAIQQAGPAVLLAYLIGGAAVFMVMRALGEMAVHHPVAGSFSHYASHYLGPLAGFLTGWNYIFEMLIVCLADVTAFGFYMKLWFPHVEQWIWVLSIVCFIGAINLCHVKIFGEMEFWLSIVKVTAIIAMIIGGMIIMIYGFGQETDHATGIASLWEYGGFMPNGISGVIASLAIVMFAFGGIEVIGITASETKNPEKTIPKAINAVPFRILLFYVLTLFILMCIYPWNQIGQEGSPFVQIFSSLGINSAANILNIVVITAAISAINSDIFGAGRMMYGMAQEGQAPKSFTKLSRNGVPWMTVIVMSAVLLIGVILNYMIPEEIFVIIASIATFATVWVWLMILLSQVAMRRKMSKEEVKTLKFPVPMWPIAPALTIIFMVFVIVLLGYFEKTRIALIVGITWVILLSITYFFSKKKNISQIHQINKZ

SEQ ID NO: 805 - protein, 261 aa, Photorhabdus luminescens
VVKKTYAIRYVAGQPVERVFPMSTHQLGNTLPVGTPLITGTNELRVVVWNIYKQQRPSWRKVLKELTNESQLILLQEAQTTPDLVEFATSNYLISDQVPAFLLPQHPSGVMTLATSHPVYCCPLREKEPLLRLSKSALITVYLLQDNRQLMVINVHAINFSFGVDVYSRQLNNIGVHVRLHNGPVIMAGDFNAWSKQRLNALKRFTRYLHLEEVSFTDDYRTIAFGRPLDFIFYRELNIANAIVIPTDASDHNPLVVNFYZ

SEQ ID NO: 806 - protein, 213 aa, Photorhabdus luminescens
GHWENRCLAVNVAMEWVVVENNALASRNLGDCRTLSPEACGKAKELSQRILDKGLPSVEDMRGKLASCQDDSCRKGVWTEYRQASDATINSLKQMALNGELSREELAFINHELGKELAVSGYRANDKIGRSEQSSWLNGGSGPLSGFFNTELRQKELEKSGLSKADAAQYVKEEQRNLLLLETAVGAIGGAASNKIQAKPSSVSSKNNVDKSV

SEQ ID NO: 807 - protein, 398 aa, Photorhabdus luminescens
KEKRKHAPCLRPPLNLNRRSIMANRKPRKGSLLTVDDVYRQPVGPAHDPKSLYALLLRFVAWRQERNWSETTLKVQTHHTYHFILWATDRGLYYAADITRPILERYQRYLYQYRKTNGEPLSIRTQRTQLQPLQVWFKWLTKQNLILANPAADIELPREEKRLPRYILSIDEIEHILSLPDPNTLQGARDRALMELLWSTGIRRSEAARLDIYSIDGSRKTVTIRQGKGNKDRVLPLGERALNWLQFYQQQIRPQLLVTPDIQSLFVAMDGLDGLQPNGITNAVSGYIRAAGIEKKGACHLFRHAMATQMLENGADLRWIQAMLGHASVESTQVYTQVSIRALQAVHASTHPAEQMADEKVRDADEVGLLADLYADDNADTDTPPDSSEPTSTADSRZ

SEQ ID NO: 808 - protein, 1131 aa, Photorhabdus luminescens
ILPAVVYDCRVIFIQTLLTGFYRRSLMTRVPDTDLARLKQTVSLLGLARKQGRPMKKRGEDYVLRCPFHNEKTPSMVISPAKNLYHCFGCGAAGSVLDWVIQTEGVTLKIAIRRLRELAGLPDMDNAVVAASSLAAPPGSQAAPLPRPKLADLDDDGQALLHQVIDFYHQHLLASPEAKAWLERRGLNHPELVSHFKLGYAGHHGISGSAGLLPSKDSQEGQQLRGKLSGLGVLRTTTRQDHFRGCVVVPIIGWAESASVASRGRVLQLYGRRTQPDYKVLKDSPKHLYLSSPLAGVWNEAAMKAAAEIILCEALIDAMTFWCAGFRNVIAAFGVNGFNREHLEALQYHGVKRVLIAFDRDEAGDRGAANVAADLLEAGIEAWRVQFPPGMDANDYALKSGNAEHALGLALQQAVWLGQGTAPGAVFSHERPVLPTVTEKPQSAGVAKSSSLAAPPALTVAPVPCERTASGELLMKSGPRVWRIRGMKKSPVPDVMKVNVQVRDETSGLFHVDTLDMYHARHRQHYISTAAQELECELSVIKREAGRVLLMLEQQQDAQQQADAEASGTTAVTVSAEDEAAALALLTSPNLTEQIINDMAACGVVGESTNLLTGYLAAVSRKLDKPLAVLIQSSSAAGKSSLMDAVLNLMPEEERIQYSAMTGQSLYYLGETSLQHKILAIAEEEGVRQAAYALKLLQSDGELKIASTGKNEQSGELVTREYRVQGPVMLMLTTTAIDVDEELLNRCLVLTVNESREQTQAIHAMQRHRQTLAGLLADSEKGYLTQLHQNAQRLLRPLKVVNPYAHQLTFLSDKTRMRRDHMKYLTLIQAIALLHQYQREVKKTTHRGQVIEYIEVTQDDIALANRLAHEVLGRTLDEMPPQTRKLLLLIQEMVNAQAQIQHCQPNEVRFTRRDIRAFTHWSDSQLKNHCQRLTEMEYLLLHGGSRGHLLHYELLWDGEDNGAAHLCGLLDVGEADSETAGSERKSDPEGRKSSPSPGQVWPESGEEKPASAQTEQGPAGAQVRADENAVIKENNHRGALPVPDRDKTPAAVPTGHESKSDLNERQSASSLGQVRAKSGVKKSPSGQAEHGFSVPQVGVTEDTVIKGKKKTRPLSAPAPQSQPEVNHGKPZ

SEQ ID NO: 809 - protein, 393 aa, Photorhabdus luminescens
VKLPDFNQIIDRHNTSSVKWDFLGRDLYLNKTDLLPMWVSDIDFQCPEAVLQTLYSRIEHGIFGYSERDDLYYQAAIDWFSRRHKLTLHRDWFTSIEGVIPGLALLIQMLSKPGEGVVVQGPYYASFAKIITMNGRMVIENPLLESLEGYKIDYDHLEQILEQHRPPLLLLCNPHNPTGRCWNSDELLQILMLCKRYGTTVISDEIWADLILPWGKFTSILHLGSEWHDNVIAATSTSKAFGLSSLRISNFLIPNPELRRAFIDRLNAHGLDVFNALSMTAATAAYQYGDVWLDELQHYLAENRCWFEQALTSVVPWCRMTKAEGTYLAWLDCRDLNLDDDALQRALLQKAKIAVSMGSSFGNHGKGFIRINLGCPREYLEKAIGGLVQITSZ

SEQ ID NO: 810 - protein, 221 aa, Photorhabdus luminescens
MNRILVALSLLAAFVLTGCSKSVPYDYTAFKESKPKSILVLPAVNKSLEVKAGHSLISHVTYPLAESGYYVFPVAVVEETFQQNGVTAAQDVQDISYKKLHDIFGADSALYLDIEEYGTQYQIINSDTRVTASAKLVDLRSGKQLWHGRAMVSSTENQSNSNNLVGMLVSAVVSQIANTIMDKGHEIAGITSNRLLTAGGSRSLLYGPRSEHYGKENQKHZ

SEQ ID NO: 811 - protein, 204 aa, Photorhabdus luminescens
VRDILSLVRFIPDNQVAVTDGSVRGGAVMALVIGTTQPIDRQIIQDLTGGRLAQADARTLLLNSKIRLIFNIFKAQRPGVQGVFGFVSVTRYHRAVQLGVVTDVNLIAAFASKQPGLLLHAVIVAVQFIAAGIEACGTVSEGTHGGTDARAGILLLAVIALAVLLAAEDQMTFHVGGNLFAADLSAFQRRVPATVQPDALSRLZ

SEQ ID NO: 812 - protein, 247 aa, Photorhabdus luminescens
LLPHIVRAQPLFVLGEFRVGLHQIVAVAARLHGIQAVIRQTRIGCHHAYHRIDCLPFDGLRGQYQWLIFDTVHRRNRRGGRMYLTGLSVCNRDIGALWTGILLPGQRFQVDGFYYGGRVIIAAAFPLRGFGATEPELFVFGLFGVPVSLATFIGGNPFALSGNIVQFADFSIQRPAGDNLAVVISDLRTVERDITPGQNFTGVTLFNLSFLDGPGVLIFVKVITAAAIRHDGIVHFVFIAVGSVHLZ

SEQ ID NO: 813 - protein, 214 aa, Photorhabdus luminescens
PVVTGGLAAEYCIVMLRLFRFDDLSDQPGVGVVNLVGINLQVAPGFNRRCVVIELMGLTGGRQGIIQLAADAHVAHAVNLRMMLVIERCGADVQPVPCRNDRGFAVLSGVIQCARLEGQLVPVNAPGAGIVQGVGREMSQTAVNQSGVAQGIVSLDLRLPGADFTGGAIGEIVSVKMQRPTGFYLAVVEEIAGCFQGQIAIGRGVAGMMKILGZ

SEQ ID NO: 814 - protein, 2951 aa, Photorhabdus luminescens
QNCRWVVLCGVKIMNKQLYRIIFNQSRQMWMVVAEIARAGRGRTGRRYRCPSSPQHRCRLTALRFGLLLAFGGISLTAQAAIVADGQAPGRQQPTIIRSANGTPQVNIQTPGADGVSHNTYRQFDVDKQGVILNNSHQATQTQLGGMVAGNPWLAKGDASVILNEVNSRYPSQLNGWIEVAGHKAEVIIANPAGITCNGCGFINSHRTTLTTGQALMERGRLKGFDVNQGEVRIDGHGMDSTQQSYTDIIARSVAINAKLHAQDLKVTTGRNIVDTAHQQIEKKSIDDEKHPAFALDVAALGGMYAHKIRLIGTETGVGVHNAGNIGASAGEVHITADGWVENRGTLSSRDTLQLTSSADVTNTGKLLSQSAVNLQTKGALRNQGRVEARGDTTVNAGTIHSSHDSVWAAGLDDNGNTTRPGSLTLTAQHVQAKGKNLAADTLAVHSQRIDLSDSQTAASQIQLTASQAGISTARATVNADRLTAKTPGQFNNDGGQLVAKEIHLTTPDLSNQQGKINQTGTGELTLHTRTLNNREGTVFNQGKLTLTTDRLNNRQGTIASQGEDLHLTAHQADNNQGTVQLAGQGRLSLNTQRWLGDKGKLLTNGALTIQAGELQLNQAETQAGQITVNADTLSHQGGVMQQQGKDTLSLTTRKLDNQRGTLAGNGNLNLKATTVDNRHGNIVAAEKGSLTLAVKDTLDNQSGRVLSGGQLTLRTGDVDNTGGIIAADGKTTLTSAELTNTQGQIAGNGGLDIHSQQLINREGTLQSADALTLDTDGQLLDNQQGHILGEGKTTITSGPLDNRHGHLQGGQLAIDTRHAALDNRDGKLLSTDTLTLNTHQLDNRHGQVQAVGDTTLNVDTQTDNTGGLIRGGQQLTLNTAHLINRETKQTDNGLEAQNLTVNAQQVDNTQGALRAANHLKANISQTLNNTQGLVSAGKQLILKSEARQPHLAINNRQGTLIAGEHATINAHALSGDGQLLSQGDMAVTLTEDFHHTGNTAANGNLTLKTTGNLLNDRQIKAGRALHLDTHNLTNSASGEISAGQTQIQAHDTLSNTGLIDGGLTHLTANTLNNTGTGRIYGDQLALQTGTLNNTAQDGKAAVIAARDRLDIGTATLNNQHHAQIYSVGDMRIGGQLDNTLTASGQAHELNNHAATIEAGRHLKINADQINNTNAGLVTQVVETEKSQHHDAVLSGQTTRYDWSQVDTSHRNKYKVHDAIMPDGSRSNDFYEYQYTRTVKETQVKQSDPGKILAGGNITLNSAQVTNHDSQIVASGALDGEIGELHNIATQGERITTDKGRQTHWYAKKTKHKKFGFGGTKTSQGKSRSNYDPAPVIETIDLKTLAWQENTRPQGTDITITDRQTGQIHSAPTAVTPVNGIKNQPLVLPPETVKGQTVDPVIRVVTPDTRLPNNSLYTVQPGSDSHYLVETDPKFTQYKQWLGSDYMRQQLTHDPALVHKRLGDGFYEQRLVRDQITQLTGQRYLPGYNNDEAQFKALMDAGVAFGKQQQLTPGVALSPAQMALLTSDIIWLTNQTVTLPDGTTEVVTVPQVYARVRQGDLSSDGALLAGNTVALNSQGDITNSGTMSGRDVTQLTANNLTNSGFIRGGKVDLAAQQTLTNRGGQIQGDDRVTLKGRDITSASTVRGDEANRWLDRPAGIYVQNDKGTLSLSAINNVQLTASDVKNAGKDGHTEITAGHNLTLDALSTRRTEQGDWGKDNTRRLTQQQDIGSQITGAGEVTLQAGQDLNATAAHVNAGQQLTAQAGNNLTLTTGTASSDLVEHSKQTSKGWLSKSSVETHDEVHDRQALSTTFSGDKVTLQAGKDLNIRGSNVAGTQDVSLNAGHQLTVTTAAEAHDETHLRQEKKSGLMGTSGMGFTVGKASQKVTTDSDSQLSKGSTVGSSQGNVTLNAGEQLRVHGSEVIAGKDLTLTGQQVDITSAENRHHTTTKTEQKQSGLTVALSGAAGGAVNSAVQTARAARTESDPRVKALQNTKAALSGVQAAQAGRLAEAQGSDDKGNNNLAGVSLSYGRQSSRSEQQHRQTTQQGSHLTAGDNLTITAKGDGKGASGQNGDIRIQGSQLQAGKDLQLNANRDIQLSSSQNTEQTTGKNSSHGRSLGMGLTVGPGGTGLNVSANVSRGNGRENGNGVSHTNTTLQAGQSVGLNSGRDTTLKGAQVSGEQITADVKRHLILSSEQDSQRYDSQQQNASAGVSATVGPLTNGTASLNASRNKLHSNYDSVQEQTGLFAGKGGYQVNVGDHTQLDGAVIASHADKTKNTLNTGTLGFKDIKNQADFTVEQQSAGVSLGQPTAGQVLNNLAVNGLSGSNNQGHDSTTTHAAVSDGNLIIRDKAHQTQDVANLSRDTDNAANVLSPIFDKEKEQQRLKQAQLIGELSAQMTEIARTEGKIIATKAAKAKLDHISEPDKAAARKKLVDSGNPHPTAADINKQVYDTAYTQALNDSGFGTGGTYQKALQAATAAIQGLAGNNLGQALAGGASPYLAGVIKALTTDPQTHKVDIATNTLAHAILGAVTAEVSGNNALSGAAGAASGELAAQVLIKQLYGDGTKVSELTEEQKQTISTLSTLAAGLAGGIAGDSTASALTGAQAGKNAVENNALASRNLGDCRTLSPEACGKAKELSQRILDKGLPSVEDMRGKLASCQDDSCRKGVWTEYRQASDATINSLKQMALNGELSREELAFINHELGKELAVSGYRANDKIGRSEQSSWLNGGSGPLSGFFNTELRQKELEKSGLSKADAAQYVKEEQRNLLLLETAVGAIGGAASNKIQAKPSSVSSKNNVDKSVPAEATQVQPNQTANKSSTTTQTDVAKYFGQDRKYWSAEPVPFKGNKVYQRNDLFDPSRIDPKSGKTNVELMRAGRAPIGNDGKPVNLHHMLQKQDGPIAEVTQSFHKDNHKVIHINDNSIPSGINRSEFNKWRSDYWKQRANDFKZ

SEQ ID NO: 815 - protein, 555 aa, Photorhabdus luminescens
MKSSILVLTVFCSVVSGSQAADIADQQLIHQQARQQALEAQLAPPPAEVHLSVPETGESSAFPVETPCFPITHVALAGTENFPHWLPFRRVAQQGENHCLGDKGISRLITQLQDQLINHGYVTSRVLVPPQDLRTQTLKLVMIPGKIRHIRYTPDSGKYIQRITPFPAREGKLLDLRDIEQGLENLQRFPTVQADMNIVPAEQPGESDIVLDWRQSRHWRIATYLDDTGSKSTGRYQGGLTFFLDNPLALSDLFYLSGGRDIHSSAGKGSQNDTLYYSLPFGYWMASVTASHYDYTQTIAGLNQAIQYRGKSQNLAVQLSRVLHRNADQKTLLNGEIYRRTSRNFIDKTEVDVQRRETAGWKLGLSHHHFIGSATLDTRVTYQQGMRWFGAQPAPEEYRNEGTALPKITQFSATLAGPLTLFSQPFSYQTQYLRQISASPLTPQDRFSIGGRWTVRGFDGELTLSADRGWYSRNELDWQTPLKGQSLYLAMDYGEVGGRGSDALLGKHLAGSALGWRGSLKGVSYDLFVGVPLSKPAGFQTSPVTAGFNLYWQYZ

SEQ ID NO: 816 - protein, 327 aa, Photorhabdus luminescens
EMTFRIPFCIACLRQVTSGGVVWVKKEIVCMSKLSKQLVTLARQAGGSFKTVSDRMKIAKRLAESMAILNIQIRDIKNMKINHIEKYIDSRKSENISKRTLQNEMAAVRAIFAMAGRSQLANPHHERLSNHALGLSGTSREGTKMAISDERYHTTLVLARGKDEGVAAAMQLSRYLGLRTEEAVQAAKSLRTWEKALLRGDERVRVVFGTKGGRPRDTTVVERDKVIQAVRTAIKYANKNQGRLIDKPNLHSAIDRYRNIVREAGLTGKSSPHSLRYAYAVEAINYHLSKGLSRKEAEAMVSMDLGHGDGRGHYVARVYNKQCSDDZ

SEQ ID NO: 817 - protein, 661 aa, Photorhabdus luminescens
TGKMMTISYLPDDICRLITRRLTDSLESGGVLWQQPWQAASEYGLPQHALTGQPFSGINVLLLWQTMLQRQLISNRWLTGDDLRALGGWVVKGEKPTTIVRYRPSMSLMRVINLEQCEGLPAELQPGCPLPPRPAPGFAAVQQLVTASGIPVVHRSGIVPVYRSLHDRIELPGCQDYAESTQYWHDLLHQLVHASGHPSRLNRFGLTARSEWDESREQWVTALGTAFLAALTGVRGNLVYPDNTILREHALGSDPWWLFQAANDARRAMDYLQDRRQQLPSQVELWQQMAAVLLSEHYGLPLNDTMLEYDEVVQRHIDEGITPLMAVSALARIYHWERRDQPEGRLFPEELGQASEALALFSSQPSCLNYSRIPATEPADTCEPDRSSQSERLLLPPVASDRSCEDEDNDPSDDNVVELPLAATYREPNPHKQAFIRLFNQIAPHENRWQVFCDFVHMAACSLYNALLQNDEFEADYMQRVKRYSREDAFRLSRLLSEVIMGLEYEAGDFLGAVFMALELGNDQVGQYFTPFPVSHMMARMKLAEGLARLGSGEHEYITVSDPDCGAGGMIIAMYQTMLEAGFNPQQQMLAFCVDIDPVAAMMTYIQLSLLGVPAVVTVGNSLTHVMSQKMVTPMYHLGFWQFKRQRQEAEDEIAMRKASZ

SEQ ID NO: 818 - protein, 337 aa, Photorhabdus luminescens
HISLIQVTIVWHHINPIGDIPYRGNPVNHEISLMSLLRFYIRHQFVERMGLELDDDAIFCLFNESQGDYVNTHIKFTKELLLPVMTHLLDSLSEDPANRARCRNSERILTLWIRGMDAISHVYQDPLLMPYTHPESSGRVDTLIRPDTAVLLNLTAEEFLRLTAQDNLPEDEQIGLEQFSKTQKYWTRFMDYLDKQLTETCLYCFERLGQFLRHLQVEPRLIRRFSFSVGYIDVFMGPQDLHNIDAEEFESGYLEDYIDEVSDGLMTPVQFQVDVVYKNGCVIESFRSDVDIENVNNPTLKDYRDVVDEAITWVDEQFGLKTRSVSLSSPVQRLAAZ

SEQ ID NO: 819 - protein, 307 aa, Photorhabdus luminescens
MPKWYANRLHITGQPDQLDALRQWGLGDRIPYYGQAIHQSIKLFVAGCVGLLQPTETTDFLLYPALVAKGTGGDSPENRAFEQWLALLKENVALDEVTSQQIDRLYQQSGLAERKWETLLPTAQKTIMALFNQKSCDWFGLVDWNGERDTEMLWSHLDDRLTETVPCDLFLLIPTHLASEINGFCGGLLRDHETTHELYIRLYGMAQPRGYDIAWKHNDDGSLTGHFDKTPREPWYEKIIAPLSRQYHCHITHYFKGARSFCGYDTYRNGQREEVSIDELEFGEEDGVRKVIGPAYILGNISHDGCZ

SEQ ID NO: 820 - protein, 243 aa, Photorhabdus luminescens
WDMFPVFQEHVLSVFIDHKKAFITLFNETARYYYRNRVFDDFVQCAAISLHNAVCPDSKLEQGYLQIIKHYKPEDASRFSQLLEHVMMGLEFEPHDFLGGVFMQLNLGNKHLKQFFTPWPISLVMAKMQLSDVEQRLTKQPFFTLYEPACGAGCMVIAAAEVLKMSGYNPAQHMWVSCVDIDVVAASMAYIQLSLLGIPGEVVIGDALTNERHRVMYTPVHWLGNWPCRLRKNRQQYEVQTVZ

SEQ ID NO: 821 - protein, 224 aa, Photorhabdus luminescens
MQGKLILSSICLASAILAGCTTESSNTVQVQKVNSYNTVYQGVRSPIAIGKFENRSSYQNGIFSDGVDRLGNQSKTILISHLQQTGRFTVLERTNMAELKAEAGLQGKSQKLKGAAYVITGDVTEFGRKEVGDHQLWGLLGRGKSQVAYSKVMLNVVNVETSEVVFSVAGAGEYKLSNREIIGFGGTASYDSTLNGKVLDLAIREAVNRLVESVETGAWKPSNZ

SEQ ID NO: 822 - protein, 511 aa, Photorhabdus luminescens
GRLIVLKKIKILLAGASTGKKPLPQSAAIPQTVKAGYFLPSESRLLLDTSRRRQYLQCLWDNSTLSKTRYQTLWLAPLHECVALMQQLPAAPQGPYARLGGLIDVTLQCTAFAVRLAKGQMLPPGVAPETQAAQSVIWNTVVFYAALFHFLPVLAKFEGELDEGQPWYPGLAVPQGAYRFRFKTSSVETMVACHFGVLLAGRLLPAKALTWLASVPDALPSLFCILSGEMKKDNAINQIMTEALNKAGAPTISEVLSVMAASPQVIVSGNPDVSATPLSTAMENVLPSQIRQEDNTMTKIVSSAVKSVDEPLFTAMTVTPEKGRQPDGSTQQLLSLMGMNVVTTVTEQVMVSEAEIAPPYTSIPSQHAVQTTWQNHENAIETSCIGEQFWDWLSVGLMHGGMSINTPKARIHLVGGFVFVSAPAIFFQFLSEKKQADGKEVSQKWKRVQTAFERLGRHRISSGKCFCCCHLYDSADRIGSYQRVHGYLIKSTLLYRGSPVPEDSPFLMISZ

SEQ ID NO: 823 - protein, 339 aa, Photorhabdus luminescens
SEEVEMDSMTWDNLLDEYFFAKILRPATESSYRKVVNTFQVFAGADNRPAQVTRQQVLAWRRYVLHQRGLKGVTWNSKIAHMRSVFNLAIEEKILPQTENPFIGVEVNENKNKKKTLTKKQLTTLYLTMGQFEERERRTGDNHRARCALYPTWYWLTVLDTLRYTGMRQNQLLHIRLGDIDLDERRIILCSEGSKNHYEHQVPVVKWLYPRLEILLERAQAAGAKPSDPLFCVNYFTAKTDRGSETDQLQTIKSFFRRLSKECGFDVGPHRFRHTLATELMKAPDRNLQMVRGLLGHRSIATTMEYIDINLDIAGRALERELMLYIDVEPERGEVLIRZ

SEQ ID NO: 824 - protein, 358 aa, Photorhabdus luminescens
MKKLLALFVIAPILISCTSNKNSEYREEYIKDTNGFDILMGQFAHNIENIWGLHEVLIAGPKDYVKYTDQYRTRSHINFEAGTITIETISPIDPTTYLRKAIITTLLMGDDPGSVDLYSDTNDIQISKEPFLYGQVMDNNGQPIRWEWRATHFADYLIANKLQKRQSGLHVIWSVTIQLVPNHLDKRAHKYLPLIRQASIKYGIDESLILAIMQIESSFNPYAVSRSDALGLMQVVQHTAGRDVFKMKGKSGQPSRSYLFDPENNIDAGTAYLSILQNSYLVDITNATSRRYAVITAYNGGAGSVLRVFSSDKKKAAQIINKMAPGDVYETLTTKHPSAESRRYLMKVNTAQKGYHHZ

SEQ ID NO: 825 - protein, 347 aa, Photorhabdus luminescens
MMEAKQFSTVVLDWYHRYGRKTLPWQLEKTSYHVWLSEVMLQQTQVATVIPYFQRFISRFPDITSLAAAPLDEVLHLWTGLGYYARARNLHKAAQQVVERHQGKFPTTFEDVVALPGVGRSTAGAILSLSQGKHFPILDGNVKRVLARCYAVEGWPGKKEVESCLWQISTNVTPAQEVEYFNQAMMDLGAMVCTRSKPKCEICPLNQGCIAYANHSWTKYPGKKPKQSIPEKTAYFLLMQNNDSVWLEQRPPTGIWGGLFAFPQFESMDLLNGWLEQSGISHSKHEQLTAFRHTFSHFHLDIVPIKINILSFTTCMDENKGLWYNLQQPATVGLAAPVEYLLQQLGZ

SEQ ID NO: 826 - protein, 240 aa, Photorhabdus luminescens
MINNVISPEFDENGRALRRVRSFVRRQGRLTNRQQQALDNLWPKIGVEYQAEKLELGALFGREAPVVLEIGFGMGASLVTMASQNPEKDFLGIEVHVPGVGACLASAEDENIGNLRVMCHDAIEVLENMIPDNRLEMVQLFFPDPWHKVRHNKRRIVQPPFAELIKSKLKVGGVFHMATDWQPYAEHMLEVMNGVDNYLNLSENGDYVPRPSSRPITKFELRGQRLGHGVWDIMFKRIKZ

SEQ ID NO: 827 - protein, 309 aa, Photorhabdus luminescens
VSTTFSNTLLSDILRQVRPLIGQGKVANYIPALAEVPADNLAIAICTIDGQIFHAGDAEKRFSIQSISKILSLTLAMTRYQEQEIWQRVGQEPSGQPFNSLVQLELEKGKPRNPFVNAGALIVCDMLQSRLSAPKQRMLEVVRKLAGCPDICYDSKVARSEMEHSHRNAAIAYLMKSFGNFDNDVLAVLQTYFHYCALKMNCIELAKCFIYLANQGSTIGSEQQILSPRQARQINALMMTCGMYDGSGEFAFRIGMPGKSGVGGGIVCVVPGEFTVTVWSPELDRSGNSLAGCAALELLADRVGRSVFZ

SEQ ID NO: 828 - protein, 241 aa, Photorhabdus luminescens
MLRKIIIAASLLFVAQTQAGYECQVNPQNDIIITSQSVQVVGASGNLQISPDGSVIRDGKNLSLNTEQRQKAQRYQRALRQDLPWIKQETGKHLITARKSLDKVVVETIGKDSNVRHRLSDLESGLNQQINRIIETRSDGMAFHHQAIKLVEKDSRSLIEQSLGGVLQDSINEIGNKQFSLNGDNNQALQSLLGSLGGLQNNLKAEWRTQEEDFQRFGKEVCGKVSGLEQQRIELLNSIKZ

SEQ ID NO: 829 - protein, 325 aa, Photorhabdus luminescens
IFFLGVQYMKKIIPVVLVSLFAVASHSAFSQKSAVFTPNVVTAQADDKVIVKHLSGETEVKKNPQKVVSFDFGTYDSLVKLGLSDRVVALPTGNTPEYLRNSLPKEVENAGGMKEPNLEKLAQLKPDLIVITGRQGSFYENLSKIAPTINLGTDSKNYLVSVESNITLLGELFSKQSEVKDQIVELEKTIVKAQDKAKSADAKVLVLLHNADKLMLNNQSVVYDVVKAQKAELAIPAGEDKTKRVVVTSDMIAQANPDVILIIDRSEAIGAGKLDKAKFEDDKVKSTSAYKNGKITYLKSDLWYLSGGGLESLSAQVNAVADALZ

SEQ ID NO: 830 - protein, 222 aa, Photorhabdus luminescens
KMNIENKEMLYTLSKEDLATELTPYYQDFYDQLSDHQKENISFDMVVNDAYKRLHFNNSEPTDTDGRLKLIEYAGESPCIHAIGIVVADAFKLAFKFMGIHKPERESATQILLKKLGHDAIHELLTIVHNLKNSNSITDKSKHTWSLISAVESILGISGITDCLKETMHWYNWMITGITAIAQLTIWFATGGAAFIAEIALAGPAIARLALDSVDAANTCSZ

SEQ ID NO: 831 - protein, 377 aa, Photorhabdus luminescens
MLKLPPLSLYIHIPWCVQKCPYCDFNSHALKGDVPHQEYVDHLLADLKTDLPMVNGREVTTIFIGGGTPSLLSSQAMQQLLDGVRALLPVSPQAEITMEANPGTVEADRFSGYQQAGINRISIGVQSFSPDKLVRLGRIHGPDEAKRAAHLAASLGLRSFNLDLMHGLPNQSLDEALDDLRQAIELSPPHLSWYQLTIEPNTSFGSRPPVLPDDDALWDIFSQGHQLLTAAGYQQYETSAYAKPGYQCQHNLNYWRFGDYLGIGCGAHGKITFEDGRILRTVKTKHPRGYMQGRYLDKQHQVENEDRPFEFFMNRFRLLEAMPKQDFSDFTGLSETSIRTQIKQALAAGYLSETATHWQITQKGKLFLNSLLELFLZ

SEQ ID NO: 832 - protein, 475 aa, Photorhabdus luminescens
MKMTLPDFHCAEVLVVGDVMLDRYWYGPTSRISPEAPVPVVKVNTIEERPGGAANVAMNIAALGANSHLIGLTGIDDAAHALSEKLRSVKVRCDFVSVPTHPTVTKLRVLSRNQQLIRLDFEEGFDNVDAQPMFERIEQALPHIGALVLSDYAKGALSQVQEMIKLANAAKVPVLIDPKGNDFERYRGATLLTPNLSEFEAVVGHCKDDNELVEKGTRLVKGLDLQALLITRSEQGMSLLSVDQPPLHLPTQAQEVFDVTGAGDTVIGVLATAIAAGKPLNEACFLANAAAGVVVGKLGTSTVSPIELENAIRGRAETGFGVMTEFQLKQAVVDARQRGERVVMTNGCFDILHAGHVSYLENARRLGDRLIVAVNSDASTKRLKGESRPVNPLEQRMIVLSALGAVDWVVPFEEDTPQRLIADVLPDVLVKGGDYKPEEIAGSEEVWAAGGDVKVLNFEDGISTTNIIKAIKNQZ

SEQ ID NO: 833 - protein, 274 aa, Photorhabdus luminescens
MERRKITLIGAGNMAHAIIAGLVKGGYPAELINVCAPSHTRRDALATEYGVNSGSDNIRYAQEADVVVLAVKPQVMVDVCQPLKENVDFSNKLVLSIASGISVARFDALLQDKLNIVRIMPNTPALIGQGVSGLFASEQVSQSDRDFTQALMNSVGKTYWVKDENGINDVIAAAGSAPAYFFLFMESMQQEAERLGFDNQTAREIILQTAIGSAALAASNVDLPFATLREQVTSKGGTTAEALRIFYEGKLPETISNAMQAAIRRAQEMEKQFZ

SEQ ID NO: 834 - protein, 232 aa, Photorhabdus luminescens
MNNIEQNLQDVRTHIAIAAQKCERAPEEITLLAVSKTKPVEDIEKAIAAGQRQFGENYVQEGVEKIAYFANCNDLIWHFIGPLQSNKSRLVAENFNWCHTIDRLKIAQRLNEQRPEGMEPLNILIQINISDERSKSGIQLDELSTLAAEMNKLPNVRLRGLMAIPAPEPDYAHQLAVFRRMEQAFLNLKTKYPQIDTLSMGMTDDMAAAINCGSTLVRIGTAIFGARQYHNZ

SEQ ID NO: 835 - protein, 346 aa, Photorhabdus luminescens
MNMDKLVALSVKHNASDLHLCIGQVPVLRINGVLCPQTQLQSVNNLLLEEWSRQFLSENQRQQLLTSGHVDFALETENGQRLRGNIFRQHSGLSAVLRLIHSQCSTLEQLKAPEIIREMALREESGLILVTGATGSGKSTTLTAIVDMLNSHCCQHIITLEDPVEFIHHSRNCLIQQRQIGLDSPSYQAALKGALRQDPDVLLLGELRDKETIRLALTAAETGHLVLSTLHTRGAVQAIDRLVDIFSAEEKGWVRSQLAGSLKAVIAQQLVSAQGGGRVAIYEVLVVNQAVSHLIREGKNHQITTLMQTGAASGMQTYEQGWQQRKLQGLLAEQTERKIKENAISZ

SEQ ID NO: 836 - protein, 188 aa, Photorhabdus luminescens
MNLQHHFLIAMPSLSDPYFKRSVVYICEHNANGAMGLVINKPIEQISVRKVLQKLKISPEDRDESVNLNKPVMTGGPLAEDHGFILHTPKPGFSSSIKISDDTMITTSKDVLETLGTPRQPKQILVTLGYTSWEKGQLEKEIMENSWLTTNADPHIIFNSPIADRWREAASLLGINIYNIAPQAGHAZ

SEQ ID NO: 837 - protein, 317 aa, Photorhabdus luminescens
MIKLGIVMDPISSINIKKDTSFAMLLEAQRRSWELHYMEMSDLYLHQGEARARTRLLQVENHPQQWYQFDREQDLALETLDVILMRKDPPFDTEYIYATYILERAEEKGTLIVNKPQSLRDCNEKLFTAWFPELTPDTLVTRNAAHLREFHQKHGDVIFKPLDGMGGASIFRLKKDDPNVGVIIETLTEHGNRFCMAQNFLPAIKEGDKRVLIVDGEPVPYCLARIPAQGETRGNLAAGGRGEARPLSESDWAIARAVAPTLQEKGLIFVGLDIIGDKLTEINVTSPTCAREIEAAFPDISITGMLMNAIEERLEKZ

SEQ ID NO: 838 - protein, 256 aa, Photorhabdus luminescens
LLYVYPQEGKKNMRIPRVYHPELLSSNTEIYLSDEAANHVGRVLRMSHGQQLQLFDGSNQIFNAQITEASKKSVKVHISNSELADNESPLNLHLGQVISRGEKMEFTIQKSVELGVNVITPLISERCGVKLDGERLAKKLQQWQKIAIAACEQCCRNRVPEIRPVMQLEHWCAENDGSLKLNLHPRASQSINTLPLPVEKVRLLIGPEGGLSIDEIAMTANYQFTDILLGPRVLRTETTALTAITALQVRFGDLGZ

SEQ ID NO: 839 - protein, 225 aa, Photorhabdus luminescens
MDFNIKVIVLAICIGIVSGMILNKVIAVFIKIIYGYEKIVFGYFQVELVTLFITAFFMIYFSLNFHLYVVLIFVWVLIILSFIDIKIKLLPDIINYPLLWLGLLLNLNQTFVPIEQAVTGAIVGYLILWSLYWLFRIICHKEGLGYGDFKLMAAVSAWLGIGAIPLLMLLSSLFGLIGCLWMWRIRENCQEPVAFGPYIAISAVIMIYLNLLGMDGISWMVPDSZ

SEQ ID NO: 840 - protein, 214 aa, Photorhabdus luminescens
MPGMTLHYIYDPLCGWCYGVSSLIQAAKEVANVKIELHGGGMLTGDNRRQIDNTWRDYVLSQDKRIASLTGQIFSEQYVALLNDKSLIMDSLPPISAILAAEKLAGKGVEMLLAVQKAHYVRGLKISETETLLNLANELQLDSEQFQQELILNNESESLQHIRKSRELLAKVGGSGFPTFILENDRNELSIISLDKYLGQPKRWQDALIHYQFZ

SEQ ID NO: 841 - protein, 355 aa, Photorhabdus luminescens
PFRCSNHAALFYNYSEHLRSSDSIHQLARFMQQIITHYAVFPSKNATYYEPRSHNIRNSIMTRKTTLNIALAGILSLGTISLAQAADLKLDVYNPGEKSLFPVSSEIISGDKEVVLIDAQFQKNDAEALVKRIKDTGKKLTTIYISQSDPDFYFGLEVLTKAFPDAKVIASPETIKEINKTKDGKLAYWGGVLKEQAPKKVIVPQPLEGHSFTVDGEKLIVEGLDGPAADRTFVWIPKLKSVVGGVTVSSNIHVWMADTQTKESRKNWMQTLDRIKELKPTIVVPGHFIGNTPMTLESVHFTQKYLTIFEKELAKAKDSKALIAAMEKHYPKLGDKSSLELSAKVLKGEMKWPQZ

SEQ ID NO: 842 - protein, 306 aa, Photorhabdus luminescens
LMDRITAAQVFTIIVEQGSMIAASERLDMSRAMVSRYLAEMEKWAGVRLLHRTTRKISLTSAGEIAYQRSRKLLQLSEEIPVHQPVEAQELSGLLRISSSQSLAVSALSVAIPEFMQIYPQIAIDMQISNKAINLVEERIDLALRITNNLEPNLIARPLSTCHSVVCAAPCYLAGKMLPQKPADLALHNCMTYNFFGKSLWLFEHRGEKYSVPVSGTLSANESMVLMEATLQGAGIAMQPYYSVASHLASGKLIQLLPEYRPQAMGIYGIYASRQNMPATLRALLDFLVQWFASSPYWQALMLKSZ

SEQ ID NO: 843 - protein, 957 aa, Photorhabdus luminescens
MLPLSTPLLAQLQRVTEHFHQLTLNVEPVAAHEQAILSLSDFVVENLQAHPEWLVEIRQHPPEAQEWHQYTEWLQQLLASVEDENTLMRVLRQFRNKILVRIAWSQALHSITTQETLQQLSMLAETLIIAARDWLYQRCCQDWGTPCNERGEPQPLLIIGMGKLGGGELNFSSDIDLIFVYPENGITQGGRREMDNTQFFTRLGQHLIKVLDQQTVDGFVYRVDMRLRPFGDSGPLVFSFVALEDYYQEQGRDWERYAMVKARIMGSDNQAYGEELRRMLRPFIFRRYIDFSVIQSLRNMKGMIEREVRHRGLKDNIKLGAGGIREIEFIAQVFQLIRGGRELCLQSQALLPTLQIIAKLTLLQSLQVKQLADGYLFLRRLENLLQSINDQQTQTLPEDELNRSRLTWGMGFESWDALIIELNNKMSAVRAIFTQLIGDDSDNSDEEPSHVPFKSLWLEDLEKEELIILAPHLDEEIAQQILHIISVFRHDVGKRTIGPRGRDVLDHLMPRLLAKVCLRQDANNQDVNNRNVNIVLERVIPLLLSIVSRTTYLELILESEAVLAHVIRLCAASPMIATQLACHPLLLDELLDPQFLYEPLPLNAYKDELRQYLLRIPEDDEEQQLEALRQFKQAQLLRIAAEDITGVLPVMKVSDHLTYLAEAIIEAVVLQAWGQMAKRYGVPSHLSQRQGLGFAVIGYGKLGGWELGYGSDLDLVFLLDCPMDVMTDGDRSIDARQFYLRLAQRIMHLFSARTSSGVLYDVDVRLRPSGESGMLVSTIGAFADYQRNQAWTWEHQALVRARMVFGDENLHRDFERIRHQTLCTRREPALLRQQVREMREKMHKHLGSHHSDQFDIKADPGGITDIEFIAQYLVLRYAAENERLVRWSDNVRIFQLMAAYEIMDEDEAAGLTQAYVSMRDELHHLTLQTHSSRVSIHCFSEQQERVRRSWQQWLGEZ

SEQ ID NO: 844 - protein, 312 aa, Photorhabdus luminescens
MPSCSWRHIEIFHAVMTTKNLTEAAILLQTSQPTVSRELARFEHLIKFKLFDRVKGRLHPTAQGLRLFEEVQRSYYGLERIMNAADNIRKFQHAQLSIACLPVFSQSLLPKVCHHFIRQYPETNLTIIPQESPLLEEWLSAQRHDLGLTEHLQTPPGTQRETLITLNEICVLPAAHPLSHKPLLTPEDFSEQNFISLSITDSYRQLIDGIFAEHHIRRRMIMETHSAASVCAMVREGIGISIVNPLTVLDYLESHGKSEICARPFSINIPFTVSLIKPIHRPSSAPVDTFIEHLKAQIALFPQKLKSAFQHZ

SEQ ID NO: 845 - protein, 459 aa, Photorhabdus luminescens
TITKWIFLFLFFTANNGLSADFVRETLMSTTFTPNFTRNNCPNLIPESLGRLPETYGTPLWVYDSETIIQKINLLCQFDVVRFAQKACSNTHILRLMREYGVKVDAVSLGEIERALRAGFCPGQEVSDIIFTADLIDVSTLQRVTELDIPVNAGSIDMLEQIGQYKKGHPVWLRINPGFGHGHSQKTNTGGENSKHGIWYQNLPQAIEKIRHYGLKLLGLHMHIGSGVDYHHLASVCNAMVEQVILCGEDIQAISAGGGLSTPYHQGDERINIAHYFGLWDDARKRIEQHLGHKIELEIEPGRFLVAESGVLMTEVRAVKQMGNRNYVLVDAGFNDLMRPVMYGSYHHISVLPADGRKIEQLPLRETLVAGPLCESGDIFTQVEGGGIAPRALPPVQVGDYLVFHDTGAYGASMSSNYNSRPLISEVLFVNGKPQLIRRRQTIEELLALEEVSCASTSZ

SEQ ID NO: 846 - protein, 812 aa, Photorhabdus luminescens
MTTLSIILFLVLIGILCYHKVNLSLSSLLLLVYTVLMGAIDAWSYWMLLPMAIILFPLNFAPMRHSLLTVPALKAFRKVMPSLSRTEKEALDAGTTWWEGELFRGKPDWKKLHDYPRPQLTAEEQAFLDGPVEEACRMTNDFQISHELADLPPELWRYLKEHRFFAMIIKKEYGGLEFSAYAQARVLQKLAGASGILAITVGVPNSLGPGELLQHYGTEEQKNRYLPGLARGEEIPCFALTSPEAGSDAGSIPDTGVVCMGEWQGEQILGMRLTWNKRYITLAPIATVLGLAFKLSDPDHLLGDTEELGITCALIPTNVPGVEIGHRHFPLNIPFQNGPTRGKDIFVPIDYIIGGPKMAGQGWRMLVECLSVGRGITLPSNATGGLKSVAMAIGAYSYIRRQFKMPIGKMEGIEEPLARIAGNTYLMDAASTLATTGIMLGEKPSVLSAIVKYHCTHRGQRSIIDAMDIAGGKGICLGPSNFLARAYQGAPIAITVEGANILTRNMIIYGQGAIRCHPYVLDEMAAVENNRIKDFDKALFSHLGHVASNTLRSFWLGLTNGRTSSTPVNDATRRYYQQLNRLSTNLALLSDVAMGVLGGSLKRRERVSARLGDVLSQTYLASATLKRYEDEGRQKEDLPLVQWAVQDSLYQAEQAIDNLLSNFPNRLVAGLMRVIVFPLGRVHSAPSDHLDHKLAQILQQPSATRDRIGRGQYLTPNEHNPHGLLEEALHDIIAAEPIHARLSREAGKRLGFTRLDKLAEQALAERKITPDEAAILKRAEASRLRSINVDEFEPEALAVPARVEKLRTEAAZ

SEQ ID NO: 847 - protein, 194 aa, Photorhabdus luminescens
MYQDLIRSELNEAADTLAKFLSDDANIEAIQKAAVLLADSFKVGGKVLSCGNGGSHCDAMHFAEELTGRYRENRPGYPAIAISDVSHLSCVSNDFGYEFVFSRYIEAVGKEGDVLLGISTSGNSGNIIKAVEAARLKGMKVITLTGKDGGKMAGTADVEIRVPHFGYADRIQEIHIKVIHILIQLIEKEMVKAZ

SEQ ID NO: 848 - protein, 256 aa, Photorhabdus luminescens
MCELLGMSANVPTDICFSLGGLIQRGGHTGPHKDGWGITFYEGRGCRTFKDHQPSYNSPVARFVQEYPIKSRVVVSHIRQANRGNVTLENTHPFIREMWGRNWTYAHNGQLRGYRQLETGQYRPVGQTDSEHAFCWILQQLSQKYPRTPSNWPKVFRFIASLADELSKKGVFNMLLSDGRFMMAYCSTNLYWITRRAPFGKAKLLDQDIEIDFQQHTQPDDVVSVIVTQPLTGNEAWNRIEPGRYALFHLGERILZ

SEQ ID NO: 849 - protein, 248 aa, Photorhabdus luminescens
MKKIAAFPAIITIILLLFSSFTPVYTQDTLVQLQQNFPVQPGSPVFIQIFKEERILELYTKNSHGSYQLSKSYPICNYSGGLGPKTTEGDLKSPEGFYRVKTHQLNPNSRYYRSINLGFPNEYDKFRGYSGNYLMIHGECKSVGCYAMTNGYMDEIYHYVESALLRGQYEINISIYPFRMTPQNMLRHRSSSHYMFWLQLQPAYEYFAKNHQPATVSIINGQYVVNATPEKSPLLQHQSQYAFTKMKZ

SEQ ID NO: 850 - protein, 448 aa, Photorhabdus luminescens
MIKIKKGLDLPIAGAPAQVIEDGPTIRHVALLGEEYVGMRPSMLVKEGEHVKKGQILFEDKKNPGVVFTSPACGQVVAINRGEQRILQSIVIEITGDEQVNFDRYDRAQFTQLSREQVEKNLIDSGLWTALRTRPYSRSPAPGSSPKAIFVTAMDTQPLAANSQVIIATDKEAFVDGLNVLTKLTEGKVHVCHSAGSLPNVGNNAQITYNQFSGPHPAGLAGTHIHFIEPVSATKTVWHLGYQDVIAIGKLFTTGTLYTDRVIALAGPQVEKPRLIRTCLGADLLELTQGQLKQGENRIISGSVLCGTQSDEVHHYLGRFHTLVSVLREGREKELFGWIMPGIDKFSITRTTIGHFLKNKRFAFSTTMNGGERSMVPIGNYERVMPLDIMATHLLRDLLAGDTDSAQALGCLELDEEDLALCTYVCPGKYEYGPVLREVLTKIEQEGZ

SEQ ID NO: 851 - protein, 413 aa, Photorhabdus luminescens
MGLKNYFEKIEHHFELGGKLEKYYPLYEAVTTIFYTPGTVTSGGAHVRDAIDLKRMMIMVWLAVFPAMFWGMYNVGQQAIPALYHLYSGAELQQLLVSDWHYCVAQFLGASLTPDAGWGSKMLLGATYFLPVYIVVFVVGGFWEVLFALIRKHEINEGFFVTSILFALIVPPTIPLWQAALGITFGVVIAKEVFGGTGRNFLNPALAGRAFLFFAYPAQISGDLVWTAADGFSGATPLSQWAAGGSQGLVNTVTGQPVTWMDAFIGNIPGSIGEVSTLMIFIGGAIILFTRIASWRIVAGVMLGMVATSYLFNAIGSETNPLFAMPWYWHMVLGGFAFGMIFMATDPVSASFTDKGKWWYGVLIGVMCVLIRVVNPAYPEGMMLAILFANLFAPLFDYLVVQANIKRRKARGZ

SEQ ID NO: 852 - protein, 266 aa, Photorhabdus luminescens
VANDKPKNNDSIGRTFIVVFVLCLVCSIVVAGSAVGLKSQQQEQKLLDKQRNILDVAGLLNPQMSADEVKEAFKRRIKTELLNLETATLESSQGKFNLNDALRSDDTSIALPPEKDLAKIRRRANMAEVYLVKNEQGKTREIVLPIYGSGLWSVMYAFISVDVDGKTARGITYYSHGETPGLGGEVDNPQWRKKWIGKKLYNDEGNPAIKIVRGGAAADDSYGVDGLSGATLTSAGVQNMFNFWLGDNGFGPFLKKVREGALKDGZ

SEQ ID NO: 853 - protein, 210 aa, Photorhabdus luminescens
MADSKEIKRVLLGPLLDNNPIALQVLGICSALAVTTKLETALVMTIAVTLVTAFSSFFISLIRHYIPGSVRIIVQMAIIASLVIVVDQILQAYAYEISKQLSVFVGLIITNCIVMGRAEAYAMKSPPIESFMDGIGNGLGYGVILVLVGFLRELFGSGKLFGITVMESVQNGGWYQPNGLFLLAPSAFFIIGMLIWGLRTLKPAQVEKEZ

SEQ ID NO: 854 - protein, 313 aa, Photorhabdus luminescens
MSVEIELKLIAKPQVIPTIRQQLLLLPHDYFSPQKLTNIYFETSDNQLRGLDMGLRIRGFDDQYEMTVKTAGKVVGGLHQRPEYNVPLAKPELALTLFPPHIWPDNCDVEALQSRLNALFSTDFMREKWVVTYGQSEIEVVLDQGEIIAANRKEPICEFELELKRGIIADVLALAVELAKSNGLRQGNRSKAARGYQLAQGKPKAVWPSTQVEIDMRQSLPSVLTSILAHWQEQEECWLAGLSDGRDGLKQVLTLIQQTIEYSSESEQLDNQLVAINQKLLDMETEAETLCYSSLYLQCKLALTMWLINLCGZ

SEQ ID NO: 855 - protein, 409 aa, Photorhabdus luminescens
MDIIILGVVMFTLIVLVLTALILFAKSKLVNTGNIRVEVNGDPEKSFTAPAGDKLLNMLSSQGIFVSSACGGGGSCGQCRVKIKDGGGDILPTELSHISKREAKEGCRLACQVNVKQNLKIKLPEEIFGVKKWECEVISNDNKATFIKELKLKIPDGDVVPFRAGGYIQIEAQPHIARYEDYDVPKEYREDWDKFNLFRFVSEVKEPTVRAYSMANYPEEHGIIMLNVRIATPPPKNSEAPPGIMSSYIWSLKPGDKVTISGPFGEFFAKDTDAEMIFIGGGAGMAPMRSHIFDQLNRLNSKRKISFWYGARSKREMFYTEDFDQLAAENENFTWNVALSDALPEDNWDGYTGFIHNVLYENYLRDHPAPEDCEFYMCGPPVMNAAVIKMLKDLGVEDENIMLDDFGGZ

SEQ ID NO: 856 - protein, 343 aa, Photorhabdus luminescens
VRKKISSWIALIFAVLLLAACDGLEQKNIHGQTMGTYYSIKFVTGSSAPSPEALQKEIDRLLEEVNGQMSTYRPDSELSRFNQSRQIDRPFPVSPATAKVVKEAIYINKLTDGALDVTVGPLVNLWGFGPEGHVTKAPSASELEKRREWTGIDKLVVEGNNLIKTVPELYIDLSSIAKGYGVDVVAEYLESQNIKDYMVDIGGEVRTSGHNGKDLLWRIAIEKPSDTGMAQNAQEVIMPGNMSIATSGDYRNYFEQNGVRYSHTIDPKTGNPISHNLVSITVIAPVCMSADGLSTGLNVLGPEKGMEVAENLNIPVFMIIKTKNGFEERYSKAFEPYLQKNQZ

SEQ ID NO: 857 - protein, 285 aa, Photorhabdus luminescens
MKNRNITVHGSIVTITTRHDQDYISLTDMVRSFGDESILYNWLRNRNTIEFLGIWEQLYNPANFKPLEFERFKSQAGLNSFSLSPKKWIDATGAIGLYAKSGRGGGTYAHRDIAFEFGSWLSAEFKLYLIREFQRLKEEEARVNSLEWNFQRTLAKVNYRIHTDAIKERLIPPQLTKTQTAIIYASEADLLNVALFGQTAAQWRQNNGNQSGNMRDHATLEQLVVLSNLESINAVLIHQELPAPERLGQLNTIAITQMRSLVGLSDVKQLGKGSQQLPDPSSTQZ

SEQ ID NO: 858 - protein, 339 aa, Photorhabdus luminescens
MRCAYPTFCYYAPDVAFFYTTMLYSNRKLRPLNTDVTTFDFKNIKGNFTMTHKRYSPSWESYMGDFLRGNSGINHLKPQYQSFDAIGLEKQLNENTTYIALLSLEEAKDVLEDIDSPKPKSPFIKKVFSITDPISPYAGNIRDAFDFANVVGEFKKLGIKATEYVGKNGQRYIKISGHAGLRKIINASRYSASNMKMISMGIGQQGINSSIVKGVKFNILFSSAYRAVEYIFKDEYTLADFLGNISVDLAKAAVAAFASWVIGTFAATAFATGASVIVVAGIMLAIGIATTSILDSIDKNFKISETIINLIKKELERKPKTPEANFNQFLHNWGNYGKZ

SEQ ID NO: 859 - protein, 264 aa, Photorhabdus luminescens
LDYEEPSTPRTKVNDRVFTSTEYPADQRIPLHNEMSYRRTWPKYLWLWSQKAADSGGQTTLADYRKVLQRLSNETREEFKSKGVLYERRYNTGFDLTWQQVFQTEERRIVEEKLRSEGVDFEWLDEEQLITRQVVQGVVTHPYTGEESWFNQANLFHPSSLPEEVQLALEAALGVGIFPRMAKYGDGTLISASTLIEIRAAIDAETVYPDWKNGDVAVVDNLAVAHGREPFSGARKVYVIMASPMHCNFFLPNEDMRCKHGTLZ

SEQ ID NO: 860 - protein, 595 aa, Photorhabdus luminescens
MQTWDTLTESRTCADLFANSVTTSDSLYAVRHDNIALTYKELAGKAGAIAQLLISQGVVNGDVVAIFMERSATSLVAALAIWAVGAAYIQLEVSEPDSRINELIERAGGVTVLTDDLNCRRIEHHSYINLDRQILDPQEYIPVSGRKAGDLAYLVSTSGSTGIPKLVAIEHSSIMNYVSAFVERVSPIPSSLASTTTFASDLGNTSIFVALLTGRTLELINREMMLDSIALAKHISKFSIEMLKCTPSQLEMLSREGNLSELLPEKVLIIGGEELTSALAKTLFAANPNLRIFNHYGPSETTIGVLMHQLNGTRLGNDSIPIGKPLNGVEIAVLDDARRPVSPGEVGQLYIGGRALARGYHGDQDLTETHFVDIFGRRFYASGDLVKQNEQGNYLFIGRVDRQLKIRGYRIQPKEIENALLAEPGIKQVVVTSVKSEFHQIDELVAYVVGTARENELLSNLATRLPASHIPSRIYNIDEILVNANGKLDIARLQASVNTVESISSDVTVPCNDIEKLILDIWREVLKRDDIDMQAKFLESGGDSFKSLVVFGRLRRHFPNLTVAQLFKYPSIESLAKVLGGESTAPNKTKVVQLZ

SEQ ID NO: 861 - protein, 1272 aa, Photorhabdus luminescens
GGTVVTTLYSDDAVAIIGVSFRLPQCSNWRELIDILADGRDCIRPIPESRVANTGQILTGNEKEGGWLDEITGFDHRYFGIALSEAEYIDPRQRIGLQLATEAIVNAGYTLKELSDARTAVLVAAHGGPHPDLFQSLSVQGKANPFAFIGSLHAFSAGRIAYLLDLRGPVYAIDTGCSSFLVALHEARNKILTGEADFALVGGCELVLGTLPQSSKNSSGLGVESMTDRCRPFDAMADGAGFGEGGGFVLLKRLSRAHQDHDVIHAVIRGSAINHDGGRSNGITAPSSIAQTEVITAAWHQAGVTATDIGYIEAHGTGTKIGDPIEVQGLVDTFAAYDVQQESCVISSVKSNFGHLSGMAGLAGLVRIIAQFRTGQIFPTAHFQQLNPLCRSTEELPIRVSSSCEPWPRQGQRPYCAGISGFGLSGTNVHLVVEEAPSTLRHKKYEINERLVLISAQTTQDLSTYLSAITNALSSTEASIDEIADILMLGREHFPYRWSCVASSVSHLVQQLTNHGSISLSSSSPSSSLSVGLIFDECSPIDIQLLMKRGETFPAFHRVIKQAENLCSGKTWTLRQRWIIWLLGHHAVLTAFGVTIDLLLAYGVGKLAAQVVDGGLEFVDALRLADEPVTDSTFDHQRLQTLLQEQAELCLVRFSRCGELATAINTLGYQSYDSERSLLTLLGDWFVNGTNLDWQQGCERKINRRLELPFAPFVATYCWPETIENSAMVSDVVPHTSISNSGENVEEILLTQVREVLKEPKLTLDDDFFAAGGNSLNGEQLVVRLNEVLGTDLKLMDLLDCLDLNEFYQLVKDSVQLSSVSTTPEIETRNNKHVLSGQQLAIWAATEIAGESGAYNVPAALLINAEADVAWLEKTLTELVLQQLMLRCSLEYNEQGVNPVIHPPMQVKLVHSEVDLTKYTIATGIPVLTQRLQQMVETPLSPYGIPPTRFELLQVNFSDGVRQALLLNFHHLFFDGWSWRLVLAALSGGKISPPVNDYLNYAMEQYTLLESEQGRKLEAFWYGYLANIPILLLPCDGEGGTASNLQGANLPVMISKDVTERLRQMAMNSRVTVQMIMLTTWVALQWQISAQHDICVAMPVANRQLKDENTIGCYVNTVIVRARLDPHQPFHVVLNAVRQASLSAISHSAFPSDRIQKLMANTSYHLTMFDFQNDVDPIRVLGGNGAVVELLDVDPNGAKYPLNLTCIEYGDELQARLEYSAALFSQDTVSRWLNIYIEALTRLMTLGEETTLFALFDGQDDVLSDIPDFQFZ

SEQ ID NO: 862 - protein, 1679 aa, Photorhabdus luminescens
RYSRFSVLDVDKKMTTMKLIDREYWLMRVGDLTKAAATTADIFPHHEGSLVSAQCPLFPTVTDRLKQVAGNSELLTWAILAAVTSIVLRRIGGVSSVVLHINTEQGKRLPVLLTVPPAVTFREWLSHVRMAAVEAINHGSIDKALLMPFLEHFMPIVVNCAQTETGIAIELIDGVVSVSGIVAATQTLHHLAAGIATLLNKGLFDLDICLNNMAIVDDAMQTKLLARFNSQPDYSSGKSFYRLVLEQAESNPHAIALRDKTESLTYRELFQLALSVALKLKNAGISADDIVALSAPRSARFIAVATGIFFSGGAYLPIDPTLPKARQQHMLKHAKALIADHVVDMPQIVWFSFSELSFQSPVLVDGDEIKLLNQQVTEPSPSELAYVIFTSGSTGLPKGVGIEHRSFLNLLVFQVQNCELKLGVTLPQTAPISFDISVWQMFTGLTVGATVSIVSDDVVKDPQELIQYIIEQKFEYIELVPSLIAVILDILEQSISLKMRVQRQLRGMISTGEVLSTDLARRWHQCMPMVTLLNAYGPAECTDDVTQGKVEEQSDGLYCPVGTPLPNVTIYVLDKDFQLVPPMVGGEIFVGGPNVGRGYIGSNRFTAAAFLPDPFLPVPGARMYRTGDRGRWREDGILECLGRADNQVKIRGRRVELGEIEAVLANHPDVAMCAVELVDMSGFEQLSAFVTQTSDTVVDARSLSKFLAEQLPDYMVPSKFYFLDALLCNANGKVDRKQLKALAKQQPESASYVAPRSKLEQQLCDLWCKYLKLAKVGITDDFFALGGDSIIGIRLIHEAGSLGINLRPRHVLEHPTIASLAKLASTKGEMAANSTPRIEKAPLTSIQQWFFEQRFSEQHHWNQSHVISTTEPLNAEALSLAIQSLVEHHEQLRVCFPKEKGKHYQALRSPYDNLLWFAESDCSEETIANEAHASLSIEEGPLLRIVMLDDFRVLLTLHHLIVDQVSWQILLEDLETAYQAIIQKEMPRFPRKSTQYLYWSQQQAAISPQILPPIQLTAPIDVVQVNSHVSNLYGKRSVAEVKLSESETQYIQEISALVPNGGIPAVLLTGLANTIAVEQGNGQLLIELEGYGRQEENKSIDVMRTVGWFTTIGPFVLPVNAMVTVVEVATAMVEASPYIKTHLQQTYVMEQNPNIGFNYLGRFNTKQQNDGFFSVEEDIGMRRAATGHRPLEWEINAAIVDGKLIITLEYIPSRHNEAAINVLLAKWKSALTKVRYAPNELSDLAPLTPAQHAFFERDNPNENHCNHGVLFTLSRTLSLETVEQAAAALLARFPILGASFMVTTLGRWQGINPQARIAIEQFELQQIALNSLSQKITELANIGHKSLDLLNGPICRIQLYRTAHNLPDKLLIIVHHLVVDPYSWDLLTEDLAALLGGAEAHELDIPTTSYLAWARRLHRLVQDDPALFGVHYWLSQPYEQAQQLVSTDAIGIEANRVEQTTVFDEVQTQQFLKPSEHSQLPVLARLLTLLARSLESHFLSSANNILVELGGHGREDLFDEVDLGRTIGWFTCGFPFLLPFSMGRSFDEHATDVARLLREVPVRGFGFEALRYLSVNPKITEKLKAIPRPQLRLDFEGELLFLNTPDEEKVNPIFIDITTEGTGYWKPQVTPMDYLLCFNISVNDGQMEIRAQFAGDVMPKEQIKTVLSEFNERITHKNZ

SEQ ID NO: 863 - protein, 590 aa, Photorhabdus luminescens
LIKINMKIQTNMQGMNSPNPLTGFKLLWQSARTMKKAIIGTFLALVVTLVCDLAGPFVIRHYIDKATAGTFVYELVLLALGYAIISFAGVIAGLVTSYCSTSAGWGIADAFRRQLFHHVVHNRSILQIESEAQGKLLEKIEGNADIIGKTIAESGFRIIGNIALALGTLVILFSIIPEVGIAITVLVLVVAYVLVKLTNLAVVRWKKAREEKAHIFGFIGDALAAKDDLHSLGRRRWPALQLQKMLSGLLKMERKAYVSGRIFWPITQLFFALSFGLGFGFGLQLLGHNSISIGTLTMIYLYVDRLREPMEEMSSEVDQVQQLMATLSLVVKMLRDEEKVNHNSVENQLPEGPLSVQFDQVDFRYESQGKQVLHNVSFSVDAGSKVGIVGRTGAGKSTLLNLMCGLAQPDSGRVTLAGVEVTSIHPDEFANRVAVLSQKAYLFSATLRENLTLFDNSISDDAIWCALEELEIHKWAKTLPEGLDTLVGVGGRSLSEGEVQMIAGVRTMLQDAQLIIIDEGTSLLDPRTEQSWMRLLEKISANRTVIIVAHRLHTLSTADQVIIMNEGRVEELLHGAGIKTLTKHRELISZ

SEQ ID NO: 864 - protein, 553 aa, Photorhabdus luminescens
GTYIMTGLTHFFPSKMLPSLLSLVRRFSFLYFISMVIWTLIHGLPLVVGFAISQLLDSAVIDPVGSAVWWLLALAVGSMVLRSVILIFGLQIDFTLIFKVSAYLKQRILEGINCSHSGADLGLSQGDMLNRIRNDSDEVASFLGWTADFFYRAVLLLIALVVLLSTDIVTTLALLPMAGGLWLGIALKHKVGALQEEKRQYQGQIAGRITDILAGIRDLRLGGKLDLHIERLSASFERRRAVQAKHQMFTDLLSGLFRNIVMLGTSIVLIIVSTRIVSGDFTIGKLALFLTYIGWVSEQIFFFGRALANYKNADVCYERIQPLLQTEQPASEAPIADDILKSLTVRGLCCNSDTQPISFTATPNQLIVVNGEVGSGKSRMLRGLLALERHLSGSVLWNNKEVCGDVDWWQSPKVTYARQGAGFVGGTVRDNLALGNDAVSDETMERALTAVYLKPGSSDLPEGLDTVLGSGSVKQLSGGQRQRLTLARMLCHSAEVYVVDDCDSSLDTDTARAIWSALPKKWSGIWIVASQNIDLLAQADQVVTIKRRSETSZ

SEQ ID NO: 865 - protein, 207 aa, Photorhabdus luminescens
MRKLHLLLTALMSLSFSLTTYAEGKRYVSDELSTYTHAGPGNQYRIAGTLNAGDEVTLISINRDSNYAQVKDDKGRLVWLPVNQLSNKPSLRTRLPELEQEVKTLTEKLANIDNNWNQRTADMQLKAANSSSIVAELKKENERLKNKLTVAEKKLDAANLQLDDKQRNIILQWFMYGGGVAGAGLIFGLLLPHMIPRRKRNDRWMSZ

SEQ ID NO: 866 - protein, 264 aa, Photorhabdus luminescens
IESFRRDVGMKRVQLTPGLWNYCDRQQTTMTVVIAPFGGGSAYSMTDWVQQLLTDSYRVLVLQYPGRGSRSIEPLPLCIRDLVATAAKDVLLHTQGPLLLIGHSMGALLCHELALLLEQANRTVEYLVLSAARPPHLNSMVPEEILRMSREAWIEELKTNIGNEDKKLLHADVLDLMLPVLRADYLLVAEHKQASGKVHCPILAIGGDRDPWVSPYHLQEWQSLTHDSCQLVMFPGDHFYYRDQLYDIYLYIRQTCLKEGSLRZ

SEQ ID NO: 867 - protein, 545 aa, Photorhabdus luminescens
FLPISHVPWRSLLLSRSALRHLFVYPSNLLKRRKSALMSDENTQTQMKYSSRFEGLTDEYLVVINDEEQYACVHSEWPVATGWRATGFSGTQEACKKWIEEVWTDMRPASLRNGPQSFDNQPLIVIYDEGAALPKDIVTELNGVAPLVLVINSNEHTRERISYFSRFGHVVDGSDIARAVSELAHLNPAGIVTFSERALRLTATLAKHLNLPFHNLETVYRLTDKYKQRVALQEAGIESIRFYLINTVSDWEQAVEQVCLPAVLKPAYGGGSIDTYLIEDPQTGKSLVEKLLSNKQVGFDGGRSLVLEEFLQGRPSLPFGDYVSVESLVVNGEIKHINVTGKMPLSPPFREYGHIWPSVLSDSEQNQIYALTSSAINVLGVNRGITHTELKLTEQGPRIIEVNGRVGGGINEMAKISLNISLLEMAARLALGKMIDLPVFNPEHVYFNICHIAPTRPCEILRINGEDELLSLEGVSSYRPYVWAGATLPGGSQTNEINMVLGKVDNHKAFLDIYQRMGQCLRFHVRFMDSEAVQILDAHELGAIZ

SEQ ID NO: 868 - protein, 403 aa, Photorhabdus luminescens
VPDNINLTDPLTHLRPDIDNIWRQLRNESPVAWHPAVNGQSGFWVVSTHELAMRVYRDSQTFTSVRGNVMATLLHDGDTAGGRMLAVSDGDRHRQIRKELLKSFSPKNLMSVQKRIKNAMHELVRNAVTSGQCDFATDVAPHIPLAAICDILKVPESDRAKLFVNASAALASNSLSVDKVDTRLARNEVLMYFYKCIQTRKIAPLEDDLISNLIAMTQNSLALTEEELVFNCYSVLLGGDETTRLALIGIIKAFAEYPECWAQLRRGEAEISKAVEELLRWTTPALHGGRTATVDVELGGQQIRAGDIVIVWNRSANFDETVFTKPNQLDLNRSDNRHISFSYGAHFCLGAALARIEIIALLEALVELVDQISLSGEPSPIYSTFLSGYHRLPVKLTAAHYSZ

SEQ ID NO: 869 - protein, 1062 aa, Photorhabdus luminescens
IMKERIVLHERIVLHEQFDAMVENAPHKIAISAHHVEMTYQNVQDRATQLAYRLMDLDIGAEDVVGIHIERSSDMIIAMLAALKVGAAYLALPPDYPTERLRYMITDSRTRLVLTRTMMKDSTVIENVATVYIDEIQSVVPKILPQVTSQQLAYVIYTSGSTGRPKGVGVTHHGVTNFVSQKQQYVHFGPNEKILQLAPAAFDASAFEIWGALTNGAALVLASPSYQAIDELPKCLVEHGITILLLTPALFHVLVDYREEALDSVPQLLVGGDAMSVTHAFKYLSRKQKLGKHFLFNNVYGPTEGTTLVSSYSMSSLSIDAIKSPLGKPIVNAEMYLLDEMLRPVRPGERGEIYIGGQSVARGYLYQPGLTSLRFLPDPFSTQPGARMFATGDEGVLSNDGLIEFVGRLDDQVKVRGHRVELAEVEHAIKSCQDVSAVCVVLNIDSDRHVEQLVAHYTTHIDHTTHKNTDVEQAIITRVQTLLPSYMWPSQFIQHEQLPLTSSGKVDRRFLMGWKEAERLEEVVSGELSMTEALVAEIWQQILGPFDVVPDADFFALGGDSLLAIQVIAEAEKRGLNLTLSTLFRTSTLRAMCKDLVLPEQTDNGLTRNPALRGVCRGLAQTEEALSQQNENPLINETDKQRLPVNIETAYPATRLQLGMLFEGLYSGKAIYLDVIARDVNLPLDEKILHDTLQSIAKRHPVLRTKFDLASFSEVMQLVESLPSLPLIVENYTNLDDEQLAARHEKVMVELSQPFDPEEAPLMRVHAAALNEGQFRLAYAFHHAILDGWSESVFILELLRLYQANLVSESVLLEQPAPLSEFVRLEREALDNDKAKQFFSQYSAKEKTDRYQDTDYRKAVLVLPERTVEQLLKNVSDWGIPLKSMFFAGFYLTTAHQLQDIDFVAGMSVNGRPEMEGADLTLGLFLNHIPIKLNLDSANNWQALARQSFDAEKEILPFRRFPYSEIQTMLGGPPFEAAFSYVHFHSRNELLEQGLVNSDEDVRDHTSLPIRVELINDLKGEGILINVTADEKRYGTGFALALAERLSEKIEDIAFVSEQIIZ

SEQ ID NO: 870 - protein, 335 aa, Photorhabdus luminescens; identical to SEQ ID NO: 532

SEQ ID NO: 871 - protein, 335 aa, Photorhabdus luminescens; identical to SEQ ID NO: 532

SEQ ID NO: 872 - protein, 439 aa, Photorhabdus luminescens
MLQPNYDVVIIGGGQAGLCISHYLQKAGIDHVVLEKESELTHSWCHKRWNNFTLVTPNWQCLLPEHPYQGNDPDGFMKKHEIVAYLDEFIEKTNPPAILNIQVEHVKKVAAHEFVIETNHGTTTAKQLVVAAGGYHTPIYPKLSDTLPNHVKVMHSEEYLNVEQLPKGAVLVVGSGQSGAQIAEDLHLAGKKVYLSTGNAPRCARFYRGKDVVKWLFDMGYYETTVKHHRYSEEVRNSTNHYVTGRDGGRDIDLRKFALEGMQLFGHFDDFKEGQFWFKPNLSENLDLADATYNRINASIDEYLEKNNIATDEPASVYQPVWQPEQEITHIDLAKENMTSVIWCIGFKPDYSWLDLDIFQTNGYPKHDRGITIDPNVTFIGLPWLYTWGSGRFLGIDQDAAYVVQHIEQQISQQNIHMPPTLIKGAKSKIKDKRISQMZ

SEQ ID NO: 873 - protein, 370 aa, Photorhabdus luminescens
KLSITACPNASLYAKGDAVMKLNQLLEMLKHTPAMQSKQAIAHNVSIDTTCHMDSLDSLYAYPGDDTAAVSLNGQYVLHACEGMLPSFVTNHPYFAGWSAVMANISDIAAMGGRALSVVNSFWHTSSEHAQLLMQGMQDACRAYGVLLVGGHTNIGVVYQPTLSVAIQGIARKLLSVLHVKPQQKILIALNLKGQFHPNTPYWKCFERVSDRILQSQIALLPQLAEANLVHAARDISNAGILGSLLMLLEATASGAHINLDTIPKPENVDWFKWLQIFPSFGFLLTADTNECEEIIKLFHRQGIACAVIGETNASGVVAVQQQQQYGIFWDFNHQMFTGFCYADALKKLQAKSVQIKPKSQQESMLCPVZ

SEQ ID NO: 874 - protein, 357 aa, Photorhabdus luminescens
LQLLTDLQCNGLKWEGNFGLSRKGGAGPSDHKALSLDGQTMMIPVLNLAVQDSPYTAKPEPHSDKVIVFKNRIPVATLTAPARPRFYDLKTAEGIAYQQIATLHSRDVLATTVLQHCIRMKDKATACQFCSIDQSLKEGRTLIRKRPEQLAEVAKAAVELDGVKQMVITTGTPNTGDRGAKILYDSVKAIKAQVDLPIQVQCEPPDDFAWFQRLKDAGAVSIGMHLEAVSERVRQKMMPGKAEVSLEKYFAAFEAAVAVFGRGQVSTYILAGLGDTELEIVEMSAKLTEMGVYPFVVPFVPIRGTPLEHHPKPDQAFMQSLYPKIGQQLKQHGLNSENTQAGCAKCGACSSLKAYEZ

SEQ ID NO: 875 - protein, 336 aa, Photorhabdus luminescens
MNRIIKAAAVQCSPVLYSQAATVKKICGIILELGKQGVQFAVFPETVVPYYPYFSFVQPPFAMGKEHLKLLNESVVVPSEATLAIGQACLEANMVVSIGTNERAGSTIYNAQLLFNADGSIIQHRRKITPTYHERMVWGQGDGSGLRAINSAVGRIGSLACWEHYNPLARFALMADGEQIHAAMFPGSLVGQVFADQIRATIQHHALESGCFVINATAWLHPEQQRQIMQDTGCDIGPISGGCFAAIVSPEGKLLAEPITQGEGYCIADLDFSLIDKRKRMMDSIGHYSRPELLSLMIDRRPTHVLHELKVETSVQSHPEKLSTFNEEHVETILMZ

SEQ ID NO: 876 - protein, 417 aa, Photorhabdus luminescens
VRVYLVGGAVRDRLLNFPVKERDWVVVGGTSEALLSLGYQQVGKDFPVFLHPQTHEEYALARTERKSGLGYTGFTCYAAPDVTLEDDLQRRDLTVNAIAQTPTGELVDPYHGVDDLNNRILRHVSDAFSEDPLRVLRVARFAARFAHLGFTIASETQALMSNMAINGELSVLTPERVWKETEKALASPSPQVFFQVLRDCGALAVLFPEIDNLFGVPAPEKWHPEIDTGIHTLMVLKVATELTDEVDSRFAALCHDLGKGLTPPEQWPHHYGHGPAGVKLVDQLCQRLRVPNSARDLAKLAAQYHDLVHTVTQLRPKTLLKLFDAVDAWRKPQRIEQLIIISEADARGRTGFENTPYPQGDCLRQAFKVASQVQVKNIVDSGLRGADIGHELRRQRQHALAQWKQQDDTAQDNTVTZ

SEQ ID NO: 877 - protein, 645 aa, Photorhabdus luminescens
KMTGIVTDFISDWVVYEDSIRPLVFEHTSQALIVLDPHQNQFIDVNISATQLLQYERHEIIQKTVTSIFGHFRQLPYLMAFTEEALVKGRAWNNELYIFDRNGEKIQLDITAVSLSYKNKTLLIWSLVDVKDLALRQLNKNADKAIRIGLKESQALQELFIDSDTGKHLLLSSVGDGIYSINKQGLCTFINPVGAKMLGLQPEDVLSDNIHNVHHHTHENGEPYPEEECPIYAAVHDGIVHEGVQEIFWRRDGSCFPVEFTSTPVIRDSEIIGAVVVFRDITDRLNTEKQLTHALEELQDLKSRLEQQNEYLQEEILHENQYDEIIGRSASILQIIEKIKVVAPTDANVMIYGESGTGKELIARAIHQSSHRKQQPLIRVNCAAIPSELFESEFFGHVKGAFTGAVRDRAGRFELADQGTLFLDEIGEIPIELQSKLLRVLQEGTFERVGEEKTRHVDVRIIAATNRNLKEEVKHKRFREDLYFRLNVFPIYSPALRDRKEDIPLLVTHFTKLICDKRKINYLPFSQRHILELQQYDWPGNIRELQNVIERALIIAKQGTVSFKYLLEQDQQQNETTHQNIHNKLQHIEVVLTMQQLKDLEIKNFSLAVKQCKGKIFGDDGAAKLLGMNPTTLISRLKKLGVDYZ

SEQ ID NO: 878 - protein, 299 aa, Photorhabdus luminescens
LDIMEKTMRHGITAAILLCCSASTFATPPQIIAHRAGTGDAPENTEYAISNSLENKADAIWITVQLSKDGIPVLYRPTDLNSLTNKSGLVSAYKASQLAKFDAGYKFGSDGHHPFRNKGLGIPTLEQVLKKYPDTFFYIDLKSPDADPAQQAKALEKVLTKQKSLARTRFYSTNETYLNALPATIQRFESRDKTRTMLANITMAHQCDIPANTDTTRWYGLEMRRNVEVVEKYTLGEARSKSVLSWDKEAMACFRANGGANIILFGIKTEEDFKQAKELGADGVLVDSPKLFSTFKTKZ

SEQ ID NO: 879 - protein, 213 aa, Photorhabdus luminescens
MLYNYWGEFLGLAVIHFLAVVAPGPDFAVTIRQSVRFGRWAGMCTAVGIGAGISVHVIYTLVGVSALMHTTPWLMELAKLVGGTYIIWLGIKFIRSKPTDLAVLENEGIVQASQSRWKAFLMGFMTNALNPKATLFFLAVFTTVVSSNTPILIQMFYGVWMCVVNAVWFVLVSVIFSNTLIRNKFIRKGYWFERVMGLVLIGFAVRLLFMSVZ

SEQ ID NO: 880 - protein, 787 aa, Photorhabdus luminescens
VTYPVSATFLFNDIPRILITMKNSGKPQKTSATATTQPINRTLHYALSSIIMLSTGLPGYLAAQENREQKSKEKPEKSEKVITLSTLSVIGGLNNSVSAGSSVLKKEDIERTQADNIAELLDQLPGVSMSGSPRPGGQTLNIWGMGDTEDVKVTLDDAPKGFEKYLQGSIFIEPELIKRVDVDKGPHNLLDGNGGFGGTVKVVTKDASDLLRPGEDFGGLLKYSYHTNDRQNIYSSAVYGRTIEGFADGLLYMSKRDGGNIKRPDGTRFAFSKSDQASYLLKTNFYLNDANTLTLSAIRSDSDGWQPWAAKRDEIAVPSEADIEKYGWNEAWRRKLVYRDQTDQNYTAKWNIAPEDNPLLNLTATYAYSKTEQHDKRSEKAHSGFLGSLGNESWIDYVDNLADINNKSAFITGPIEHTLLVGVRWHKNQRNTLIHDKSKDKKPEYNYGYFQPTYMPSGEQKTNSFYLQDAMVIGDVTLTPGVRYDHITNIGKPNIAAIYNNNSPNIGHDYRSVTYTGWSPHFGIMWKATQNLSLFSDISRTWRAPLVDEQYEMQYARASVTATSRNLDVERITGLRFGAILNFNNLLADQDNLQIRTTLFRNRGKDEIFTRRGIVCKSPDCGKPLSNYRNLPGYTIQGLEIETFYDSNSLFGKLSYSTIRGQRDASPRDPWGNKTWIAEIPPTSARAMLGVKIPQWQMAIGWTGDFIRKQDRSPKDGDPMATLWSIPKSKGYALHGVFASWQPNFWQGLEARVTVNNLFNRDYRPYLGESVSGVGRNIKFSISQKFZ

SEQ ID NO: 881 - protein, 352 aa, Photorhabdus luminescens
MRKIIHIDMDCFYAAIEMRDDPSLRHIPIAVGGNADRRGVISTANYPARRFGVRSAMSTAMALKLCPQLKVLPGRMALYREVSRHIHQILSRYTEWIEPLSLDEAYLNVTDSHHCYGSATLIAQEIRQSIFDELQLTASAGIAPVKFLAKIASDINKPNGQYVIPPDRVADFIKVLPLRKIPGVGKVMVQRLANMGLETCSDVQKYDVIVLVKQLGKFGQVLWDRCHGIDERLVNPDRLRKSIGVERTLARDIHQWEQCTELIESLYLELEKRLSNVKPDLRIARQGIKLKFDDFQLTTQEHVHPLLDKQDLLQLAQKTWTSRREGRGVRLVGLHVTLQDPEIERQLLLEWZ

SEQ ID NO: 882 - protein, 487 aa, Photorhabdus luminescens
VSELSQLSPQPLWDIFAKICSIPHPSYHEEALATHIVQWAQEKELHVERDQVGNILIRKPASKGLENRKAVVLQAHLDMVPQKNNDTVHDFTKDPISPYVDGEWVTAQGTTLGADNGIGLASALAVLADDNVKHGPLEVLLTMTEEAGMDGAFGLQPGWLQADILINTDSEEEGEIYMGCAGGIDFTTTLALTREAVPAHYKTLKLVIKGLKGGHSGCDIHLGLGNANKLLARFLVAHTQELGLKLLDFQGGTLRNAIPREGHVIVAIPADKAAQLTQLKDNYLDILKNEYAIVEKNLTVLLEEVETDIQALTDDCQNRFISLLNSTPNGVIRMSDVIKGVVETSLNVGVVAMEQDKVNIICLIRSLIDSGKSYIIGMLSSLAKLSNAEISAKGDYPGWQPDASSPVMHLVSETYQQLFDKTPNIMVIHAGLECGLFKKPYPDMDMVSIGPTITGAHSPDEQVHIKSVGQYWQLLTAILKAIPEKAZ

SEQ ID NO: 883 - protein, 416 aa, Photorhabdus luminescens
MANRNLSESLFKPRQKHQETSTLVKHRDPRLIAGNYSTLDGNSHGSWYRMINRLMWIWREIDPFEIEEVLCRIAMTNAQRSDDNLLDTVIGYRKGNWVFEWSHQAMLWQQRALQAEQIPEASNFWLKAANLYSIAGYPHLKGDELSQQAVILANKAYENAARCSGYQLRKIEFKLKEGGCVTGFLHLPQQLQRPSPTILVCGSLDNLQSDYYRLFRDYLAPLGFAMLTVDMPSIGYSSRLRMTQDTCILHQQIIHQLDEIPWIDHTRIGLFGFRFGANIAVRLAYLESKRIKGVATLGAIVHEWLSSVERQQNSPSMYLDMFASRLGIYNVDEKAFRLELGCYSLKKQGLLGRRCSVPMLAGYWQNDIFSPKEESKLIAMSSMDSQLLAIPTTPVYNSFNKALREISQWLRNKVCZ

SEQ ID NO: 884 - protein, 369 aa, Photorhabdus luminescens
MMNSSQTLVVKLGTSVLTGGSRRLNRAHIVELVRQCAQQHEKGHRIIIVTSGAIAAGREHLGYPDLPATIASKQLLAAVGQSRLIQLWEQFFSIYGIHVGQMLLTRADLEDRERFLNARDTLQALLDNRIVPVINENDAVATAEIKVGDNDNLSALAAILGGADKLLLLTDIEGLYTADPRNNPDAKLIPEVYDISDELRMVAGDSISGLGTGGMATKLQAAGIAGRAGIDVIIAAGNKPDVISDVIEGNPVGTRFHGLESPMENRKRWIFGAPPAGEIIVDHGAETAICEKGSSLLPKGIKNIKGDFSRGEVICIRSLSGKDLAHGVCRYNSDALRLIAGHHSQQISQILGYEYGAVAVHRDDMIVSZ

SEQ ID NO: 885 - protein, 418 aa, Photorhabdus luminescens
MLEQMGKAAREAAWQLAQLSTKQKNQALIRIADLLEQESAIILEANQLDMIQAREQGMSEALLDRLLLTPERLTAIAHDVRQVCGLSDPVGEVIDGSLLDSGLRLERRRVPLGVVGVIYEARPNVTIDVASLCLKTGNAVILRGGKETHNTNQATVKVIQQALEQSGLPAAAVQAIDKPDRELVIQLLKLDRYVDMLIPRGGAGLHKLCREQSTIPVITGGIGVCHTFVDESADFDKALTVITNAKVQRPSACNALETLLVHQKIAADFLPALSKYMEEQGVTLHASKSAMVFLKDGAAKVVDVTEADYRDEWLSLDMNVEIVSDMEQAIDHIRTYGTSHSDAILTQSLHNADYFVRQVDSAAVYVNASTRFTDGGQFGLGAEVAVSTQKLHSRGPMGLDALTTYKWIGYGEDLVRKZ

SEQ ID NO: 886 - protein, 640 aa, Photorhabdus luminescens
MLFKFLRLVFRLMFRLTVEGDIKQFNHPKCLITPNHVSFLDGVLLTLFLPVKPVFAVYSNIANRGFMKLVSRYVEIVPLDPINPMAVRILVKEIEKGRPIVVFPEGRITVTGSLMKIYDGAAFIAAISEAVVVPVRFEGLERTLFSRLKGIFKLHLFPKVTMKILPATQLLMPNASSSEQRRRLAGERLHEIMMNARMATRPQETIFESLLVARKQFGRFKPCIEDVSFKEDSYNSLLKKVLAASRILQRFTCQGERIGFLLPNATIMVAAIFGASLRGRIPALLNYTTDSHGLKNALAVASIKTIVTSRQFLKKERLTHLSEQVTEVNWVYLEDLESTVTLLDKLWILWHLFFPKQAMVAQKPDDDALVLFTSGSDAVSKGVVHSHASLLANVEQIKTITDFNPLDRFMSSLPLFHAFGLTVGLFTPLLSGSRIFLYPNPLHYRVVPELVYECNCTVLLGTSSFLENYAYSAHPYDFARLRCVIAGIEKLAENTKQIWQDKFGIRILEGYGMTECAPVIALNVPMMAKVGTVGRILPAMEFRLIPIAGIKQGGRLQLRGPNMMKGYLRMEDPNHLEPPAVKDEHGNIQFDWLDTGDIVSIDEQGFCTILGRGKRFAKQGELDGGKADFVTLCKIAEAEZ

SEQ ID NO: 887 - protein, 273 aa, Photorhabdus luminescens
MTDLSTLFHAAILGVVEGLTEFLPVSSTGHMIIVGHMLGFTGDKAETFEVIIQLGSILAVVVVFWRRLFGLIGIHFGEVPHEGKTNGKLKLSHIILAMLPAVTLGLMFHDVIKSLFNPQSVMYALVIGGVLLITAEILKPKTPKAEGLDDITYRQAFMIGCFQCLALWPGFSRSGATISGGMLMGVNRYTASEFSFILAVPMMMGASGLDLYKSLHFLSASDIPMFAVGFVTAFVVALVAIKTFLALIKRISFIPFAIYRFIVAAAVYWVFMZ

SEQ ID NO: 888 - protein, 403 aa, Photorhabdus luminescens
EQYIVNASSVVQPLLTRGMKAVLVSQFFSAFADNALLFAILAQLKAQFYPDWSQPILQIVFVLAYILLAPFVGQIADRFPKDRVMLFANSFKLLGAFTICLGYDPFLGYALVGVGAASYSPAKYGILVELTDGDRLVKANGLMEASTIIAILTGSVVGGFLSDWNLAIALLVCALMYGIAVVANFFIPRLSAVRRDKGWNLKKMLTDFASACCILWHNKGARFSLIGTSLFWGAGITLRFLLVLWVPVVLGISDNSTPTILNVMVAVGIIIGAGAAARFITLKTVHRCMPAGVLIGVMVVIFAVQHSIWASYVLLIILGIFGGLFIVPLNALLQESGRQTIGVGYAIAVQNLGENIAMLLMLGLYSLVIKIGVPVVTTGIGFGTLLALTITSLWIWNRFQRNZ

SEQ ID NO: 889 - protein, 181 aa, Photorhabdus luminescens
MSEKILTQLSIELGEKLRQQTLSVTCAESCTGGWLAKTISDIAGSSAYFDRSFVTYSNKAKHQMLGVSEAVLQQYGAVSEQVVREMATGALKAAQADLAVSVSGIAGPDGGSEEKPVGTVWFGFAYLTVNGVEVVSRRCCFNGDRNEVRLQAVIYSLKTLLSEIIYLIGFQDASKRQLERZ

SEQ ID NO: 890 - protein, 356 aa, Photorhabdus luminescens
MAIDENKQKALAAALGQIEKQFGKGSIMRLGEDRSMDVETISTGSLSLDIALGAGGLPMGRIVEIYGPESSGKTTLTLQVIAAAQREGKTCAFIDAEHALDPIYAKKLGVDIDNLLCSQPDTGEQALEICDALTRSGAVDVIIVDSVAALTPKAEIEGEIGDSHMGLAARMMSQAMRKLAGNLKSSNTLLIFINQIRMKIGVMFGNPETTTGGNALKFYASVRLDIRRIGSVKNGEEVVGSETRVKVVKNKVAAPFKQAEFQIMYGEGINTYGELIDLGVKHKLVEKAGAWYSYNGDKIGQGKANATIYLKEHPEVATELDKKLREMLLHNAGEFNSAASDYEDNENEEMNNEEFZ

SEQ ID NO: 891 - protein, 877 aa, Photorhabdus luminescens
MSKSTAEIRQAFLDFFHTKGHQVVPSSSLVPNNDPTLLFTNAGMNQFKDVFLGQDKRSYSRATTAQRCVRAGGKHNDLENVGYTARHHTFFEMLGNFSFGDYFKHDAISYAWELLTGKDWFNLPKEKLWVTVYQTDDEAYDIWKNDVGIPAERIIRIGDNKGAPYASDNFWQMGDTGPCGPCTEIFYDHGEHIWGGPPGSPEEDGDRYIEIWNIVFMQFNRHADGTMEPLPKPSVDTGMGLERITAVLQHVNSNYEIDLFRDLITVVANVTGATDDLSNKSLRVIADHIRSCAFLICDGVVPSNENRGYVLRRIIRRAIRHGNMLGAKDTFFYKLVAPLLEVMGAAGEELKRQQAVVEQILKTEEEQFARTLERGLQLLDDELAKLSGDILDGETAFRLYDTYGFPVDLTADVCRERNISVDEAGFAVAMENQRRRARESSGFGTDYNELIKVDERSDFSGYDHNEQQATVTAIFRDGESVNQIQAGEEAIVILDKTAFYAESGGQVGDSGILSNTNCAFCVIDTQKYGQAIGHIGKLEKGTLSVNHNINAVIDIERRDAIRLNHSATHLLHAALRQILGEHVSQKGSLVNDKYLRFDFSHFEAMKPEQIRLVEDLVNAEVRQNSPVVTELMDLETAKVKGAMALFGEKYEEQVRVLSMGDFSTELCGGTHANRTGDIGLFRIIAESGTAAGIRRIEAITGKKAVESVHQQVDLLQDIAQLVKSDIHSLSEKVRMTLDRAKALEKELQQLKDQQAAQESSSLASKAKEVKGVKLLVSQLSNTEPKMLRTMVDDLKNQLGSAIIVLSTISDDKVSLIVGVTKDLTAKIRAGELISSVAQQIGGKGGGRSDMAQAGGSDIEALPSALDSVEEWVASRLZ

SEQ ID NO: 892 - protein, 520 aa, Photorhabdus luminescens
LIPDVSRALSWLEAHPTILKGIRRGVERETLRITSDGSLAITEHPKTLGAALTHKWITTDFAESLLEFITPAGDDIKYTISFLSDIHRHTARVLDKEKMWPLSMPCFIDAEENITLAQYGASNVGRYKTLYREGLKNRYGALMQTISGVHYNFSLPIEFWRAWVGVEDAESGKEQISNGYFRLIRNYYRFGWVIPYLFGASPAICSSFLRGRETSFLFERTEDGTCYLPYATSLRMSNLGYTNKSQSDLNITFNNLHTYIDGLKKAIHKPSDEFAKLGTKQGDKHIQLNTNVLQIENELYAPIRPKRVTRGNESPSDALLRGGVEYIEVRSLDINPFAAIGVNETQIRFLDLFLIWCVLAEAPEMGSDELDCCRKNWNRVILEGRKPGQMIGLGCGSVEEPLAKVGKKLFSDLKRVAAILDSCSGTQYQKVCEELIATFDDSSLTLSARVLEKMKSQGIGGFGLELADEYHQQLISEKYEVISDEQFAIERRASVERQDALEREDTMSFDEYLKQQTGCZ

SEQ ID NO: 893 - protein, 431 aa, Photorhabdus luminescens
LEHVSTSTLLIILIIMVIVSAYFSASETGMMTMNRYRLRHLAKQGNHSARRVEALLRHPEQLISLILIGNNLVNILASALATIIGMRLYGDAGVAIATGILTFIVLIFSEVMPKTIAALYPEKVAFPSSFLLRPLQKIMLPLVWVLNKITLLLMRCLGIKQPTGSSHAMSKDELRTIVHESNAKLSQQHQDMLISILDLEKVTIGDIMVPRNEIVGIDINDDWKSIIRQLTHSPHGRIVLYRDSLDDAIGMLRVREAYRLMTEKKEFTKRNLIKAADKIYYVPVSTPLNIQLVNFQRNKEKAGLIVDEYGDIQGLVTVEDILEEIVGDFTTSMSPSLAEEVSPQSDGTILVDGTANIRELNKAFNWALPVDGPRTVNGMVLEELGEIPALNVQVQIGKYNFEVLSVNDNVIKQVRVTPISLFSDQKAQVIZ

SEQ ID NO: 894 - protein, 278 aa, Photorhabdus luminescens
ALIQPKTIAKTTNAMPVFSIISSFAYLFSLVLIIPGLLRKPKGYRRLALLSAIVALICHAIALKHQIFHVSSGQNLTLLNLGSIVSLLTCIIMTIVASHGRAWFLLPIVYSFSMINLVLASLMPGEFITHLETSFELSIHIGLALLGYATLLIAALYALQLGWLDHQLKNKKLTFTPDMPPLMFIERKMFHITQLGVILLTLTLCTGILYMDNIFSSENIHKAILSIIAWFVYIVLLWGHYHDGWRGKRVIWFNLIGAFTLTLAYFGNRLLQEIMVYZ

SEQ ID NO: 895 - protein, 454 aa, Photorhabdus luminescens
MFDNLTDRLSRTLRNISGRGRLTEDNIKETLREVRMALLEADVALPVVRDFISCVKESAVGHEVNKSLTPGQEFVKIVQNELVKAMGEVNSELNLSTQPPAVVLMAGLQGAGKTTSVAKLGSFLKGKQKKKVLVVSADVYRPAAIKQLETLAQAVGIDFYPSDAQEKPVDIVTQAVQHAKLKFYDVLLVDTAGRLHVDEAMMDEIKQVHKAINPVETLFVVDAMTGQDAANTAKAFNEALPLTGVVLTKVDGDARGGAALSIRHITGKPIKFLGVGEKTDALEPFHPDRIASRILGMGDVLSLIEEIESKVDRTQAEKLASKLKKGDGFDLNDFLDQLKQMRNMGGMASMLSKMPGMSQVPDAVKSQMDDKILVKMEAIINSMTRKERQKPEIIKGSRKRRIASGSGTQVQDVNRLLKQFDEMQRMMKKMKKGGLAKMMRGMKGMMPPGFMGRZ

SEQ ID NO: 896 - protein, 251 aa, Photorhabdus luminescens
MWIGVISLFPEMFRAITDYGVTGRAVKNGLLSIECWNPRDFTYDRHRTVDDRPYGGGPGMLMMVQPLREAIHAAKTAAGEGAKVIYLSPQGRKLNQQGVCELATNEKLILICGRYEGIDERVIQTEIDEEWSIGDYVLSGGEIPAMTMIDSVSRFIPGVLGHQASAEEDSFADGLLDCPHYTRPEVLDGMEVPPVLLSGNHAEINRWRMKQSLGRTWLRRPELLENLALTDEQRILLTEFQREHLTEATNZ

SEQ ID NO: 897 - protein, 269 aa, Photorhabdus luminescens
LKTFQIHNKKMAYRDEGEGFPLLLGHSYLFDSTMWAPQIEALSKQYRVIAPDLWGHGNSEELPEQHSTLADLARDYLALMDQLGIEEFAIIGLSAGGMWGIELVDMAPDRVKALVLMDTFVGLEPEVTYTKYVAMLDAIEQVGAIPQSILQQQIVPAFFSQQPAQHLVDELTQRLVAIPAEILRNSIVPLGRIIFGREDRTHLLEKLDIPSLVITGEQDTPRPPLEGYLMAEILHCDHIIIQDAGHISTLEQPYKVNQELIAFLQQALZ

SEQ ID NO: 898 - protein, 219 aa, Photorhabdus luminescens
MSAIALGMIIFAYLCGSISSAILICRLAGLPDPRQHGSGNPGATNVLRIGGRSTAAIVLICDVLKGMIPVWLAYQLYVPPFYLGITAIAACLGHIYPIFFQFKGGKGVATAFGAIAAIGWDLTGLMMGTWLLTILLSGYSSLGAIVSALIAPFYVWWFKPEFTFPVAMLCCLVLLRHHDNIQRLWRGQENRLWNKLKKKKEMTEKEKKRTEKEQRKEDZ

SEQ ID NO: 899 - protein, 365 aa, Photorhabdus luminescens
MFMQRDALNNVHISGEQILITPKELKQQYPLSDDDLHVIANARKTIADIIQRRDPRLLVVCGPCSIHDVDAALDYAHRLAALSAELSDSLYIVMRVYFEKPRTTVGWKGLINDPYMDGSFDVEAGLHIARRLLLSLVKMGLPLATEALDPNSPQYLGDLFSWSAIGARTTESQTHREMASGLSMPVGFKNGTDGSLNTAINAMCAAAMPHRFVGINQSGQVCLLQTQGNPNGHIILRGGKTPNYSVQHVMECEQQMMQAGLLPSLMIDCSHGNSNKDFRRQSLVVDSVADQIISGNQSITGIMLESHINEGNQSSEQPRSEMKYGVSVTDACISWQTTEAVLRKLHQQISMQLSQRMAVLKKAGZ

SEQ ID NO: 900 - protein, 374 aa, Photorhabdus luminescens
MAAELSQLRDKIDEVDKALLGLLAKRLELVAEIGEVKSQNGLSIYAPDREMAMLASRRQEAEEFGVPPDLIEDILRRIMRESYTSENNKGFKTLCPQLGPIVIVGGLGKMGKLFGRLLTLSGYEVRNLEPQDWPNAEQILAGVGMVIISVPIHLTEEVIRRLPPLPDHCILVDLASVKQQPLQAMLDVHKGPVLGLHPMFGPDVGSLVKQVVVYCDGRQEEAYQWFLEQLLIWGACLHQMSPEQHDKNMSFIQALRHFTTFAYGQHLAQEGADLQQLLSISSPIYRLELIMVGRLFAQDPQLYADIIMSSPENIDLIRRYHQSFGQALEILESQDKRAFVSSFEDVSEWFGDYAPRFMRESRVLLQQANDSRQZ

SEQ ID NO: 901 - protein, 386 aa, Photorhabdus luminescens
MDQNNLLKIREKVSELDLKLLILLAERRQLAFDIAQTKLQDNRPIRDKDRERELLDVLIKKGKSYGLDGFYISRLFQMIIEDSVLTQQALLQQHLNQTPQDSARIAFLGPRGSYSHIAARQYAARHFNQLIECSCHKFQDIFSLVETGQADYGMLPIENTSSGSINDVYDLLQHTNLSIVGEITIPINHCLLVATDTTLSEIKTVYSHPQPFQQCSQYINQFPHWKIKYCESTAAAMQKVAEQNSPEIAALGSEAGGALYQLQVLEQNLANQSHNITRFIIVARQPIEVAEQVPAKTTFIMATGQQAGALVDALMVLKKHNIIMSKLESRPINGNPWEEMFYIDVQANIRSINMQHVLKALAKITHSLKVLGCYPTESVVPVNPSZ

SEQ ID NO: 902 - protein, 244 aa, Photorhabdus luminescens
MIRIKYLVAAATLSLALSGCAGNKNAVPDSPPAEIYSKGQEKLQKGSYPDAIKQLETLDNRYPFGPYSQQVQLDLIYAYYKSSDLPMALASIDRFIRLNPTHPNIDYVLYMRGLTSQALDNSPLQSFFGIDHSDRDPEHARVAFKDFSQLVRYHPNSLYTADAIKRLMFIKERLAKYELSVVEYYNKRGAYVAVVNRIEQMLRDYPDTQSTLEALPYMKSAYTHLGLIAQADKVAKLIAANPVZ

SEQ ID NO: 903 - protein, 326 aa, Photorhabdus luminescens
MAQQIRLNTTVAESQLGQRLDQALAELFPDYSRSRIKDWILDDRVQVNGKLINKPKEKVLGGEEIAIDAIIEEDARWEPQNIALNIVYEDDDILVINKSRDLVVHPGAGNPDGTVLNALLYHYPEIADVPRAGIVHRLDKDTTGLMVIAKTVPAQTRLVESLQLREITREYEAVATGRMTAGGMVEEPISRHPTKRTHMAVHPMGKPAITHYRVMEHFRAHTRLRLRLETGRTHQIRVHMAHISHPLVGDPLYGGRPRPLKGASDEFREVMRNFDRQALHATMLRLYHPITGIEMEWHAELPDDMVMLIKALKADAEAFKDEMDWZ

SEQ ID NO: 904 - protein, 244 aa, Photorhabdus luminescens
MTSLIFPNWPQPTTIKACSSTRLGGISLSPYDSLNLGKHVGDKPDVVEQNRHILAKMAELPQQPVWLEQVHGTRVVRLNGQPLEDNRADAVYTHIPGQVCAVMTADCLPVLFCSSAGDEVAAAHAGWRGLCAGVLENTIAQFNAKPHQIQAWLGPAIGAEKFEVGNEVLHAFTIQHADLSRAFIPFGEKYLADIYLLAKLKLQSVGVKAIFGGDECTVSNKEKFFSYRRDGITGRMATLIWLIZ

SEQ ID NO: 905 - protein, 858 aa, Photorhabdus luminescens
MRLDRLTNKFQLALADAQSFALGHDNQFIEPIHLMSSLLKQEGGSIRPLLTSIGIDAGRFSNQLELALERLPRVQGIGGDVQPSNDLVRHLNLCDKLAQKAGDNFISSELFVLAALEERGTLSDILKAVGATKEKITKAIEQMRGGEKVDDQGAEDQRQALKKYTIDLTERAEQGKLDPVIGRDEEIRRTIQVLQRRTKNNPVLIGEPGVGKTAIVEGLAQRIINGEVPEGLKNKRVLSLDMGALLAGAKYRGEFEERLKGVLNDLAKQEGNVILFIDELHTMVGAGKADGAMDAGNMLKPALARGELHCVGATTLDEYRQYIEKDAALERRFQKVYVAEPSVEDTIAILRGLKERYELHHHVQITDPAIVAAATLSHRYISDRMLPDKAIDLIDEAGASLRMQMDSKPEALDRLERRVIQLKLEQQALKKESDDASKKRLEMLNEELLVKEREYSELEEEWKAEKAALTGTQHIKAELENARISLEQARRSGDLAKMSEIQYGKIPGLEKQLAAATQAESKHMKLLRNKVTDAEIADILARWTGIPVARMLESEKDKLLRMEQELHKRVIGQDEAVNAISNAIRRSRAGLADPNRPIGSFLFLGPTGVGKTELCKALANFLFDSDDAMVRIDMSEFMEKHAVSRLVGAPPGYVGYEEGGYLTEAVRRRPYSVILLDEVEKAHSDVFNILLQVLDDGRLTDGQGRTVDFRNTVVIMTSNLGSDMIQERFGSLNYDEMKDIVMGIVSHNFRPEFINRIDEAVVFHPLGRRHLSAIADIQLQRLYKRLEERGYQVTITQQALEILAEAGFDPVYGARPLKRAIQQEIENPLAQKILSGQLLPGKPVTLDVENSHIVAKQZ

SEQ ID NO: 906 - protein, 380 aa, Photorhabdus luminescens
KWRVKMTISLKDQRINLALSFISGAGSIITEKPEPTMVAENIQASLEKSKVTANRFSIIWGPAVFRVDNGKNSKDNKDDHVLFIVKNRKIPHDYRIVIRGSWSDVNWQVENFAVHETVNWSLWDQNIPEEFKDAKISYGTHIALDYIVNQVKSNNIPGHGESLIDAINKIASEKGIHNITITGHSLGGILASTLGLYLKRLYLNKGNNNIRIHVCSFANPNTGNDVFASYIKSVFNHTSATSYKSHFLRIYNRKDVISLIWNLDGLAKIPTIYEPLIKLDEKLIDRFKKIVLLVQDKGYTKLTPDLPFTAPIAELDLNKQVVFQHIKAYANQYGMNLVEVNDGTQPPIDDLVVINSNLSQDIVAYFLRISLPDNNINISZ

SEQ ID NO: 907 - protein, 376 aa, Photorhabdus luminescens
GVKMTISREDQKINLALSFVINSGGIKTSKSEPSIVSENIHRSLENSKATANKFTIIWGPAVFRVDDVNVKKSVIDKKDDHVLFIAQNRHDPNDYRVVIRGSWSDINWLNEDIIVCKTQDWARWDSRSPENAKIAYGTDMALGYIINQMKSNNPPGYGESLIDAIDKIALKEGIQNITITGHSLGGVLSSTIGLYLKRRYLDKGNNNIRINVCAFAGPTAGNDAFASYSESIFNDISVAGYKSHFLRIHNSIDVVPLAWHIKGLEEVKAIYPVLTVTINGLILSVLDKNYTQIFPDFPIHSQIPISPITSFDNLLANIGNQHTHAYTKEYDMSFITIDDNSNIPTDYDIVVVNDSLSESIIDLFKFLTKDKINITZ

SEQ ID NO: 908 - protein, 398 aa, Photorhabdus luminescens
TLDMLAKASDQHLPDEKWRVKMVISCEDQKLNLALSLIINSGEINGEPDEIETIKSDIKKSLNSSKTTANKFSICWGPEVFNIKEKHHDKKYDHVVMIVKNKNNPNDYRLVIRGTWSKINAIDEDLCVFKTVDWSKWDTDIPQEFKGAKISHGTDLALNTLINGKPIDKDKPNNEDTDSLSLIEALQQIIAEEGKDKILNITVTGHSLGGLLASTIGLYLKKRYINNNNIRIHACSFAGPTAGNDIFASYSDAVFKGTLSPNVYESHFLRIHNNHDIVPLAWAIKDLNKIQDIYPHIEIKLLVDAVILFVLDKNYTQLFPDCSFTITKTLGTIDNLSKMIGYQHIDAYPEGYGMSFIRTENAPVTPNDHDIVVVNDSLSERIIDLFESLTKGKIDITZ

SEQ ID NO: 909 - protein, 338 aa, Photorhabdus luminescens
MRVLGIETSCDETGIAIYDDEAGLLANQLYSQIKLHADYGGVVPELASRDHIRKTVPLIQAALKEAGLTCKDIDAVAYTAGPGLVGALLVGATIGRSLAFAWDVPAIPVHHMEGHLLAPMLEDNSPEFPFVALLVSGGHTQLISVTGIGKYELLGESIDDAAGEAFDKTAKLLGLDYPGGPVLSRMAQKGEVGRFVFPRPMTDRPGLDFSFSGLKTFASNTIHNNSDDEQTRADIARAFEDAVVDTLAIKCKRALEQTGFKRLVMAGGVSANRALRIKMEEVMAKLGGEVFYARPEFCTDNGAMIALAGMIRLKGEVNDSLGVIVKARWPLSELPPLZ

SEQ ID NO: 910 - protein, 374 aa, Photorhabdus luminescens
KLETKMTISLEDQKINLALGFIINSGSIITNQPEPAIVSENIQKSLANSKATANRFSIIWGPAVFRVGSVNNKTSVTDKKDDHVLFIVKDLKNPNDYRIVIRGSWSMTNWFDENFNVGTTENWSIWDSKAPKDAKISKGTHITLDYVINQIKSNNPPGYGESLIEAIDKIALEEGVHNITLTGHSLGGVMASTLGLYLKRRYIDKGNNNIRIHISSFAAPTAGNDVFASYSESVFNGTLLSSYESHFLRVHNRKDIVTLAWSVKGLEEIKVLYPISTLIVNGFISVVKDKNYTQLTPDLPFTAPDLKPSTGLIEKLVLQHIDAYAKEYGMSFIVVNDRANPPTDYDIVVINDGQSRNIRKLFSSIIQDEDNIQZ

SEQ ID NO: 911 - protein, 353 aa, Photorhabdus luminescens
MKKIANYIQVGKYKSGGIFGVGSKQQIIENYLKWKNLVKVSSLLKLPTHEKEITETIKSNLPEICDNEIKEIISFLDENHALMDFNEYNQNDRYSRNYLFYRYAGAIPSLVQDRIKKSTVTIIGCGGIGNHISYLLSTSGVGKITLIDDDTIELSNLTRQVLFSQNDIGRKKTEVLERELNKRNSETNIETINMFISSINDLYKIPRSDLFIVSADHPFELINWINEFCVKERQAYINIGYINDISVIGPFYIPNKTSCIKCQNIMPEYHPKDDILEHIENVNKDFKAATFPSVNGVAASYAFGDIMKYLGSFGNILSTNKRIGIHSLSIKIEEQSIHKNDKCDVCSQKQKLZ

SEQ ID NO: 912 - protein, 400 aa, Photorhabdus luminescens
RMLSKTKIIIYYNVIFNSMRMLVGATSTIFILNHGLTLVDIGLMKTIQSFIYFLFDIPSSYLADKFGRKFAIILSTTFGGVWLIITGIADSKYLFYIAEIFNSISLTILGGVFYSYLIDNSLNDNDTHKILGESNKLQFLFMAIFSIIGSLITDFDDRLVWLIAGSGCIILSVSLSWFLPKSITKNRQPNLSFLKEIKTSIAMLKDNKNYLFITSISLSSSLLYFQIILQYWQPLINYIIEELGVSIFFGIVFSAILLSQSISGWIISKNEDNNKNHLYSIVILLVCSLTCIYGVYEKNHITTISTIIMFGANQVMTTSLRSNYHQIIPSELRSTFDSFISTITRLIAVIVIPLIALITENFGWIYFPILISLIISINILCYFFIKKHHKRKPTWNPKSZ

SEQ ID NO: 913 - protein, 311 aa, Photorhabdus luminescens
MRVLLAPMEGVLDSLVRELLSEINEYDLCITEFLRVVDSLLPVKSFYRLCPELRNQSRTPSGTLVRIQLLGQYPQWLAENAARAIELGSYGVDLNCGCPSKTVNGSGGGATLLKDPELIYQGAKAIREAVPAHLPVTVKVRLGWDSGDRQFEIADAVQQAGATEMTVHGRTKEHGYRAERINWQAIGEIRQRLSIPVIANGEIWDWQSAQNCQSVTGCDAVMIGRGALHVPNLSRVVKYNEPKMCWQDVVQLLQKYIRLEKQGDTGQYHVARIKQWLGYLRKEYEEATMLFEEIRKLKTSADIAHVISLVZ

SEQ ID NO: 914 - protein, 435 aa, Photorhabdus luminescens
LEHFLFMNFKSLGLSADILRAVEEQGYSAPTPIQQQAIPVVLAGKDLLASAQTGTGKTAGFTLPMLQRLNDSPIQMKGRRPVRALILTPTRELAAQVGENVRDYSKYLRLRSLVVFGGVSINPQMMKLRGGVDILVATPGRLLDLEHQNAVDLSRVEILVLDEADRMLDMGFIHDIRRVLNKLPPKRQNLLFSATFSDDIKSLASKLLRDPVSVEVARRNSASEQIEQLVHFVDKKRKGELLSFLIGSRNWQQVLVFTRTKHGANRLAEQLNKDGVTASAIHGNKSQGARTRALADFKDGRIRVLVATDIAARGLDIDQLPYVVNFELPNVAEDYVHRIGRTGRADATGQALSLVCVDEHKLLKDIERLLKREIPRMAIPGYEPDPTIKAEPIQNGRQARGDNRQKNSHRRSGAPSRQRSSSHDVSHKSPNVRGZ

SEQ ID NO: 915 - protein, 231 aa, Photorhabdus luminescens
MSMSVNNTQTARGEQAKQQLLEAALEIFGKSGLTGATTREIALHAQQNIAAIAYYFGSKEGLYQAVAQHITDTIKTEFTHLFKEIDDFFSSSAPYSAENILRMIHEGFLGINRLMIEKESINISRIMAREQLAPTDAYTLIHKQALVPLHSRLNKLIASYIDADEHQLSTMLHTHALMGEVLTFRMARETLLRQTGWNNIGPEEYKLIDQILIQHIDLLLNGLKKHNLNKZ

SEQ ID NO: 916 - protein, 331 aa, Photorhabdus luminescens
MYNKKLTLAILVTAIILSAILGSYYYQGKSDKTLTLYGNVDIRTVNLSFRVGGKLASLQVDEGDTIAANQVIGQLDNGPFTNALNKAKATRDSTKARLAMMEEGYRTEEIAQVRSEVAQREAAWHFANSFFKRQQGLWQSKVISANELDDAKTNHNQALAALQAAKDKLNQFETGYRKEEIAEAKGQLAQAEAAVAQAELDLQDTQLTSPSSGTILTRAIEPGTMLSAGNTVFTLSLTDPVWVRAYIAESHLGQATPGREILLYTDSRKDKPYHGKIGFVSPTAEFTPKNVETPDLRTDLVYRLRIIVTDPDDALRQGMPVTLHFSDSDKZ

SEQ ID NO: 917 - protein, 580 aa, Photorhabdus luminescens
MSSSAYTIRLEKVEKTFPSLNNPAVSSLTAEIYGGSVTGLVGPDGAGKTTLIRMLAGLLKPDSGSIEIMGLDPIKDGVQVRFELGYMPQKFGLYEDLTVLENLNLYADLRGVLGDERKKTYEQLLTFTDLTRFTGRLAGKLSGGMKQKLGLACTLLGKPKVLLLDEPGVGVDPIARRELWRMVHELADDGMLILWSTSYLDEAEQCRDVLLLNQGKLLYSGQPQKLTQKMSGRSFLLGAKQDSRRKMLQHALTLPQVTDGVIQGKYVRLILKPDASPQELLNQLELPDAEIIKAAPRFEDAFIDLLGGGSTRHSELAEIMPRIAANPAETVIEAQDLTKKFGDFAATDHVDFQVKRGEIFGLLGPNGAGKSTTFKMMCGLMVPTGGKALVLGMDLKTSSGKARQHLGYMAQKFSLYGNLTVEQNLKFFSGIYGLQGRKQKEKIDGMIDAFNLKSVLHQTTDQLPLGYKQRLALSCALMHEPDILFLDEPTSGVDPQIRREFWLHINGMVDKGVTVMVTTHFMDEAEYCDRIGLVFRGKLIAAGTPDDLKQLVATDENPDPSMEQAFIDLVVNYDEELQQZ

SEQ ID NO: 918 - protein, 391 aa, Photorhabdus luminescens
GATTMSSPTQHAPQQAVRFSWWRLKALCVKETKQILRDPTSGLISIVIPLILLFIFGYGINLDSSTVRLGILVEQQSEDARELIQAFAGSPYIEPKISDNRQQLINMMQSGEIRGLVVIPVNFDAQLARPDGKAQIQVITDGSEPNTASFVQNYAKGVWQIWLQQRGQDQGNAVNPLIDMQVRYWFNPATISQHFIIPGAITIIITVVGAILTSLVVAREWERGTMEALLSTQITRTELLLSKLLPYQVLGSFSMLLCMLVAIFVLDVPYRGSLWILSAITSLYLATALGIGLLISTVTRNQFNAAMIALNVAFLPAIMLSGFIFEINSMPAFIQVVTYFIPARYFVSSLHTLFLAGNISTVLVINLLLLIASAIVFIGLTAWKTQRRLDZ

SEQ ID NO: 919 - protein, 369 aa, Photorhabdus luminescens
MFYRLYTLIIKELQSLLRDPQTRAILVMPVIFQMILFPLSATLDVTNATIAIFDEDKGKASIELTQRLAKSKAFPDVLLLNHSQEIQPVIDHQKALLLVRFPQDFSAKIASHDPVSLQVLLDGRNSNSAQIAAGYIQEIVLNYQQELMGNLPKANNSELVIRNWYNPNLDYKWFVVPSLVALITTVGILTVTALSIAREREQGTLDQLLVSPMTTWQIFIGKAVPAVIVATFQATLVLAIGIFCYQIPFSGSLALFYCAMLIYSLSLVGFGLLISSLCYTQQQAFIGVFVFIMPAILISGYISPVENMPGWLQDITWINPIWHFNDITKQIYLKDADFTVIWRSLWPLLAITATTGNLAYWLFRRKIAZ

SEQ ID NO: 920 - protein, 485 aa, Photorhabdus luminescens
MDDKKKLNLGLAILPIAAMLLLLVIGYGQLNLRIESLLLISAAIAATLAYWQGYRWNDIIDAIVTKLAKAMPVIMILICVGGLIGTWMFSGTIPYMVYWGLKLISPQYILIAAFFITSVISVCTGTSWGSAGTVGVALMGVAAGLDVSLAAAAGAVVSGAYFGDKISPLSDSTNFAAIVADTDLYSHVQHLMYTTIPGFVLAAIVYFIVGHTSLTGNVATPEKVTEIVQSLESLYHFNLLLILPPILVLWGAITKRPVIPVMLAACALAIVLGIGLQGLTLKQGLNALIDGFNLSMFSDQGHNITGVVSDVSRLLNRGGMFSMMSTILLAFCAFAFAGALALTGALTIIINRLLQVVHTTGQLIAATLATTILVTGATCNGKLALLIPAELFKDAYRRMGLDNKNLSRTIEDGCTVIEPLIPWTAAGIYMATTLGVSTLELLPWAIQCYSAIFFALIYGFTGFGIAKITPENSLNKKEIQREIAZ

SEQ ID NO: 921 - protein, 582 aa, Photorhabdus luminescens
MAGRIPRAFINDLLARTDIIDLIDVRVPLKKQGKNHHACCPFHNEKTPSFTVNGDKQFYHCFGCGAHGNAIDFLMNYDRLEFVESIEELAAMHGLEVPYEAGSSHSQIERHQRQNLYQLMDKLNSFYQNVLNTPAAQQARQYLAQRGLSEEIIHRFSIGFAPAGWDNTLKRFAHNEEDRRQLNDAGMLVANDNGRTYDRFRERIMFPIRDRRGRVIAFGGRVLGDALPKYLNSPETEIFHKGRQLYGLYEAQQNHSDLSRLLVVEGYMDVVALAQFGIDYAVASLGTSTTSEHIQLLFRATDNVICCYDGDRAGRDAAWRALETALPYLNDGRQLRFMFLPDGEDPDSLVRKEGRKAFEQRMEQSHTLSEFLFESLLPQVDLSNPEGKTKLSSLSVPLINQIPGEVLRLYMRQELGNMMGIPDAVQLERLLPQHLESGNNYQMPQLKPTTMRILIGLLVQNPHLAALVPPLQGIMQAKIAGLPLFMELVEVCLTQPGLTTGQLLEQYRDNKFSKQLEKLATWNDIQVEEIAENTFRDALDHLVDSALEERLDILIARARTEGLTPEEREEVRLINESRARKZ

SEQ ID NO: 922 - protein, 399 aa, Photorhabdus luminescens
NYFPSVQDNYRLIKMKKNLLLIPCISIFIAQLGMTMYLPAVPEIASDLHLNINHTSWMLSSYLIGMASLMLVWGGICDIWGGKKSMFFALIILFACSVGVTLSTNIYSLILIRFFQGVGAGGVSVIARSILRDNFRGDELAKALSYLSIAFVISLGIGQSIGSVILTILGWKSIFYVLAFGALISMLLLSAKKYNHSKNEKNSVYKYINLLKNKYYIYAVFIGGIGYGAIISFNIMAPLIFKFNFGWSESQYGIIGIPISMSYLLGAIILNRYIVYCGRANLMKIGIILILIGGVVMFVGSIVGGILEIILYSAYFLVVLGQAINYPISLSIASDKTPVTGSSVMALIGFIHQIIAAFVGGITGLFSYKESYILPLTIIVLSSFLLFLFYKVNKKSEKZ

SEQ ID NO: 923 - protein, 450 aa, Photorhabdus luminescens
FLIHGNINCYKGKVYYIGAMIHDILTREFNGVYYMNNNKFINYKKIINISESDWENAENNKISGLDVKVSGINYMTDQYGREFHHFCTTSYLGLDYHKDILNGAIDAIKETGSLRIPNSKNRCKLSILEDYERELSALFNAECLSTLSCSSASSGILPLLASGVFTGNVNPVMVFDKYSHYSMNHLKPSCADETEVITAPHNDMGYLEDICEIHKKVVYVADGVYSMGGVADINSIMYLKERYGLFTYLDDSHALSAIGDKGCGYVRSHIKELDEDSIIVASLAKSFAASGGLVMLGSRNQKKLIHRYGGPSNWSQSLNSAAIGAGRASIRIHYKPELKELQEKLKKNIQLFDSLITTDQFGSSTAIRLIQCGDASLANKTAAFLAENGFFTSSVFFPVVPQGRAAIRVTLRADMDSDLIKRFCYLITDFLRESLYQESATLNSLISVAZ

SEQ ID NO: 924 - protein, 237 aa, Photorhabdus luminescens
MDRYPRSNGSIIQQAGTGLQTYMAQVYGWMTCGLLLTAFVAWYVSQNQNVVLYIFSNSILFYGLIIAQFGLVFVLSGMINRIGASLATGLFMLYSALTGLTLSSIFVIYTIGSVASTFVVTAGMFGALSFYGYTTKRSLSGLGSFLFMGLIGIILASLINLWLKSEALTWAVTYIGVVIFAGLTAYDTQKLKEMGEDLDVNDKENLRKFSIVGALTLYLDFINMFLMLLRIFGDRRZ

SEQ ID NO: 925 - protein, 328 aa, Photorhabdus luminescens
MVKQLTDAFARKFYYLRLSITDVCNFRCTYCLPDGYKPRGHHSFLTLPEIRLVGRAFADLGTEKIRLTGGEPTMRRDFTDIISVIRENKLIKTLAVTTNGYRMERDIAKWKEAGLTAVNVSMDSLDPRQFHAITGQDKFFQVMRGIDAAFAVGFSKVKVNVVLMKNVNDISLSAFLHWIKDRPIQLRFIELMETGDGGEMFRQYHISGEIIRERLLLDGWHLLQRSRSDGPAQVFSHPDYQGEVGLIMPYEKNFCQSCNRLRVSSIGHLHLCLFGEQGIPLRDLLASEKQLDDLKLRIQDGLRHKRETHFLHQGDSGITPNLSVIGGZ

SEQ ID NO: 926 - protein, 303 aa, Photorhabdus luminescens
MRNRTLADLDRVVALGGGHGLGRVMSSLSSLGSRLTGIVTTTDNGGSTGRIRRSEGGIAWGDTRNCLNQLITEPSVASAMFEYRFSGNGELAGHNLGNLMLKALDHLSVRPLEAINLIRSLLKVNAHLIPMSEQPVDLMAIDDQGNTIYGEVNVDQLNCIPQELMLYPPAAATKEALDAITQADLIIIGPGSFFTSLMPLLLLEDLTQALRRSNANMIYIGNLGKELSAAAAELTLKDKLEIMENKIGSRIIDAVIVGPCTNISELNDRIITQQILEAQDVPYRHDRELLHQALENTLQNLGZ

SEQ ID NO: 927 - protein, 338 aa, Photorhabdus luminescens; identical to SEQ ID NO: 778

SEQ ID NO: 928 - protein, 404 aa, Photorhabdus luminescens
YGKRQICGNNRLSTDSSLTEKMMETVDDFAQLKSQLAAFTFLNGDGLTVSRLGISITLFFKQGYTQEKKQRILACYRRFREEFGTHLRFHSHELEGLKKYSPENIAKVEEAILNQKKNQPSSWVVSDAKNIYEAPRYLMRYLDSDEDDGDDDSSYLSLTLPWDYLKEQDGMARFMAWLDFLCEQLEPDSGDCGYSLALPRDYHDYFPLEYQLAQRYPSLQVNSTVHTAVLQYEHSIRGINWITLLSKRFVNRLGGEFWIRQVLRPYRDVVITSYRDGLIIQAGQYPDLTPLPGSVPESYFAINQLIRPIRVIPREGHSLHFYGEGHFNSTSTLAWYARYDRGPLHVTPLRGDHPALVSGIWQTESLPGKQYFFAQGAMAFDVEGAEPGTTAWHLIRETENTTEZ

SEQ ID NO: 929 - protein, 448 aa, Photorhabdus luminescens
RNAGNGSDYCRCCHCYPCHPCRRCRADCTGGNFSRCCCGKRRCIGHRLGNIGECDICHRFIINGENMETVDYFAQLRSQLTSFLFLNGDGLTVSRLGLSITLFFKQGYTQEKKQRILACYHRFREEFGTHLRFHSHSLKGLSKYSPENIIKVEEGILARKKNQPCGWVVSDAKNEDEAPRYLMRYLDSDEDDGDDSSAYLSLVLPWDYLKEQEGMARFMAWLDFLCEQLEPDWGDCGYCLVLPKDYYDYFPLEYQLALRYPSLQVNSTVHTTLDDYAHSIRSMNWITLLSKRFVNRLGGEYWIRCTLARYPDVVISSYSNGLIIRAGKYPDLTPLPGSVPESYFAINQLIRPIRFVPGEGDSLHFYGEGHFDDISTLAWYARYDRGPLHVTPLRGDHPALVSGIWQTESLPGKQYFFAQGAMAFDVEGAETGTTIWHLIREAANMWEZ

SEQ ID NO: 930 - protein, 467 aa, Photorhabdus luminescens
HAGRVCDGIYGGISMTISNSGKMCPAVTSINCTMEIGVFPADEDPCYLARKAEYALRLPAMIITKLGAIRFLNQVIMSGLIKVEELKHDFLWPYKAEVVFAIRGPKDVPLPMLATSLASKQRYSDNLPQSSNPFARPSADDVEKFGVKRIRRPDIILVKDEVLRWPGRNATYFDGSVHPDNLKMLIEVKFPGDKLSEDQEKDYIRIATRSRFGVMRVDDNRTEEQKQYDEAWRKLYQPSSQHYKNPIPLAPLLPGSPPDDEALPAPPAEGMPGTIPQPLTKKLPLVSTSPWSFLPSYEDWVILGQEVAGLTEQGLDYIRDSTRELLAQFGAWLNQAGKWVCEEIIDPISHQASYAFSWVSAQTGKIVTWTESEIKARWQTVQQGSDITLEELKNISWMQILKEVGEGMLEMVVIIAGVAIVILVTLAVAAALIALVEILAAAAAVSAAALATVLAILASVTFATASZ

SEQ ID NO: 931 - protein, 705 aa, Photorhabdus luminescens
MDGLVFTCRIGVLPQTTFQVAQFTLQEELSQLYRLTLKVVSSRDDIPLNEQLGDSASLTITRNGVTERTINGMITGAEQGNTDGRSTFYIFTVRPKMWLMTLNQDSRIFHRKSVPEILTILLKEHYIFFARDTLYKRHVEREYTTQKRESAYDFWCRLAAEEGIIFWFEEEQTLFCDCRLGMQADIDLTYNTHPETDETDTTAYQWSYGEYLCSNGTIQKDHNFLNPKYSLEHQKQSDDSGHHSVFESYGRFQWDEEGKPFTQLRLEQLRNYSKVGTAKTNCIRLRPGKIFTLQSHPIEAMNARWQVISVTHHGWQPVASNDGGEGTTLTNEVAFIPGNQDWRPPYRYKPLADGDEVATVVGVGSEEIYVNEHGAIRIHFHWNRYDKADDNASCWVRVAQGWNGNGFGFMAIPRVGQEVIVSYLNGDIDRPIVTGCTYNGLNRPPLDLPREKTRTTFKTRTLGGQGFNELRFEDNKGREEVFIHAQRDMNSQILRDKTTQIGHDQQTEVAHNRTAIIKNDDDEAVQGGQTLEVGQNQTVTIKGQQAISIGKSHQLNVADNQQITVGKHITVHSESGQIIIGNAGGQIVIDPMGNIRIEGVSITMTDHITGKKSAGALFDYSARYTLLSEQSGKPLAHTRYTITTAGGQTLSGKTDAQGRTVTVQSEAEENLQLSSPEASPKPKKTLCEVGDNTPVEYVMEFMEEZ

SEQ ID NO: 932 - protein, 622 aa, Photorhabdus luminescens
LKCGYRLMEQNPQSQLKLLVTRGKEQGYLTYAEVNDHLPEDIVDSDQIEDIIQMINDMGIQVMEEAPDADDLMLAETANDTDEDAVEAAAQVLSSVESEIGRTTDPVRMYMREMGTVELLTREGEIDIAKRIEDGINQVQCSVAEYPEAITYLLEQYDRVEAGEARLSDLITGFVDPNAEEELAPTATHVGSELPQEELDDDEDDDDEDSDDDSDDDNSIDPELARQKFQELRQQYDITRQEIKENGRNHPNTAAEILKLSEVFKQFRLVPKQFDYLVNNMRSMMDRVRLQERQIMKMCVEQCKMPKKNFITLFSGNETSDIWFTAAKAMNKPWSEKLLEVEDEVQRSLQKLRQIEEETGLTIEQVKDINRRMSIGEAKARRAKKEMVEANLRLVISIAKKYTNRGLQFLDLIQEGNIGLMKAVDKFEYRRGYKFSTYATWWIRQAITRSIADQARTIRIPVHMIETINKLNRISRQMLQEMGREPTPEELAERMLMPEDKIRKVLKIAKEPISMETPIGDDEDSHLGDFIEDTTLELPLDSATSESLRSATHDVLAGLTAREAKVLRMRFGIDMNTDHTLEEVGKQFDVTRERIRQIEAKALRKLRHPSRSEVLRSFLDEZ

SEQ ID NO: 933 - protein, 670 aa, Photorhabdus luminescens
MSKVFKLHSDFQPGGDQPEAIRQLQEGLEDGLAHQTLLGVTGSGKTFTVANVIANLNRPTMVLAPNKTLAAQLYSEMKDFFPENSVEYFVSYYDYYQPEAYVPSSDTFIEKDASVNEHIEQMRLSATKALLERRDVIVVASVSAIYGLGDPDSYLKMMLHLTNGMMIDQRSILRRLAELQYTRNDQAFQRGTFRVRGEVIDIFPAESDEHALRVELFDDEVERLSLFDPLTGQVQYHVPRYTVYPKTHYVTPRERIIQAMEAIKIELEQRRKVLLANGKLLEEQRITQRTQFDLEMMNELGYCSGIENYSRYLSGRTEGEPPPTLFDYLPADGLLVVDESHVTIPQIGGMYRGDRSRKETLVEYGFRMPSALDNRPLRFEEFEALAPQTIYISATPGKYELEKSSGDVVEQVVRPTGLLDPEVEVRPVATQVDDLLSEIRIRAVKNERVLVTTLTKRMAEDLTEYLEEHGERVRYLHSDIDTVERVEIIRDLRLGEFDVLVGINLLREGLDMPEVSLVAILDADKEGFLRSERSLIQTIGRAARNLHGKAILYGDKITDSMAKAIGETERRRAKQQIFNEKHGIVPKGLNKKINDILQIGQPAGGKRKGRGKAVATAETFSNLSAKELESKIRELEAKMYQHAQDLEFEQAASVRDQVQALREQFIANFZ

SEQ ID NO: 934 - protein, 208 aa, Photorhabdus luminescens
RILMKTSNAQRKTNIIKNIEYLIRTRGETKSSFSNRTGLTRTTIYKILEGQVNNVQQSTVLRISDFFGVSCEEIEYYDLEQLERLNETLSTEGNKNPSAIPIVPQSEFLAVSEKKIGQLVTEYPLTYFFGDESNMLALKVESAIEDTFIPGEVIIIKRPPALVTNTPLLYYAKEIGFFIRQEKNDDSLDRKPYRNAHFLGYIVGERLZ

SEQ ID NO: 935 - protein, 298 aa, Photorhabdus luminescens
MTANQKFKLLGFSRYGKLSANVMVLATGKTITMGLKELVDSDISEDLSRHELSTIYRKLYSHSNIVTAYELGDRHERSWQAYLLISIALSVIYIFSTICGVKPIHIPILNIVTPPGVFIYPITFLLVDILNEFYGLRLARRTIIISFAANLLFVLGLWGTALMPGVPGWEFGATYNGIVNSIVSVLLASSLAYFISENINSYLLCKIKSLTNSKYLFLRVITSTVIASAFDSIIFCSIAFYGVLGIDIIKEMIIAQFLIKVAYSILGVGPIYLVRKIFRNYINRPEDTPVNKKLAEVZ

SEQ ID NO: 936 - protein, 227 aa, Photorhabdus luminescens
VTKRWFLTGTDTEVGKTVVSCALLQAATKAGYKTAGYKPVASGSEITPAGVRNADAVALLANSSVSLQYEEVNPLVFVEATSPHIASDDSNQPIDFTVMSMGLHQLEKKADWVLVEGAGGWYTPLSESVTFADWVVKEQLPVILAVGVKLGCINHAILTVEAIIGSGLHFAGWIANEVEPAGKRQQEYLATLERMLPAPLLGTIPHLTQEYFNHLGEYIDLKLLNNZ

SEQ ID NO: 937 - protein, 256 aa, Photorhabdus luminescens
MGSVAEFANKQAIAGAFGRAAANYDVVAKLQQQTGEFLMQQVGEHSGKLVLDAGCGTGFFSHRWRQQGKQVIGLDLASGMLAHARKQLAADYYLQADIEHLGLADNSVDICFSNLVVQWCDDLSSALRELYRVTRPGGLILFSTLAKGSLYELKQAWSVVDNYQHINQFLPQQTIKDACQGFRHCLISQVYRQQYSHILPLLGSLKGIGATHLHDGRQQGLMTRGRLIALEQAYPRENEQLPLSYQVVFGVIHRDZ

SEQ ID NO: 938 - protein, 384 aa, Photorhabdus luminescens
MDWSSYLSRQLSERRSTSLWRQRQVNQKSDGRFLYAADGKYLNFSSNDYLGLSANPAIISAWQRGAEQYGVGSGGSGHITGYTKAHQLLEQQLADWLGYPKALLFISGYSANQGVIAALMTEQDRIIADRLSHASLMEAAMHSPAQLRRFLHNQPESLANLLATPCVGKTLVVTEGVFSMDGDCAPLADIHQQTRISGNWLMVDDAHGIGVCGEQGRGSCWQQKVKPEILIVTFGKAFGLSGAAVLCDEQTAEYLIQYARHLIYSTSMPPAQAQALSEAVRQIQSGDELRQRLQQNINYFRRQAQKLPFNLTDSTTAIQPLIVSDNELSVSLSQSLQQKGIWVKAIRPPTVPPGSARLRITLTASHMPQDIDMLMEALHGFRSZ

SEQ ID NO: 939 - protein, 346 aa, Photorhabdus luminescens
VIERKQWTIKQAQELFDKPFFELLFQAQQVHRIYFDPQQVQVSTLLSIKTGACPEDCKYCPQSSRYKTGLEKERLMEVEQVIDSARKAKNAGSTRFCMGAAWKNPHERDMPYLEKMVKEVKALGMETCMTLGMLNGLQAQRLADAGLDYYNHNLDTSPEFYGNIITTRTYQDRLDTLDKVREAGIKVCSGGIVGLGEAIRDRAALLVQLANLPKPPESVPINMLVKVKGTPLAENEDVDPFDFIRTIAVARIMMPSSHVRLSAGREQMNEQTQAMCFMAGANSIFYGCKLLTTPNPAEDKDLQLFRKLGINLQQTQTAFGDNQQQQHLAEAIINADNEQFYNAALZ

SEQ ID NO: 940 - protein, 424 aa, Photorhabdus luminescens
MTPSDIEFDLRHIWHPYTSMTNPLPVYPVVGASGVELELADGRKLVDGMSSWWAAIHGYNHPVLNQAAKIQLDQMSHVMFGGITHPPAIALCRQLIAISPLSLECVFLADSGSVAVEVALKMALQYWQAKGEKRQRILTLRHGYHGDTFGAMSVCDPDNSMHNLYKGYLPTHLFAESPQCGFDSQWDPRDIMPFRTLLEQHSGDIAAVILEPIVQGAGGMRIYHPEYLRQVRMLCDQHQILLIADEIATGFGRTGKLFACEHAEIEPDILCVGKALTGGYMTLSATLTTRKVAETISNGEAGCFMHGPTFMGNPLACAVAKASLNLLLQSPWQQRIKSIENQLKSELMPLKHHAKVADVRVLGAIGVVEMNQPVNMAVLQHYFVSQSVWIRPFGKLIYLMPPYIIQPEQLSRLTKAVSGAINLZ

SEQ ID NO: 941 - protein, 240 aa, Photorhabdus luminescens
LNLMMFIWQPKKKLKGRVMVDDKKEFQEDIPLPPENTAAKIQKWKAGTPIERIHKAEFKGAEFNPGVGNARFSPFKNNGIFVPTLYGGENVGVAIMETILHDIPLNCAGIPVELSKLDDLAYSQITPKKDIKYVDINPRILKKWGIIQGQLVESEASDYHITQLWAAKIYHDNPDAQAIRWPSKQHGGKAIIIFGDRVEEKDLHVSLESESAATSKEVNEKLRELADEMELVLVPTDMTZ

SEQ ID NO: 942 - protein, 202 aa, Photorhabdus luminescens
TQFSKKSKESAMASLSVTPFIFENQQVRTLIKNGNFWFVAQDVCDALKITNSREAIAKLGDDEKDVALSDTLGGEQKVNIINESGMYFLTIRCRDAVKKGTLPHRFRKWVTSEVLPLIRKTGSYIGREKSISLSQLIICPYCQKPANVLSTEKLHRHRIEVLAICDSIWCSEQAFKFDLCFSHYLQEEAGIRVEKVMMLRGZ

SEQ ID NO: 943 - protein, 329 aa, Photorhabdus luminescens
MKQVVYTASPNSCQIHVWSLNNEGELSLIQTVDVPGEVQPMVVSPDRKHLYVGIRPQFSIVTYQIGSRGELAQQGISSIPGSPTHISTDKQGRFLFSASYSYNNLSVSLIDDQGIVGEPVQVIAGLQAPHSANIDWDNKQLLVPCLKEDRVRIFEMAKEGYLTEKRAEEITTAMGAGPRHMAFHPNQQVIYCINELDSTVDVYRKWEKYRTVQTVDSLPADLAGVRWSADIHITPDGRHLYTSERTSSLISHFVISQDGSNLTLAGHYKTEIQPRGFAIDHSGKYLIASGQKSDHISVSSIDKYTGKLTELTRYPVGKGPMWVTVLALZ

SEQ ID NO: 944 - protein, 273 aa, Photorhabdus luminescens
MSYRIIALDLDGTLLDPQKNILPESLIVLNEARKAGIKVLIATGRHHVAIHPFYQTLQLDTPAICCNGTYLYDYHEKSVLTSDPLSTQEAIKVLSHLKNTDIHRLMYVDDAMLYEEPYDTVVRTIKWSETLPESQRPTVRHVNSFQHAIDEVQSIWKFTTCSPDLVKLREVTAQIANDTGLSCEWSWFDQVDIAKKGNSKGMRLKQWVESQGMKMKDVIAFGDNFNDLSMLKAAGLGVAMGNSVDAIKEQADLVTLDNTQPGIAEVIRKYVLZ

SEQ ID NO: 945 - protein, 355 aa, Photorhabdus luminescens
MLELDFEQQLGDLYLQVNTQLPTEGITAVFGLSGAGKTSLINVIAGLIRPRKGRIVLNDHVLVDIEKGICLSPEQRRIGYVFQDARLFPHYRVKGNLQYGMSPEMKPEFDSIVSLLGIEHLLSRFPLTLSGGEKQRVAIGRALLTAPDLLLMDEPLASLDLPRKRELLPYLEKLSGEVNIPILYVSHNLDEILRLAENVLVVDNGKVRATGKLEEVWSSSALRLWLQKETLSSILNVSMVEHHNRYEMTAVALADQALWLPKMDVQPGTDLRIRIDASDVSLVLEPPRGSSIRNILAVKVVEFFDDNGHVDVKLVLSGHYLWARITPWARDELNLRSGQWLYAQIKSVSFHRQLZ

SEQ ID NO: 946 - protein, 233 aa, Photorhabdus luminescens
LAMLSEYEWQAIILSLKVSGMAVLLSLPFGILMAWILARFQFPGKSLLDSIIHLPLVLPPVVVGYLLLISMGRRGFIGEWLYDWFGISFAFSWRGAALASAIVAFPLMVRAIRLALEGVDRRLEQAARTLGANPFKVFFTITLPLSLPGVIVGTVLAFARSLGEFGATITFVSNIPGETRTIPLAMYTLIETPGAETAAARLCIIAIILALMSLMVSEWLTRWGRRRLGATCZ

SEQ ID NO: 947 - protein, 257 aa, Photorhabdus luminescens
MKKSFGKLLVGVVVSFALTWQAWATEKVTLFAAASLTNALDDIAALYKREKKGEVVASYAASSILARQIEQGAPADIFISADQQWMDYVAGKKLIIDETRLTMLGNQLVLIAPKASRLNKVDINKETKWKSLLEDGRLAVGDPDHVPVGIYAKESLQYLGAWERVNPLLARTSNVRSGLALVERAEVPLGIVYGSDAVASDKVKVVGVFPEESHKPIEYPMAIIKDHSNLTVLDFYEYLKTPKAVEIFKRYGFHPRZ

SEQ ID NO: 948 - protein, 264 aa, Photorhabdus luminescens
MQAEILLTLKLQQRLFADPRRILLLKQIKATGSISQGAKQAGISYKSAWDAINEMNQLADEILVERATGGKGGGGTNLTHYGERLLQLYDLLTQIQQKAFDMLKDDQLPLDSLLAAICRFSLQTSARNQFFGTITDRNHNQVQQHIRILLTDGQTSLNAALTEQSANRLGLVKGKEVLALIKAPWVKLTKEPFSIGHFDNALTGQISNIETSEENTEIIIVLDGGEILCSTLPNQEANNLKLHSGDKITALFNADQVIIATLCZ

SEQ ID NO: 949 - protein, 492 aa, Photorhabdus luminescens
MSELQITQGCFRLSDTRTLQLSSLKIASGENWAFIGANGSGKSSLARALSNELVLLSGERNCSFRKCARVSLEQLQKLTEEEWQRNNSDMLSDDEDDTGRTAAEIIQLYHKDNELCLELAKQFGIMDLLSRRFKYLSTGETHKTLLCQALMTSPDLLILDEPFNGLDLFSRGQFTELLEKLSSKGIVLVLILNRFSEIPDFVDQIGVLADCQLTSIGTKEKVMADSLVAQLAHSEKLNGIHLPETDEFPVDNQLPPDQPLIILRNGIVQYNDQPILHGLDWQVNSGEHWQIIGPNGAGKSTLLSLITGDHPQGYSNKLILFGRQRGSGETIWDIKRHIGYISNSIHLEYRVSISVRNVILSGFFDSIGLYQTVSDRQQQLADEWLALLGLSAQIANGPFHRLSWGQQRLVLIARALVKHPALLILDEPLQGLDPLNRQLVLRFIDVMIADGDTQLLFVSHHQEDAPQCITHRLIFIPDGDLYCYKTEKVSDZ

SEQ ID NO: 950 - protein, 274 aa, Photorhabdus luminescens
LGLLTTSLALLAIHRTTALIVLLAAVITGFVTQTVIYPAVATIAIIFLLGALRIHFQQNNIIKITTELLLLAFAVALFLHLLPGFNNLKYLDKVQAGPHSAPFSMYFNFDKALIPFLLLCCMPSLFTTKPLTKIRPYAWIILAIAIPVLLSIATALGGLAVELHMPQWLPMFILANIFFISLAEEALFRGYIQQRLSQWINPYFALIITALIFGGAHFAGGPLLMIFAALAGLIYGLAWMWSGRLWVSVGFHFVLNLVHLLFFTYPIKLVTALZ

SEQ ID NO: 951 - protein, 251 aa, Photorhabdus luminescens
MAVTKLVLVRHGESEWNRENRFTGWTDVALSEKGRAEAQQAGQLLKEEGFVFDFAYTSVLKRAIHTLWNILDQVDQQWLPVEKSWKLNERHYGALQGLDKAETAAKYGDDQVKLWRRGFAITPPDLTKDDERFPGHDPRYANLKPEELPVTESLATTIERVIPYWEEVIKPRVAQGEKVIIAAHGNSLRALVKYLDNMSEETILELNIPTAVPLVYEFDENMKPIKHYYLGNADEIAAKAAAVANQGKAKZ

SEQ ID NO: 952 - protein, 350 aa, Photorhabdus luminescens
KAALFSWLKSRAVKKIFVAVLLLLTVGNKKATFYGVASSPMQRQIDAAYPELSAGLHLPKFARIEAHPENTVSGDISDPFRPRYAVDVQLLADDGQDTAVPVYHAVPLLLPMAGSESGMFQYPPVGTVVEIAFEAGRLDKPFIRQTLSQGNTLPDIKPGEQLQQQRAEVSQRVTQEGHWIRQTDQTIDESSMHREVRADTETRNVVARETTIQATDKTTVLGTSTLLAGAVRQIADGDYSMVTSSNFVVSVGKEANVEVGQKLIEKIGLLKQSIAGARQEIVALVVWVGSQQINVMTLMLETLDVVKALAEQIAAHTHHNTGMLENASAIRNTAYKSDGLKQKYSPVIGZ

SEQ ID NO: 953 - protein, 351 aa, Photorhabdus luminescens
MNYQNDDIRIKEIKELLPPVALLEKFPATEKAALTVCKARKTIHQILTGEDERLLVVIGPCSIHDPKAAMEYAGRLNELREELKEDLEVVMRVYFEKPRTTIGWKGLINDPHMNHSFDINDGLRLARQLLRDINDMGLPAAGEYLDMISPQYLADLMSWGAIGARTTESQVHRELASGLSCPVGFKNGTDGAIKVAIDAINAAGSPHSFLSVTKWGHSAIVNTSGNNDCHIILRGGKEPNYSSEHVAVVKQNLEKAGLPARIMIDFSHANSSKQFKKQMDVCSDVSRQLIAGEKAIIGVMVESHLEEGNQNPDSGLPLVYGKSITDACIGWADTEILLRQLSSAIKARRGZ

SEQ ID NO: 954 - protein, 242 aa, Photorhabdus luminescens
MNFFSINNILVNIPLGKGGYDLSWIEAVGTIAGLLCIWFASQEKIINYLFGLINVTLFAVIFFQIQLYASLLLQLFFFAANIYGWYAWSRVNDQQQIELKIRWLSLNKAVIISLISVLLIAIMTFNIDRVFGYLTQIAVTIMQKFGFNVQMPILEPDAFPFWDSTMTVLSIVAMVLMTRKYVENWLVWMVINVISVVIYFHQGVLAMSLQYVILLGIAFNGSRLWIQAAKENHSLPLSHVKZ

SEQ ID NO: 955 - protein, 347 aa, Photorhabdus luminescens
MNQYIDFNSTIYPFPPKPAFLSKDEKKHYREKIKRLLKQQDAVMVAHYYTDPEIQALAEETGGCVADSLEMARFGNNHPASTLLVAGVRFMGETAKILNPEKRVLMPTLEAECSLDLGCPEKEFTQFCDDHPDRTVVVYANTSAAVKARADWVVTSSIAVELIDYLDSQGKKIIWAPDRHLGNYVRKQTGADILCWQGACIVHDEFKTQALIRVKGLHPDAAVLVHPESPQAVIDLADAVGSTSQLIKSAQSLPHQKLIVATDKGIFYKMQQACPEKQLFAAPTAGEGASCRSCAHCPWMAMNGLQAIVQGLEQGGGQHEILVEKELREKALVPLNRMLDFAAQLKZ

SEQ ID NO: 956 - protein, 257 aa, Photorhabdus luminescens
IKMIKITDLCFSYKSREIKKNIFKNIFSLNEIEIVLFENINIEIFDDSKIIGLLGRNGAGKTTLIKLISGILTPNSGNITVFGIDSNGRPLNLLSNLGIVFGNKSMLWDELSLYENIEFFSKIYKRNYDKNSVENMIEMLNLNSIAKKPAKTCSLGQSVKSNLLIHFLNRPKLLILDEPTIGLDIESQILLRNILKDYAQNNESKILITSHNMIDIADVCKDIIFLKDGEISKIHLNKNNSKEKNALYLERLFCDNZ

SEQ ID NO: 957 - protein, 265 aa, Photorhabdus luminescens
NTIKDIMVMLRVIFIGFKSGLSEAKRSPLNFWLSAFVNFSYYIAQAFFWYAILNSQSSSYILSDDFVIIFFTTVCLVDNFYLFLFGKGSFLLVKKVKSLKLEPHLTLPINTQFLYVTTNIVFEHFLLSFLSLVLFFTVHIYLGTNILLVFLHLIMALEGVLILTSITWIIRTTIFWTASLVSIKNSNPCFKVLVRPEQSFHGVVRFILMFILPCLFITGVPASVASGIMSMKWFFIQTLVTLILIFIAKLVFDIGVKRYSKYITZ

SEQ ID NO: 958 - protein, 289 aa, Photorhabdus luminescens
FNMFLMKEYYLIQEVCMSPKNDFKAFSISDNANVVSQEKYEENQGLQTGFPPDNVPTHVLNKVLRQVSTVSSVVADFIAAQSGNDVLDDGNIAKLTDQLNKALEQKITTDIPSASLTQKGVVQLTNVMGNSDTLAVTQKLVQEVINALRADITIPVGSPIPWPLPNPPTGYFICNGSAFNSLQYPQLAEAYPSGRLPDLRGEFIRGWDDGRGVDLGRALLTWQESTSLAEYLGHFPRGGGQQIVNYDGIASSAAGYLKYNVTSPTTTGVNFLRFRPRNVAFNYIVRAAZ

SEQ ID NO: 959 - protein, 308 aa, Photorhabdus luminescens
GKYMSHKNDFKAFSISSNANVISQAKYEQNLGLQVGFSPDNVPTHLLNKVLRQSSTISSVVADFIATQSGNDILDDGNVAKLTAQLNKAIAQKITTDMPNASLTQKGVVQLTNVIGNSDTLAVTQKLVQQEINSLREHTYTREEIDNRIKTVGEIPVGSPIPWPLLYPPFGYFICNGSPFNKSQYPKLAEAYPSGRLPDLRGEFIRGWDDNRGVDSGRGLLSWQGDAIRNITGTTQMIHAQMGGAPQTPVVSGVMASSRYATADTRSANSGGSTDLTYFDIDASRQVPTANENRPRNVAFNYIVKAAZ

SEQ ID NO: 960 - protein, 332 aa, Photorhabdus luminescens
TLIGVNCRRVIFKIIQYIDYKIILFNLRRKYMSHKNDFKAFSISDNANVVSQEKYEENQSLQTGFPSGNVTTHLLNKVLRQSSTISSVVADFIATQSGNDILDDGNVAKLTAQLNKAIAQKITTDMPNASLTQKGVVQLTNVIGNSDTLAVTQKLVQQEINSLREHTYTREEIDNRIKTVGEIPVGSPIPWPLPYPPVGYLTCNGSAFNKLQYPKLAEAYPDGRLPDLRGEFIRGWDDGRGVDMGRTMLSWQGDAMQRMTGFLEAGNGIGLMTRPHDSTSGVFLEGDLRTISHVTQNGTSYAVSFDSSRVARTANETRPRNIAFNYVVRAAZ

SEQ ID NO: 961 - protein, 288 aa, Photorhabdus luminescens
ELHIMEDPVILLEKILTFAHNDPRIDTVIQTGSRARNARVDKFSDLDIELIGSGTDELIGNDLWFKQLGDVMVALHLANEKEDEPDWPTCLVVFNGGRKVDFTLASVKRLKDMKQRGLDELYQRGYKVLLDKTGLTNGLPEITHQLTKSYIPSSTEFNENLREFWFEATQVPVYITRGDLWHARMRDNEMKDLLLAMMEWYVSIKSDGKTDVWYNGHHLHEWLPEKFSKHIQGIFSSYGKEEAIRALLETTELYSEISAEVAEMKGFEFDSELPSKVRKHIMQVCYGZ

SEQ ID NO: 962 - protein, 259 aa, Photorhabdus luminescens
MNSNFRHHFLGLSLLVGVTVPWAAIAQAPISNVGSGSTDERLTQLERISNAHSQLLTQLQQQLADSQRDIDMLRGQIQENQYQLNQIIERQKDIYQQLEGATSSEGSKPAANTASSTASNTKNSGNQASSSVSTGSEKGDYDAAVHLAVNTKEYDKAIIAFQSFVKSYPKSSYMPNANYWLGQLNYNKGKKDEAAYYFATVVKEYPKSQKSGESLYKVGLIMQDKGQKDKARSVYQQVMKQYPGSNAAKLAEKKLSTLZ

SEQ ID NO: 963 - protein, 323 aa, Photorhabdus luminescens
KPFNKEKFMSSFDNVFCTDVESVSPYHIIQGETTNDYESKVVQTYCGDPECWRKVIGDTLLFQFGVYDDPASKLPISLDDSGIRYFDRQLLLAGLETKIERPPIQRILDIGCGWGYILKYLAERFPECKRLDGVNISEQQLRYCAEFHAQYGLSERINLYLCNAQDIDRLPDPQEPYDLVIIRGVISHFPDSLYEKAMSALFKRVSAGGQVIISENLYNMELDNYKSDIPDTVDRLACANRKTPSYFRQVLEKSGFVIKDMRVLPSNIDVVHWLLDVKANIERNFPEGVSGPLEELRVLAENFSVAQVKNYVSTYSVIAQRLZ

SEQ ID NO: 964 - protein, 431 aa, Photorhabdus luminescens
MRQAFKVVLSILMLWVTVAHAEVRIEITQGVDSARPIGVVPFKWTGAGNAPEEIGAIVGADLRNSGKFNPIDISRMPQQPTTTSEVTPAAWSALGIDAVVVGQIQPSADGGFLISYQLVDTASAPGTVLAQDQFKVTKQWLRYAAHTASDQVFEKLTGIKGAFRTRLAYIVKTNGGKYPYELRVSDYDGYNQFTVHRSPEPLMSPAWSPDGAKLAYVTFESGRSALVIQTLASGEVRQVASFPRHNGAPAFSPDGSKLAFALSKSGSLNLYVMDLGSAQIRQITDGRSNNTEPSWMPDNQTLVYTSDQGGRPQLYKTDINGGAPQRLTWEGTQNQDADVSADGNFVMMVSSESGKQHIAKQDLATGAVQILTDTFLDETPSIAPNGTMVIYSSTQGLGTVLQLVSTDGRFKARLPATDGQVKFPAWSPYLZ

SEQ ID NO: 965 - protein, 208 aa, Photorhabdus luminescens
LLMSAFEAPLFLPPPLPAAEAPPCCFGALEVKPPSKSSTSLSCLAACAAAFFLASASALALAFASASVLALASASALAFALASASALAFASSAAFCLAATASASFLASASAFFCASACSLISFSFSALAFAAASSACFCSSRALFAASTACFFCSSAACCALIRSSSTAFKRSCSSACFSLNSAACCSAFLFRNCSARLASACCCCCZ

SEQ ID NO: 966 - protein, 357 aa, Photorhabdus luminescens
VGKTNGQNNKLNRAVIVSVVLHIILIGLLIWGSLTRKTEMGGGGQDGSVIDAVMVDPNAVVQQYNQQQQQQADAKRAEQLRNKKAEQQAAELREKQAEEQERLKAVEEERIKAQQAAEEQKKQAVEAANKAREEQKQAEEAAAKAKAEKEKLIREQAEAQKKAEAEAKKEAEAVAAKQKAAEEAKAKADAEAKAKAKAEADAKAKTEADAKAKAKAEADAKKKAAAQAAKQESEVDDLLGGLTSNAPKQQGGASAAGKGGGKKSGASNADINNYLGQIQIAIQNKFYDPSMYRGRTCTLRIKLAPDGLLIDVKSEGGDQALCQAAVAAAKQAKIPKPPSKEVYEVFKNAPLDFNPQZ

SEQ ID NO: 967 - protein, 232 aa, Photorhabdus luminescens
VTDMNILDLFLKAGLLVQLIMLILICFSVASWAIIIQRTKILNAATRESEAFEDKFWSGIELSRLYKESQSRRDSLGGTEQIFYSGFKEFARLHHANNHAPEAVITGASRAMRISMNRELESLESHIPFLGTVGSISPYIGLFGTVWGIMHAFIALGAVKQATLQMVAPGIAEALIATAIGLFAAIPAVMAYNRLNQRVNKLEQNYDNFMEEFLAILHRQAFAAENKAENKZ

SEQ ID NO: 968 - protein, 380 aa, Photorhabdus luminescens
MFDYEVLRFIWWLLIGVLLIGFAVTDGFDMGVGILLRIIGKNDTERRIMINSVAPHWDGNQVWLITAGGALFAAWPMVYAAAFSGFYVAMILVLSALFFRPVGFDYRSKLENRKWRNMWDWGIFVGSFVPPLVIGVAFGNLLQGVPFNVDSQLRLFYTGSFFGLLNPYGLLAGIISLMMIVTQGATYLQMRTTGELRLRSRAATYLCALVTMVAFLLAGVWLIYGIDGYIVTGGLDTVAQSNPLHKEVAHQAGAWLTNFNNYPWLWVLPALGVASPLLTMLMTRMNKAGWAFLFSSLTIAGIILACGVTMFPFVMPSITDPNVSLTMWDATSSLMTLRVMFVVALIFVPIILGYTIWCYYKMFGRLDKSFIEDNKHSLYZ

SEQ ID NO: 969 - protein, 523 aa, Photorhabdus luminescens
MFDIVELSRLQFALTAMYHFLFVPLTLGMAFLLAIMETVYVLSGKQIYKDMTKFWGKLFGINFALGVATGLTMEFQFGTNWSYFSHYVGDIFGAPLAIEGLMAFFLESTFVGLFFFGWDRLSKTQHLAVTWLVALGSNFSALWILVANGWMQNPIASDFNFETMRMEMVSFAELVLNPVAQVKFVHTVAAGYVTGAIFVLGVSSYYLLKGRDIPFAKRSFAIASSFGIAAVLSVIVLGDESGYEMGDVQKTKLAAIEAEWETQPPPAAFTLIGIPDQDKMENKYAIQIPYLMGLIATRSVDTPVIGLRDLMDLHEQRIRNGIKAYHLLEELRAGNTDPTVRTAFNENKQDLGYGMLLKRYTSKVTDASEEQIKAAAKDSIPRVAPLYFAFRIMVAAGFLMLLLIGLAFWSVIRGRIGKQKWLLRAALYSIPLPWIAIESGWFVAEYGRQPWAIGEVLPTAVASSNLAASDILFSMALICGLYTLFLIAEMFLMFKFARLGPSSLKTGRYHFEQKTTSAPEAQZ

SEQ ID NO: 970 - protein, 213 aa, Photorhabdus luminescens
MYIQKVFEENRISVLHDLIEQNPLGTLTVYGSYGLSADHLPFTLDRHGLELGVLKTHIARGNPLHKSVVETNEVMVIFQGPDAYISPSWLPRRHINGRVQPSWAYTAVHAMCSIKFIDDGSWIKAHFEQSVNCFEAGLPDPWQVAEAPKDFIDGLKQHVVGIELTIHNLLGKRQLMQQRNIDDRLAIIEGLRTQSDPRAHQVAKQIAQAIENZ

SEQ ID NO: 971 - protein, 369 aa, Photorhabdus luminescens
MFNIQAVIKEHVVENKRESLWSYLEERPNYLMLDKNENHHPMDEDLFEAFRASLKPEHLCNYPVLNNLYKKIAKLVGVEERNIYLGSGSDLAIKALFDACLREGDHVVLHNPCYFMFENYAKYAGVSISSTPVTEDWKPDVAAIIDAVKENTKLVIVEDPSGFVGTRLSYSQMHGLAEALYSKGVLLLIDEAYLYVEGKQSANLDILQKFPNVILAQTLSKAHGLAGARVGFLIGGTELIGHISNVRPLYEISALSAWAAEWQLDHPEVLERFQEKMRQTKAYMREALTERRQTFKDTHGNFMLVQFAGYDSKEIEQLFQEQGILIRRPFEQSNLKGWLRVTISQLEHCEKFISALDIVVDKLNFKKIZ

SEQ ID NO: 972 - protein, 397 aa, Photorhabdus luminescens
MKSLAIAELFINIGKAILLLSFAKFMYDETGQIWQISLIFIAEILISTILPILVGKSVDNQGIKTVLIGSAVCHVVFCLAGVLALTQLGMSVSILLLISVFLSFLGPISKMALFSVTPLLSQHDRLEKDNGTLTSAFQGGQLIGMALSAWLLDEFDFIAILMFVVCLYSAASFFYWRATANLSLAESPSDIDKREDPENLWQLFKASKPYMRYFVLSNFDFVTVAIFNIMLVSVVSQAFDGSTYWLAGLDASFAIGAFVGGAVIAKQIRNKSTSLSDVIAIQVAFLIYLGLCFTEQAVYLMPLAIVSIGLFQSYSGIYWRTLLHKQLPSHMIGRLSSIKYIVSSVHIGIVAMVVSYAHELGFQYAIATAAVITIGQILFVAIIIKQSLAIESKSSSZ

SEQ ID NO: 973 - protein, 823 aa, Photorhabdus luminescens
KLMNILILHRVRYVDVLYHQSIDHELHNVYYIGIEENLNEIPADLRCTKIVRPGVDAVHKEVLEQIENLDVCFDHVVSINEFELIEAALIREKLNIAGPKVADVEKVRNKIVMKHCVGAVNIRIPQYMSLSDFMNSERLAIPPSSQVILKPLDGASSVDVVKFDSQKVLEQALIDRTTGIVALDKETPERIENFEVEEFVSGPVLHIDGMIRNGQIEMIVVSQYINTLLDFANGYPAGSVQLETTEEMKTWALQILNAVDISLGAFHLEAIQTDTGPVFLEIAHRIGGARIAETLTLQTGIHPSILELGLLLDPDFKFELNYDTGYKYAWFIVPGHQLPGNYGLVSGHEFLYGKEEVVMLNQLTMQQPLVKAVTYKESEIPLAGLLKAKSAKELTDLIDRLFGQLQLISVDTPLPYSECMPQKKKHVLVIGNIRQPHKTLEAQGYAISWMYKKVPNFTHTTEDHNRCERILMYSNESAIQLISLARSIDQLQKIDSVVSFHDGAQLDALTIANALELPFSLSMGAIVNTRDKQLSRRILREKNLTEVQSAIAENEQDLHDFFKIYPQVNKVIVKPVAGTGSENVRSLESKELETANLDNVYPVLVEQFVEGREFSVEAFMQEGKCHIFAITEKFKDAQSFIETGHLVPARLSSDEHEKIAAFIAKVLPALGVVSGITHSEIMLGEKIELIETHTRVGGDRIFDLVQMTTGIDMYRLQALQSLGLPIGEDELTPKLNGKHACIKFKLNDHPGKKVIRVNGEEEIKNWSGVEDVSITHQAGEVLPQIVNSFDRSASVLVLCDSSEQALSIAEEAIQKLEFVVGEZ

SEQ ID NO: 974 - protein, 312 aa, Photorhabdus luminescens
MKYMYQPASSGIRLFTDLVGKKISPSPHWYSAQNRTKFALRSALMPISTLKLLNQIVNTPFYLDILKKQPCLPSKLHRPYLSINFNRGQTLRAINEHYQLLFTGLNQSIVNKIFRSNAYPLAVINGKSGTYTIFLDSMDCFNKEGELTLFITTGDSKTLARCAFTLLTIAGKKTLFIGGLQGSKGDATLEIIRDATKDCYGLFPKRLLIESICRLAAHFECQQILAASNDTHIYKSLRYWHKKKDKLVADYDSFWESLGGAKGKNKDFHLPLSIERKPLEDIASKKRAEYRRRYQLLDELDNGMQHSLPSNZ

SEQ ID NO: 975 - protein, 431 aa, Photorhabdus luminescens
HKVNLRRVFKEESMNSKYCLLLGTEKNRFRALVATARATNMKIAIMAPSGYVNGNRYADLVIDGNPENIEQALAAVQTFAEREGMQPGAVVPLTEMTIAPGARIAQYYNLNYLSEKALTLTRNKFEMRKAAHAGGLNVPKFARFNHLEQLATLAEDFPFPAVVKPTNAGGSEGVTYVASKDDLASAFANLRRVTENYGSEFGIADNDYQIEQFVDARIELSVEVLNTKTGRRVLAVTDKELTPLPHFVEIGHSLPSIESDNEALKQAALKACEVLDVEHGIAHVEFMIDHSGKIYLLELNARTPGGGIPEIFEKIAGVNMLELHSRSYLYDEVEVPAYHMSGLAAIGFMKAKQGTIERIKLPAQHELPKGVFGLQLWTSEGARVNPLYSNAELEGYVEFFWPDYELNGKPKEYLMLTQQLTEQIFEMDESZ

SEQ ID NO: 976 - protein, 255 aa, Photorhabdus luminescens
GNLNTMTSSIYAKFMQGKVEVLDLTAPLSTETPVIRLPPERGQPWPFKLEKISRYDEKGKEVYWNNIQMSEHTGTHFDAPVHWRSGKDSIDVSSVPPRHLVAPAAVIDVSDQVTAPDFLLEREHVDQWCEVHGPLPVGGWLLFRSGWDSRDSDADTFLNHGHTPGVSEACAKWLAEQTPIIGIGVETVGTDAGQAGKFEQPYPVHWYFHGAGKYGLTQLKNLAKLPPTGAVIMIAPLPIVGGSGSPCRVLALVEZ

SEQ ID NO: 977 - protein, 267 aa, Photorhabdus luminescens
VYWNKTDKQMYMYRIREHIKRLRDSMKCVDMPVTFTDQEIVEACIDLVRKNNFKQHVHLVIAPYFAMGKNFDPLIYTEDTGMHITALPMPRSARYDTGMTASFSTWRRISDDSMPPRIKTGANYHNSRLAQHEAMRNGFDTAFFLNHRGTVAEGPGSCIMMVKNNRLITPPGSAGVLEGITVDSIIRLAKDKLSVECERREIDRTELYLADEVFTCGTLAEIVPVISVDRKSIGDGRPGLMTRKLQVAYEDEVMSNSTSEYSTPVYZ

SEQ ID NO: 978 - protein, 544 aa, Photorhabdus luminescens
ITKMNSSNKTKIAIIGAGPVGLILSARLASFGITSIVMDKAPYLLRKGSKACLIHGDALEVLDKVGCGEQIAKEGIHWRIAHTYIRNVERITQEYPERPGYGEFVNISQYRIEQELVKLLEANPLCELRWSSEVVGYSQQQDKVKLEVRHCTETETLEFDYVIACDGVRSTLRDLTEVNFTGYTHQDRFLVTDIKANIALTKERHFHFDPQFNPGRQLVMHPQPDNIWRIDWQLPPDADIEAEKKNGQLDKRIKSVIGDIPYQIDWISTYRFNQRVVEKFRLNRLFFAGDAAHSFPPYGSRGMNSGIQDADNLAWKLALVIRGSAGDELLDTYHEERFLAAKENLRLTEATIQFMVPPTPLKQIWRDTVLRISEVWKPLRKQVNHGKMTEPFTYESSSLIDYNHRTPYVGAFSPDVVVYIDGEKSRLRKLFGKGFVCLFCADPNKVKQYLNKQSHTYNGLDFSLVAAVPKGYFSPKVDERLISVTYDDILFFETLTEKQDSLFVIRPDGHLAGHYLLDNAPSLSLILEKVSGTDSLTFQREASZ

SEQ ID NO: 979 - protein, 434 aa, Photorhabdus luminescens
KESFTVLDILELEHPRFTSLLCDYSDSETITINLSIHTILRFAKENKATFPYQDVVRMYHKTGKHFVPEYFLELLNITRKECAKLNSEEIEQVTRFLNVLLDKYDGTYDYRSYLALELLNMPDDQTEIKAYAEAQSHIDRMMLLLTADILKFELGGLVTEGNFRHQLPERTLVEKRCAMALKAVTPYVQRAKLSYISSEYVIESAKHFIAAVEQRKTHNDEQMLMTTNLPVYLIHDEYMFIRVLQTFEYTFSWIAVGLRATIEACTDSPSQASILVESCEKKIKEAIGFFHLLSSMRAESFKVFRAYTEGASAIQSRNYKRIESLCRQPDEDRLNSIAYGSVPEVQEKLLVRPNNLDLALSQAQQSGRFNSNDFGEVKQAMKSFATTLKRWKQTHYGLAMKMLGEGSGTGYTEGTPYLAFVKDIPVFETQLDEZ

SEQ ID NO: 980 - protein, 388 aa, Photorhabdus luminescens
YQQLLVAMYSPQAFRDNYFSGLHGLVHLASCSISPRSQFLDAAMETMLVDMAKNELAWVYFERQTEQARRLFAEFIGADASQIAILPNATIAAYQVISTLVANSGEQILCTEDEFPSLSHVWLQQASRGLVTRCIESQVSDESFVTITCAMLGSNTCLVSVPLASFRTGRRYPVELITELANQSQVPILVDAYQGLGAEKINVSELNCDYLICGSMKYMLGLPGIAFLYVKDGIRNTVALGLTGWQGRKEPFAFNPSLVDFPDCAKRFETGTPAVPALYAASSALTALLTLDFEQGRLHIQTLVELAIDILEKGDVTIVKVPGTLFSAHIALLVPNVPALDTHLKQHKIITSPRGEMLRLAFHHFNTADEVVQTCRLICAYFKTQIWZ

SEQ ID NO: 981 - protein, 238 aa, Photorhabdus luminescens
RRKNVIGNRDYSTSVLSGEGDSDYEKYMRIPTLLNLQVTPEKMLHRDELLFQVVHQSTELWLKLSNNELAEAIKKLSKKDFVAATELIKRSSYPIELITKQLEMFKYMTPYDFQKVRPALGNGSGFESPGWRRLQSVGRELHQTFIRIVKSMSIDLMGVYTEEDKSPLYFLMEEMVSWDEMVSLWRSRHYKIAVRTIGLNTIGTKGTPIEKLTVLMNKQFFPELWELRTEMTNTNSYZ

SEQ ID NO: 982 - protein, 292 aa, Photorhabdus luminescens
MSILIDKNTKVICQGFTGSQGTFHSEQAIAYGTQMVGGVTPGKGGTEHLGLPVFNTVREAVEATGATASVIYVPAPFCKDSILEAIDAGIKLIITITEGIPTLDMLAVKVKLDEAGVRMIGPNCPGVITPDECKIGIMPGHIHRAGKVGIVSRSGTLTYEAVKQTTDAGLGQSTCVGIGGDPIPGSNFIDILKLFQQDPQTEAIVMIGEIGGTAEEEAAAYIKQHVTKPVVAYIAGVTAPKGKRMGHAGAIIAGGKGTADEKFAALEAAGVKTVRSLADIGDAVKDLLAGKZ

SEQ ID NO: 983 - protein, 389 aa, Photorhabdus luminescens
MNLHEYQAKQLFARYGLPAPAGYACTTPREAEEAASKIGSGPWVVKCQVHAGGRGKAGGVKVVNSKEEIRAFAEQWLGKRLVTYQTDAQGQPVRQILVEAATDIAKELYLGAVVDRGTRRVVFMASTEGGVEIEKVAEETPELIHKAIIDPLIGPMSYQGRELAFKLGLTGKQVSQFTKIFLGLANLFLERDLALVEINPLVITTQGDLICLDGKLGADGNALFRQAELREMHDPSQEDPREAQAAQWELNYVALDGNIGCMVNGAGLAMGTMDIVKLHGGAPANFLDVGGGATKERVTEAFKIILSDENVKAVLVNIFGGIVRCDLIADGIIGAVEEVGVHVPVVVRLEGNNAELGAKKLADSGLNIIAATSLTDAAKQAVAAVEAKZ

SEQ ID NO: 984 - protein, 200 aa, Photorhabdus luminescens
MKKQMTEWVTLAGKGVTLEPLTHQRHDEFLQAIEESELHKLWYTSVPSPAELGNEIERRLLLHEKGTMLPFAIVDHRTSKAVGMTTYMNIDSDVRRLEIGYTWYARSVQRTHINTEVKYLLLKYAFEELGCIAVEFRTHFFNHQSRKAIERLGAKLDGILRSHGVSKDGSIRDTCVYSIISGEWPAVKIHLEWQMVKPRZ

SEQ ID NO: 985 - protein, 407 aa, Photorhabdus luminescens
MSSVDILVPDLPESVADATVAVWHKKQGDRVERDEVLVEIETDKVVLEVPASEAGVLEAILEEKDATVLSRQLLGRIRLGDSTGKPAEIKEKTEATLAKRQTAGLDEESNDALSPAVRRLIAEHDLDAKAIKGSGVGGRIVREDVEKYMADNEKVASKPAESSAASAQGSLLPHRSEKRVPMTRLRKRVAERLLEAKNNTAMLTTFNEVNMKPIQEMRKQYGEAFEKRHGVRLGFMSFYVKAVVEALKRYPEVNASIDGTDVVYHNYFDISIAVSTPRGLVTPVLRDADALSMADLEKRIKELAIKGRDGKLTVEELTGGNFTITNGGVFGSLMSTPIINPPQSAILGMHAIKDRPMAVNGQVEILPMMYLALSYDHRLIDGRESVGFLVTIKEMLEDPARLLLDVZ

SEQ ID NO: 986 - protein, 936 aa, Photorhabdus luminescens
MQNGAMKDWLDSSFLAGSNQSYVEQIYEDYITDPNSVDASWREIFQQLPNAGLSGEQLHSQTRDYFRRLAKDTTRYHSSVSDPAMDAKQVKVLQLINAFRFRGHQNANLDPLGLWKQDSVPDLDPAFHNLTEADFAETFNVGSFAIGKETMKLADLYEALKRTYCGSIGAEYMHITNTEEKRWIQQRLESVTVSSQFSVEEKHRFLAELTAAEGLERYLGAKFPGAKRFSLEGGDALIPMLKDLIRHAGKHDTREVVLGMAHRGRLNVLVNILGKKPADLFDEFSGKHKEHLGTGDVKYHQGFSSDFATEGAKVHLALAFNPSHLEIVSPVVIGSVRARRDRLDEGRSNMVLPITIHGDAAVTGQGVVQETLNMSQARGYEVGGTIRIIINNQIGFTTSNPKDARSTQYCTDIIKMVQAPIFHVNADDPEAVAFVTRLALDFRNTFKCDVMIDLVCYRRHGHNEADEPSATQPMMYQKIKKHPTPRKIYGDKLVAENLISVDDVTEIVNLYRDALDRGDCVVDEWRSMGLHSFTWEPYLNHEWDEEYLHKVDVKRLQDLGRRISSVPEEVTMHSRVAKIYNDRAEMANGDKLFDWGAAETLTYATLVDEGVPVRLSGEDAGRGTFFHRHAVIHNQANGSVYVPLANVHNGQGAFNVWDSVLSEEAVLAFEYGYATTEPRALTIWEAQFGDFANGAQVVIDQFISSGEQKWGRMCGLVMLLPHGYEGQGPEHSSARLERYLQLCAEQNMQVCVPSTPAQVYHMLRRQALRGMRRPLIVMSPKSLLRHPLAVSSLDELANGKFQTVIGETDALDPKGIKRVVLCSGKVYYDLLEQRRKNEQTDVAIVRIEQLYPFPHQDVQSTLEQYAHVHDFVWCQEEPLNQGAWYCSQHNFREVIPFGASLRYAGRPASASPAVGYMSVHQQQQQELVNDALNVEZ

SEQ ID NO: 987 - protein, 239 aa, Photorhabdus luminescens
MKLEFSIYRYNPDVDSAPHMQDYTLEAEEGRDMMLLDALIQLKEQDPTLSFRRSCREGVCGSDGLNMNGKNGLACITPVSALRRGSKKIVIRPLPGLPVIRDLVVDMGQFYAQYEKIRPYLLNDGKNPPAREHLQSPAQREKLDGLYECILCACCSTSCPSFWWNPDKFIGPAGLLAAYRFLIDSRDTETASRLDKLNDAFSVFRCHSIMNCVSVCPKGLNPTKAIGHIKSMLLKHSAZ

SEQ ID NO: 988 - protein, 589 aa, Photorhabdus luminescens
MKLPVREFDAVVIGAGGAGMRAALQISQMGLSCALISKVFPTRSHTVSAQGGITVALGNSHDDNWEWHMYDTVKGSDYIGDQDAIEYMCKTGPEAILELEHMGLPFSRLDDGRIYQRPFGGQSKNFGGEQAARTAAAADRTGHALLHTLYQQNLKNHTTIFSEWYSLDLVKNQDGTIVGCTAISIETGEVVYFKAKATILATGGAGRIYQSTTNAHINTGDGVGMALRAGVPVQDMEMWQFHPTGIAGAGVLVTEGCRGEGGYLLNKDGERFMERYAPNAKDLAGRDVVARSIMIEIREGRGCEGPWGPHAKLKLDHLGKEVLESRLPGILELSRTFAHVDPVKEPIPVIPTCHYMMGGIPTKVTGQALMVNENGEDVVIPGLFAVGEIACVSVHGANRLGGNSLLDLVVFGRSAGLHLKESLMEQGTSREASESDIEISLQRLNRWNSTRTGEDPVKIRKDLQACMQNNFSVFREGDAMAKGLEELKVIRERLKSARLDDTSSEFNTQRIECLELDNLMETAFSTAAAANFRTESRGAHSRFDYPDRDDANWLCHTLYLPQTETMTRRDVNMQPKLREAFPPKARTYZ

SEQ ID NO: 989 - protein, 428 aa, Photorhabdus luminescens
MADNKATLAPDGSVAIELDVLTPTLGSKVIDVRTLGSQGFYTYDPGFTSTASCESKITYIDGNEGVLLHRGFPIDQLATKSTYLEVCYILLYGETPTQEQFDKFKKTITRHTMIHEQIHRLFNGFRRDSHPMAVLCGVTGALAAFYHDALDVNNPRHRDITAYRLLSKMPTVAAMCYKYSIGQPFVYPRNDLSYAGNFLNMMFATPCEEYKVNPVLERAMDRIFILHADHEQNASTSTVRTAGSSGANPFACIAAGIASLWGPAHGGANEACLRMLEEIQSVEHIPEFIKRAKDKNDAFRLMGFGHRVYKNYDPRATVMRETCHEVLDELGLNDSLLEVAMELERIALHDPYFIEKKLYPNVDFYSGIILKAMGIPSTMFTVIFAIARTIGWIAHWNEMHDGGVKIARPRQLYTGYTKRDFDSQLEKZ

SEQ ID NO: 990 - protein, 248 aa, Photorhabdus luminescens
MRNIELENVINQELNVGDFQDYAPNGLQVEGRAHIQRIVTGVTACQALLDEAVRLQADAVIVHHGYFWKNEPAVIRGMKRNRLKTLLCNDINLYGYHLPLDAHPSLGNNVQLARLINAKVVGLVEPFVPHGEFEQPITPVELAARIEQALGRKALYVGDNAPAEIRKLAWCTGGGQSFIQQAAEFGVDAFITGEVSEQTVHIAREMGLHFYAAGHHATERYGIKALGEWLAGHYGLDVTFIDIPNPVZ

SEQ ID NO: 991 - protein, 356 aa, Photorhabdus luminescens; identical to SEQ ID NO: 52

SEQ ID NO: 992 - protein, 569 aa, Photorhabdus luminescens
MAASAFLLITSFLLILMLLAKPLGNIIANLIDGDIPRWLTKIESGLWRCCGLQKPGGTVKEMNWWQYALAITIFNLTGLLLLFTLLVTQHALPLNPEHFPGLKWDLALNTAISFITNTDWQAYSGENTLSYFSQMTGLTVQNFLSAATGIAVAFALIRTFSRHGVNTAGNAWVDITRITLYLLLPLSMVIALVFVSQGVIQNFEPYQLAHTIEGQPQLIPMGPVASQEAIKLLGTNGGGFFGANSSHPFENPTAISNFIQILSIFLIPCALCFAFGQVVGDNRQGHTLLWAMSIIFVIATVGVMYAELKGNLHFSLLGANSNINMEGKENRFGILATSIYAVVTTAASCGAVNAMHDSFTALGGMIPMWLIQIGEVVFGGVGSGLYGMLLFVLLTVFIAGLMIGRAPEYLGKKIEVFEMKMVALAILVTPTLALLGTALTISTASGRAGILNPGAHGFSEVLYALSSTANNNGSAFAGLNTNNMFYNLLLAIILFLGRFGMILPVLAIAGSLAVKKRQPASNGTLPTYGPLFISLLILTIMLIGALTFIPALILGPVIEHLQIWLMARZ

SEQ ID NO: 993 - protein, 689 aa, Photorhabdus luminescens
MTNKQQTLFEPVLIRNALMDSVKKCHPAAQWRNPVMFVVYLGSGLTTILWIAMLAGQFKGNALFTGNIALWLWFTVLFANFAEALAEGRSKAQAASLKGVRKTSWATKLHSANRNGSREKAPSDSLRKGDIVIIEAGETIPCDGEVIEGGASVDESAITGESAPVIRESGGDFSSVTGGTHVLSDWLVVECSVNPGETFLDRMISMVEGAKRRKTPNEIALTILLTALTIIFLLVCVTLLPFSIFSVEINHSGQPITVTVLIALLVCLIPTTIGGLLSAIGVAGMSRMLSANVIATSGRAVEAAGDVDVLLLDKTGTITLGNRQASQFLPVPGITEQRLADAAQLSSLADETPEGRSIVILAKQRFNLRERDLRSLNATFVPFSAMTRMSGVNVENRMIRKGAVDAIRRHIEANHGKFPEAVEILVQTVARKGGTPLVVAENQQVLGVVALKDIVKGGIKERFSEMRRMGIKTVMITGDNRLTAAAIAAEAGVDDFLAEATPEAKLALIRQYQSEGRLVAMTGDGTNDAPALAQADVAVAMNSGTQAAKEAGNMVDLDSNPTKLIEVVHIGKQMLMTRGSLTTFSIANDIAKYFAIIPAAFAVTYPQLNILNIMHLHSPTSAVLSTVIFNALIIVFLIPLALKGVSYRPMNASALLRRNLWIYGLGGLIAPFIGIKLIDLLLTLLILKZ

SEQ ID NO: 994 - protein, 674 aa, Photorhabdus luminescens
MSHYPHLFAPLDLGFTTLKNRILMGSMHTGLEEHPDRAQRLARFYAERAAGGVALIVTGGISPNKQGVIGKGTAFLVDEKDLIHHKVITDAVHQAGGKIAMQILHTGRYSYQPHLVAPTAIQAPINPFMPREMTEEDIQQTIADFAHCAQLAQLAGYDGVEIMGSEGYLINQFLTTRTNHRQDKWGGSFENRMRFAVEVVKAVHQATGREFILIYRLSMLDLVEEGSNWQEIEQLAVAIEQAGASIINTGIGWHEARIPTIATMVPRAGFSWVTQKLMGKVSIPLITTNRINDPNIAEQVLAQGCADMVSMARPFLADAEFVMKAQQGRADEINTCIGCNQACLDQIFVGEIASCLVNPRACHETEMTAEPTTTPKKLAVVGAGPAGLSFAVTAASRGHHVTLFERDGQIGGQFNIAKQIPGKEEFHETLRYFQRQLTIHHVDVRLNQTATPEALSDFDEVIIASGIVPRQLTIDGIHHEKVLSYLDVLRDKKNVGQRVAIIGAGGIGFDTAEYLSQPGKSTSLDSTTFSEKWGIDHNLTHRGGLSPEGPKPKPSPRKIYLLQRKPTKVGEGLGKTTGWVHRTNLHLRGVKMLNNMQYLKIDDQGLHISSNGEQRCLAVDNIVICAGQEPLRELYQPLQQAGKTVHLIGGADVATELDARRAIDQGTRLGLKIZ

SEQ ID NO: 995 - protein, 900 aa, Photorhabdus luminescens
LNMDQHEPQRPDPDELLTLVNEKQRGKLKIFFGACAGVGKTYAMLQEAQRLRAQGLDVVIGVVETHERQGTAALLDGLPQLPLKQIYYRRRKISVFDLDAAIARHPAIILMDELAFSNPHTNRHPKRWQDVEELLEAGIDVLTTINVQHLESLNDVVGDITGIRVRETIPDHIFDQANEIVLVDLPPDDLRQRLNEGKVYIPSQAERAIEHFFRKGNLIALRELALRRTADRVDDQMRAFRDTQGHEPVWHTRDNLLLCIGNSSGNEKLIRTAARLAARLGCIWHAIYVETPKLYQLPEGKRRSILKALRLAHELGAETATLSDPNKEKAVLRYAREHNLGKILIGRRCTSKQKLFGWQWRSGFADRLGKLGPDLDLVIVALEERSHWDKEQDNRSVSEKWRVQIQGCLIAIALCTLITLFSRTFLLTLDKANLVTLYLLGVVVIALFYGRRPSIFAAFINVISFDIFFVQPHWSLAVTDMQYLLTFSVMLIVGVVVGNLTAGMRYQARIARYREQRTRNLYEMTRELSRALNEEDIARTSYHFLTNGFQAKTGLFLPNDDGNLYQLTTNNGGHMLIDDAIAKWSFDKNLPAGAGTDTLPSVPYQLQPIATPSQTLAVLAIEPSYLRQLLIPEQQRLLQTFTGLIANALERLQLSRRAESAKLDTEREQLRNSLLAALSHDLRTPLTVLFGQAEILMLDLSAEGSPHTKQVNQIRQQILSTSRLVNNLLDMARIQSGGIQLNLEWQSLEEIVGSTLRSLEYALNRHPVAVSLPSDLLLHCDASLLERVFINLLENAIKYTDEQIPLGIKATTEKNQIHIEVWDAGKGIPPEQEQLIFDKFSRARKESAIPGVGLGLAICRAIIEIHQGKIWASNNEKGGASFHFVLPLEKPPEIITEEMZ

SEQ ID NO: 996 - protein, 231 aa, Photorhabdus luminescens
VIITNNNTILIIEDEKEIRRFVRLALEGEGYRVFDSDTLKWGLIEAGTRKPDLIILDLGLPDGDGINLIRDLRQWSAIPVIVLSARDKEADKVAALDVGADDYLSKPFGISELLARVRVALRRFARTNREESIVHFSDVVVDLVNRRITKNDEELHLTPIEFRLLGELLANSGKVLTQRQLLNQVWGPNYVEHNHYLRIYMGHLRQKLETDPTRPKHLLTETGIGYRFMPZ

SEQ ID NO: 997 - protein, 514 aa, Photorhabdus luminescens
GSIMSNDKTGKSLEQENSERDVEIRDRNYFRKLSLFDDTVIAGAEMIGTSYDVFGKYCNVGSCMNSLFDERKINASEDNFKKVTILGKTLKVPYYIDCYSVGDLKYTNASGESIESYQSNISSKSRIKGNYLFFSASLKVDFDTDSLTDFENAFSRIQYTYDLYILKSSAEALKEFLKESVKTALDKADTEEDMNDLFNTWGSHFLSGVVMGGCAQYSSSTNKYTSNLTNSFDVVAAASFAGFIGLSARTGNSFMEDIKKFRSASNIKTHAIGGDLSRFDPFGGATSADQPSAEEIAAAKKAFEDWKASVPNAPELVNFADSNPLTGIWELCSDRTQKAKLKKHFETVWAPAESAKRRVHADYIDEIIIGINNTNTPPEGYIGLKSTKDENLNSKGNICLFMHKAKYDPNIDNKDCITELKFITVRDKSPEGDWVKIPQDIYISPNQYLYLCYLPAKYSAEKAIKDIQLLCSSCGSSMILPYGYNDVLDERGERANATEDDNVHYLIYSAGWKZ

SEQ ID NO: 998 - protein, 276 aa, Photorhabdus luminescens
LPLTLERPMYNLIATDLDGTLLLQEDIIGKFTRKVLTDLSSMGKQIVFATGRHHADVNSIIGDFDIPVHLITSNGARLTSACKNLDIRQHLPSHIVKRVIEETQVDNDLVINMYCGSQWLTNEVNHNFSDFSQNDNFNPTFKCVDEMPCDAVEKVFFIHKSRNHDALVKLERHLIDLFSDNVSIAFSFPWSLEVMGSGVSKGQALIQLAGFLGIPMNKTIAFGDGMNDVEMLSTVAKGVIMGTAHNRVKQALPDADIIGSCCEESVAHYLSENMCZ

SEQ ID NO: 999 - protein, 229 aa, Photorhabdus luminescens
RGLRMNNPKTVVICGKGELAIFICQYFLNHKEYKISHVVADKFEPVSTDQTLIDFCYQNNIAVIEDNKVENLPGYENGDFTCDLCFVVFHKRILPLKFINSCKKILNIHLSYLPKYRGVRPVNWALKNGDQSHGVTIHEINEGIDAGPIVNQISFSIYPEFEEVIDTYTRAIRYARQLFLDTMLILEKITPRPQIDSEATIYYEKDNHSLEERMTFTKQASLELLNKAZ

SEQ ID NO: 1000 - protein, 619 aa, Photorhabdus luminescens
MHMKTVILLCAGRGSRLSTRTSNKPKPLVETNQISFIDNALRNIESVGIKKVIIVVGYKSDVLMAHIKQNAYNLHIEFVNSDKWESTNNIYSLYLARNWIKQDTLILEGDIFFTKKCLEIVMSKAGDLNVLVSPLSQNMEGTYAKVDNDNIVALNSTKDNNYQVEEGQYKTVNIYNICTANFAEYVTKELESYVDSGSTGLYYEDIFKHSLLNNMAEFKASIVDNSQWYEVDNTYDLAICDFISSNNKLDLVQNRHGGYWRYPIIDFGLIYNFNFPPKKLKDEIKNHFDEILLNYPGGNRLVEQALSEFIGIERTQLCISNGAAEIIKRLPDVYTGKVLVTVPSFNEYANCFGKDRTIFSYSKESRDFEINIDELLTLAKAEKPNVVVIESPNNPTGKLTPIDSLLYLAGELSALNIDLIVDESFLDFSKMRDDTMLTHLDNYKNLSVIRSMSKTFGIGGIRIGYIATANQELLGKIRAVLPIWNMNGFAEEFLLRLPQYRESYKLSCEKVISDTLKLQQELNSIEGITAFETDSNFVYCKLHVSDAKTISRLLLDIHGLYVKECSGKGNIGSDLYLRISCRTPSDNEILIGSLRMVMQGLINISDISVVKEVNEVCEZ

SEQ ID NO: 1001 - protein, 402 aa, Photorhabdus luminescens
GLSMNKQFYDVVMCGAGPANISLIPDLLKDEAIKNCLILEKTEMVGSGSLKKYKITANSLGSVFLEKFDGCDDELSQYIRSTSEWEHFSANKDKPVELRFVGQYLERIARFIQENKYGDRFNILTEAEVKKIKQNEEGNYDITYHKNNEDYIVSARKVLFNIGGNPNESRLLHNSNNITSGDFIKGFYDEVINKGDVKSISILGSSHSSVSCLIRLIEQLEFAGKINVFVNKDFKLFFDSPSSAESYDYDFTQEDICPLSNRVNRYSGLRYDSFAFAQELKERKYKNISILNISEISDDEVIKLINCDDLLIHCTGYHSKLVEIIDKNNIPLEFKSDRYGLLTNEKLSPISTSGEVLNNFHTFGLGSGVKTGGENGGEASFHGRIDGVWVYQHVIYDIVFNZ

SEQ ID NO: 1002 - protein, 416 aa, Photorhabdus luminescens
YKKITMKNFSLSNYTSIPACIWGLFLGTFVTRSTSMMVWPFISIILYTKFHFTASMIGLVLSLSIAISSILSFYAGYFSDKVGRAKIIIIGCLISSLAYLILWLSEHQSGFIIGTLLANISWALVNNPIKAVIGDIIEEKQVRENAMYLRYLFLNAGAVVGPYLGVKLSLDINSISFLIVSLSYVIFMIPVYLFGKKIKIKLTNNDDFKGTMKVLLNDRVFLMLVINNILMMFIFGHFDSTLPQLITSLGFNGYAEFIASLIMLHAVTIVVMQLPFSILTQKMALETKINVGSVLLILSEFMFFISFKYYDVYLLWYVAAFIMSISQTILFPCVNVFIDRLAPNDLRGAYFGAASLYSIGFSISPLVGGTVIQLFNGGVLFQLLAILSVLMLVIFCRMFKLRDKHEINIRRSLKSZ

SEQ ID NO: 1003 - protein, 547 aa, Photorhabdus luminescens
VVNHPRAGQIARQSDLINVAQLTSQYYTLHPQPENSEHKVKFGTSGHRGSSQRHSFNEAHILAITQAVAEVRKQRGINGPCYVGKDTHALSEAAFISVLEVLTANSVNVIVQENNGFTPTPAISHAILCYNRLGKALADGIVITPSHNPPEDGGIKYNPPDGGPADTDLTAIIERRANELLTAGLKGIKRLPFVQVLNSEYLHQQDLVEPYVSALGDVVDMAAIQRAGLKIGIDPLGGSGIAFWQRIGERYNLDLTLVNDQVDQTFRFMHLDHDGVIRMDCSSPWAMAGLLAMRDKFDLAFANDPDYDRHGIVTPAGLMNPNHYLATAINYLFRHRPQWSESVAIGKTLVSSAMIDRVVADLGRKLVEVPVGFKWFVDGLHKGELGFGGEESAGASFLRFDGTPWSTDKDGIILCLLAAEMTAVTGENPQQHYNKLAARFGTPSYSRIQAPATYQQKALLAKLSPEMVKADKLAGDPITARLTKASGNGASIGGLKVITENGWFAARPSGTEEAYKIYCESLLGPEHRQKIEQEALDIVNQVFAAGZ

SEQ ID NO: 1004 - protein, 322 aa, Photorhabdus luminescens
MNLYGLVADIGGTNARLALCNLENGVIERIETYSAKQHAGLESIISHYLAEQKTVVTYACIAIACPINGDWVEMTNHQWAFSISELKRTLGLEKLDVINDFTAVSMAIPMLTEEYKLQLGGGEAVKDKPIAVYGAGTGLGVAHLIKVDKQWVSLPGEGGHVDFAANSEEQDAILAVLRRKFGHVSVERILSGSGLVNLYQAIAILDHRQPEDLEPETVTQRALDKSCQYCHRALTLFCEIMGRFGGNLALNMGTFGGVYIAGGIVPRFLDFFRQSNFLHGFEDKGRFKPLVQQIPVYLITHPQPGLLGSGTYLRQQLSLIDZ

SEQ ID NO: 1005 - protein, 416 aa, Photorhabdus luminescens
MEKQKRGFVHYIVQGSLVKQILVGLIAGILLAWLAPSVAKSVSLLGTLFVGALKAVAPVLVWILVMSSIANHKKGQKTNIRPILILYILGTFFAALVAVAGSFIFPLPLVLAVNDAQMSPPENIIEVIKGLLVNVVANPVNALLNGNYIGILAWAIGLGIALRHAADSTKSLIHDMSEAVTQVVRVVIRFAPVGIFGLVSATIAETGFNALLGYVQLLVVLLSCMLVMALVVNPLIVYWKIRRNPYPLVFACLRESGVTAFFTRSSAANIPVNMAMCRRMNLHEDTYSVSIPLGATINMEGAAVTIPVLTLAAVNTLGIPVDVPTALLLSVVSAICACGASGVAGGSLLLIPLACSMFGISNEIAMQVVAVGLIIGVLQDSAETSLNSSTDVLFTAAVCQAEDDRLSSDQLTQRNZ

SEQ ID NO: 1006 - protein, 473 aa, Photorhabdus luminescens
MSKIKTRFAPSPTGYLHVGGARTALYSWLYSRHNKGEFVLRIEDTDLERSTQEAINAIMDGMNWLNLNWDEGPYYQTKRFDRYNQAIDQMLEQGNAYRCYCSKEHLEALRETQMANGEKPRYDGRCRDNPCQHDPAQPHVVRFRNPQEGSVIFNDQIRGPIEFSNQELDDLIIRRTDGSPTYNFCVVIDDWDMEITHVIRGEDHINNTPRQINILKALGAPVPEYAHVSMILGDDGKKLSKRHGAVSVMQYRDDGYLPEALLNYLVRLGWSHGDQEIFSIEEMTELFSLDAINKSASAFNTEKLQWLNHHYINTLPPEKVAVHLAWHIEQQGIDSRNGPQLVDLIKLLGERCKTLKEMAESCRYFYEDFAEFDADAAKKHLRPVARQPLEVVHAKLASITDWTPENVHHAIQSTADELEVGMGKVGMPLRVAATGAGQSPGVDVTIHAIGQPRTLSRINQALEFIAQRETQSZ

SEQ ID NO: 1007 - protein, 395 aa, Photorhabdus luminescens
MSQILHFFLALIVIGGLAILASSDRKSIRPRYVIQLLVIELILAWFFLNSGIGQEFVMGFAGLFEHLLKYAGEGTEFIFGGMMDAKLAFFFLNVLCPIIFISALIGILQHIKLLPIIIRVIGTLLSKVNGMGKLESFNAVSSLILGQSENFIAYKDVLGKMSERRMYTMAATAMSTVSMSIVGAYMTILAPKYVVAALVLNMFSTFIILSLINPYAVDSEEDIQMSNLHEGQSFFEMLGEYILAGFKVALIVAAMLIGFIALIAAVNALFSMVFEKSFQEMLGYVFYPFAWVIGIPTDEASKVGSIMATKLVANEFVAMHSLQSIVTELSPRSQGILSVFLVSFANFSSIGIVAGAIKGLNEKQGNVVSRFGLKLLFGSTLVSFLSAAIAGLLLZ

SEQ ID NO: 1008 - protein, 673 aa, Photorhabdus luminescens
MKSTAQQIEKLRTTLRHHEYLYHVMDAPEIPDAEYDRLMQELQDLEEQYPELITSDSPTQRIGAAPLAAFEQVRHEIPMLSLDNVFDEESYLAFDKRVRDRLKETQDLVVCCELKLDGLAVSLLYENGELVRAATRGDGTTGENITSNIRTIGAIPLRLFGENIPARIEIRGEVFMPQKGFEKLNEEARRTGAKVFANPRNAAAGSLRQLDPRITAKRPLAFFCYGVGILEGGELPASHYERLIQFKKWGLPVSDKVKVCTDSQQVIDFYHDIVNQRSALGFDIDGVVVKINSLELQEILGFVARAPRWATAFKFPAQEQMTIVRDVEFQVGRTGAITPVARLEPVQVSGVIVSNATLHNADEIERLGLRIGDTVIIRRAGDVIPQVVGVLEERRPQDSNVVVFPEHCPVCGADIERIEGEAVARCTGGLVCGAQRKEALRHFVSRRAMDVDGMGEKIIDQLVDKEYVKTPADLFRLTAGKLTGLDRMGPKSAQNVVDALEKAKKTTFARFLYALGIREVGEATAANLAAHFGELDKLRSADEEALKEVQDVGEVVAKHVVNFFIEPHNQTVIDDLIDDIGINWEPVVVTRAEKIDSPFSGKTVVLTGSLHQLSRDEAKAKLVALGAKVTGSVSKKTDLVIAGEAAGSKLAKANELNIPVIDEEEMIRLLGEZ

SEQ ID NO: 1009 - protein, 304 aa, Photorhabdus luminescens
MMQDLRLILIIVGAIAIIALLLHGLWTSRKERSSLFRDRPVKRHKHDRQNSFVDDSDDEAFDNQQKPYAHKQVKSHQEYKAEPAIERRQQKLTEIDAATPEESDDPLLTGRQPETTARRAAIEEQEPQLGLFEFEEQNESERNGSAIEEKSQEAAGEKEAQTKVKEIVLVLHVAAHHGQELNGESLLQSILQSGFQFGEMQIFHRHVNPSGSGPVLFSLANMVKPGSFNPETMVDFTTPGVSIFMMVPSYGESSQNFKLMLQAAQRIASDVGGVVLDDERKMLTPQKIELYKARIRSTLGVQVZ

SEQ ID NO: 1010 - protein, 257 aa, Photorhabdus luminescens
MLNLTKSPKNLSGFQYLVQGCKLITRPGIKRFVLLPLLANVLFLGGSFWWLYQKLENWLPWIVSKVPDWMQWLSYILWPLAVISVLLIFTYFFSTIANFIAAPFNGLLAEKLEADLTGIPAPDTGVIALFKDVPRILKRELVKLRYYIPRALILLLLYFIPVIGQTAAPVLWFIFSAWMLSIQYCDYPFDNHKVSFPTMRSALRQNKIINLQFGATVNILTMIPIVNLVIMPIAVCAATAMWVDRYRDQHAPRIMPZ

SEQ ID NO: 1011 - protein, 318 aa, Photorhabdus luminescens
MNKIYEDNSLTIGRTPLIRLKHFGNGRILAKVESRNPSFSVKCRIGSNMIWDAEKHGILQPGKELVEPTSGNTGIALAYVAAARGYKLTLTMPETMSIERRKLLKALGAQLVLTEGAKGMKGAIEKANEIKASDPDRYIILQQFSNPANPEIHEKTTGPEIWEDTDGEVDVFVTGVGTGGTLTGVARYLKNTKGKNITTVAVEPEESPVISQTLAGEEVKPGPHKIQGIGAGFIPDNLDLTLVDRVFKISSEEAIKTAREIMVKEGILAGISSGAAVAAAVKLSQEPEYKDKNIVVILASSGERYLSSVLFADLSDEZ

SEQ ID NO: 1012 - protein, 576 aa, Photorhabdus luminescens
MISGILVSPGIAFGKALLLKEDSIIINQKKISQEQIEQEISYFKQGREKASSQLEIIKNIAAKNLGEEKAEIFEGHIMLLEDEELEQEIIALIKNDLKTSDAAVYSVIETQAQALEELDDEYLKERATDVRDIGKRLLKNILGIPIVDLGSISEEVILVANDLTPSETAQLNLEKVLGFITDLGGRTSHTSIMARSLELPAIVGTTQATTTIQNGDYLILDAVNNHIYINPSDAEIEQLKKTKNEYLSEKAELAKLKDLPAMTLDGHQVEVCANIGTVRDVIGAERNGAEGVGLYRTEFLFMDRDALPTEEEQFQAYKAVAEAIGSQAVIIRTMDIGGDKNLPYMNLPKEENPFLGWRAIRICLDRKEILHSQLRAILRASAFGKLRIMFPMIISVEEVQELKVELELLKGQLREEGKKFDEAIEVGVMIETPASAVIAHHLAKEVDFFSIGTNDLTQYTLAVDRGNELISHLYNPMLPAVLSLIKQTIDASHAEGKWTGMCGELAGDERATLLLLGMGLDEFSMSAISIPRIKKIIRNTRYEDAKALAEQALSQSTAKGLIALVDTFIKEKTLCZ

SEQ ID NO: 1013 - protein, 432 aa, Photorhabdus luminescens
RRGIIRYTVGMTLNDLIALDDPGQFRLRALALLQQQGDYIRQLEEALKQAQRWRFGAHSETLPAGPKRSQFEEDADTDIAVLETRLSRLHIKENATPAQPKRQPLPATLPREDIRLAPETESCPDCGHALRFLRDEISERLEYRPATFIVRRYISPQYSCARCQCVHAKAQPAHLIEKGLPEPGLLAQVVVAKYRDHLPLYRQQQIYARSGVTLARSTLSDWVGQVAVALQPLADALKQTLLTSPVLHADETPLPILAPGKGQTQRAYLWTSVTGPDTSPAVVYYELHPGRSGRYAQSLLKDWSGGTLVTDDYAGYNALHARADITEAGCWAHARRKFFDQYKASQSPVAKQALDGIRDLYKLERKIKHQPPDKRRQWRQRYARPWLNEFRSWLQTMQTQTAPNSGLRKAIDYTLKRWSALVCYLDDGGCRZ

SEQ ID NO: 1014 - protein, 377 aa, Photorhabdus luminescens
LLYLRKKYSDDIILSEHFLMGTPFYNSSAMVKAIYDNQQIKNISSVKVNFNYIKEDKDIDIYILLIGESARRDHMSLYGYEKTTTPTLDTMQKNMLIFNQAISPAPVTILSVPISLSNITLYQLRNKAHYADNVISLAKDAGFKTTWISNQGRSGKNNSLITIIANMAESQKWNEYIGYDEELLTYLDDSLKQKGKKFIIMHIYGSHEPSCNRFPENKLISFSSNEDDNCYDSSIVYTDQLIEKVINKIKDYKASILYFSDHGLQRLDKNGDIRYHHGVSHPRKEAYNVPLFIWYNDNVNPRYHHTGVINTPFSTSDNYYLISDWLGIYHKSPEYCRSPLSNCFKSEKDLMVIDGNKNLIKYNDLLGEKYIKNSNKZ

SEQ ID NO: 1015 - protein, 289 aa, Photorhabdus luminescens
SALSLGLALMFGTAGLPHIIMRFFTVSDAKEARKSVFYATGFIGYFYILTFIIGFGAILLVSPNPSFKDTTGALIGGTNMAAVHLASAVGGNLFLGFISAVAFATILAVVAGLTLAGASAVSHDLYANAIKSGKANERDELRVSKITVVILGFIAIGLGILFENQNIAFMVGLAFSIAASCNFPIILLSMYWHKLTTRGALVGGWLGLITAVVLMILGPTIWVSILGHEKPIYPYEYPALFSMIIAFIGSWLFSITDNSQQGMQEREQFRIQFIRSQTGLGIAQGKTHZ

SEQ ID NO: 1016 - protein, 321 aa, Photorhabdus luminescens
MNSVGSPLLWGSFAVLITIMLLLDLSLQGRKKEQAMSFRQAAVWSVIWVSLSLLFALGLWWYCRETVGVAVANSQVMAFLTGYLLEKALAVDNVFVWLMLFSYFAIPANLQRRVLIYGVLGAIVLRTVMIFAGSWLVSQFSWILYLFGLFLLVTGVKMALVKEDDSPIGDKPFVRWLKAHIRITDNLHGERFFVKEKGLLYATPLILVLILVEISDVIFAVDSIPAIFAVTTDPFIVLTSNLFAILGLRAMYFLLAGVAEKFTMLKYGLSVILAFIGIKMLIIDFYHIPIGGSLGAVASILAVTMIINVWVNKYKATENQZ

SEQ ID NO: 1017 - protein, 261 aa, Photorhabdus luminescens
MKNFLLLAIMLFPHLTWANVISETGERQPVNIQAIIMFVLFVGFTLYITYWASKKTRSRTDYYTAGGRITGFQNGMAIAGDFMSAASFLGISALVYTSGYDGLIYSIGFLIGWPIILFLIAERLRNLGRYTFADVASYRLQQRPIRILSAIGSLFVVALYLIAQMVGAGKLIELLFGLNYHVAVVLVGILMVLYVLFGGMLATTWVQIIKAILLLAGATFMALMVMKIVNFNFNTLFKEAIAVHSRGEAIMSPRGLVSDPZ

SEQ ID NO: 1018 - protein, 652 aa, Photorhabdus luminescens
MTKIMKHPIPIAIAEHALMNEQQYQQDYQLSLQDPDRFWGEKGKIVDWIKPYTKVKNTSFDPGHINIRWFEDGTLNLSANCLDRHLKERGEQTAIIWEGDDPTESKAITYRELHHDVCQFANVLKNMGIKKGDVVAIYMPMVPEAAVAMLACARIGAIHSVIFAGFSPDAVSGRIIDSNTKLVITADEGLRAGRTIPLKKNVDDALNNAAVVNVSNVIVFKRTGNIGHWQSGRDLWWHELVADASADCPVEEINAEDPLFILYTSGSTGKPKGVLHTTGGYLVYASLTFKYVFDYQPGEVYWCTADVGWVTGHSYLLYGPLSCGAITLMFEGVPNYPAVNRLSQIIDKHQVNILYTAPTAIRALMAEGDKAIEGTKRTSLRIMGSVGEPINPEAWEWYYQKIGNSKCPIVDTWWQTETGGFMITPLPGATELKAGSATLPFFGVQPALVDNLGEQLEGVCEGNLVITDSWPGQARSLFGDHDRFEQTYFSTFKGMYFSGDGARRDEDGYYWITGRVDDVLNISGHRLGTAEIESALVSHPKIAEAAVVGTPHNIKGQAIYAYVTLNHGEEPSPELYTEVRNWVRKEIGPIATPDILHWTDSLPKTRSGKIMRRILRKIASGDTNNLGDISTLADPGVVEKLLEEKQTMSISZ

SEQ ID NO: 1019 - protein, 209 aa, Photorhabdus luminescens
MSYSLPSLPYSYEALEPHFDKQTMEIHHTKHHQTYVNNTNSALEAFPELAGLGIDDLIQQLDKIPADKRTFVRNNAGGHANHSLFWKGLKLGTTLQGPLKEAIERDFGSIDSFKEKFEQAAATRFGSGWAWLVLKDDGKLAVVSTANQDSPLMGEAISGASGYPITGLDVWEHAYYLQYQNRRPDYIKAFWSVVNWDEAAKRYQEKVKZ

SEQ ID NO: 1020 - protein, 224 aa, Photorhabdus luminescens
MYCPQVYTGKIEISGKLSASAINKRMVDGGLRLTSLGLDGDEQAETHFHGGPDRALCHYPREHYDFWKHQFPDQEDFFIAPAFGENISTTGLTEENICIGDIFSWGEAMIQVTQPRSPCYKLNCHSGISNFSAIMQESGRCGWLYRIIAAGNVSPDEPLVLVSRNSDVFVREAIAIAFNMPFDEEQYRRLMSAAGLSASWSLTMQKRVMFGKIEDFNRRLFGKZ

SEQ ID NO: 1021 - protein, 211 aa, Photorhabdus luminescens
YPVIPNNPVKIEATMSDINNLLRDPQFFSMLHKQMLQFAILQLNDFHQAEDVVQEALEGAMKNASSFAGRAAWKSWVFTILRNKISDALRMRYRHSSVQLTDDVDEQNFEALFDESGHWPRNEHPQCWHLPDEVAEQEQFWTIFELCLTQLPTQNARAFMMREFIGLETQEICQEMALSVSNLNVMLWRARMRLRECLSQRWFSHEDKYAZ

SEQ ID NO: 1022 - protein, 265 aa, Photorhabdus luminescens
TKPAMPSITLRRARNMQQQLYQALLDPDLMVPEGLTTWNGSDPAVRFAVYRNNVIASLIDALAENCPVLLAQLGECFFRAMAAEFIRQQPPPSPVLAGYGAQLPDWIATFQPLADWPWLSDLTRLEMLFIESLHAADPAEQTAEAAPIDDPAQLLMALHPSVRLFSSDYAVFSLWASHQQSENEMMLDPFQPEHMLLCRVDDDVRIMLLSRAEMQFVTMLQSGRCLTEALEIAAGEDATFEPQSVLQRMQHYGLILSLYSNTERZ

SEQ ID NO: 1023 - protein, 290 aa, Photorhabdus luminescens
MLNRLPARAGIGLKPEHFRAILHNKPDIGFFEIHAENYLVAGGPFHQALTTIRQDYPLSIHGVGLSIGGENPLNQTHLQRVAALVERYQPAVFSEHLAWSTHNDLFLNDLLPLPYTDVTLTRVCEHIDQVQNALRRPILLENPSTYIEFSASTMSETDFISEVVRRTGCGLLLDVNNLYISGVNHNRCPRQMLLELPLHRVGEIHLAGYTESRDGANDLLLIDSHDSHVTGPVWDLYNKTLRKTGPIATLIEWDSNIPPLDVLLNEASHAQHYITESKKHATTTVSSTSZ

SEQ ID NO: 1024 - protein, 353 aa, Photorhabdus luminescens
NFRKHNKMNEPTVSETLNSQKPIVFSGAQPSGELTIGNYMGALRQWVKMQDDYDCIYCIVDQHAITVRQDPKELRKRTLDTLALYLACGIDPEKSTIFVQSHVPQHAQLSWILNCYTYFGELSRMTQFKDKSARHAENINAGLFDYPVLMTADILVYQTNQVPVGIDQKQHLELSRDIAQRFNAIYGNIFAVPEPFIPTGGARVMALQDPEKKMSKSDDNRNNVIALLEDPKSAAKKIKRAVTDSEEPPRVRYDLEQKPGVSNLLDLLAGVTGKTIPELEAEFEGQMYGHLKSAVADAVSGMLTELQERFHYFRNDEILLNKIMAEGAAKAKARAQITLDKVYEAVGFIAHPZ

SEQ ID NO: 1025 - protein, 235 aa, Photorhabdus luminescens
MASKVLKGIRAIAFDLDGTLVDSAGGLADALDQALLAKGLPAAGKERVAAWVGNGADIMVERALTWARTKLTAQLHKETRELFDRFYETTVTTGSQLFPEVKVTLAELAKHNLPMGIITNKPTPFIAPLLASLDISEYFSLVLGGDDVKEKKPHPAPIYLTMGTFGLRKEELLFVGDSRNDILAAQAAGCPCVGLTYGYNYGESIALSNPDCILTNFSDLLSTIGLPSLKLQEAZ

SEQ ID NO: 1026 - protein, 231 aa, Photorhabdus luminescens
LEKIMKDFLIAPSILSANFARLGEDTDKVLAAGADVVHFDVMDNHYVPNLTIGPMVCQALRDYGITAPIDVHLMVKPVDRIIPDFAKAGATYITFHPETSEHIDRSLQLIKEHGCKAGLVFNPATPLSHLDYVLDKLDIILLMSVNPGFGGQSFIPGTLEKLRQVRKIIDESGYDIRLEVDGGIKASNIAAAATAGADMFVAGSAIFSQPDYKTVIDNMRSELSKVSHGKZ

SEQ ID NO: 1027 - protein, 334 aa, Photorhabdus luminescens
MTTMKDVAHQAGVSVATVSRVINNTAYVEPGTRERVEKAMREFNYHRNSAALALAKRCGNMLGLLTGNLADPFFSLLARGVEKVARQEKVKLMVCSGGYQAELEKSALDFLINQGCEAIVAHVSRMSDVDVLRYAAHTPGLVIINRYFPAIANRCIWLDNVSASQIATNYLLQNGHRKIACVTANLPIDNRRLRLEGYYAAMANAGVTVPGDWVISVPFNEKGGELAAEKLLDSDIGFTAAVTFNDVMAAGMMRSLHQRKIKLPEQLSIVGFDDIVPARYLYPPLTTVHNPIERMAQRAANLALQLSAKKEITPQMNMFSAELVIRDSVFLIEZ

SEQ ID NO: 1028 - protein, 224 aa, Photorhabdus luminescens
MEIVKELIYALWYQDYETLANPSLLWAIYIMLFLILFLENGLLPAAFLPGDSLLILVGVLIAKGAMSFPLTIVVLTAGASLGCWIGYLQGKWLGNTKTVQGWLSHLPAYYHQRAYNLFHRHGLSALLLGRFLAFVRTLLPTLAGLTGLQNSRFQFFNWLSGFLWVIILTSLGYAFGKTPIFRQYEDLVMNFLILLPLALLIIGFSGSLLVVWRKKTCQSPQKKZ

SEQ ID NO: 1029 - protein, 271 aa, Photorhabdus luminescens
MKKKRAFLKWAGGKYPLVDDIKRHLPAGSRLIEPFVGAGSVFLNTDYDSYILADINSDLINLYNTVKLRADEFIVHTRPLFTQEYNTAEHFYQLREQFNQSTDPFHRSVLFLYLNRHCYNGLCRYNSHGKFNVPFGRYKKPYFPEEELHWFAEKAQNATFICEHYQHTLNEAHKDSVIYCDPPYAPLSATANFTAYHTNSFNIADQENLANIAFKLSSERAIPVLISNHDTPMTRKWYYQASLHIVKARRTISRNILARSKVDELLALYRZ

SEQ ID NO: 1030 - protein, 342 aa, Photorhabdus luminescens
NNDSIRQISIFVKSACRTDFNCNWQYLALFGGHMDEFKSENEQRANNEFRPDTSDRRPSRSRQPLNKPKFAVSRQQMMLGIGILVLLLLIIAISSALKAPTEHEKQQSPNVAEKNIDLSNSSSNNDDNQSITSENTTTDTINRPQEIHVPPVSGTSTQPHQLQTNNGKTQNQRIELPGNIPDALTQQQSNINHAVQNLNQAQQSQPVTPPPVVQQKSENIRPLKSETPAKSKPSTSHASSKNNVVSSTSSDQLKTPANHYTLQLSSASRSDTLTAFAKKHNLTHYKVYETKRNEKVWFVLIHGDYPSVSEAKRAVSSLPAEIQAKKPWVRTMQQVQQDLRKZ

SEQ ID NO: 1031 - protein, 367 aa, Photorhabdus luminescens
MEKITVTLGERSYPITIAKGLFDDPSAFAPLKAGQQVMLVTNQTLAPLYLAKVKATLQQARIRVDEVILPDGEQYKSLSVLNDVFSALLENSHSRDTTLIALGGGVIGDLTGFAAACYQRGVRFIQMPTTLLAQVDSSVGGKTAVNHPFGKNMIGAFYQPASVMVDLNCLQTLPARELSSGLAEVIKYGIILDSAFFSWLEDNMDKLLALDNQAMAHCIRRCCELKAEVVAADEKELSGLRALLNLGHTFGHAIETEMGYGVWLHGEAVSAGMVMAARTAQLIDNFSEQDTQRIIRLLERANLPVHGPQNMPPEAYLPHMMRDKKVIAGKLRLVLPTKIGKADLRSDIEHNCVVDAILQCLPYENVZ

SEQ ID NO: 1032 - protein, 359 aa, Photorhabdus luminescens
TSKSPCQKPHMRNFMTKKFILFILFLPAIVVAEIRNPFVPPMIETEEQSVELFDQSVNETEIQSLSTVLQYADAERIAMNLRQNTPALITKEGKVDFDPETNSLILQDTPIAIAQIKSWLKEIDTPQQQVQITAHIVTSSREALHELGIYWGMPIGEQINTSTGINRLNINQAANDNMHRFAFNIARIHTSLLEMELSALEQENQLDIIASPRLTASHQQLASIKQGSDIPYVSQEKEKSTVQFKEAVLGMEVTPHILRKNKIRLSLKISQNMPGISISQGGGENLTIDKQEIITQVTVKNGETLILGGIFQQKKGEQTQKVPYLSDIPLLGSLFNQKAHKHSRRELVIFITPQLMDIZ

SEQ ID NO: 1033 - protein, 282 aa, Photorhabdus luminescens
YGDRYMYSPKWYVGLDIQNGILRAVAAIKRRDGWQLRHCWQYLLSDAVMPEGRLQRPEILCDILNQWRQELPKKISFRLALPVQQTLQKSLILPPDINLKEPEQGWFINASAEKQFPFNTRELALDYRIIEQNAYISAARQKDLNLWLQCLAQAGIFPDAIDIAPCALRYIAQYAGVPADSWLLHRQQSGWLWVSPANAPFAYDLVSANTAVSPQQIIRQLSASSMAEQPVYYSSYQQEALPEGTYSWDMLTAFRHYQPPLPIQLMEYVIAGGLALRPDDKZ

SEQ ID NO: 1034 - protein, 843 aa, Photorhabdus luminescens
VKFVKYFLVFVVSCIFLGTASIFGMYKYIEPQLPDVATLKDVRLQTPMQVFSADGELIAQYGEKRRMPLELPEIPPIMVKAFIATEDSRFYEHHGVDPVGIIRAASVAMSSGHASQGASTITQQLARNFFLTPEKTLMRKVKEAFLAIRIEQLLNKDEILELYLNKIYLGYRAYGVGAAAQVYFGKSVNELTLSEIAMIAGLPKAPSTFNPLYSYGRAINRRNVVLSRMLNEGYITQQQYNQARSEKLVANYHAPQIAFSAPYLSEMVRQEMIERYGENAYTDGYKVYTTITRKLQLAAVDAVRNNLIDYDVRHGYRGAQEVLWKVGEPAWDREQIVKKLKTLPSYGALMPAVVTKAGTDQAIVMLPDGSSVELPIAGVRWAKKFKSDSAQGAVPRSVNEVVQVGEQVWVRKVKDIWWLAQVPEANAALVSIDPNDGAVKALVGGFDFNLSKFNRVTQSLRQIGSNIKPFLYTAAMDKGLTLASLLNDLPISRWDAGASTDWRPKNSPPAYVGPIRLRQGLGQSKNVVMVRAMRAMGVDYAADYLQRFGFPAQNIVRTESLALGSPSFTPMQMVRGYSVMSNGGYLIDPYFITKIENEDGDVLFEAKPKIACPQCDIPVIYGDTVRSIELSENSIENVAQSHVGQQEILPLPELERAPVIDGREGAQEYAPHVISTQLAFLIHDALNSNIFGEPGWSGTGWRASRDLKRRDIGGKTGTTNSSKDAWFSGYGPDIVTTVWIGFDDHRRSLGRTAASGGEAGAKSAQPIWDDFMKIALEGVPEKEVTPPPGIVSAVIDRKTGKLAGGGGDTRSEYFIDGTQPTESAVQEVGTILIENGESQELFZ

SEQ ID NO: 1035 - protein, 183 aa, Photorhabdus luminescens
MNDLKNPKILNIEDIAHSRLFHIQSVDLEFSNGVKRVYERMRPANREAVLIIPVIGEELLLIREYAVGIEQYELGFPKGAIDPGESIFEAANRELKEEVSFGARKIEQLAKLTMAPSYFSSKMNIVIAENLYPESLEGDEPEPLSQIRWPIADMMSLLDHADFNEARNVCALFLAQKYLIHRZ

SEQ ID NO: 1036 - protein, 711 aa, Photorhabdus luminescens
MSVTVVILAILIISLIVMASFLIFKWKLHDNDRYLPSVAAPTYRKLNADEYQAIECYLNRVLPPVVTNRINKTSWPILMGKNDMVYTICHSITRFSVASDERHSWRYYIDMAEIHLPFFLEPFIKQQNIIDVIHTATIPLVISINGHFLKDFQQDFPSAPVIADISHQQASIQKNGETSVKLQNIRKETLEEYRLNHSSGIWEGGFLCFGFFIWFFALLSPALLLPWLMLIAGSLVVVSFWPLLCPLSICRRQDIHCFTGIPKRWGLFGEFEQGQMSNISLGGIDLIYPPHWEPYVAYYFDQKTSIDIYTNGQVVRQGHYLSLHDEEKNYPYRRYGKNLMMIASCLLIMLLLYFYQPVSVPMKLSFAWLHGSSTKVITDANMMEGMELRVGDILKAKGVGMCYMPPNNMNGKGDTYFSPFDCSGIYWNRVNPLPIPESEIIENAAKLIATVNKQLRLQENNDVINPDLPQEIFKSGMILLDNFSDIVLKTKELCEKEADCLRLKNALVNLGSAIDWLTLLKNAESGKLDGTHVLLRPAGAEALGKLVDATTSSFIYREIDKVAMLLNSPSPGGVLLISDEGKQLVEYITPAIISYDHSVLEDHSALEQWRELQRLSDMVLQTPFETTGIVTELSVDSHGTRRIVLHSELDAMTLARCIGTTILFLALFTTLIINFVLVVKKNRQNKQRLNKIKQYYDNCFNTLFPPTRWRZ

SEQ ID NO: 1037 - protein, 291 aa, Photorhabdus luminescens
MFKQDQLHRFLFKNYSVRGELVLASETYQHILENHDYPQPVQQLLGELLVATSLLTATLKFDGDITVQIQGDGPVKLAVINGNHQQQMRGVARIDGLVAENSSLKQMVGTGYMVITITPTHGERYQGVVALEGETLADCLDDYFRQSEQLPTRLFIRTGIQDGRVAAGGMLLQILPTAEQGSAEAFDHLVQLTATIKGEELFSLEVKEILHRLYHEEDVILYEPQAVEFRCTCSRQRCADTLVTLSDEDVNHILQKDGNIDMACEYCGTHYIFDADDLAAIRIEKKNRLHZ

SEQ ID NO: 1038 - protein, 540 aa, Photorhabdus luminescens
MSVKGITPQELAGYGIHDVNEIIYNPSYELLFSEETKPSLEGCESGTLTNLGAVAVDTGIFTGRSPKDKYIVRDDVTRDTVWWADQGKGKNDNKPLQQETWTYLKGLVTKQLSGKRLFVVDAFCGANADTRLKVRFITEVAWQAHFVKNMFIRPSDEELAEFKPDFIVMNGAKCTNPQWQEQGLNSENFVAFNLTERMQLIGGTWYGGEMKKGMFSMMNYLLPLKGIASMHCSANVGEKGDVAVFFGLSGTGKTTLSTDPKRKLIGDDEHGWDDDGVFNFEGGCYAKTINLSKEAEPDIYNAIKRDALLENVTVLTDGTVDFRDGSKTENTRVSYPINHIENIVKPVSKAGHATKVIFLTADAFGVLPPVSRLTPEQTQYHFLSGFTAKLAGTERGVTEPTPTFSACFGAAFLTLHPTQYAEVLVKRMQAAGAKAYLVNTGWNGTGKRISIKDTRGIIDAILNGDIEETDTITLPIFDLAVPTALPGVDTDILDPRKTYADKSQWEEKAKDLAHRFVDNFDKYTDTPAGEALVKAGPKLZ

SEQ ID NO: 1039 - protein, 299 aa, Photorhabdus luminescens
MSKERALTLESLRVMDAIDRRGSFAAAADELGRVPSALSYTMQKLEEELDVVLFDRSGHRTKFTNVGRMLLERGRQLLEAADKLTADAEALARGWETHLTIVCEALVPASSLFPLVGKLAQKSNTQLSLLTEVLAGAWERLETGRADIVIAPDMHFRASAEINSRQLYSITNVYVASPDHPIHQEPEPLSDVTRVKYRGIAVADTARERPVLTVQLLDKQQRLTVSSLEDKRRALLAGLGVATMPYPMVEQDITEGRLRVISSEYSHETNVIMAWRRDSMGEAKSWCLREIPKLFVSRZ

SEQ ID NO: 1040 - protein, 232 aa, Photorhabdus luminescens
MIHLRKASDRGHADHGWLTSWHTFSFASYYDTNFMNFSALRVINEDFIEAGQGFGTHPHKDMEILTYVLSGTVEHQDSIGNKERVPAGEFQIMSAGTGIRHSEYNPNSDCQLHLYQIWIIPSKTGLTPRYEQRRFDDVQSRQLVLSPDARDGSLKVFQDMTLWRWILKDHETAEYVAEKGRYIWIQVIRGEVTVNGVKATTSDGLAIRDEINLQLSSSNDSEILLFDLPPTZ

SEQ ID NO: 1041 - protein, 460 aa, Photorhabdus luminescens
LYFNVMKDIFSGNHMWHFLAWIVLTGLTIWGMINHSLNQNYQQQTVSFNILYRELSEKLAQHDAIVSLTDTNIELEQLQENFPQIVGLQEMPMNVLIFPIVSEEEEGRYWLNSKRDNIRLLIDLNILIKDLSLLSQFRMVQLDWNNRPLITYGLEKDHYFWRWEKKLTNRFQPFVLKVGNDQQWSKIPWGYIACLSFLWAVIICFIFLIQKNKRLRKISDLRAHFFEFTRLNTMDEVATGVVHELNQPLTAIMSYNQTALRLMKKQQYDKVTPILDSSILQTQRIANLLTQYRQKLTTGNIILQPVNIQTILGRVEILLENEIKVGKIKIIKHICDELPMISAEPLWIEQIFHNLISNAIQAQQEQGRSEYQNWICIDITYIDDMIKIMITDGGPGLSDEALKNVFIPFFTTRQQGMGLGMTLTETLIHKLGGDINAENCETGGARFIIWLPTNKGKEKZ

SEQ ID NO: 1042 - protein, 209 aa, Photorhabdus luminescens
MATVIYLIDDDEAIRDSLSMLLETMNWQVSSFPGAQEFLDRIDSENIAVLQGCILLDIRMPGKPGLALQADLLKLNSTLPVIIMTGHGNIDICRRAFKNGAFEFLTKPIDADLLIETVSSALLFHQKVFRQRQIYEQLKTKFSQLSEREREVMKIILEGKTSKQIAQQLSLSPRTIEVHRANIFHKLDIHSLPQLVKEYELFKSLSYDZ

SEQ ID NO: 1043 - protein, 1095 aa, Photorhabdus luminescens
KGLIMVAPFWKRAYLALLSSTFVLLLASCDNNRSLPKTPEKPMAHIPNKVPSEAATAGNFQAVIHLVDIAKLSQSPTTNRDYSTNTLYLWNDKNCDALASLSSSWNDTSATPTGSDSYGPYWVIPLTKNEGCINFIVRDGNNNKLIDSDLKISFSDFSNRTVSVIPGNYQIYGSRAAAFNSVFGVSQASAHWVDNQTLLWSGGADKPYVRLYYNRNGKVEANDEGNFIDSYLTLTPTTLSQKTAERFPHLKKLTAFHLPEDTDVDTLLTGELVALATNEAGLLLSATQVQTAGVLDDRFANVADTLEYGALINDTGVTFRLWAPTAQHVGLVIYDANKQIIANHAMKRDPASGSWSWQGDKELVGAYYRYALTVYHPYSRHVEHYEVTDPYSHSLSTNSEYSQVINLDDEALKPQNWDSLIMPRSQNTPADIARMTIYEAHIRDLSVADGTVTETWRGKYLALTADNSDMFKHLKTLSQAGVTHMELLPVFDVASINEFSNEVADLNHPFSRLCQVNPRVKNSRFANYCSGSQTVGEVLQALQRGDNANNPQVQELNAMIAETDSYNWGYDPFHYSVPEGSYATDAEGSVRINEFRAMIQAIKQQLGMNVIMDVAYNHTNAAGPAHRSSVLDKVVPWYYHRLDEITGNVESNTCCHDTAPEHRMFAKLIEDSLVTWVKDYKIDAFRFDLMGYHPKAQMLSALAKVRAINPSVYFFGEGWNSGQDDRFEIASQINLKGTGIGTFSDRLRDAVQGGGPFDSADTIRINQGVGNGAGTLLNEMAWLDANETRHLADLVRLGMAGNLADFVLINKDGAVKTGREINYKGAIAGYAADPIEVINYVSKHDNQTLWDIISYKAAREANLATRVRMQAISLATTFLGQGLAFAQHGSELLRSKSFTRDSYNSGDWFNRVSYTYQDNNYDVGMPDQRVDGENYALIEKVKNVVDKPGRTELLQMTAFYQELLRLRQYSPLMTLGDGTSVKQRVDFRNVGPHQQLGLLVMTIDDGNTTGDDRDSRFDGLVVMINAAPYPATVRDLNVKGLKLNDIQRELGHTSLAAGTRIAKDGTVTLPAWSVAVLVLPQDGKRGIGLPVRRKZ

SEQ ID NO: 1044 - protein, 506 aa, Photorhabdus luminescens
IIQNSWWWFFTYHHIEGGKLNFQGLQAKYRRLFQESAAWKLLRADNAPVILAFLGELFSEDSEVPFSRARVSLDAELVRCRELGLWETETGAGTYLNKWIREGWLREMDDTLTKTDASEIALRFSQGLDERNSGTTASHLRIVQEAVRDFAIAISPNADERVAFLEDRKSEIQREIDALRAGVVTELTKAEQRERIREIYQLASVLTGDFRRVEDEIRQLDQEIRIQIIEGDSTRGDILLAVLEKEALLAKTDAGSAFESFFDLLCDQNRTMELRDQLRSILSRPVAEHLSTQQRQFLSQLMRELSRESDRVFQIRRRTEESLRAYIESGTAQENRAVDRLLGQLERLAIELKNLGYDLQTATTLSLPVGAASISSPESMLLKSPDEKLDTSDAEEQLNSREPSMQMLDCLDVVQIRLIAERALETLKEFGPMTIASIANYQPINSGLEELVAYLRVAKSVGAALLEEKESVEISDKRGARLRASIPTFLLSADLFPDSLDELVLZ

SEQ ID NO: 1045 - protein, 299 aa, Photorhabdus luminescens
CMVGKKLNKDNGALATLGKSDSNPQEEQKTGFFDQLIKHHTQSEYDPLTDTAGVESDVAFSIVNQSPSCEADDVLVSKHAENSNSDMPPDARRVLVSLLRQGVILSSQKAKLFELLCRYQSAVRKHLSEVYLRLVLDEKAGVAFIAGFQNEEDTESLGIDDEEVVSLISRRTLSLYDTLLLLVLRKHYQDRETSGEQRVIIDIERIESHLTPFLPLTNSTKSDRRKLKGALDKMVTKKILSSVRGSEDRFEITPVIRYVVSAEFLESMLNEYLKMAGEKGIELNKNGSDAVDYQDEEEZ

SEQ ID NO: 1046 - protein, 1152 aa, Photorhabdus luminescens
IKMAATLLIIKMKRNRQEMKMTDQTLSANSLFHVGQIRLAELSVYNWGSFNGLHTALIDPMGTLVTGDNGAGKSTFIDGLMALLLPAGKATFNVAAAQGDRSDRTLLSYMRGSFGSAHDGAGTRVRSKREFGVVTGLRALYQGDDGSKITLAALFWITKSTNVLADVTRVYVVAKRDLTLKEMLNAFGNGNARAFKQWLRDDPTITCCDDNFSDYQELYRKLLYMDNKNAPALLSRALGLKKIDDLTGLIRELVLEPSTVKDDAKKVVEEFADLVAIHSQLVDARAQKVHLSRLPELNSIIEKTTKEFAELMAEKNSLPVYFGEIFAQLWSEKITDIEAELEALLLKISQVEGQKVDANKLVERRHEEYLQFGGDKIESLRKEVDHTQTQLNRVVRNSSQYQTHANELALPSVLEEAVFLKNQSTASTRLASIQQEEGEYQDRFATISAKFSELQANIHDISQEIREIEARPDSNIDVKYQQLRDELVNSLELSKEQCVFIGELIDVEDREKSWQGAIERALGGLRTTLAVPHHCYSMVTRWLNARHTGLHVRVQVVNNSTTQGQSVVFKSDGYLRKLVWRTHPYREWLKHHLQRFDLQCVSSTEELDQTPFSMTQQGLMHMDKGRFEKKDQYRIDDRRRWCLGFSNKSRLAILNNDKKELTLQLAETEKKVSQARQDLNSVSDRKILWEKIQGYRWDDINAPYWHEKLSDLQVDLKMLEQSGGDLDKARERWESAKEQLVQIQSVLNQLNSDSGGVKNTLKNAKEEWSKAQAKASKGLPDSARQLLAIRVGVLNTNDLGRMSELVLKVEEDLERLLDISRNSKDKAERLAISIMVSFRSNDKWQVFTVDWQSNIGGLPDYLNHLRQLEEEGLPNLVEQFIERLNKHATQSLARIKTKLESEREDILERIDIINRVLKRTEFRSGTHLKLGSKREKFPHVNEFEQHLRKVLSQVTSDDHEARFRQLAKVVEILGKASAPGSSNTLESLRLLDPRYQMSFYAEELDSNTGEIRDVLESSSGKSGGEKESFAATIVAASLAYVLTPDGYDRPVYCTVFLDEAFSNTAETVSRRVLRVFRELHIHVNLITPYKNLNLARESARSLLIAERDQENHDSHLCEVTWEEIDRRMGEEKEKKLPDEAADLGIEFEKLTZ

SEQ ID NO: 1047 - protein, 402 aa, Photorhabdus luminescens
ETDMKRGQYEVRWGLLPSQVKSIIRQREWDNLSSLKSRLLGIKAFPIRVGLKPPKGNSAILDIAHFQRFIDEWKSFPHQDLVEWSSKNFRELSEQRIPTFVVIESMQCLIQFLGNDALSRSKVWERNMKPFLRVDKDLYPALVKCIDIVEKLSLRDAELLAKLLPQLKQGLGEGQYLRALPLIGIDTKFLENHQILIEELADIIHKGAVSASGGLIAWLGCSINPKGWLTIRPLCRAATVALGGMPILQIPSELLRRHELPASNILIVENLQSGLALPEMSDTIAVIGGGKNIAWMDAAWLKGKRVGYWGDIDTWGLSILSDARNKFMDIEPLMMDVKTVKAHEDRMVPEPNPVESNPTLLNEDEAKLFNDLISGRFQSSRLEQERLSSDYIRNKLTNWLSZ

SEQ ID NO: 1048 - protein, 301 aa, Photorhabdus luminescens
MLLRHIRYLLAVAEHQNFTRAAEELHVSQPTLSQQIRQLEESLHVQLFDRSGRSVRLTDAGEVYTSYARRALQDLDAGQRAIHDVQDLSRGLLRLAMTPTFTTYFIGHWVERFNALYPGISLNIKEMTQDQIEISLAENQLDLGIAFSDVRSPDIDSEPLFIETLSLIVGQSHRFIGQQTSLTAKMLEHEGLALLSKDFATRSHIDLYFQKQGITPRIAIEANSISAIVEIVRRGRLATLLPDVIAHEQTGLYSIAIQPTLPQRNAVLLWRRGAYRSAASQAFANLITHHFDVHQESDDFZ

SEQ ID NO: 1049 - protein, 220 aa, Photorhabdus luminescens
MQDIIEGFLQFQREVFPKRCELFKRLATSQNPRTLFITCSDSRVVPELLTQSEPGDLFVIRNAGNIVPSYGAESGGVSATVEYAVAVLGVTDIVICGHSDCGAMTTIASCKCMNHLPAITSWLRYADCAKAISQARVHVNETAQIDSMVRENVIAQIANIKTHPSVALGLEQRHLNLHGWIYDIEAGSIDALDGLAGQFVSLADYPHVSATQSVFHHGIZ

SEQ ID NO: 1050 - protein, 234 aa, Photorhabdus luminescens
MIINRTAKQCGKADYGWLQARYTFSFGHYFDPKFLGYGALRVLNQEVIAPKAAFQPKSYPHVDILNIILQGEAEYRDSEGNYIRARKGECLLFSTRQGISYSEHNASINKPLTRLQLWLNAFPQQESLPLQRMELPEQPLAMLASPTAEDGSMQLRQQVWVNHISLNKNQSHHLQLKGKNAYLQSLNGNIKIRGNSKDNNLIKCGDGAFIHEESRLVLKADTEFQGLLIDLAAZ

SEQ ID NO: 1051 - protein, 302 aa, Photorhabdus luminescens
PISIRRYLITMNKSEQKFNINESVINVDGKEVKFFTSQPLDPNKNNAKRNPIVLVHGTGGSTEIHFGYLFQLLASENQIISLDFSQPVKTNETLTFEHLEKQVEAVIEAAALGETVTLIGYSLGAVITASVAAKRPDLVRNLVLIAGWMKTDLQLERFLSVWRQLYEIQSPAIADFVMFCAFSDASHANMSPDQFAISFENAIPEEFEALQMDLNGRVDITQIVPTIKATTLIIGCTHDQMTPIRHSKALFAAIQDARFAEIACGHAVVYERPAQLAQIIDQFCANPSFYPAGTIIPSDLPZ

SEQ ID NO: 1052 - protein, 406 aa, Photorhabdus luminescens
RLKMSNRLLVIEKKPSGSIELKKAKELGAYIIFIGSRKYYNKVSDNDLLYIDEFFEADTNDDELVINMVEYINAKKKIQGVITFMEFYVPLVAKVAETLGLKGITYENALRARNKHLMRESFRQKNVPIPKYALISNIDSAKIEAAKIGYPNIIKPINMAGSRGVLRNDNVIELERNFREVCEITPPFGVKKSSLFLIEEYLEGQEYSIESISFNGVVNIVTITKKYVSSNGYFVELGHTLPANIPLQQKIEIEKVVTQALFALGIYNGGGHTEVKVTSDGVKVIEVGARLGGDHIPELVEMATGIDMWKAVIQVSLNISPDLSKKFSKYAAISYITAPSGIVKKVNYIKNGFIHFDVNVGEHIESLKNSSQRLEYAIACGVTAEQAEFESHHLKENIIIEIASEZ

SEQ ID NO: 1053 - protein, 404 aa, Photorhabdus luminescens
MASLFRLSLLKHLPPPIFIMLLGTLLTRAAYFMVWPFLAMILYRQFNMSATGIGGLLALSSILGSVTGIYTGYLSDIFCRRTIMLIGVMISIISFIMMSFSSSPILYLIAISGISIGRALLEACSKALIGDYIDSPKERESIQYYRYYLINVGAAIGPYIGLASGLSAQRETFLITAIVYFVYGIMLRVFLLSSKKEEKIKKVSNDISFTKTLNIIISHRAFVILLLCNVLVMFVYANFDSTLVQYLSRSNINNVTNFIALLVIVNSLTIITLQIPTLILLRNFTPRIKILIGIVLIAIAQIIFAFSPINTVYYLCVATVILSFGEIVAIPTFNVEVDRLTPHHLRGAFFGASNMSSIGAALAPIYGGIMLDLFNATLLFSLLSLISLITLLIYYTFLIKKNNZ

SEQ ID NO: 1054 - protein, 395 aa, Photorhabdus luminescens
VEKFDAVIIGAGAAGLFCAAQAGQLGLRILVLDNGKKAGRKILMSGGGRCNFTNMYTEPSAYLSTNPHFCKSALARYTQWDFIELVQRHGIAHHEKTLGQLFCDDSAQQIVDMLLKECEAGQVTIRLRSEVSQVEKNEQGFVIIVNGKEVSTRSLVIASGGLSMPGLGATPFGYRIAEQFGMKVLPTRAALVPFTLHKPLLEQLHMLSGVSVPAIVTAENGVLFKENILFTHRGLSGPAILQISSYWQSGEFVSINLLPDSDLEALLEKERSSHPNQSVKNALAKLLPKRLTECLQALGQIPDIALKQLTPNQQKQLAVNLQSWRVQPNGTEGYRTAEVTMGGIDTHQLSSKTMEANQVKGLYFIGEVVDVTGWLGGYNFQWAWSSAWACAQALZ

SEQ ID NO: 1055 - protein, 497 aa, Photorhabdus luminescens
MLHLFTGLDFHTSLMLVLALLFVLFYEAINGFHDTANAVATVIYTRAMRAQFAVVMAGVFNFFGVLLGGLSVAYAIVHLLPTDLLLNVSSAHGLAMVFSMLLAAIVWNLGTWYFGLPASSSHTLIGSIIGIGLTNAIVTGSSVVDALNVPKMIQIFLSLILSPLIGLIIAGAIVFLLRRYWSSTKKRKRIHLTPAEREKKDGKRKPPFWTRTALILSAVGVSFSHGANDGQKGIGLIMLVLIGVAPAGFVVNMNANGYDIARTYDAITHLQQYYQQHGAALSHAIELTPSVVVAEDEPEGRFHCDITRAVVVLDQTESLLKGIQSYSELNAEQRNNMRRMLMCIADTAESLAKLPETRAEDARFLNKLRKDLLHTVEYAPVWIIIAVALALSLGTLVGWKRVAVTIGEKIGKKGMTYAQGVSAQMTAAVSIGVASYTGMPVSTTQVLSSAVAGTMLVDGGGVQGKTIQNIMLAWILTLPVSIGLSGTLYWFALKLIZ

SEQ ID NO: 1056 - protein, 448 aa, Photorhabdus luminescens
MSCLLSLSSFLGSIQRRDEYQPEYLQAVREVFTSLWPFLEQNPKYREYSLLERMVEPERVIQFRVCWVDDQGKVQVNRAWRVQFSSAIGPYKGGMRFHPSVNLSILKFLGFEQTLKNALTTLPMGGGKGGSDFDPKGKSQGEVMRFCQALMTELYRHLGPDTDVPAGDIGVGGREVAFMSGMMKKLSNNTACVFTGKGLSFGGSLIRPEATGYGLVYFVNAMLKRHGMGFEGMRVSVSGAGNVAQYTIEKCMALGAKVVTASDSGGTLVDEDGFTPEKLTHLEEIKNQRYGRVEEYARERGLTFLKGLQPWSVPVDIALPCATQNELDLDAAKVLIKNGVKAVAEGANMPATISATEAFIEAGVLFAPGKAANAGGVATSGLEMAQNAARLGWKAEKVDARLHHIMLDIHHACVEYGGEGKQINYVQGANIAGFVKVADAMLAQGILZ

SEQ ID NO: 1057 - protein, 248 aa, Photorhabdus luminescens
VGICLICEQGADNSALSQLAERWGLVHDENAIMALVLTPQHLELRKRDEPKLGGIYVDFVSGTMAHRRRFGGGRGEAVAKAIGIKKDYLPTIVDATAGLGRDAFVLASLGCHVRMLERHPVVAALLDDGLQRGYQDEEIGGWLQQRMTLLHASSITALADITPQPDVVYLDPMYPHKQKSALVKKEMRVFQSLVGADEDADSLLSPARVLAKRRVVVKRPDYAEPLAGVAASAAITTKNHRFDIYPCZ

SEQ ID NO: 1058 - protein, 681 aa, Photorhabdus luminescens
MTNPLLVPSGLPKFSSIKPEHVVPAVKEVIANYRQTVEKILAENTVFTWDNLCQPLAEAGDKQSRAWSPVNHLNSVKNSPELRAVYEESLPLLSEFSTWLGQHKGLYQAYKSLRESAEFEKLSVPQRKVVENALRDFKLSGIGLPEEKQKRYGEISARLSDLSSQFNNNVLDATMGWTKLITNVKDLSGLPESAIAAAKAQAEAKGQKGWLLTLEAPSYQPVITYADNRELRREIYHAYNTRASDQGPNAGKWDNSEVIAEILALRHEQAQLLGFKNYAEQSLATKMAKTPKEVLDFLNDLTKRAHPQGEEEVDELKGFAKWHHCAHKLEAWDMAYYGEKQKQYEFSINDEQLRPYFPEQKAVEGLFEVVRRIYGITAKERHDVETWHTDVRFFDLYDDTNELRGSFYMDLYARENKRGGAWMDECISKMRRSNGELQKPVAYLNCNFNKPVGNKPALFTHNEVNTLFHEFGHCLHLMLTQIETAGVSGTNGVPWDAVEMPSQFMENWCWEPEALAFISGHYETKEPLPQALLDNLLAAKNYQAAMRILRQLEFGQFDFRLHVNYDPKKGAQTMKTLKEVKKLVSVVPSPEWGRFPHSFTHIFSGGYAAGYYSYLWADVLAADAYSRFEEEGIFNRETGQSFLDNILSRGGSEEPMELFKRFRGREPKLDAMLRKAGIKGZ

SEQ ID NO: 1059 - protein, 408 aa, Photorhabdus luminescens
MPPMKLTVRQIDTAKPKEKPYKLSDGGGLYLEVTTNGSRYWRLKYRYAGKEKCLAFGVYPEVSLAQAREKREAAKKLLSAGSDLGELKKAEKIAQKLNYDNTFEAIAREWHQLRADRWSLRYRDEIIDTFEKDIFPYIGKRPIAEIKPMELLETLRRMEKRGALEKMRKVRRRCGEVFRHAIVTGRAEYNPAPDLATALATPKKTHFPFLTAEELPHFLKDLAGYTGSVITKTATQIIMLTGVRTQELRFARWEDINFEKRLWEIPAEVMKMKRPHIVPMSDQVVELFESLKPITGLYPLVFVGRNDRTKPISKESVNQVIELLGYKGRLTGHGFRHTMSTILHEEGFNSAWIETQLAHVDKNAIRGTYNHAQYLEGRREMMQWYSDYIVSLPEDNTSLVFYSKKVVZ

SEQ ID NO: 1060 - protein, 1098 aa, Photorhabdus luminescens
TQRFDVGDTWSITIMKVQEAKFSSKEFLKRRRPEKFSDSTIRETGSLDRVVLEHFLSTLNTRNQELQFEDFAKRICEKIICPNLLEQTGPVAGGDGKTDTQTFPVSEQSKLLWFEGVNDTSNKERWAFAVSTRKDWKKKCHEDVLKIKETGRGYTKIFCVTNQSAKSNVRSEVEDTLKNKTGIDVRILDINWLLDQIYKNHFEKLAIDTLSVPTQYKREIIFGENDYKKNKKYEELIEYIRDKVNPAEISYEQVDIFLEVAELSAELEKAIIETQGLFERAIKISKKFGTNQQLLDAYYQYAWKSHFWMEDFNLFEENLQLAYECIASSTNSSKWEKVLNLVTVHKSYIRLNNATSTIDIENIERNMLAKLDEIADDESRPSNALTARTHKAIYKMTTFSDVEDASVVFEELHEIFKNSGNLIGYPFEKNFQLLNELDDIFFEVDAYENLLDYMTEQSALRGGEVKGALLNLRRGIKRIQNGHPYQAIKYLGKSFIPLYKEESRDKFILALKAIAYAYESIGLLWSSRSCLLLSASLITDDYWKYDEISLKQVEIYYGLCLTEIKLGKLAHALLWYELFLIVNQNISDSSLGDKENQQVDFYISQLILNTDLKQINRQINIPDELDRLDLFVSSGCLKYALGYIEEFEREYEVTADNDNNDFLQKIRDFDAGFNSKGIKDNHDKRGVHTSFIFGCAIEINFPNRSPFIEFSTNVLSLLESAFATCTIDNIHLKEAFLNIEVIADDEDDLSLSHEINSNSGKLNLTINCAGFDTSDFRIEAQQKITNEFKKIVFDLLPELFFIKNTEYIEKMIFEDAAFDRAISFGACIKAIENVLGNDIDQKIKKIYSTSAEKKTYPLLRDKSWDSEFPKVLEIEDINDPIFGKGKMPEEELNAENITHKDYSIQSLIKPRLWDRTRWKGVGFVQVKTCHPGLYLLFKDSSVGEDIFKDLISSVGLLDTKARLRVCIVKGISVKNPTHYRVLISENMKTTPRTKRMTMISRINTMTPDSNVNLERFIAAYHACGKFYLGCDAMLKNINPEHPQKDSLGIEMSTLDVRWAWEIGLNDVDCIGVNLEEDDPYIPNDVTDVPLLNLINSKZ

SEQ ID NO: 1061 - protein, 549 aa, Photorhabdus luminescens
SITFICRKANMSTPIPAIKRLDHLGLIAAFCHEAGLPRMIDAIIPKYSSHTVSHGDAFLAMILNGLGFHSRTLHMFSGFFQHKPIARLIGADIEAEHLNDDVLGRTLDALYEAGVSEVYQVLAEQVVDKLGLNPDSVHLDITSFHVDGDYDSALGDDTKRIALVPGYSRDHRPELNPVVLELICENQAGIPVYMQAMSGNTNDAKAFAQTIKTHIQCLKAAQNSRYFVADAALYTEAAIASLHQQKQRFITRVPLTIKEAKQSLLNVTAEQFSPISEGYSGCWVTSSYGGVPQRWLLVNSTAAEKRENQTFRKNTLRETENESKQFDKLGKKPFACREDALQALHDFESQCQFIGIASPEIQAITAYAGRGKPGKHQPPKSVHYQLAGQAYTRLDKVKQARLRVGRFILATNERDEGRLDMAALLANYKAQQKVERGFRFLKSPEFLTSAIFLKKPERIEALLMVMTCCLMVYAALEHKIRHELKQNVPFFPDMKNKPTQSPTARWVFLAFEGISTFEFQEHKMVTGMQSYHHELLSLLGAQYKAVYSZ

SEQ ID NO: 1062 - protein, 377 aa, Photorhabdus luminescens
LCFDIFTEHFSDIQDPRQSAKVAYPLFDILFASLCAVLGGADGWSEIQEYIEGHHEWFLEHNMFKEGIPVDDTIARLLSRINPEQFNLCFINWMRSVHQVTQGELVAIDGKVLRGAYAPGERGSALHLVSAYATANKMVIGQVKTQKKSNEITAIPELIKLLELKGALISIDAMGCQTQIAQEIIDAGADYLLSVKDNQKRLHRAIQKALEAQRVLPLTPEKARIEQGHGRLEIRESHVLNAETFKADFPEWAGLKTLGVTIGYRQENGKLPSLEYRYYISSARLTEEQFSQAVRSHWQIENNLHWVLDVTFKEDDCQIYRENAAENIAILRRISLNMLKKETSQLSIKAKRRRIWMKTQFLERVLQAGFANVSDIZ

SEQ ID NO: 1063 - protein, 263 aa, Photorhabdus luminescens
YLIIHAVALGEYELGELEKQFQEHGNIYNSIYTNEFLVNRIIKKTEHSKNQNDSTQAILLGTSLPKKVNTGFRCQIPFIEAIMPRRINKGNLKRFIIDDLQGKLPMYMPEIPPWINLVIITEANITFQKMNGKETADVDVNYCFLLTPLYPQGGGEQYYHLDLMNIKYMRFAEVFRKNGRYRKYLQMLHINEAKTRGSGGYFVGVLNEPVQIKKMVDMQKVSEDIFSNHYITFADNQIISVKLRTFPKPEDPFINDDSISKKZ

SEQ ID NO: 1064 - protein, 349 aa, Photorhabdus luminescens
LSGAITLSSGCRYFTGKASNRPFAAKPSSFNSLNLASRLPELHSRSFFLIYSLHNAPATPGRRVCFYTDKNMQTEAEVLTDHNELICSTSIERIVTGRDAALSLIEILIHKLDDISRLTSSIGGDVAEHWAMRQGHSFDCWLMQPVDKAMPVITRNIDRSIWRDLMLKSGMLTLMDAEACSQWAKNLEEGDLPAISEANILSTFEQLHHNKQEVFERGIINVFRGLSWDYKTNNPCCFGKKIIINNLVKHDRWGYSLNWGWRRDQLADLERMLHLLDGKTIPDNRHDVSIRFMDFVRDNPHQQVFEDDLFIIRYFQKGSGHITFKRPDLVEKMNDIVAKHYPGALPAKZ

SEQ ID NO: 1065 - protein, 369 aa, Photorhabdus luminescens
ASPGISGILSGLQHYESDVSGGGMTDKYLTQSPAGEFVMFASDDGDVRVECRFEQETLWLPQATIANLYQITPQAVTQHIKAIYEEGELEQNATCKSYLQVQQEGSRQVSRNRLHYSLPVILAVGYRVRSPRGTQFRQWATQTLQEYLIKGFVMDDERLKNPPVGSSAVPDYFDEMLERIRDIRASERRVYLRVREIFALAADYQPSLKETTQFFQTIQNKLHFACTGHTAAELIHLRADASQPHMGLTSYKGKEVRKCDVTVAKNYLNQDEVSELNRVVNMWLDFAEDQARRRQQVFLRDWQDKLDQFLQFNDREVLQGAGKVSKKMADEKAQAEYSQFAEQHRRLKEAEGEKDIAGLLQWKTEPKKZ

SEQ ID NO: 1066 - protein, 291 aa, Photorhabdus luminescens
NGFYFYIIKSLRVRIENKKITMRTPIRYWKRVNKMSIPEESKEFVTSLARGLSVIQVFNRAANKLSLSEVAKLSGLSRATARRFLFTLSVLGYTESDGKLFWLSPKVLQLGYSYLASQPIVNIVQPFIEQVSNETGESCSVSVLDGSEIVYVARYMTHHIMSVNLGIGTRLPAVATSMGRVLLAYKTPEEQQAFLANYILERYTPHTLVERNALLGILTQVQAQGYAIVNQELELGLRSIAVPIMNQRDQVIAAINVSTQPTRTSESVLLEKILPSLRQAAKCIYDRLPVZ

SEQ ID NO: 1067 - protein, 331 aa, Photorhabdus luminescens
LRAEKMNTNLKCTIDNTETGYQTFTAGHFTFDRCEYFAYISCPTGEHMIPIDDYLKALMRDIAWGFFYGTVAFDDVLGTTNHYGNVDLYMGSFHKEWTRAGRDYKENFKSDELMAIFKAMISDWTNTGFDPFAAPQETGVAWGRKNGNEDRLIGRKREVAKRMVGIPGDAPLRSDDNGHPVNRAFMDVNQEQPVVKAEPGFEGELHAFNLFGYLSRSDMTWNPSVVSVVRQSLFCPTTEEFILPIDHGNDRAEWFIQLSDEIAWDIKDGKSSSPLAKVTMRAGDIAAMPGDIRHQGMSPKRSMLLVWENGSPEIMDMIKDGTIPMVPVTFZ

SEQ ID NO: 1068 - protein, 499 aa, Photorhabdus luminescens
HSNQGEDIPMRIQNKMLINGDWIDASDGQTIEVMNPHDGSLITRVAEAKEADVDCAVAAAKAAYPAWGRLQASERGALLLKLADKIEEHAAELAQLETMDTGHPIRDTLNIDVPRTAYCFRYFGGMADKLEGSVIPVEEGFLNYTTREPIGVVGQIVPWNFPLMFTSWKMAPALAAGNTIVIKPSEITPLSTLRIAELMMEVGFPPGVINVVVGYGNSAGARLSEHEDVGKIAFTGSTMTGQSIVAASAGNLKKVQLELGGKGANIIFEDADLTKAVGGSAWAIFHNQGQACIAGSRIILHESIADAFLEKFLTLAGSIRLGDPLLPETEMGPVTSLQHRERVLAYCDVARSQGCEILLGGKPPADPALANGCYIEPTVVRAKYSDRIAQEEVFGPFVTVITFKNDEEALAIANSTEYGLGSGLWTKDISRAHRFARDMHAGMVWINCYKRVNPASPFGGVGRSGYGREMGFEVMREYTQVKSVWVNVDAKIPPFYQRZ

SEQ ID NO: 1069 - protein, 288 aa, Photorhabdus luminescens
MTKIIALKQAVCELVQDGNILALEGFTHLIPFAAGHEIIRQRKKDLTLIRMTPDVIYDQLIGMGCARKIIFSWGGNPGVGSLHRLRDAVEKGWPHTLEIEEHAHADMANAYDAGAANLPFAVLRGYLGSDIPKYTTTIKQINCPFTGQRLAAVPAIRPDVTIIHAQQADRKGNVLLWGIIGVQKEAVLAAQKVIVTVEEVVDVLKPAMNQVVLPGWVIDAICVIPGGAFPSYAQGYYKRNNAFYQNWDSIARDRQTFSDWMEKHVLGTADFAAFKLSLEKEQKGEVAZ

SEQ ID NO: 1070 - protein, 260 aa, Photorhabdus luminescens
VSNTYTSSEMMTVCASRMLKEGQVCFVGIGMPSAAANLARLTRTPDIVLIYESGTIGTKPDVLPLSIGDGELAETADVVVSVPEMFRYWLQGEHIDVGFLGAAQIDKYANINTTVIGDYHSPTVRLPGAGGAPEISTNCKEVLIILKQNSRSFVEHMDFITSPGYLQGGDSREKLDLTNGGPRAVITDLGILEPDPVTKELVMTYLHPGVTTEQVLENTGWSLRIASVLNTTQPPTEQELKVLRDLNERTERAHTEVASZ

SEQ ID NO: 1071 - protein, 289 aa, Photorhabdus luminescens
MNQPNRAVVTTSTLYVVPTPIGNLGDITQRALEVLEHVDLIAAEDTRHTGLLLQHFAINARMFALHDHNEQQKADQLITKLQQGQSIALVSDAGTPLINDPGYHVVRRCREAGIHVVPLPGPCAAITALSAAGLPSDRFCYEGFLPAKRKSRTDTLRALQQEPRTLIFYESTHRLIESLEDMVEVLGAERYVVLARELTKTWESIQGMPVGELLAWVKEDETRRRGEMVLIVEGYKKLDDDVLPPEALRTLALLQQELPLKKAAALAAEIHGVKKNALYRHGLGQNEEZ

SEQ ID NO: 1072 - protein, 355 aa, Photorhabdus luminescens
MMNFIYQALPGRVIFGAGKIAETKAEAQLLGITRALVISTPQQLNLATDVQSILGDIAAGIYDKAVMHVPAETVADVMRVVDELRVDGCVAIGGGSTVGLAKAIALQTALPILTIPTTYAGSEMTPVWGITRDGIKTTGRDVNVLPKTVIYDPQLTLSLPAFISGPSGMNAIAHCVEGLYSQNHNPITSMMAEEGIRALRLSLPEVVIRPEDINARAQALYGAWLSGSVLGSVGMAIHHKLCHTLGGSFNLPHAQVHTVIIPQATGFNQTYAPQAMQAIGRALGVKAQDAAAGLYDLAKAIGAPVALKDIGMQEKDLDKAAKIATTDPYYNPRPVDCMAVRELLEKAFWGIRPEZ

SEQ ID NO: 1073 - protein, 404 aa, Photorhabdus luminescens
MMREVFICDAIRTPIGRYGGVLSKIRADDLGAVPLKYFLQKYQDLDWSAVDEVIYGCANQAGEDNRNVARMSALLAGLPVTVAATTVNRLCGSGMDAISIGARAIKAGEADLIIAGGVESMSRAPFVMGKAETPFSREANGLHDTTIGWRFINPQMAELYGVDSMPETAENVAETFGISRQDQDLFAFRSQQKAKAAQLSGRFSLEIVSVSVPQKRGEFLVVDQDEHLRPETTLEGLAKLRAPFRAGGSVTAGNASGVNDGACALILASAEAVQRHGLTPRGKVIAAATAGVEPRIMGFGPAPATQKLLLKTGISLDEVDLLELNEAFASQALATLRALGVRDDDERVNPNGGAIALGHPLGMSGARLVTTALLELSLRQKRYAICTMCIGVGQGIAILIERVZ

SEQ ID NO: 1074 - protein, 203 aa, Photorhabdus luminescens
TRYLKEEMKMAFHLSNYWRCNWNSRKNKIIFFSCTLLIVFFMFNSNRQFSIVKSMFDYADKHCQQNTDCLVNISKITPFKWDTLYVIDSGWNLDEIKSVIGAELKERTDIFSKIIFVKDGQVVYFEEYHYYPDSGDEKILVLDFDYENQEKGLIAYYRVPREAPKIVIKMKGDPSVEDKIYYLFSSVNEQQVQRNPASFRKRZ

SEQ ID NO: 1075 - protein, 641 aa, Photorhabdus luminescens
TILHEYGFNSDYIIGRVKGICMSYFFDTAVNIEGNKKLRTPQIEAYIKIREYFNQPDNKEALVVLPTGTGKSGLISIAPYGVSNKRVLIITPGLVTKDSIRKTQEVLEDNFWVNCDVIFNSKDIPVVNEYLQDISDEHLFASHIVYSNIHRVSSKRETSLISRVPQDFFDFIIIDEAHHAPAQSWREVLGYFREAKILHVTGTPYRGDNQEIPGEKIHETPLSEVMKNNYVKWLRKETVNAHELYFSIKENEEVKLSKEEVLAFKDKEWIEKSVALSEECSKDVIEYSILKLNELKKLSSKVPHKILAVGCSISHAEDLYHWYKEKGLNSIIVHSEMSLDELRRAFRNIENHQCDVVISVNMLMEGYDHKYLSILAIFRPYRSINAFAQVVGRILRAIPDDEITAFEIDNNGLVIFHEEIGLNTMWNVFQKEVDRAKRGSIREYTFSDREYIERENSLASVNSEGAFISNKDSYLDDIDFNELFERKRAEINALVSENINKIIQSGVDLPLDVLENLKDSLVEREIREAAKLIDPELIEKRPAQARKMMRQILSTRIQDEVANLLIENGIDEKGSELYHVFNRCIPNLKTTDVNDGIVVRFINSKLSKIYGAVKDRDNKTLLKSIGALAGILEEVKRVIRZ

SEQ ID NO: 1076 - protein, 219 aa, Photorhabdus luminescens
MLYAGFAFTIPLTLITFTLGIILGFIVALIRLYGPKPLIAVAKFYVWLIRGTPLLVQLFLIFYALPSVGITLGAFTSAVIGFTLNIGAYTSEIIRATLLSVPKGQWEAAYSIGMSWTQSLRRIILPQAARIAIPPLSNTFISLVKDTSLASVITVPELFLAAQRIAAVTYQPLILYTEAAILYLIISSVLSSLQTRLEKKFSQKSDIQELKDDSTLRHZ

SEQ ID NO: 1077 - protein, 255 aa, Photorhabdus luminescens
MIQLSGIEKSFDGQKVLKKIELTIEEGSLTALIGPSGSGKSTLLRCINLLEIPQAGKLQIDNENITFTGKGRIAHKDIQRIRQQTGMVFQNFQLFPHLTVIENIMEGLIWVQKWSREQAKQRALELLEKVDMSHKADVFPATLSGGQQQRVAIARALAPSPKVLLCDEPTSALDPELSQEVVAVLKQLAKEGTTMLMATHDLRLAANLAHNVIFLESGEIVESGTSKTIFTGALKQRTVEFVSTLTNTLPDWEIZ

SEQ ID NO: 1078 - protein, 258 aa, Photorhabdus luminescens
MKMLLTALLAGVIQFGIAYSAHAESGLDNIKSAGVFKIATEGTYPPFTYHDVSGALTGFDIDIGREIARRLNVKAEFTEGKWDGLIAGLDAKRYDAVLNQVAITPERKKKYDFSGPYIISKAVLITRKNNDSIKTFSDLKGKTSSHSLTSNYAQLAKHFGAEIVPTEGFNQAIDLVATGRADATINDNLSYLDFRKHKPNAPVKVVASEPNGDLVGVLIRKGEPELQAAIDKALADIKADGTYLRISTQYFGTDVSKZ

SEQ ID NO: 1079 - protein, 937 aa, Photorhabdus luminescens
MIRYNSAINRNTPSVSVRDNRGLNIHTLEYLRTQADETNSNELITRYQFNTHGLQVKSTDPRRYKNQSGSNFTRIFSLAGNTLREESIDAGRTITLNDIEGRPVLTINAIGARQTHHYEGNTLPGRLLAVTELIQKNEKTTERLIWGNNTDAEKNQNLAGQCIRHYDPAGLVQLESLSLTGSVLSQSRQLIADDQEADWRGDDENSWRTKLNGNIFTTQHKTDAIGALLTQIDAKGNMQRLAYDVAGQLKGSWLTLKGQAEKVIVQSITWSAAGQKLREEHGNGVITEYTYEPETQRLINITTRRTRDSTKPLQDLRYEYDPVGNVINIRNDAEATRFWRNQKIVPENAYSYDSLYQLIQATGREMANIGQQGSQLPPLITPLPTDDNTYTNYIRTYTYDDSGNLTQIQHSAPASNNNYTTNITISNRNNRGVLSTLTNDPNLVDTFFDAGGHQTSLFSGQSLNWTPRGELQQVNQSGNTAREWYHYDSDGMRLLKINEQQTSNTTQQQRVTYLPGLELHTTQSGTNITEDLQVITVRQAGKAQVRVLHWEKGQPTGINNDQVRYSYDNLTHSSELELDMHGEMISWEEYYPYGGTAVWAARNQIEAGYKTIRYSGKERDATGLYYYGYRYYQPWAGRWLSADPAGTVDGLNLYRMVRNNPMTGIDEDGRMFKTVATGALGIGGMAYELYKYKNQQVEKPQMPSPVSESYGDQQVSKITQKASALKANYDPMKQMAHNITGRKEAAEHLAQGQVPGAQAIKEGASLVAAAGEFAAAGNVGELNKTTLTKAAGTDAINNFSLTLDGIKKVFKAGAASATVSPEKLEELQKATDDLKEVATDTLITGASLGATVGATLDTAAAVVPHPVAKVALKGLSLAWKVTGIVHTAEELSELAEKHKDLVSNELGQELKREVTEANQIRRGTILAKVREHGLIKZ

SEQ ID NO: 1080 - protein, 339 aa, Photorhabdus luminescens
MNPFHQRHFLRLLDFSSAEIHALLKLAAELKSTKKSGTEKALLTGKNIVLIFEKDSTRTRCSFEVAAYDQGANITYLGPSGNQIGHKESIKDTARILGRMYDGIQYRGYAQTIVESLAKYAGVPVWNGLTDEFHPTQLLADLLTIQEHQPEKPLSEIKFAYLGDARNNMGNTMLEAAALTGMDVRLIAPEKYWPNAALVTECQKLAEKTGGKITLTENITEGVKNTDFLYTDVWVSMGEPKDVWQQRVHLLKPYQVNMDVVSMTGNPQVKFLHCLPAFHDEETALGKQLAAEFNMYGGLEVTNEVFESEHSIVFDQGENRLHTIKAVMVATLANDLKIZ

SEQ ID NO: 1081 - protein, 615 aa, Photorhabdus luminescens
RGCRNHCSIRLIHCFIRMADLKLSIFEKNIAGYSMLSSIFVRIKTGLVCSAMLAVMIIAGCTVPDQQGQQPSQTQDKISTEIARYQSIIDAAHGEPSLDVIRAYIAQEPLVKESAVRQKNIDDTWQMLTRLSPQERRGLVINADENVLQGWLDLLSAYQDNKQDSDKLQAAIRDWKIRYPQNPAVQSLPTQLQPAAIQQQDTNIRIALFLPLSGQAKVFGEAIRQGFLDAQAGLPSPSLPTENPENLSITDSDSASDSVASTNMSPSEGAIINSAIPATQTTPVIANAPINTQQVKIYDTTSQPLENLFIQAKQDGVNLIVGPLLKPDVVKLVQINAALNMLVLNELDNAQPHSNICYFSLSPEDEAKNAAEHIWQQQKQNPLILVPRGTFGDRIANAFAQEWQKQGGHTVLQQTFGSSAELKQLINRGTGIRLTGTAVNVTSNQPTSIAIGDLEIPQINTDVVPTSTGGSVDAVYIVSTLDELTLIKTMIDMAISSRDKPALYASSRSNQAGVGPDFRLEMEGMQFSDIPLIAGANLPLMQQAVSKFANDYSLMRLYAMGIDAWSLANQFSQVQLQSDFHLNGASGVLSVQENCTIFRQLSWMQYHQGQITAIZ

SEQ ID NO: 1082 - protein, 308 aa, Photorhabdus luminescens
MANPLYRKHIISINDLSREDLELVLQTAATLKARPQPELLKPKVIASCFFEASTRTRLSFETAIHRLGASVVGFSDSSNTSLGKKGETLADTISVISQYVDAIVIRHPQEGAPRLASEFSGDTPIINAGDGANQHPTQTLLDLFTIQETQQRLDSLNIAMVGDLKYGRTVHSLSQALAKFNGNHFYFIAPEALAMPNHILHMLNEKGATYSQHANIEEVLPELDILYMTRVQKERLDPSEYANVKAQFVLRASDLIGAKENLKVLHPLPRIDEITADVDKTPYAYYFQQAENGIYARQALLSLVLNEZ

SEQ ID NO: 1083 - protein, 461 aa, Photorhabdus luminescens
MFSTSAEQWANDTFQHAELGDKRRTNRLVKVACSLANHIGQSLVQSLDSPADVEAAYRLTRNSAIAPQAIAEAGFTATVAHAQRYHCLLALEDTTTLSFSHASVADELGYTTSKEKSRGMQAHSVLLFAPEEQQVVGLIEQQRWCRDVSDYGKSRQRDTRPYEGKESYKWERASQAVDSRLGEQMANVISVCDREADIIEYLRYKTSQKQRFVIRSMQNRRIEESQDKLYDFISRLQSAGERLVQVRQKGGRQARVAHCDISYAEVTLKIPEGKSGEAVRIFYVGCYEKGPEDGLCWHLLTSEPVNSQEDAHKIFSYYERRWLIEEFHKAWKTGGTQVEALRMQSKDNLERMIVLLAFIAVRIHQLRFMGLNKEEAEKESCETVLSPLAWKLLWSKQEKRRVPKKAPSLHWAFINLGKLAGWYDSKRTGRVGWERLWEGWFRLQTLIDGYLLAKSVDLEIZ

SEQ ID NO: 1084 - protein, 268 aa, Photorhabdus luminescens
GACMYIDILIIISAFAGSILSGLFGGGAGLIFTPTIYLFLSYANPNSSYIMQTSITTMIASLMISGLVAIVKHHKYNHIDWNVLKWSAPLIIIGSILGCFTMTVVSSRSVIYVFSLATLILAIRSTQKLISNTQQNNTNRDLGWSFRYIGCFLLGLISTLSGAASFVVPYYESIGLDIKKSIGTTTVVVWLYSVFVLIFMISLGLNKNNLPPGNIGFLNYNYLWLFIIPTIPGALLGAKLANTLPERKLRIAFTVLLYFIGSSMLFSZ

SEQ ID NO: 1085 - protein, 551 aa, Photorhabdus luminescens
SPQTQARQWRFSGLSQRNTDSGTYRLSDRESSAHHTGCYPSCRSVVGYQLHRSRHEHHTMDLVIKNRPAYHTSSMRNSNGPLWNKWVYMNNKYETVIVLGAGPIGLFSAFKILENNFAENVLILDKRFISAYTFKGWAERSMVVQFHRKLFSLSYLPKIVKKCPYGVLKEDYEDNRKKYSDLDHMSIKNIQSTILENMEKFYKNRFFMVGLKDMSFDKDIVSISIFTEHFDDNSILKNLNPELIVDATGYHSILMNKTIGIQFESEHEYGSALKMTWPEHEMSHVENKKTEFHDCHENTIFFSEGNSSVAEFSYPSDKFSEFFEECGYSINHRSTKLPFLKFDTTPFSIKLPPFLEKITSLKKDHFLYKRAVDLFNMIRRNKLSGINGLEFINHLQGFNWSEADSLALVVRRIINKRVTIENTYANLEENFLDLMKIRVIFIPSRAERWLSTNKVTTKINLIFSNDNNSLHNQISSVTACAVGDSLASTDFRHGLGINRGFHTATRLFQDKTDPELVRLELIQNSYSMLDVINDNSIFSRAISCRDWLILZ

SEQ ID NO: 1086 - protein, 549 aa, Photorhabdus luminescens
MNGAQWVVKALRTQGIDKVFGYPGGTIMPVYDALYDGGVEHLLCRHEQGAAMAAIGYARASGKPGVCIATSGPGATNLITGLADALLDSVPIVAITGQVGSELIGTDAFQEVDVLGLSLACTKHSFLVDSLEDLPQIMAEAFSIATSGRPGPVLIDIPKDIQLKEGNFVPHLVPVEQKEPCSESELEQARKMVAAATKPVLYVGGGVGMSQAVSVLRDFVVETGMPVASTLKGLGAADSEHPCYLGMLGMHGSKAANLAVQSCDLLIAVGARFDDRVTGKLNTFAPCAKIIHLDIDPAELGKLRQAHVSLLGDVKVLLPRLQQPLSIMPWQQEVKYLKAEYPWCYDHQGESIYAPWLLKQVSDRKTFNTVITTDVGQHQMWTAQHMTFDGPENFITSSGLGSMGFGIPAAIGAQIARPEDMVICVSGDGSFMMNVQELGTIKRKQLPVKILLLDNQRLGMVRQWQELFFDKRYSETTLTDNPDFVTLAKAFDIPGQHITDKSQIDEALNALFSSKGPYLLQVSIEELENVWPLVPPGASNETMLEKSLZ

SEQ ID NO: 1087 - protein, 309 aa, Photorhabdus luminescens
MTKQSDYIWFNGEMVPWADAKVHVMSHALHYGTSVFEGIRCYDSHKGPVVFRHREHMQRLHDSAKIYRMPLNQSVDELMEACRATLRKNNLVSAYIRPLVFIGDVGMGVNPPAGYKTDVIIAAFPWGAYLGEGALDQGIDAMVSSWNRAAPNTMPTAAKAGGNYLSSLLVGSEARRRGYQEGIALDVSGYISEGAGENLFEVKDGILFTPPFTSAALPGITRDAIIKLAKDLGLEVREQVLSRESLYLADEVFMSGTAAEITPVRSVDDIQVGIGRCGPITKKIQQAFFGLFDGTTDDKWGWLDPVNPZ

SEQ ID NO: 1088 - protein, 617 aa, Photorhabdus luminescens
MPKYRSATTTHGRNMAGARALWRATGMTDADFGKPIIAVVNSFTQFVPGHVHLRDLGKLVAEQIEASGGVAKEFNTIAVDDGIAMGHGGMLYSLPSRELIADSVEYMVNAHCADAMVCISNCDKITPGMLMAALRLNIPAIFVSGGPMEAGKTKLSDQIIKLDLIDAMIQGANPKVSDEDSNQIERSACPTCGSCSGMFTANSMNCLTEALGLSQPGNGSLLATHADRKALFLNAGKRIVELTKRYYEQNDDSALPRSIATKAAFENAMMLDIAMGGSTNTVLHLLAAAQEGEVDFTMADIDRLSRQIPHLCKVAPSTQKYHMEDVHRAGGVIGILGELDRAGLLNRQVKNVLGLDLLQTLNQYDVMQTVDESVKEMYSAGPAGIRTTQAFSQDCRWPSLDTDRVEGCIRDIEHAYSRDGGLAVLFGNLAIDGCIVKTAGVDEGSLTFRGPAKVYESQEDAVDAILGGKVVAGDVVVIRYEGPKGGPGMQEMLYPTTYLKSVGLGKSCALITDGRFSGGTSGLSIGHVSPEAANGGLIGLVQDGDIIDIDIPLRKIRLDVDERILATRKEVEFARGDKSWTPKARERQVSLALRAYASLATSADKGAVRDKSKLGGZ

SEQ ID NO: 1089 - protein, 497 aa, Photorhabdus luminescens
MAACLPLTSSPNGAEYLKAALSAPVYEVAQVTPLQEMEKISARLGNTILVKREDRQPVHSFKLRGAYAMIASLTEEQKNRGVITASAGNHAQGVALSANRLGINSLIVMPVTTADIKVDAVRSFGGKALLYGANFDEAKAKAIEMAQQEGYTFVPPFDHPAVIAGQATLAMELLQQDVRLDRIFVPVGGGGLIAGVAVLIKQLMPEIKIIGVEAEDSACLKAAMEAGHPVDLPRVGLFAEGVAVKRIGDETFRLCQQYVDDVITVDSDAICAAVKDLFEDVRAIAEPSGALALAGLKKYVQQHQLRGERLAHILSGANVSFHGLRYVSERCELGEQREALLAVTIPEQKGSFLSFCQKLGDRVVTEFNYRYTDADPDQACLFVGVRLSRGEVERREIIEELRTAGYQVADLSDDEMAKLHVRYMIGGRPSKPLKERLFSFEFPESPGALLKFLQTLGTHWNITLFHNRNYGTDMGRVLAAFEMSERKCVLSVILMHZ

SEQ ID NO: 1090 - protein, 506 aa, Photorhabdus luminescens
MLKEPLSGAKLGWLTLALALAAFLQILDLTIANVAISTIAGDLGSSVSQGTWVITSFAVANAISIPLTGWLAKRFGEVRVFLISMILFVITSWLCGIANSLEMLIISRVLQGISAGPIMPLSQSLLLNNYPPLKRNMALALWSMTIVIAPVCGPILGGWISDNYHWGWIFLINVPVGFAAIAITWMLLKDRETEITARSIDIVGLILLVIGVGCFQLLLDRGKELDWFNSTEIIALAIIAVIAITFLIIWEFTDDDPIIDLSLFKSRNFTIGTLCISLAFLLHIGTLVLQPQLLQMVFGYTATWAGLVMAPLGIVPIMLVPLIGRFSSKIDMRYLVMFSFIIFALCFFWRTHTFELSMDFSTAAWPQFIQGFAIACLIMPLTAIILSDVEPAKIASAGSLFNFLRTLATSVGTSITTTMWSRREAVHHVQLTESITPHNPIAQQAYEKMEQLGMTHAQASHSLAREITNQGLIIAANEIYWLFGFIFLILLILIWLAKPTVGEKKZ

SEQ ID NO: 1091 - protein, 391 aa, Photorhabdus luminescens
MTGEIQSPPLNEKKSKRKLALILATLLFAFVGLGYFTYWLISLRHYQATDDAYVVGNQVQVMAQITGSVTAIYADNTDFVQQGDILLRLDSIDAEHAFERAKNTLANNVRQTHQTIIDNEKLLANIDLKQTALQQAQDDLKRREHLGLTGAIAKENLIHSRNSVQMAKSELNVARQQYYANKALVIDTPLDQQPAIKLAASQLRDAWLTLQRTQIVAPVTGYVSRRSVQVGSQIKSGAPLMVIVPADQLWVEANFKEVQLANVRIGQPVTLISDFYGSDVTYKGRIVGLDMGTGSAFSLLPAQNATGNWIKVVQRLPVRVELEAQQLIAHPLRIGLSMHAAVDTRNQGGLVLADTPRNGIVYETNVLTYNTVEIDRLINEIIQVNTSQNKZ

SEQ ID NO: 1092 - protein, 192 aa, Photorhabdus luminescens
MRFFSLLATICAAVMLQGCIGAVVVSSTAVATKTATDPRTIGQQVDDSTLEARVSNALNKDKQLKEQTRIITTAYQGKVLLTGQSPDSSLPERAKQIASRVDGAHTVYNEIRQGKPVELGTASKDTWVTTKVRSKILASDSVKSSNIKVVTENGEVFLLGILTKQEGNAAAKIASETNGVKRVTTAFTYLNZ

SEQ ID NO: 1093 - protein, 248 aa, Photorhabdus luminescens
MNISTPWVFISGGSRGIGKGIVKMLAAQNYHVVFTYKSSINEAQILCHDIEQQGYRCEGYQCDVSNAKEVTTLSAELISQYGAPYAIINNAGITQDALLINMKEEEWHNVISTNLSSIYLVNHSFLPEMITAGEGCIIHMSSVTAFKANSGQVNYAATKAAMIGITRSLAVEVGRFNVRVNTVAPGLIDTEMLAHIPAPHRKKLLSNIPLGRLGSVEDIALTVNFLLSPGGRYITGQTFVIDGGMTAZ

SEQ ID NO: 1094 - protein, 272 aa, Photorhabdus luminescens
MNVQFSKKDLSQWAKFSGDYNPIHFDEKIAREVGLGGIAVHGMLAMIPLKSGYDYLSQLNREMGRQWHVNLRNPVPLDACYCVKTKHTNRNGKTTFNLQDETTNLKPLIGHYSCFDFSQKTSFPEKPRCQVPIQETIKKSIEFKHTFPEVNEFWIFLDALMFYLFMQQSAKTALATEFKTYFGKQEHDETCLKDLIVLHVMHTVSFSPALLNRQIPDEMPNIEYTIVPKDTFDVDGSLYGTLEIPIWLNGEISLVVEMSLMGTTKRKQIANZ

SEQ ID NO: 1095 - protein, 422 aa, Photorhabdus luminescens
MNIQTGYHRVAVTGYGSICSLGQNTQEIWDAILNYRVGYKKEEHPDASVVAKFFGNIPFSPDVSRFSKKLLKNLPKFSKLGLIAADEAIKMAFGNDKTALDENYSPFERGVIFGTGWGGEDATVENSHSYADQGIASPMTNIMSMHSVGTAAISMNWNLRGYQNTPVAACATGSMAIGDAFELIRSGRTKMMLAGGGESIRDPFIVWSIDILGALSKEQESVEKACCPFSKDRSGFVMSEGAAILCLEDYDCAVARGAKILAEVIGYGNNSDASDMTAPAPDCKGRVMAIQMALEQAKLSTSDIHYINAHGTSTPLNDINETDVLKMSLGEHAYRIPISSTKSYTGHLIAGAGAIESIFCLKAIETATIPATMHLNNPDPLCDLDYVPNIHRTHQLIDTALNVNYGFGGTNCALIFRKADRZ

SEQ ID NO: 1096 - protein, 397 aa, Photorhabdus luminescens
MTSLYFDYNATTPLSVKAQLAIKDAMSVFANPSSHYSLSSMAKKLLTDARISMAALMGTVPEQILFTSGGTESNNQALSSLLATLSGSDLSAHHVISSSIEHPSVLAPLLWYQQRGLQLTLINPDNQGRISVQSIQENLQPQTRLITLMAINNETGVIQPYEAVASLAKEAGVYLHIDAVQAIGKRPFSCDTLSGVTTISFSGHKFNGPKGIGGLYHAPGIQLNPLLHGGGQEQGVRSGTENTLGLAGLAAAAKESLNSLQGRFNTYKTLRTTLLSRLDQHHVNYLINGNTNPAFQAPWTLNLSFSGIRAESLASRLDLRHGISLSLGSACSNNKSTQRSHVLAAMGLPDDRIDSAVRISFGYATSQDDIEILANAIKQETYNLLKISGKSLITQEZ

SEQ ID NO: 1097 - protein, 408 aa, Photorhabdus luminescens
AKINLSTLYPTGDEKMENIKNIYDGIKSRGGNPLKWLIADVDLLYKLSKEEQQELKTCLLKDAFNFHYHNNPYYKDICEKQGIKPEDIQNYNDLVRIPLIPVATYKSAESHRLLSKPLSEIEHEMRSTGTSGIPSVYRRCHDTMDHTVLAVYSNYRSMFKVSGGAGLCLCPSTEDIPEMALVKIFNFLTGLLDTRRYMINQDHFSPEDALNQLIQWKGKFTRHLIGPPFMIHRFITFLKENNTKLTLDRDSMVITMGGWKRFTGDMISRSELNADIEEWMGIPASRNRDMYGLVEANVLAIEDEYNHKHVPPYIHFSVRDPNDLTRELPDGETGQLVILDPLSVSTPGMLLTEDLVYLRTDPNKSWRNSQRIQFVMRTAAAKEFGCCAVNLERKMSDDESTSATPAVZ

SEQ ID NO: 1098 - protein, 362 aa, Photorhabdus luminescens
MMKMDCLIVGAGQAGLSLAATLAAKNINVCILEREARIGDVWRRRPDNMLLFTSRGMTQLHGLPFPGIKEGYPDKNEVADYLERYASHHNLAIHTQTEVVEVKHDTDGYRVKTKDGKVFHAPCLVNATGANQLVDIPALAERFSTDIQQITADQYREPKQIKTGSRVAVVGDGASGRQIAKDLAATAKVTLFCGSSRPLLPNRILGKDIFWWLSKSGLLFANYYSLVGKIMRRRNPIPCGDLKNHRLAVLDIKIANRLVDIKDNKLCDSSGNQYEVDTVIWCLGYKDDTAWLTLPGAADANGFVCKNGHAEGGKTPYPGLFIVGRKWLSSRGSELMLGAYKDTCRVAKWVENYLKEHVPLKZ

SEQ ID NO: 1099 - protein, 296 aa, Photorhabdus luminescens
NTHNNLIKDTIMLHKIDKSPYFIKFYKFHLQDLVFSYNMQTEWHHHPCIQLSVSPHNSLMRIDTENESRQAHGFIISSNIKHKLHSEGQLCFNLLIDLANPLCHLLLHQMRGSDIIYLNQESSGLIANYFTNCLQSETSPDIFILNNLLGKIEDCHCYQDKRIIKAASLITELPVKCISSREISNQLYLSESRFLHLFREKMGTNFRSYLLWKRLHHAIDEIHSSDSLTLLACNSGFSDGAHFSRTCMTLYGLRPSELKHASKNRIQQAQQKYFNLSSTLTGLNFTKKNIWVMNKZ

SEQ ID NO: 1100 - protein, 294 aa, Photorhabdus luminescens
MDIRDLKLFLHLAESCHFGHTAKAMHVSPSTLSRQIQRIEDILGHPLFLRDNRTVKLTFAGEQFKQFAQQTLLQYQQLKHSLNQQSPSLSGELRLFCSVTAAYSHLPQILDRFRAEHPMVEIKLTTGDAADAVNKIQSNDADLGIAGKPEKLPDNVSFTKMGEVPLVLIAPSLPCAVRALVMQKSPDWNNIPFILPEHGPSRKRIEHWFRHHKITNPSIYATVSGHEAIVSMVALGCGVALIPNVVVENSPEPVRSRISLLDNISLVEPFELGMCVQRRRLNEPLIKAFWGLLZ

SEQ ID NO: 1101 - protein, 493 aa, Photorhabdus luminescens
MANYFNTLNLRQQLAQLGKCRFMAREEFVDETGYLKGKKVVIVGCGAQGLNQGLNMRDSGLDIAYALRKEAIEEKRASWRKATENGFQVGTYEELIPQADLVINLTPDKQHSSVVSAVQPLMKEGAALGYSHGLNIVEVGEQIRKDITVVMVAPKCPGTEVREEYKRGFGVPTLIAVHPENDPKGEGMAIAKAWAAATGAHRAGVLESSFVAEVKSDLMGEQTILCGMLQAGSLLCYDKLVADGAEPGYAGKLIQFGWETITEALKQGGITLMMDRLSNPAKLRAYALSEQLKEMMTPLFQKHMDDIISGEFSSGMMADWANDDKKLLGWREETGNTSFENSPEYDGKISEQEYFDHGVLMVAMVKAGVELAFEIMVDTGIIAESAYYESLHELPLIANTISRKRLYEMNVVISDTAEYGNYLFSHVAVPLLKEKFMGSLQAGDLGKPVVDNGIDNAQLRDVNEAIRHHPIEVVGRVLRGYMTDMKRIAVGGZ

SEQ ID NO: 1102 - protein, 676 aa, Photorhabdus luminescens
MRLNPSQQQAVEFVTGPCLVLAGAGSGKTRVITNKIAHLIRTCGYQPRHIAAVTFTNKAAREMKERVAQTLGRKEAKGLMISTFHTLGLEIIKREYKTLGMKSNFSLFDDQDQMALLKDLTADLLEEDKDLLQKLISTISNWKNDLLSPQQVLALVRSAQEHQFAECYRRYDLHLASCNVLDFDDLITKPTLLMQRDEEVRERWQNRIRYLLVDEYQDTNTSQYQLVKLLVGQRARFTVVGDDDQSIYSWRGARPQNLVLLKEDFPKLNVIKLEQNYRSSGCILKAANILIANNPHVFEKRLFSELGYGDPLKVITANNEEHEAERVIGELMAHHFINKTQYKDYAILYRGNHQSRVFEKMLMQNRIPYRISGGTSFFARPEIKDLLAYLRVLTNPEDDSAFLRIVNTPRREIGAATIQKLGEWANQRNKSLYQASFDLGLEQSLTGRGLAALQRFIHWMDEITRQVERDPLLAVRDLLHGMDYESWLYETSPSPKAAEMRMKNINQLFTWMSEMLEGDELNEAMTLSQVVARFTLRDMLERDEDGEEFDQVQLMTLHASKGLEFPYVFLVGMEEGLLPHQSSIDEENIDEERRLAYVGITRAQRELFFTLCKERRQYGELIRPEPSRFLHELPQDDLHWPQDKKIVTAEERMQKGQSRIADIKSRLGLGQKNKSZ

SEQ ID NO: 1103 - protein, 246 aa, Photorhabdus luminescens
LSNWMRNPFQFLWYWLKKIAISVIILWIVSVVAFSFLPVPFSMVMVERQISAWLSVNFSYVSHSDWVGQGQISPNIALAVIAAEDQKFPQHWGFDFDAIESVLERNQNHSGRLRGASTISQQTAKNLFLWDGRSWLRKGLEAGMTFAIELGWSKSRILTVYLNIAEFGDGIFGVEEASKHYFHKSASKLTASEAALLAAVLPNPHRYKVNSPSAYVLQRQQWILRQMRLLGGGSYLEKNGLMKDDZ

SEQ ID NO: 1104 - protein, 501 aa, Photorhabdus luminescens
MLSSSSLYAAIDLGSNSFHMLVVREVSGSMQILARIKRKVRLAAGLDKNNRLSQQAMERGWQCLRIFSERLQDIPPSQIRVVATATLRIAENSDEFVGKASEILDCPVKVISGEDEARLIYQGVAHTTGGPEKRLVVDIGGASTELVTGNGAKASQLSSLSMGCVTWLEGYFNDRSLTEENFARAEAAAHETLKLIAPKLIEQGWQICVGASGTVQALQEIMIAQGMDELITLPKLQELKHKAIECGKLEELEIEGLTLERALVFPSGLAILIAIFQALNIESMILAGGALREGLVYGMLDLPIEPDIRTRTLRNIQRRFQLDVEQSQRVKQLAEHFLQQVAKPWELDSRCHELLQSACLIHEIGLSIDFHQAPSHAAYLINYLALPGYTPAQKKLLATLLKNQSGPIDLFSFNQQNALPLIQAQRLCRLLRLAIIFANRRRNDTLPALRLKVSDEALTITLPHGWLMQHPLRAESLQQEIQWQNHAQWSLVLGEQDAQTZ

SEQ ID NO: 1105 - protein, 435 aa, Photorhabdus luminescens
LIFYHTMSKTHLTEKKFSDFALHPKVIEALDNKGFSNCTPIQALTLPFTVEGRDVAGQAQTGTGKTLAFLASAFHYLLTHPAAEERQTNQPRALIMAPTRELAVQIYSDAEDLAQATGLKMGLAYGGDGYDKQLKILESGVDILIGTTGRLIDYTKQGHINLNAVQVVVLDEADRMYDLGFIKDIRWLFRRMPPVNERMNLLFSATLSYRVRELAFEQMNHAEYIEVEPLQKTGHRIREELFYPSNEEKMRLLQTLLEEEWPDRCIIFANTKHRCEDIWAHLAADGHRVGLLTGDVAQKKRLRILEEFSNGNIDILVATDVAARGLHIPLVTHVFNYDLPDDCEDYVHRIGRTGRAGESGHSISLACEEYALNLPAIEDYIQHSIPVSKYNSQALLKDLPAPKRRYRSRSGNHQRRNNLSHRNNTPRNNRKRSGZ

SEQ ID NO: 1106 - protein, 420 aa, Photorhabdus luminescens
MNLTELKNTPVSELITLGENMGLENLARMRKQDIIFSILKQHAKSGEDIFGDGVLEILQDGFGFLRSADSSYLAGPDDIYVSPSQIRRFNLRTGDTISGKIRPPKEGERYFALLKVNEVNFDKPENARSKILFENLTPLHANSRLRMERGNGSTEDLTARVLDLAAPIGRGQRGLIVAPPKAGKTMLLQNIAANIAHNHPDCVLMVLLIDERPEEVTEMQRLVKGEVIASTFDEPASRHVQVAEMVIEKAKRLVEHKKDVIILLDSITRLARAYNTVVPASGKVLTGGVDANALHRPKRFFGAARNVEEGGSLTIIATALVDTGSKMDEVIYEEFKGTGNMELHLSRKIAEKRVFPAIDYNRSGTRKEELLTTSEELQKMWILRKIIHPMGEIDAMEFLINKLAMSKTNDDFFDMMKRSZ

SEQ ID NO: 1107 - protein, 362 aa, Photorhabdus luminescens
VNILSMNIEIFYVFLFSFAFLFMARKIAKKVGLVDKPNYRKCHQGLVPLVGGISIFVGICFAFVITKEFIPHKWLYLVCAGVLVFVGALDDRFDISVKVRATIQALVGIAMMYFAGLKLDSLGYAFGPWDMTLGPFSYVVTLFAVWAAINAFNMVDGIDGLLGGLSCVSFGALGILLYQSGNTALALWCFAFIAAILPYIVLNLGLLSQRFKVFMGDAGSTLIGFTIIWLLIESTQGNERPVNPVTALWIVAIPLMDMVAIMYRRLRKGMSPFSPDRQHIHHLVMRSGFSSRQAFILITVAATLLAAVGITGEWLEFVPEWIMLALFLLAFVLYGYCLKRVWKVARFIKRQKRRMRRSANHZ

SEQ ID NO: 1108 - protein, 364 aa, Photorhabdus luminescens
PLSIYYQQRFCAVIKSETKSIQDKQALEHELDIRALCSALWHGKVWIIVLAIIFATAALGASYLMQQKWSATAITDLPTTNQLGSYYSQQQFLRNLDTHINISLETQLPSISEEAYKEFITQVAAYDTRREFWLKSDYYKQQQEGDARADAALLDELVNNIQFIPHDDKKVLNDSIKLTAESSGQANQLLRQYIAFANSRASTHLNDEVKGAWITRAQSMDALVKRQEMVAKAVYSREMNVLQQSLKIAEKQGIRRNQTDTPVDQLPDSKMFMLGAPLLQAQLETLEAIGPKYDVDYDRNIAMLAAWNVHPTLQDQFQAYRYLRTPEEPVTRDSPRRMFLMIMWGAVGALVGAGVALVRCSRKZ

SEQ ID NO: 1109 - protein, 374 aa, Photorhabdus luminescens
VKVLTVFGTRPEAIKMAPLVHALARDEAFEAKVCVTAQHREMLDQVLHLFEITPDFDLNIMKSGQDLTDITCRILAGLKPVLAEFKPDVVLVHGDTTTTMATSLAAFYQRIPVGHIEAGLRTGDLYSPWPEEANRKIAGHLAMYHFAPTENSHNNLLKESIADNRVFVTGNTVIDALLWVRDRIMNDEAMRSKLAKHYPFIDTNKKMILVTGHRRESFGGGFERICEALAQIARAHPDVQVVYPVHLNPNVSEPVKRILHDIDNVILIKPQDYLPFVYLMNHAYMILTDSGGIQEEAPSLGKPVLVMRNTTERSEAVDAGTVRLVGTETKTIVEEVTRLLTDDAAYQRMSRAHNPYGDGDACQRILDALKKIRZ

SEQ ID NO: 1110 - protein, 426 aa, Photorhabdus luminescens
MSFETVSFETISVIGLGYIGLPTAAAFASRNKKVIGVDVNQHAVETINRGAIHIVEPDLDKVVKVAVEGGYLKAVIAPLPADAFLIAVPTPFKGDHEPDMTYVRSAAESVAPVLKKGDLVILESTSPVGATEQMAEWLAAARPDLTFPQQVGEESDIDIAYCPERVLPGQVMVELIKNDRVVGGMTLKSSARASELYKIFLEGECVVTNSRTAEMCKLTENSFRDVNIAFANELSLICADQGINVWELISLANRHPRVNILQPGPGVGGHCIAVDPWFIVSQNPKQSRLIHTARMINDDKPLWVVNQVKAAVADCLAESGKRASEVKIACFGLAFKPNIDDLRESPAAHITGMIAQWHTGETLAVEPHIHELSAPLKEITQLVNLEKALEEADILLMLVDHNQFKAVNSHEIKQKWIVDTKGVWRZ

SEQ ID NO: 1111 - protein, 357 aa, Photorhabdus luminescens
LRRILITGGAGFIGSAVVRHIINNTEDSVVVVDSLTYAGNLASLAPVADSPRYAFEQVDICQRGALDRVFEQYQPDCVMHLAAESHVDRSIDGPTAFIETNIVGTYTLLEAARAFWQKLNEEKQAVFRFHHISTDEVYGDLHGEEGFFTETTPYAPSSPYSASKASSDHLVRAWHRTYGLPVIITNCSNNYGPYHFPEKLIPLMILNALAGKSLPVYGEGKQIRDWLYVEDHARALYLVVTEAEPGKTYNIGGHNERKNIDVVCAICELLEEFCPEKPVGIAYYRDLITYVADRPGHDMRYAIDAAKVERELGWRPQETFESGIRKTVQWYLENENWWRKVQDGSYAGERLGLGKNZ

SEQ ID NO: 1112 - protein, 299 aa, Photorhabdus luminescens
MGAVNMKGIILAGGSGTRLHPITQGVSKQLLPIYDKPMIYYPLSVLMLAGIRDILIISTPEDLPSFRRLLGDGNRFGIHLSYKEQPSPDGLAQAFLIGEEFINGGPCCLVLGDNIYFGQGFSPKLKNVVSRGKGATVFGYQVMDPERFGVVEFDDVFRVLSIEEKPEKPKSNWAVTGLYFYDNQVVDFAKQVKPSARGELEITSINQMYLERGELNIELLGRGFAWLDTGTHDSLIEASTFVQTVEKRQGFKIACLEEIAWRNGWLDDAQLRETVKSLSKTGYGQYLLDLLHVRARQYZ

SEQ ID NO: 1113 - protein, 197 aa, Photorhabdus luminescens
VQAKVPAQRLDLIDGLSALGFSLVEGEVDLSLMIGIENAENAKDNPESNLLLAERRDIPMLKEVASNVFPLSRFRTPWYQPQDSGRFYATWVEKAVLGTFDHQCLLVNGDNEQPAGFVTLRDIGAGEARIGLLAVFPGNIGCGIGSKLMLAAQQWCQHHQIHQLRIATQTSNIAALRLYTRSGAFVESTAYWLYRGZ

SEQ ID NO: 1114 - protein, 218 aa, Photorhabdus luminescens
MKSVAVVLSGCGVFDGSEIHESVLTLLSLDRLGVKTSFFAPDEPQLHVINHINGEEMGEERNVLQESARISRGKIKPLSQANADEFDALIIPGGFGVAKNLCDFAAKTVDCEINKELLSLVRAMHNQHKPMGFMCIAPVMLPKLLNKPVKLTVGNDPETVAQVEAMGGVHIICKVNDVVVDLENKIVTTPAYMLAESISQAEEGIDKLVRKVLEMTEZ

SEQ ID NO: 1115 - protein, 377 aa, Photorhabdus luminescens
MIPFNKPPVVGTELDYMKQAMESGKLCGDGGFTKRCEEWMEQHFNCPKVLLTPSCTAALEMAAILLNIQPGDEVIMPSFTFVSSSNAFVLRGATVVFVDIRPDTMNIDETKIEAAITAKTRVIVPVHYAGVACEMDTIMALAEKYNLFVVEDAAQGVMSTYKGRALGTIGHIGCYSFHETKNYSSGGEGGAALINDQSLISRAEIVREKGTNRSQFFRGQVDKYTWRDIGSSYLMSELQAAYLWAQLEEAEKINERRLALWNTYYQALKPLVDAGLLTLPVIPEELEHNAHMFYIKLKDVEERSAFNSYMKDAGVLTVFHYVSLHTSPGGEKFGRFHGEDCFTTCESDRLVRLPMFYNITDAEQQIVIKHIREYFAZ

SEQ ID NO: 1116 - protein, 417 aa, Photorhabdus luminescens
MSLAKASIWTAGSTLIKIGVGLLIVKLLAVAFGPSGVGQAGNFRQLITVLGVLAGAGIFNGVTKYVAEYQQQPERLRAVLGTSSAIILGFSTLLAVIFLLFSGSISTGLFGHQDYESVVQALAFIQMGIAFANYFLAILKGYRDAQRNALAIIFGSVIGVMAYYLCFVLGGYEGALAGLALVPALIIFPAGLMVWRLKAVSISSFKPMWDKVLAGQLGKFTLMALLTSITLPVAYIMMRNLLAAHYSWRDVGIWQGVSSISDAYLQFITASFTVYLLPTLSRLQGKNEISNEIIKALKFVLPAVAIASFTVWLLRDFAIWLLFSDKFTAMRDLFAWQLVGDVLKVGAYVFGYLVIAKAALRFYVLTEVSQFLLLTGFAHWLIPVNGALGAAQAYMATYIIYFTLCCGAFLIYRRRAZ

SEQ ID NO: 1117 - protein, 362 aa, Photorhabdus luminescens
MTTLIHVLGSDIPHHNRTVLRFFNDVLVQEIGFLAKPKFMVVTKNRALLDDCPALDMAFFDSKKSLAQAVIAQACSDRDCRFFFHGQFNVSLWLALLSGKIKRHQFWWHAWGADLYEDSQQLKFRLFYFLRRLAQRRVGHVFAVRGDLYFYSQHHPNVPTSLLYFPTRMEPALTIAERVPVEDGKMTILLGNSGDRSNRHITALKVIHKQFGDKVRIIIPMGYPENNQVYINQVEQAALSLFRPENLNIIKQNMAFDDYLALLRRCDLGYFMFNRQQGIGTICLLIQFGVPFVLSRQNLFWRDLIEQQVPVFFAGNPLDSQLIAEAQRQMLSLDRNVIAFFSPNFIDGWRQALAKAAGEQQZ

SEQ ID NO: 1118 - protein, 460 aa, Photorhabdus luminescens
MTLTQFGGLFVVYLISLVFILTLTYQEFRRVRFNFNIFFSLLYLLTFYFGFPLTCLLVFQFDVEVVPVDALLHALLASTCFYGIYYVSYKTRLRKPSMQPKAPVFTMNRVETNFTWLLLASVAVVTVGLFFMQNGFLLFKLQSYSQIFSSQVSGVALKRFFYFFIPAMLVVYFLKPTQLRWLFFLISTVAFGILTYVVVGGTRANIIIAFALFLFIGIVRGWITLWMLVTAGAIGIVGMFWLALKRYSLDVSGAEAFYTFLYLTRDTFSPWENFALLLNNYDKIDFQGLAPIIRDFYVFIPSWLWPGRPDAVLNSANYFTWEVLDNHSGLAISPTLIGSLVVMGGVLFIPVGAIVVGLIIKWFDWIYELGKQETNRYKAAILQAFCFGAIFNMIVLAREGVDSFVSRVVFFCIIFGLCLVIAKLLYWLFESAGLIRMYLTGNRVVSQKCPLQCEERKWSZ

SEQ ID NO: 1119 - protein, 246 aa, Photorhabdus luminescens
MELNNIPKYSIRGLNIWGFRDMAHFLDHIFQREQVKTGTMVAINAEKVLTAEEDTALSTLLSDAEYLYADGISIVRAIRRKYPDTEVSRVAGADLWEAIMERAGKEGTPIFLVGGKPEILKQTESKLRAQWNVNIVGSQNGYFTPEERNAVFERIHASGAVIVTVAMGSPKQEIFMRDCRKIHSNALYMGVGGTYDVFTGHVKRAPKAWQNLGLEWLYRLLSQPSRIRRQFKLLKFIGYYYSGRLZ

SEQ ID NO: 1120 - protein, 464 aa, Photorhabdus luminescens
MDREFMADQQHSLQRGLEARHIELIALGGTIGVGLFMGSASTLKWAGPSVLLAYIIAGIFVFFIMRSMGEMLFLEPVTGSFASFGHKYLSPYWGCLTAWGYWFMWVAVGISEITAIGVYAEFWFPELPQWVSALIAVALVALANLAAVRLYGELEFWFAMIKVTTIIVMILIGLGLIFFGIGNQWQPIGLDNLTVHGGFFAGDWQGFLFALCIVVASYQGVELVGITAGEAKNPQVTLKKAINNILWRILIFYVGAIFIVVTLFPWTEVGAQGSPFVMTFTKVGITSAAAVINFVVLTAALSGCNSGMYSGGRMLYALAQNRQLPSSLTKLSKNGVPVIGIAITILCLIVGSSLNYLIPNPQAVFVYVYSASVLPGMVPWFVILMSQLRFRQYHQQALKQHSFKSILFPYVNYLTLAFLCCVLVGMAINPDTRFSLLVGGGFLLIVSLIYWLVKLFNGKKPKAZ

SEQ ID NO: 1121 - protein, 549 aa, Photorhabdus luminescens
SITFICRKANMSTPIPAIKRLDHLGLIAAFCHEAGLPRMIDAIIPKYSSHTVSHGDAFLAMILNGLGFHSRTLHMFSGFFQHKPIARLIGADIEAEHLNDDVLGRTLDALYEAGVSEVYQVLAEQVVDKLGLNPDSVHLDITSFHVDGDYDSALGDDTKRIALVPGYSRDHRPELNQVVLELICENQAGIPVYMQAMSGNTNDAKAFAQTIKTHIQCLKAAQNSRYFVADAALYTEAAIASLHQQKQRFITRVPLTIKEAKQSLLNVTAEQFSPISEGYSGCWVTSSYGGVPQRWLLVNSTAAEKRENQTFRKNTLRETENESKQFDKLGKKPFACREDALQALHDFESQCQFIGIASPEIQAITAYAGRGKPGKHQPPKSVHYQLAGQAYTRLDKVKQARLRVGRFILATNERDEGRLDMAALLANYKAQQKVERGFRFLKSPEFLTSAIFLKKPERIEALLMVMTCCLMVYAALEHKIRHELKQNVPFFPDMKNKPTQSPTARWVFLAFEGISTFEFQEHKMVTGMQSYHHELLSLLGAQYKAVYSZ

SEQ ID NO: 1122 - protein, 413 aa, Photorhabdus luminescens
MLKVLLLFVVLIVGIVLGPIIAGHQGYVLIQTDNYNIETSVTGLFIIFVLLQLVLCLFGWCYRRVIRTGSRTRGWFLGRKRSRAHAQTKAALLKLAEGDFKQVEQLLTRNADHAEQPVVNYLLAAEAAQQRGDEFRTNQYLERAAEVADNNQLPVDITRVRIQLTQGEIHAARHGVDKLLNQASRHPEVLRLAEQAYMKSGAYQSLIDILPVMEKIHLHDELQIHKLRQQAYIGLMNQYMAEQGSEGLKRWWHDQSRKIRHDVALQVAISEHLIECDDHETAQKIILESLKRQYDERLLLLIPRLKSEDPKPIQNALDHQLKQHGSTPLLNSTLGQVALRHGEWEKAVKDFKTALAQRPDAHDYAWLADALDKLRKPEEAAQVRREGLVLTLKRESNVVKSDLVNSNSAVMSZ

SEQ ID NO: 1123 - protein, 375 aa, Photorhabdus luminescens
MTEQKQSSETVEQTKTTVENSQQLETAPQKQERSGTLKNIIAIAIMLAIGGGLYYYGQQQSHLLSTENHELRQQLESLKQQQSQDKQHIEALFKEQSQTLSHFSAQNEQLGHSLQELQAKISALSSSDVKSWLLAQADFLVKMAGRKLWNDQDIVTAAALLKNADASLSEMNDPSLIEIRRAITQDISTLSAISQIDFDGIILRVNQLSNQVDNLRLADNTTDGSPMDEDNDELTGTLSEWRQNLSKSWKSFMDNFITIRRRDTAAEPLLAPNQDIYLRENIRARLLIAAQAIPRHQGEVFKQSLETVSTWVRAYFDINDPNTKAFLEEIDSLSQQPVSITAPDHLSSQPLLEKLMQTRVRSLLSQSSETNQEGZ

SEQ ID NO: 1124 - protein, 247 aa, Photorhabdus luminescens
MSILVTRPAPAGEELVRRLQAAGKTAFSAPLINIHPGSELPQLAEKLNPLNTRDMVFLLSKNAVYYANNQLNKINLSWPDKLIYYAIGRSTALAFHQLTGMNVIWSSEGETSEILLKLPSLHQVENKQALLLRGNGGRELIARTLTERGATVDYCECYFRQPVDYPAAEFSAHWQKYGVQTLVVTSGEILQLLYNLIPESDRNRWLLHCRLIVVSERLAHAARNLGWQDVKVAKSADNDALIQALEZ

SEQ ID NO: 1125 - protein, 782 aa, Photorhabdus luminescens
MKLLRGLAQYYVDLMMKLGLVRFSLLLASALVVLAMGVQMVVTFLLQGGVQSIDLVRSIFFGLLITPWAVYFLSVVVEQLEESRQRLSKLVEKLEVMRQRDRELNQQLKDNIIKLNQEISEREKAEQAHLILLDKLKEEMKHREQTQIELEQQSVLLKSFLDASPDLVYYRNENNEFSGCNRAMELLTGKSQKQLVGLTPNDVYDKEVARKVMKTDEKVFRHNVALTYEQWLVYPDGRKACFELRKVPFYDRVGKRHGLMGFGRDITERKRYQDALENASRDKTTFISTISHELRTPLNGIVGLSRILLDTELTSEQNNYLKTIHVSAITLGNIFNDIIEMDKIERRKVQIDNQPIDFTGFMSDLENLSGLLVQPKDIKFVMNPELPLPARIMTDGTRLRQILWNLIGNAVKFTQKGEITVRIWYEEGERLLFEVTDTGIGIPHDELEKIFAMYYQVKGSHGGCPATGTGIGLAVSKRLAQSMGGDIVVESEPGQGSRFTLSIIAPAMEENLLCKEDTEDYPLPALHILLVEDIELNVIVARSVLEKLGNSVEVAMNGKDALEVFKPGEFDLVLLDIQLPDMTGLDISRELSQRYAKKDLPPLIALTANVLKDKKEYLDAGMNGVLSKPLSVNALTAIIEQYWGEQSVHHMQPEEEESGLMKKDEDLLDTEMLNQYIELVGPQLIRNSLSVFEKMMPGYLSVLDSNMTAKDQKGITEEAHKIKGAAGSVGLRHLQQLAQQIQSPDLPAWWDNVQEWVDELKQEWRKDTEILGEWLTDAEKKZ

SEQ ID NO: 1126 - protein, 314 aa, Photorhabdus luminescens
MSTKTIRIATRQSPLAMWQALYVQQKLQQCHPDLEVQLVPMVTQGDVILDTPLAKIGGKGLFVKELELALLEGRADIAVHSMKDVPISFPEGLGLVTICERDDPRDAFVSVKYHSLDELPTGSIVGTSSLRRQCQLRELRPDLIVRDLRGNVGTRLNKLDNGHYDAIILAVAGLKRLKLHERIRTPLTAEQSLPAVGQGAVGIECRLDDQQTQTLLAPLNHYDTEVCVLAERAMNTRLEGGCQVPIGSYAIWQDGKIWLRALVGAPDGSVIIRGERTALPKDACQAGVELAEELLERGAREILTQVYRGNPSTZ

SEQ ID NO: 1127 - protein, 857 aa, Photorhabdus luminescens
LYLYIETLKQRLDAINQLRLERASTAMSAEFKQVYSLLPVLLHYHHSMMPGYINGNVPYGVCFFVHDEAQKSYLNDLENKLDHFIEQPANGELPITGIYSMGSTSSIGQSGCSDLDIWVCHQSWLDNDERLLLQRKCTLIEQWAAALGIEVNFFLIDENRFRHNASGSLGGEDCGSTQHILLLDEFYRTAVRMAGKRLLWEMVPVEEERHYDEYVLSLYAQGVLTPNEWLDLGGLGELSAEEYFGASLWQLYKSIDSPYKAVLKSLLLEAYSWEYPNGKLLAMEMKQRLHAGEIVSFGLDAYSMMLERVTRYLIEINDTTRLDLIRRCFYLKVCEKLSLNQDDKGCIGWRRQVLTQLIYEWKWDPERLKILDNRNLWKIEQVRDAHNELLDTMMQSYRNLIRFARRNNLSVSASPQDIGVLTRKLYAAFEALPGKVTLVNPQISPDLSEKNLTFIYVPQGRANRSGWYLYNQAPAIGSIIGHQPLEYNRYLNKLVSWTYFNGLLTEKSCIHIHHGETQCDELKLHELINDISTHFPIRLPSPTPKALYSPCEIRHLAIIVNLEKDPTAEFSNQVVHFDFRKLDVFSFGESQQCLVESIDLLYRNSWNEVRTLHFSGGQSVLEALKTILGKMHQDAAPPAAVEVFCYSEHLRGLIRTRIQQLVSECIELRLSSNRQDPGRFKALRIAGQTWGLFFERLNVSVQKLENAVEFYGAISNNKLHGLPVKINTKETHLPAVVDGFASEGIIQFFFENTQDNQSFNIYILDETNRVEIYSHCEGSKEELVRDVSRFYSSSHDRFTYGSSFINFNLPQFYQIVQMKGQIQVIPFSGSSFSHLCVAHDGENEEQPELYRSVSHYZ

SEQ ID NO: 1128 - protein, 275 aa, Photorhabdus luminescens
MQFSKMHGLGNDFMVVDAVTQNVYFSPELICRLADRHTGVGFDQLLIVEAPYDPDMDFHYRIFNADGSEVAQCGNGARCFARFVRLKGLINKRDIKVSTQSGRMVLSITNDDQVCVNMGEPEFEPHHVPFRALRAEKTYILRVAERTVLCGVVSMGNPHCVIQVPDVETAEVDILGPALESHERFPERANIGFMQILNRGHIRLRVYERGVGETQACGSGACAAVAVGIQQQLLDNHVRVDLPGGSLFICWDGPGKPLYMTGPAMHVYDGTIHLZ

SEQ ID NO: 1129 - protein, 235 aa, Photorhabdus luminescens
MEKKEEQLSINDILDDQTVVDYLLENPNFFIRNACVVEQMRVPHPVRETISLVEWYMSRQRTRIAYLEEDITLLMEQARVNEQLFEQLLKLLVNLVAAESLQDMLSRLSLWAKNMGLNSASIRLFSDKWHIGAPLDAPDLALSRNAFEPIRIQRFGNKNHYLGMLNGPEILLLLPQVRQVGSVAVSLLGTRGELGMVIFNSRNHQHYQEGMGTDMLEHLAKLLPDILSRWIKRIZ

SEQ ID NO: 1130 - protein, 304 aa, Photorhabdus luminescens
MMQEIDQLLEPIEAFLRYLRVERRLSPVTITHYRRHLATLAEMVLEMGVSQWQDLDPAKVRMLVTRSRRAGLQSANLALRLSSLRSFLDWQVIQGEISVNPSKTVSTPGTKRHLPKNIDVDEVNQLLNINFNDPLSVRDRTMLEVMYGAGLRLSELVGLDCQHLDLESGEVWVSGKGSKERKVPLGHTAVEWLNRWLAMRELFEPEDNAVFVSKRGRRISTRNVQKRFAQWGIRQGMSSHIHPHKLRHSFATHILESSGDLRAVQELLGHASLSSTQIYTHLDFQHLTKVYDVAHPRAKRGKSZ

SEQ ID NO: 1131 - protein, 239 aa, Photorhabdus luminescens
MRFYRPLAPVLAMTFDLDDTLYDNHPVMDKAEEEVLNFVRQYDPRFSHLNHQDLCAFRELTLEQHPEIYHDMTLWRWYSSKLMFCHYGFSREDADRGADDVMAHFTLWRNRIDIPESTHKTLAALAEQMPLVAITNGNAEPAACGLAPYFKFVLQAGPDGRAKPCSDMYCLAADRLGLALGQILHIGDDLNTDVAGALGSGMQACWMNTKNKKLLQTMESRLLPHIEIYDLASLTALIZ

SEQ ID NO: 1132 - protein, 721 aa, Photorhabdus luminescens
MDVSYLLESLNDKQREAVAAPRTNMLVLAGAGSGKTRVLVHRIAWLLSVEKASPFSVMAVTFTNKAAAEMRHRIENLIGTSQGGMWIGTFHGLAHRLLRAHHLDANLPQDFQILDSEDQNRLLKRIIKAMNLDDKQWPARQGMWYINGKKDEGLRPQHIESYGNPVEATWQKIYQAYQEACDRAGLVDFAELLLRAHELWLNKPQILQHYRGRFTNILVDEFQDTNSIQYAWIHLLAGETGKVMIVGDDDQSIYGWRGAQVENIQRFLKDFPGAETIRLEQNYRSTSNILKVANTLIANNSDRLGKNLWTDGVEGEPISLYCAFNELDEARYVVSRIKNWLENGGALKNCAILYRSNAQSRVLEEALLQASMPYRIYGGQRFFERQEIKDALAYLRLIANRHDDAAFERVVNTPTRGIGDRTLDIVRQAARERQQTLWDCCQILLQEKVLAGRAAASLQRFIELIDALSTETEDMPLHVQTDRIIRDSGLRAMYQQEKGEKAQARIENLEELVTATRQFSYQDEDENFTPLQAFLSHAALESGEGQADAYQDSVQLMTLHSAKGLEFPQVFIVGMEEGMFPSQMSIEEGGRLEEERRLAYVGLTRAMEKLTITYAESRRLYGKEVYHRPSRFIGELPSECIEEVRLRATVSRPVSHSRLGTPISANDSGYALGQRVRHPKFGEGTIVNMEGSGEHSRLQIAFQGEGIKWLVAAYARLEMVZ

SEQ ID NO: 1133 - protein, 317 aa, Photorhabdus luminescens
MLSAFKLENNRLLRLEFEEGEKLSDSLWVDLVEPAEQDRLQVQNELGQILATRPELDDIEASARFFEDEDGIHVHSFFYFEDAEDHAGNATVAFTIRDGRLYTLRERELPAFRLYRMRARNQTLVDGNAYEVLMDLFETKIEQLADVIENIYSVLESLSRVIMEGKQGDEFDIALSSLAEQEDISWKVRLCLMDTQRALNFLVRRARLPGAQLEQAREILRDIESLLPHNESLFQKVNFLMQAAMGFINIEQSRIIKIFSVVSVVFLPPTLVASSYGMNFEFMPELHWTFGYPGAIGLMIAAGLAPYLYFKRKNWLZ

SEQ ID NO: 1134 - protein, 297 aa, Photorhabdus luminescens
MNKPQTTKGVLYAFGACFIWGIAPIYFKHIQQVPADEILTHRIIWSFFFMLLLLTLTRHWSQVVKVFHQPKKVLLLAVTATVVACNWLIYIWAVNHGHMLEASLGYFISPLVNVLFGMLFLSERFRRMQWAAVILAFTGVLIQLWQFGSIPVIGLSLAVTFALYALLRKKMNVDAQTGMTIETLWLLPVAAIYLFGFANSPTSDLTANPMTLNLWLIAAGIITTVPLLLYTEAAAHLRLSTLGFFQYVGPTLMFLLATLVYGEQIGIDRLITFGFIWAALVLFTLDAVYTQRRSQRZ

SEQ ID NO: 1135 - protein, 812 aa, Photorhabdus luminescens
HRRSMLMSVFNPTLFEKSLPEIGTFTLRPLDLERDIPILTDWVNRDYAHYWGMINNTKQQVWEFYQDLESRHPGSVFIGIYREQPAFLLECYRAQDDLIGKYYPAHPDDMGMHILVAPPQAKIRHFTWGIFQTIMAFLFSDPTVARIVVEPDIRNEKIHKLNLRAGFVYQKALVLPNKTAKLAFCTREQHQIALQREHHATTPTHLGSLMTNAMHLQPAVWQKVNRLHLCKAIAEFSHECLLVPQQLTEKADSDGYHHYRLDSYRLNSADHLVSYTFRARRMALDHWLIDADSLQKNANGEEKALDSLLFIIEFKQQLGISDVVMTTYLEEITSTLYSSAFKHNRIGISAMDLVNTDFQALEGEMMEGHPSFVANNGRIGFDIGDFQNFSPEAASAIHLVWLAAHKSKAHFACIEQLNYQQLLEQELGTTTMAEFDQRLIALNLNPKDYFLMPVHPWQWQNKLASVFAPDIANQKLVYLGIGADTYQAQQSIRTLFNRSHPQRYYVKMALSILNMGFMRGLSPYYMATTPGINDWLFDLVTQDPILQRYRFKILREVASVGFKNSYYEQAISSDTPYKKMMAALWRENPLQLIEPGQQVMTMAALLHSDQQGNALLPALISASGLPTQEWLRRYLESYLAPLLHCLYAYDLMFMPHGENIILVLENHIPQHIFMKDLAEEILVMNPDADLPEKASRVKVDMPEDMKTLTILSDVFDGIFRYLAAILDEQGDYSQDLFWQAVAECILSYQHNHPELSEQFVRYELFTPEIKRCCLNRLQIANNRQMLDLADPAQSLQFADNLINPIAKFGHSZ

SEQ ID NO: 1136 - protein, 398 aa, Photorhabdus luminescens
KEKRKRAPCLRPPLNLNRRSIMANRKPRKGSLLTVNDVYRQPVGPAHDPKSLYALLLRFVVWRQERSWSESTLKVQTHHTYHFILWATERGLYYAADITRPILERYQRYLYQYRKTNGEPLSTRTQRTQLEPLKVWFKWLTKQNLILANPAADIELPRLEKHLPRYILTIDETEQILAQPDLTTLQGIRDRALMELLWSTGMRRGELTRLDVYSVDGKRKTVTIRQGKGNKDRVLPLGERALSWLQRYQQQVRPQLIVNPDVKALFVAMDGLDGLQANGISNLVTAYINAVGIEKKGACHLFRHAMATQMLENGADLRWIQAMLGHASVESTQVYTQVSIRALQAVHASTHPAEQMADEKVRDADEVGLLADLYADDNADTDTPPDSSEPTSTADSRZ

SEQ ID NO: 1137 - protein, 228 aa, Photorhabdus luminescens
RPYMSQITPQLTNMWDKSHESWFVKDKNLRFMYANKVFIKLSKLPEHFDVTGYTAKELPTPFNHLVHLFEEHDRKVLQAMQRISSIGAYLQSDSQQLKPYFCEKYPLMDENNQCIGVICHIKEINHFSVHHYIKNDTTMSVKHSPPNNILTEKEWIVIFLFCRGISNRCIANEMKISCRTLEGYFQSIYEKLSIGSIIELKLFCENNHYDLYIPPKYFKSMNHFFLDZ

SEQ ID NO: 1138 - protein, 1486 aa, Photorhabdus luminescens
MLYNKSQEKDNCGFGLIAHIEGEPSHKVVRTAIHALARMQHRGAILADGKTGDGCGLLLQKPDRFFRMVAQEQEWHLARNYAVGMLFLSQDPQIAQNCRAIIEQELQNETLSVVGWREVPINRDILGEIALSSLPHIEQIFVNAPAGWRARDLERRLFVARRRIEKRINDSDFYVCSLSNLVTIYKGLCMAADLPRFYPDLADLRLESAICLFHQRFSTNTVPRWPLAQPFRYLAHNGEINTITGNRQWARARAYKFKTPLIPDLHTAAPFVNETGSDSSSLDNMLELFLNGGMDLIRAMRLLVPPAWQNNPDMDEDLRAFFDFNSMHMEPWDGPAGIVMSDGRYAACNLDRNGLRPARYVITKDKLITCASEVGIWDYQPDEVVEKGRVGPGELIVIDTRQGRILHAEETDNDLKSRHPYKEWMDKNVKRLTPFEELLEDQAGHRDLNDQSLAVYHKQFAYSNEELDQIIRVLGENGQEATGSMGDDTPFAVLSSRPRIIYDYFRQQFAQVTNPPIDPLREAHVMSLTTCIGREMNVFCEAEGQAHRLSFKSPILLYSDFHQLITQQSPHYRAEQLDLTFNPQETNLQNALFALCDQAEQLARDGAVLLVLSDRNITPNKLPIPAPMAIGAIQHRLVEKNLRCDTNLIVETASARDPHHFTVLLGFGATAIYPYLAYESLAKMVDNGTINKPYADVMLNYRNGINKGLYKIMSKMGISTIASYRCSKLFEAVGLHSELTEFCFNGVVSRIGGANFSDFEQDLRNLSKRAWLARQPLDQGGLLKYVHNGEYHAYNPDVVSTLQAAVHSGEYNDYLKYSRLVNQRPITTIRDLLAIKTEAEPLPIEEVEPAEELFKRFDTAAMSIGALSPEAHEALAEAMNTLGGFSNSGEGGEDPARYGTKKVSRIKQVASGRFGVTPAYLVNADVIQIKVAQGAKPGEGGQLPGDKVTPYIAKLRYSVPGVTLISPPPHHDIYSIEDLAQLIFDLKQINPNALISVKLVSEPGVGTVATGVAKAYADLITIAGYDGGTGASPLSSVKYAGCPWELGLVETQQALVANGLRHKIRLQVDGGLKTGVDIIKAAILGAESFGFGTGPMVALGCKYLRICHLNNCATGVATQDEKLRRDHYHGLPERVMNYFRFIARETREIMATLGVKNLTDLIGRTDLLEVLEGISAKQSKLNLDPLLATAEPHQGKTLYCTENNPPFDNGALNKNLLTQAASYIENQQSKTFYFDIRNTDRSVGASLSGFIAARYGNQGIAAAPIKIHFNGTAGQSFGVWNAGGLELTLIGDANDYVGKGMAGGRIVIHPPVGSAFKSHQATLIGNTCLYGATGGKLFAAGRAGERFAVRNSGAITVVEGIGDNGCEYMTGGIVCILGRTGINFGAGMTGGFAYVLDENDDFRKRVNLELVEVLAVDALAIHEEHLRGLITEHVLLTGSQRGEDILANWQQWLSKFALVKPKSSDVKALLGHRSRSSAELRIQAQZ

SEQ ID NO: 1139 - protein, 434 aa, Photorhabdus luminescens
MITRPYDFIAIGIGPFNLGLACLTQPLKDVHSLFIDQKPGFDWHPGMMLENSTMQTPFMSDLVTLASPTHPLSFLNYIKQKGRIYSFYIRESFFLMRKEYNQYCQWAAEQLSNLRFNTRVDSISYDEDASLYTLHCSDTLTGQQHQFVCKKLVLGTGPAPYIPKCCQPFSERMVTSGDYLNNKATLQQKRSITVLGSGQSAAEIFYDLLSDIDKFDYQLNWLTRSPRFFPLEYTKLTLEMTSPEYIDYFYSLPGDKRDALNLSHKQLYKGINSSLINDIFDLMYTKRLNGKLNVNLYTNSELRQVSHANNGRDLTLALFQHEQEQSFSLDTEGVVLATGYQYQIPTFIEGIHHLIHWDEKGRYGVQRNYSIDQNNTIFIQNVELHTHGFVTPDLGMACYRNSCLIYEITGIEHYPIEKSIAFQQFSVDTEGACZ

SEQ ID NO: 1140 - protein, 519 aa, Photorhabdus luminescens
QGHIMYGDALLLDNSLTQDSHITDEDFSRYFLNMHSAGDYLDDAYNVITRIKKILQQVDKPFSGILPNELSPLFSKVNLDLPLTSLNQALDELQQLYIKDAVYFHHPKYVAHLNCPLVLPAVLAETIIGAINSSLDTWDQSAGGTLIEQKVLDWTRDKMALGTNADGIFTSGGTQSNLMAMLLARDHFCHQRNPEHKNQLHGLPADFHKLRIFTSTVSHFSTQKAAAILGLGYNAVVSVPHDSEFRMDPQALEQSINQCIEQGNIPFAIVATTGTTDFGSIDPLHPIAAIAKQYSIWLHVDAAYGCGLLVSPRRAYLLEGINLADSVTVDYHKSFFQPVSCSAFFVKNKKHLSHLTYHAEYLNPLSASQEGTPNLVNKSIQTTRRFDALKMWLTLRIMGAKRLGQAFDKVVDTAQDAYRLMAQNPYFELIHYPELSTLVFRFIPKQKLPDADIDAINAAIRKALFREGNTVIAGTKVNGRQYLKFTFLNPATSQQHLQEIVHSIVMHGNDFLATHNNNZ

SEQ ID NO: 1141 - protein, 267 aa, Photorhabdus luminescens
EHVNRELMVSNTNDSVTPLTTVVIEDIIQLFEQTFSHFTATMRVNADNIPATSMSFPQWSDTREFPVLIQRYQDEYYGDNDIKPNQKALYSLWAQWYFGLVIPPMILMLLEYPQAVDTHYNLFRLEFHDSGRPDIVYYHLTWLNESPLSLLHRHYSLLDRHIIPVCEKIESYQGINGRLLWNNIGYIMHWYLAEFSTRINSKSYQEIINGLFMEPQLPNGRDNPLYRTVILRHNNMQRRSCCQRNKLPGVGNCHDCPLESKVESKHZ

SEQ ID NO: 1142 - protein, 271 aa, Photorhabdus luminescens
MSSDVNSSTTTSRLTAQALSLAYGKKTIVECLNISIRDGEFSVIIGPNGCGKSTLLRAISRGITPQHGEILLDGNNIQHYKPKTVARELSLLTQGAIITEALTVYDLVSRGRYAHQSFLRQWSAEDERAVNDALHAVELQEMSQQLVSELSGGQRQRAWFAMTLAQQTPIVLLDEPTTYLDITHQIEMLDLCQRLHLQGKTLVLVLHDINLALRYASHLIMMKNGKIYAEGVPEEIINEQSIADVFGLPCRIICDPESGKPLIIPKYNPIZ

SEQ ID NO: 1143 - protein, 357 aa, Photorhabdus luminescens
VELIMSQINLSRPAKIRTFMLGTAVFLVPPQRTQRAILLILLLLSVLFYLSLALGKQGIDNPWLATSTPYQEFILIQLRLPRALVAIGAGATLALSGSLFQLTTRNALGSPDIIGVNAGAAAGIVATLIIWPGVLPIPLGALLGASFAVLLVYTGNISRSGQMQTTRIVISGIAIAALCMAFVNFAISNVRLEQAQQLASLLHGSLASRGWQDVGLIYGTSLFIPFLLWLGRQLNYVNLGYEVANTLGVPVRIIQLMSLSLAVILASMAVLVVGPVAFIALSAPQIARRLVRAKGTALFCSALVGALLLLASDLITLLLPTSARLPIGVITAGVGGVYLMYLLYAELRRTKSCHPMZ

SEQ ID NO: 1144 - protein, 338 aa, Photorhabdus luminescens
MTNPKRRFVLLLGLGLMILLTFICIIASLSLGAKMLPLSTIWHHYWLGDSGSYSDLVINARKPRTLIGIMAGAALALSGAVTQGLLRNPLAEPGLLGVNAGAAAVVVSFSFIPILNELPRFWTAFIGASLATLLFYLLSGGQRNSNPARMVLTGAAINACLFAFVQGIVLMNAHVLDSYRFWTIGSLSAMSLAEASSLIPYLLFALILTLSLSSSLNVMVFGEDIATSLGANVARTRVLSLITATMLAAVATAMAGPIAFIGLAAPHLMRALVGSDFRWLLPYCLFAGPCLLLTSDILARLVIAPGEIMVGIITAGIGGPLLYLVIKTYRGVNYVADZ

SEQ ID NO: 1145 - protein, 356 aa, Photorhabdus luminescens
HCGRQTLCFYLFEGKQTMKLKRCKGFAVPLMLLVSLLAGCDKPASTNNAPSDKPGYPKEITTALGTAVIPHQPQRVVALGAGAEDIVLDLGIVPVGIESHRWGGDEQGYLPWFKQAIQQRGETLPTVIEMYPELDIEKVISLKPDLIVATQSGLTQEIYDHLSYFAPVIAYPSAPWLTTPQQQIELIARALDKQPQGEQLATELNVILRESGNTIPHISGYTFAYIKAGISSNMLSVYVRGDPRVDTLIHLGLTLLPSVSTLADPFGSFAANIGLENADYLNGADILVTWFNNEQERKAVEAQPLFQSIRAVHLGGYIPLTDQSLVVAMSYGTPLSLRWGLSQFMPVLAEAIKSSZ

SEQ ID NO: 1146 - protein, 752 aa, Photorhabdus luminescens
FGDGMNNKKVMYPFLQKDSMIKKTTLAMTIQLVLMGNSYAIAESAQNKSDKTAAQNDKILVTASRPEHEGVTEDTGMYNTTSMVTATGLNLSARETPQTVSVVTKQRMLDENLDSVNRVIDSTTGMNVRQFDSDRFGFTSRGMSINNILRDGVATYYDTRFNYGDNLLDADLLDRIEVVRGAAGLMVGPGNPSAAVNLIRKRPTRDFRGEFSAGAGSWDKWRTGLDLSGPLNDSGNLRGRFVTAYQAANSFIDRNNNERYPFYGVLEADLTENTLLTIGVDYQRNHTRGGMFGGLPIYFANGSKTDYKRSDSYAPDWAFSKVRTFSTFTSLQHNFDNGWSVKGTFTYDNSALDQKVLWATSFPNRSTNIGMVPGNMTLIDGSRRQKNYDLQVNGDYRLFNRTHHVSFGLNHQQQDFQNDYFNATCMLTRPNSCPGIGDFTSPGWQYPEPEWSNTRTYGSKGRNEQTSGYAVTQISLADPLTLILGGRVTSWQTRGDNFNTPQNASYSDEFVPYGGLIYNITQDLSVYTSYTEIFNPENQRDRNNKLLAPVSGQNYEVGLKGVAFDNSLDYSLAVFEIRQDNLPLVDNNAPRLPDLSIPRYTVDGTKTRGFEAEISGQLTDNWRLYTGYTQFRATDPNGVRINANTPNRLFKLFTTYTLPGAMSNLTIGGGVNWQDKTWLTVDGPGKTSMQAEQNSFAVVNLMSRYQFTPDLSLTVNLNNVFDKTYYTQFGQYSQYYYGAPRNIEAILRYKFZ

SEQ ID NO: 1147 - protein, 605 aa, Photorhabdus luminescens
LHINSDNHTLHLNAENWLYANRHLVTKILRELCHEKLINPTYHGQQQYSLTIGDYQYHFQAETYQLDHIDIDAASVTKLRDNQSQPLDAIQLIIELHPLLEIPEKMLPIYLDEISSTLYGHAFKYQYNRLTAQDLAYADYQVVETTMSEGHPVFIANNGRIGFDADDYQRYAPESASPVTLIWIAVHKDKAIFSALSDLSYQQLIEEELGKYLPAQFERHLNMLGLCPSDYYLMPLHPWQWQHRIAISFAADIANNHIVYLGEGHDRYLAQQSIRTFFNITQPKKNYVKTALSVLNMGFMRGLDPHSMVTTPSVNEWLSNLVHNDSFFQQKGFTVLRERAALGYFNNYFESAIKKDSPHKKMLSALWRESPMTLLQDNQRLMTMASLLHVDYQGHSVVAALVKSSGLDAEEWISRYLDAYLSPLLRSFFTYDLVFMPHGENLMLVLDNNSPTNMLMKDIGEEIAILNGDLQLPEEINFLHVTIEDDMKINYIFLDIFDCFFRYLIPLLQKDLNLPEERFWLLVARCVHNYQSQHLHQIEKFRQFDLFKREFIRTCLNRLQMANNQQMIDLDDREKNLKFAGTLVNPLYALRHEYSVILHQAEQQZ

SEQ ID NO: 1148 - protein, 613 aa, Photorhabdus luminescens
LRKSVSTAEVINTISLAEQVLRKTFGYLQFRSGQQQVIDTILEGRDCLVIMPTGGGKSLCYQIPALVQEGVTLVVSPLISLMKDQVDQLRANGVAADCLNSTQAREQQIDVIRRCRQGMIKLLYIAPERLMMDNFLEQLLEWQPAMLAVDEAHCISQWGHDFRPEYRALGQLRQRFPTLPVIALTATADETTRNDIVRLLNLNNPLIHISSFDRPNIRYTLIEKYKPLDQLWLFIRGQKGKSGIVYCNSRSRVEEISERLQKRGLSVAPYHAGLDNSQRARVQDAFQRDDLQVVVATVAFGMGINKPNVRFVVHFNIPRNIESYYQETGRAGRDGLPAEAVLFYDPADMVWLRRCLEEKEVGTQQDIERHKLNAMGAFAEAQTCRRLVLLNYFGESKQTPCGNCDICLDPPKNYDGLVDAQKALSSIYRVGQRFGIGYIVEVLRGANNQRIRDMRHDHLPVYGIGKDQSQEHWVSVLRQLIHLGFISQNIANYSALQLTEAARPILRGEVSLKLAVPRIQNLKGRSQQSKSYSGNYDRKLFAKLRKLRKSIADEENIPPFVVFNDVTLIEMAEQCPVTEGEMLLINGVGQRKLERFGNVFMALIREHLEEFGZ

SEQ ID NO: 1149 - protein, 473 aa, Photorhabdus luminescens
MSQNVYQFIDLQRVDPPKKPLKIRKIEFVEIYEPFSTSQAQTQADRCLSCGNPYCEWKCPVHNYIPNWLKLANEGRIMEAADLSHQTNSLPEVCGRVCPQDRLCEGACTLNDEFGAVTIGNIERYINDKAIAMGWKPDMSHVQPTGKQVAIIGAGPAGLACADVLTRNGVQAVVFDRHPEIGGLLTFGIPAFKLEKEVMIRRREIFSEMGIEFRLNTEIGKDIALSELTEQFDAIFLGVGTYQSIRGGLANEDADGVYDALPFLTANTRHLMGYPALPSQPFINMQGKRVVVLGGGDTAMDCVRTAIRQKAASVTCAYRRDETNMPGSQREVKNSKEEGVEFLFNLQPVRIEINHSGQVCGINMVRTQLGQPDENGRRQAEIIAGSEHLLKADAVIMAFGFKPHTMNWLSAHQVTLDKQGRIVAPEYSDIPFQTSNPQIFAGGDAVRGSDLVVTAIAEGRKAAQGILDYLNIZ

SEQ ID NO: 1150 - protein, 333 aa, Photorhabdus luminescens
MTPEMLKESWFNREVQFSVFANGPLLDFWQAREECEFIGVDNVLIRYVRFCTTIKNDRAVVIFPGRSESYVKYSEVAFDFYHLGYDIFIIDHRGQGRSSRILADPQKGHVEKFDDYIDDVEILIEREILPRHYSHCYALAHSMGAAILGGFLLRHSQVFDAAALCAPMFGINFPMPRWLATFLVNRAEKRPDMRNHYAVFTGKWRPLPYLINLLTHSYERYSRYLRYYADYPELHIGGPTYRWVRESIWIGDMLIEKAGEIETPLIILKASEDKVVNNCRLRAFCESRNKVRAFIKERSPLIIQGAHHEILFEKDKLRSQALNAICDFFDQNZ

SEQ ID NO: 1151 - protein, 267 aa, Photorhabdus luminescens
MYHIVASDLDGTLLSPDHKLTSYTKETLNLLTNKGIHFIFATGRHHVDVAQIRDVLGIDAYMITSNGARVHNAMGELVFSHNVDPEIVHDLCLMEFDNVDILTNYYCHDHWYMNRECPEQKEFFQESVFHYQLFERDNFKTDDVCKVYFTCQDHDLLVALEEKIKARWGDSVNVSFSLRNCLEVMAGGVSKGHALEQVAQAMGYKLSDCIAFGDGMNDFEMLTVAGKGCIMQDAHQRLKDILPDMEVIGSNADDAVPHYLCEMYRVZ

SEQ ID NO: 1152 - protein, 498 aa, Photorhabdus luminescens
MSTIQINSQHRGSLDFADIQNIKTNAKEGDTVKFGSVFGKEYRVTKNSDGEVSLKQKENRSFFNRFFSNTDSSKNSDLKLNLMNQQLHKKENSGNVKVLTLTYNQANQKMPEETKNYFQNLIQKGDYDVVLFAEQESKLLANDLELDGMNLLSQNKMKVMTKGLGEGVSYTSMSVFAKDGVDINVKKESEYRHGIGGRNMAFFMGITGNKGGVKTALEINGQALNVISAHLDSNKEVKREFEGNKLMEGIKPNEEVLITGDLNEREKRVAEGSDVLYDPIAHDDTHLAKHGFKFKPLDSHTYMQLDKHTGNIKQKEGRDRPDFGELDNTGLTNKTGNLQNHETSVITDGFVNVSDHKPVQSTFEVRSFSQKLIENAMTQNAGDFKNDAAYLKPGTDPANATFDDVTSANQARLGLESLSPNEQEFVKENFSSFIIGKDALFSQLTSGFMEEMGQLHASDLVKNPAQLQTQQIALSEKYELLSDKVNAEFNKQFVANLZ

SEQ ID NO: 1153 - protein, 330 aa, Photorhabdus luminescens
SDNCRQTKYRDQRIKPMTIISTKPQLMQFFSDTFLEKTARRCGFMERFRNIGPQSLVLSLIAALSKGNCTSIADLHRQFNGMCLSEKHTVAYKPFHNQLRKSTFADFMKKLVTFAMVQLIENVLPPLPKKFEQFDDILLQDGGSFNVHPDLAGVFPCRFSPLKAAVECHMTLSLFSQSPIAMTVTADTASERAYLPAPHTLRNKLLLADAGYVDFGYFEQLSLSSGSFIVRGSQSLNPLIVSARNGQGRQLPTLAAKNSGTSAAKITAMRYWISPVGVADSNFGSSGVGSRRKSASVFGSPTCRHPTLPQMTSWRSIAVAGRSNCCSRNZ

SEQ ID NO: 1154 - protein, 256 aa, Photorhabdus luminescens
TLIILTKGELKMSMIFSRIKLFHDLNEALTPENALLDLYQITCKINKLTTRKSGWYLPGYTQEERLKNNAFDENGPTKYAIEDFKETYDENSGFIVKSLSDGVDENNNSILYMGEDKIHVNPVRLGKTNISISINLDKDKFNFQDIIELLKNSISIRNSPFMLVDTRGYSLKQKQVFPDRVYAGWMLYLPIEIDPTLVPMAEEIISISDKNNKKGSLIITTKDIFDIENQEHINKANDIEICLRDLQILPLITEIZ

SEQ ID NO: 1155 - protein, 253 aa, Photorhabdus luminescens
KFQTGLMIMSLIHPRIKLFHDLNEPITPELALRDAYQIMQKINNISSNPSYWHLPGYSLEEIEENNVFTDAGFTEYAISQLTENYDKDAKYLIATLFDIPGDIELKNRIFYQSSDVIYNNRLGKTNISIDLNLVKEKFKIQTIIEFVKALASTRNSPIVMTETRGYRLKKKQVFPDRISAGWMLYLPIEIDPTLVPMAEEIISISDKNNKKGSLIITTKDIFDIENQDHINKANDIEICLRDLQILPLMTELZ

SEQ ID NO: 1156 - protein, 216 aa, Photorhabdus luminescens
KGKINMPLPLLAPAAPALLAAAEWTLAACAAGLAAVGVMESTKDKEGEQDKAKADTQTIASSRTECEKCPAIGNVTMVWEKTTSYSEITIAYQTKIAGTIYNPELNLIETWLCMDTNFDGWKPAQCLFLEAKAKYDQFFKNGEPDWIFGEFRKTPTSKTGAESTIWQAERQNRVCIGLNNIPKSHWHFLQPISYEYFSEMFVPFTNIKTFHTPMSZ

SEQ ID NO: 1157 - protein, 241 aa, Photorhabdus luminescens
MTTLSLNMKLYTDWKEPLTPTIVITDLYKITQQVDIFFRRHKTWYLPGDTRQESLQHIAFDQQGATKEAIKEFEEDYTEENPIIIKGIWDGEDDDHSCSICYMNYRRDRLGQTQIDFHISIEENEFQLSRLINFINFLISTHNAPYIMAENNTYRIKRKHVFPDRLSAGWMLYLPIEIDPALVPMAEEIISISDKNNKKGSLIITTKDIFDIENQEHINKTNDIEICLRDLQILPLMTELZ

SEQ ID NO: 1158 - protein, 208 aa, Photorhabdus luminescens
KGEINMPLPLLAPAAPALLAAAEWTLAACATGLAAVGVMESTKDKEGEQDKAKADTQTIASSSTECEKCPAIGNVTMAWEKTTSYSEITIAYQTKIAGTIYNPELNLIETWLCMDTNFDGWKPAQCLFLEAKAKYDQFFKDGMPISWWKISKSGDRSMTTQVEKQQEVCTTLNGTPNSHWHFMQPISYAYYLEKFSIYPNIKVFHTIZ

SEQ ID NO: 1159 - protein, 214 aa, Photorhabdus luminescens
MAVAANKRSVMTLFSGPADIFSHQVRIVLAEKGVSVEVEQVEAGNLPQDLIDLNPYQTVPTLVDRELTLYDSRIIMEYLDERFPHPPLMPVYPVARGSSRLMMHRIEKDWYSLMHTIEKGNSQEANTARKRLAEELLAVAPIFKEMPFFMSEEFSLVDCYLAPLLWRLPVLGIELPSSGTKDLQIYMQRVFERDAFLASLTEAEREMRLQSRSZ

SEQ ID NO: 1160 - protein, 659 aa, Photorhabdus luminescens
MKTGLRFSCTIGNLPPMTFAVVNFTLDEALSSLFTLSLTLAAHRSDIDTDTLLLQTGLFTVTRDDILQREVKGLVESAVVGTTNRHQTQYHLTIRPEMWLLTLDQDSRIYHQLSVPDILHSILKQKKLRANMHLNNPHSTREYVTMKRESSYDFFTRLAAEEGIFFWFADDGLYLSDSYLNMRAPDTLIYNPDVTSAVEENVIYKWSLGSYMRPESTDQKDRNYHNPNYALQHNATDFEAENGTPFHIFESYGRFQKDKEGIPLTQYRLEALRVDSKSGQADSNCIRLMPGRIFTLTNHPIDAMNDRWQVVSSQHIGYVPAVLGDNGTGTTLNSHTQFIPGRNDWRPPYRYKPLADGDEIATVVGPGTEEIYVNKDGAVRVHFHWNRYDAPDDQASCWVRVAQGWNGNGFGFLATPRVGQEVIISYLNGDIDRPIITGCTYNGLNRPPLNLPAEKTRTTFRTKTHKGNGFNELRFEDANGSEEVFIHAQRDMNTQVLNDETHNIGHNRTDHIKHDAHLRIDNEYRVQTGNDISLSTGQKLHIKADDALLTQSGNEIHLSSGAKVVIDASSELTLQAAGHFLKIDAGGITSSASINFGSGAPGSGSGWGGKLPDRLDKLKQTSVVQVEKALTTPLKEICLTCLLKAEQNGTAMVIRGQSZ

SEQ ID NO: 1161 - protein, 588 aa, Photorhabdus luminescens
YLIIKRAKVNMKNFEDFYREALSQIKHDLSNAAQEHPHLAPFTSESGDPDVLRLLEGFALTTAGIKQKIDDGFPEVINPLLRKVWPIPLHPIPSTSIVQLDMQPGSMTETTSIAKGSEISAIQQNQSITFRTTQDISIEPITLIHKTLTHSGDKSLISLTFQYHGPTTHWKTGPVTLFLGEDQKLASLLTKYIDQSLNNTYLKTSLKEQEMWLSIEIAPRLKENLVLPRPHDYFWPLQVLYEYLYLPHVNDFMSFDLSEEIAELPLGEDKQFTIILEFDCNIPIEDITPAFIPHCIPVINLAPARTKPITFEKGKSRYVLEANEIFSIDNIKLQSDPDGTSEGSAHSVPLINSAQLAACHFAEPGDNILLFNHIREESPFGGNQINLTFYDHQAKPVTEHHYREFYCQYHRYHTQARTLGIGQICIPSEQIPSHIQARNIVAASKDLPAVVNSHQHWPILSLLSIGPFFLSHIESVRSLVKQLDTFAHLDAPRSRHIQRMADGLSAIYLEPYYHFDKGIPVRGQAITLRMTPENYEHEGEMYAFAKTLHTAFSLCFVETSFHRLTVINNGTNECWEFYNMPGHQKIMZ

SEQ ID NO: 1162 - protein, 1112 aa, Photorhabdus luminescens
VRLIISLLLSLLIITPVSAAIPLDENQLKQELKQIESSKNPQDAEVAQALQGALNWIADTKSANDRTQKYQTAIDDFPKITKELRQKLLTESDTPRPIPANQPIASVEQQIIQVSSRLLEQGGQLQQEQDKGREISDSLVLLPQQQSEARRLLTEASSRLQSLGTPSTPLAEAQFALAQAEVNAHKATVNELEIAQLSANNRQEISRMRVELFKKRYHRLDLELQQLRSQLNAQRQQKAELALEHTEMLAEQSDQLPKFLLDELQLNRNLSQELNQQAQRMNVIGSKQRQAASDIIQVRQALNTIREQAQWLGGSTTLGEALQTQLARLPDMSKPQQLDRNIVKFRVDRLKYEDMLDQLQKDTKPVQKSNVALTAEQERIYDSLTRTRKELLNSLLSGYDSEILELTKLKVATSQLNDALTEVKEATHRYLFWVADVNPVSLNYPINVVQDLTRLLSLDTFSQLSGALIVMLTTQDTLLYLFGTLFLVIFSIGSLRHYHAFLERASNRIGKVTHDHFSLTLRTVFWSVVVALPLPMLWSAIGYGLQSAWQYPMATAIGYGVSATTPVLWIFMLSATFAHPNGLFIAHFRWPEERVKRALRFYQLSIFAIVPLVMALITFEHYSDREFASTLGRLCFLILCVSLSLITNSLKRAKVPLYLDKNGYGENVINTALWWILLSAPIVAALASILGYFSTSQALLGRLETSVAIWFFLLVIYHIIRRWMLIQRRRIAFDRAKQRRAEILAQRAKGEDDSTGSSSIEGAIEVEEPIIDLDAISAQSLGLVRSILTLLALVSLIWLWSELHSAFSFLENIRLWDVTTTINNVETVQPITVGSVLIAILVIIITAQLVRNLPALLELALLQHLELTPGTGFAITTLTKYTITLIGGLVGFSLIGLEWSKLQWLVAALGVGLGFGLQEIFANIVSGLMILFEKPIRIGDTVTIRNLTGSITKINTRATTLSDWDRKEIIVPNKAFITEQFINWSLSDTITRVVLTIPAPAEASCEEVTQILLTAAKRSTLILDNPAPEAYLVDLQHGIQIFELRIYAAEMGHRMPVRHEVHQLILQGFREHGITLPFPPFQASIDVIGRDIRSATTNRSGRNPPRQPGSLZ

SEQ ID NO: 1163 - protein, 298 aa, Photorhabdus luminescens
VLDNIKIRLHYLLPKQGITHLAGWFANKKAGWLTQLAIKAFARVYKVDMNEAKSPEFSAYITFNEFFIRSLKDDIRPVVSNEHQLALPADGTISQLGNIRTDQLLQAKGHHYTLEALLAGNHQLAEIFRDGQFVTTYLSPKDYHRVHMPCDGLLKEMIYVPGDLFSVNPLTAANVPNLFARNERVICLFETQFGPMIQILVGATIVGSIEMAWCGMVTPPREGIIKRWTYPEAGTTGAISFKKGEEMGRFKLGSTVINLFAPNQIQLAGHLSSGSTTRMGELLAQAIMLEEPTDNISZ

SEQ ID NO: 1164 - protein, 352 aa, Photorhabdus luminescens
VAKHKLSKGQQRRVRENHQRRLKKQDNKPEMDDNQLGEPQEGLVISRFGQHADVEAEDGSTQRCNIRRTIRSLVTGDRVVWRPSLQTQADVKVNGIVEAVHERTSVLTRPDYYDGIKPIAANIDQIVIVSAILPELSLNIIDRYLVACETLGIEPLIVLNKIDLLDEESRAWVNEIMSTYHNIGYRVLKLSSHTGEGMEELTKMLAGRITIFAGQSGVGKSSLLNTLLPEDEEEILVNQVSDVSGLGQHTTTASRLYHFPHGGDVIDSPGVREFGLWHLTSEQVTQGFVEFRDYLGGCKFRDCKHRDDPACALRKAVEDNEINQERFENYHRILDSMDQIKPRKTFTDNDSZ

SEQ ID NO: 1165 - protein, 338 aa, Photorhabdus luminescens
IAILTNMKSNHASTQSVNNYSTYIKLSLVAIIWGGTFVAGRYISVETPPLLSASLRFILAGMTLIIFLVLSGKMFVKINLSQLLKIIGLGLSGIYTYNLFFFYGLHHTTASRASLIVALNPAVMAIFSYLFYKERQSPLKILGIILCLLGAMIVIFSKTPQLTVGAEGNWLGDTLIFGCVLSWVAYSVFCKNIVNQIGPLHTVTYSILAGAIMLTATAIFTGQMSLSAIHTLPITDLYSLLYLGAVGSAVAYIWYYDGIQRIGSTRSGVFIALNPLTAVLLGAVLLDERLTFPMFIGGALVIGGILICNKRSTDKKLIPPEPKSGINHIAKAKNYRRZ

SEQ ID NO: 1166 - protein, 404 aa, Photorhabdus luminescens
LIKKGDFMSYQWPSDGSSSIWPEINSTFLSLRGFSDEFIPMNDTQRTYKKLLMGFDAITSCEMKELYKFKITLTQMNEHDLSLPELCLIHKAFSAWVKFDYENARSLLTQHIRAYPSDIVALFFIHMLDFCTGKTTNLRSLLLYCDEHIPGTHYLYPYYLSIKSFVLCEAQCFDDALEVGFKSVKLMPDNIYGIHAVAHALHELGRWKELCHFLTNCKEHWITNTGMGMHVYWHLAIAYERSDEITLALQAFDELYALKDNPFAKQDLDAVEFLWQLRLKSADAKFQPIWERLAVLWTGSISSSTSYFHKIHAALAFSAINQSFLIEKLIAESDGFGIEPDTHSTGIDVLKAILLFTSRHYEECLSKLRLSYEKWPLLGGSRAQREILEQTMEYAALKASSTLZ

SEQ ID NO: 1167 - protein, 357 aa, Photorhabdus luminescens
LIKSPFLINYGLETRLSARRACLAYCFISALHILIQMYDHAEMSDYSKGEIMTLTQLEIFAVVAERKGFTLAAAQLKISQSGVSHAIRVLEQELGVELLHRHQGVVELTDIGEGLLQKAQAILGLAETMRQEAADARGMKRGTLRIGSFGPTSSLWLLPTVLADYRRLYPGIEVHIDEGPDRQVVQWLMDRRVDVGFVTLPEEQFDTYPILEDQMVALLPVDHPLVLQDTVTLKDLCVGPFALTEAGSAELVSRLFLSARLQPNIRYRTSQLLSTLAAVERGDAVTIVAESSLPLTHEVHYVKKTLNPKVKRHVGLAVFDERQSSPAAKAFIALATKKFRMVSSAISPVSKELVSEZ

SEQ ID NO: 1168 - protein, 621 aa, Photorhabdus luminescens
KEESMDNLHHIYHSLSPDEQRIAKSALLEHLSSITPSVSSAGDTKQMPIAIVGMAFRLPGAEDSPEQMWEILRSGHSVIKEIPEQRFASGKPYVIPLPKKALKAGLLDSIDGFDAPFFGISPRVAAMMDPQQRMLLELTWQAIEDSGANPLGYSGSKTGVFIGSCSNDYRELVAADMAMANAYAPTGTLNCLLANRLSFYYNFIGPSLQIDTACSSGLTALTQAVNSLRSGECQQAIVGSVNLLSNTFNMAAYYRAGMLSKDGCCRVFDADANGFVRGEGAICLFLKTQKQALEDRDPIYGYVRASAVNHGGRANSLTSPNPEQQIALVKDCLLQAGISAEQISYLEAHGTGTSLGDPIEFNALNEVFNRDESGGTLQPCYIGSVKANIGHLEGAAGLAGIVKVLLMLQHKSIVPSAAFQRLNPEIDSVDSRLQLATEENSWRVGAGQKRFAGLSSFGLGGSNSHVILEEAPTQAQQQIKANLEGYYYPISANSQASLQKIVAMLGDFIENDESVELPAVSWTLQFGRAALSYRALFVATSRQDLLKQLRDFASSTATKEDQWLHMAEDDSRFLWLRGQDIDWRTCWPSGQKPLRIRLPKYAFEHRRYWLPHNESVVAKQZ

SEQ ID NO: 1169 - protein, 377 aa, Photorhabdus luminescens
MPSLITPSSCYQKALSEGKYQPDDVQRQVVAQLDTIHHALINVSPGNPVRRQSLKGRLSKLLGKTTSMSCAPVQGLYMWGGVGRGKTWLMDMFYQSLPGERKLRLHFHRFMLRVHEELMVLQGHENPLDIVADGFKTETDVLCFDEFFVSDITDAMILGALLEALFVRGITLIATSNIPPDELYRNGLQRARFLPAIEQIKKYCDVMNVDSGIDYRLRTLTQAHLYFTPLNEDNKRAMDRMFILLAGNSGEQASILEINHRRMPAIRDADGVLAIGFNVLCEDARSQMDYIVLSKRYHTVLLYQVPAIMPGNENAARRFLALVDEFYERRVKLIINAAVPMEQIYQGVLLVFEYQRCLSRLQEMQSEEYLKLPHLPZ

SEQ ID NO: 1170 - protein, 525 aa, Photorhabdus luminescens
GELMAQLLIPPMGEGTTEVVIIQLLKQVGDHVKRDEPVYEMETDKAAFTIESDVEGILEKWLAAENDIIPVGSPIAVIRAVGEMAEPSPVSEALTPPPEKMERVAEDVEKIEKVEAAPEVSAPPARIPPKTRQYAQEHQIEPLILSQLAEKHGTLLPGHIDDYLQQHRETKISEETRPSEKSNTENDNVGFLSRDQQRLNRAIRLNSAAVQPCWAAKPLPIELVDNAIHHLTETSGQQEWITPFQVITYAISQALKKFPMLRSRPLDQERYHTYTDINLGIAFLDEKGDLSSLKVPNTQTMSFFEFRQHLNGVLDPDAEKLPVDIDVPMMISYTGNDGATFAVPVIVPPSQSTLFIGAPHNKEMSLVLAFNHYLLNGVEASEFISEIIVQVRALSGPRSAAHQIEGKVGKSVSGQLRTLLADFLHWDEDFTESMMPRTWADLGIDSLKAVKLAELMSVHFRRKLSPTLFWRYSSPHRLIEYLDTAKTELTENKHSLDDFINAMRGLDGEAALRLQRLIEGGKHGZ

SEQ ID NO: 1171 - protein, 579 aa, Photorhabdus luminescens
LFVRKKRVIDVQINEVPLKEHSPSINDCLDEQKLLYDMLLSREFDNRSAIVTRQGRAWFHVSAAGHEGLAVLPQLMEKNDVLVPYYRDRALVLARGMSIVEMTRELMGKATSHSAGRTMSNHFCSKEHNIFSVVSLTGTQCIPAAGAAWASVLDNKNGLVVCGVGDAATRQGEFYEAVSFAVEKRLPVVFVVSDNKLGISTSTEKMAPYRLGIFNECLIRRVDARKPETLFTVAQEVFNKARFERTPCILVCRMDRLDSHSNSDSHKLYRTPDELEVLQDPIENYVAYLKEKGAITEQALAEQKERIKADVAEIFERVYHEEEPDPASVSTYLCNREGTPTVHVEMEAEETQVKAVNQVLDEALSQHPNVLIFGEDIEDPKGGVFGFTRGLSTRYPDRVINAPLSEATIIGSSVGLSASGWRPIVELQFIDFVGLGLNQLQSQLGTLSWRTVGKWRCPVVIYAPYGAYLPGGGIWHSQSSDGILAHIPGINVLVPTTPADTVALFRTALSLDMPSLILIPKHLMRERHERRLVSPVSLGQAKISSGQERTLHWLLGEIRLSLRRWRLFRRKKTILTLKZ

SEQ ID NO: 1172 - protein, 476 aa, Photorhabdus luminescens
YPKEYSIMKNLRYLIVTPGLMLSASVLASPANSIEARLDALEQRLQQAEQRAAQAEARATAAEQHAQQLEQRAIETKQQTTQVAQHPTSQENSAPSTSNLKLNDFGDLKLYGDVEFNLDSASRTGQLTSLKTSDNKDWKPGDKERWNVNGRILIGLDGYHRDQNNNFAGFRVQPLADMTGKMNLDDAAFFFGNEKNWQVKIGRFEAYDMFPLNQDTFIQYSGNTANDLYADGFGYIYMMKEGRGRSNSGGNLMLSKYAGNWYFELNTLLEDGTSLFRDNTYHGNTLENKKNVAYLRPVAAWKKDQFSAAIAMESNVVNNAYGYQNNQGQWVDQSRRNGYGMTLSWNGLEADPDDGIVANLNTAYLDASDEHNFTTGINVMWHRFELGYVYAHNNIKAFNTDDTTAYINHPFNEPGKYDINTIHMSYQIPSIMNMKNFNLYLGAYVSMLEANDSNKIANSNNDRRYGARARFKYLFZ

SEQ ID NO: 1173 - protein, 277 aa, Photorhabdus luminescens
RDITMGWNIFINAPDSYHLTSTHIRNSLHQQGFATFNATDLDLSDSEKIDLISLCELSKSLPLDRFGEGGRHRSYCEGVWHRETETIDWKTGHQQSDGSIEIDYHQGSEYQPEFGGVVRKFLRMPDEILNKGLLNKLIWHDLSLTGMAEHYSRLLCGVHLIRMQALPGKPAKITPNCFHRDGQPFTAVHLIERYNIEGGTTHIAPPSYANCQLEEVPAHEITRFLLNDPLDSYIIDDAAICHYINPVTCDENASVGVRTIILIDFTPLEQIDRCSQZ

SEQ ID NO: 1174 - protein, 4198 aa, Photorhabdus luminescens
HPGVIAFTAITKLQKSFYLRKNFVSNYSNTLSNVPFLLPTPAQRRLWLISQGNMDSALYNVPFSLRLRGTLDREALEKTIIFMIERHPVLRSQFHVVNGELQIVLNPQWPELRISDLSDYSPEERETKIQSICDNEVRYCFNLSNDLPFRYLLLRRQENDHQLIFTLHHIVFDDWSTHVFLNDFSHAYNQYKVGQQPKLATITYPHVNDSITDIHINSAHRQRLRNYWGKQLVELPELHKLPTDRPRLLEQRGRGAVYHKSLPLSLVGRISKICQRYGLTPYMVAISAFTVLLNRYSHDDDIVIGSPFANRHNIDEHVRLGFFINLLPLRFRVNEGISFSDLLVQARDILLDAYENADLPFDEIVDVVQPLRSLSHSPVFQIMFDYLKSPGQALQLDGLAAEVQFIHSGTAKYDLTLSIEESPSSLLCLVEFDTDLFDNLTITRMVNHYETLLDALLSEPERSVAKCSMLPPEELETLARFSRPAEPLPVLEFISVAERIKSQVRNHPDARAMVWRDQRFTYAQLDEYAQYLLAKMRQCGVGPGSRVAVLMSYRPEIVISFYAILSAGAVYVPLSPSDPRFADKINDAQPVLILTSEQDAVGLLDFRAIMLDVDELFRQPAPPDVQPIWPVQESDSAYVIYTSGSTGNPKGVEVSHGSLHASYHAWCHDYRFTQPGEPVSLQLAAPIFDLSIGDFSRTLGCGGCLVMCPREWLLDAPEMHRLMMSEGVTFGDFPPVVLRQLIQFCQDNGKRLDGLSTLVCGADVWFGHELHAAQALCRPDARILGSYGVTEATIDSTVFDPETHPLETGRVIPLGRPLASCELFIVDKHLQQVPIGVSGELLIAGVTVAKGYLNNPQLTAEKFITGKFDSHGRFVADGLVAENSSTRFYRTSDICCFLADGTIDFMGRSDHQIKIRGFRVELGEVESALLEHADVRQCAVVACNDSTNNKVLVAYVVSSADTDKLRGYLSLRLPGHMMPRAFVFLDKLPTTPNGKVDRKRLQVPDFSLPENQESMTEPANAREEQLLALWRTALGVQVISTEDNFFYCGGNSLIAANLITQINKTFSVQLKLSAIFNHPTIVGLASLLGSVEKDSIEKNSIEKDGVEKSNAKQSVTVQHVSQVSDLLSFGQRSLWLIAMQRPDDCSYNVPFTLRLHGNLHFTALMQALNDIVQRHDVLRTTFSSQVSKVSEPDGTSSFEPSHQVASELTLTLRQQNISGGESALASKLREEMMASFDLVNGPLIRAVLFTLSPQEHVLCITLHHIISDGRSLAILFDELRHGYQARLAGKAPMLPMLEANYGHFISWQRSRLTDPAVQQQIHFWRQQLADAPATLILNEMAAPTDEAAAISCAIPHVYVEGVEKLAREQNCTPFMVWLSLFALLLRQQSGEQDLIVGTPVSLRTIPAWDTLIGYFANTLPVRINSRELQTFQQLLMHTRQVSLDILENRDLPFDYLVQTLNLPRVAGKNPVFQTIFSCELDQPNDATFGDMKVSDVELGDYRAKIDLELAINRVNGQVYAHFMAMPGGLSAVTLGRMSEYLLAMLPQLIEKPDTALADLLTVNSDRSAQPELVVDKPQGLFQLFQQNLSRYGGHVALESDELSLSYQQLDTLTAYVAQQLQQVGVGRGDRVGILMGHHPHNVTAMLAINRIGAVFVPLAPDNAEPANRYVIDNAEIKAILCRNETAPLCQRLSLAAMNIDELDIANAPYMTMAAICQPDDCAYVIYTSGSTGKPKGVAVTHRSVCHNILAIRDELRLEPSSRIVQYSSPVFDVMLGEIFPALVAGACVVFANKQQLLPGSNLTEWLAHKQITHMWIVPSALAIVPLVPLPSLQVIIVTGEPCMPEVAQRWSVGRRLMNGYGPTECAIVVSLTDYHAAGQNLVLRPMGDVRFHLLDEQRKPVAPGEMGELYLAGTCVAQGYLGMDEKTAGVFLPDSFAPQLKARMYRTGDIVRQRMDGALEFIGRVDRQVKIRGYRIELNAVRAALSALPGVRQAEALAITDSQGNKELAGYIVGETSRSEILSALRQQVSEVMVPTALFFLDALPTGITGKVDLKALAEMKLTRAGQHQSSPLPAKVVSSLSRVEAIWRELLERDEIGYDENFFDAGGHSLRVMALFQQLNEAFGVNLSVTDIFAHPTIRQQAQLLDTLSQQKTPVTVAVTPLIVTEKRAIPTAIPMLDVSTQDSNAIAIIGMTGRFPQAPDLDTFWQRLLAGYDASVELSDEELLQRGVNPALLSHPQFVRRARLLEGCAEFDARFFGYSSREAQVMDPQQRLFLEMAWETLELSGYGNDSTPRSVGVFGSSGFNYYLLENVMPNKDRMHLDPGQWQIGNDKDFIATRAAYKLNLSGPSVSIGTACSSSLTAIHFACESLRRGECDMALAGAVALDPQQVGFVHVSGGIMSPDGLCRPFDAAANGTASGSGGGMILLKRLSAALQDGDTIHAVIKGSAINNDGAQKVSYTAPSIDGQSSVIKDALRNAGVSPASISYIEAHGTATSLGDPVEIRALTQAFLEQSDGEVLPVGSCAIGSVKGNIGHIDAAAGIAGVIKTVLALRHQTLPPSIHYHQPNPAIPFEQTPFSVINTACPWPQTSQPRRAGVSSFGIGGSNAHLILEEAPRQQDARILDDERWHLLPISAKTPQTLLQQGERLAVALTTGNELLADIAGTLQQGRSAFSERAFVVGKDREQLINQLRQLSPQTINRKQQPRAVIFMFPGQGSQSIEMGQSLYLRDGVFRQQFDRCAELLQPHIKLDIRQLIYPQSERDNAISRLNATRYTQPALFTVEYALACQLQAWGITPQAMIGHSLGELVAACVGGMLELEDTLALVANRAAIMQRQPTGAMLAVQASSERMVALAPECEFAALNGPAQCVITGSHDNIAVLEEQCNKAGISCQRLTTSHAFHSSLMDAAAQQMREFSAGFTLQSSTIPMISNISGRWFSEQDRDNSGYWGDHLRRPVRFYDGILTLLNHYDNPILLEVGPGRALTSMLKDLQQTGQAQILTTMRHTRQQKPDEEVLLNTVGQLWQQGVAIDWAAFGHSHKLHRVMLPVYPLQRQHLWLEQPVTTSATVISTQRRKLPTFTRSSDKEGITRFTCKLDDNVWFIDEHRIFEGQGVLPGTGCLELVRRVFNELQPGGTATFSEVYFPSPLVLSSGVERQIRISLTAIDNSLAFTLESHDDGNDMWQLHANGNVTAVCSPPAEIVSPYELRRNLQLEEVAEAPERFNQAFADYGPRWQCIAGVWMGDRCALAQLRLNQAFIDDLPDIALHPALLDLGTVFLHACLLPGDASIPFHYGSLTLHQPLCAEFYSLAVETAPRTYDITLFSWDERQNCKQVLAEIHGYNLRQFNSLPFQPASESNVARWCRYPRWLPKPLGEAKQNRAPWLIFGAQAAELSDLSQAAAPGSIVVEDADEFLQQSTYRFSLRKDQPEDYQRLIDCLIQQQVLPERIIWCWTAAGISQPEAAFEQLAAAIKALTGHHRVFNITLISRGLQAAKVLEACNAAPALGLLGILAAEYPGCSARHIDLNDDTFATYQSLIAELYTDMQPEETTEGIPVTSISLKQGERELQTFTELDEIPRRQILRDGGVYLITGGLGGIGQLLARHISNQCSKVKLGILSRRGTNAVSEALLDVLQKSGAEVMMLRADVADDAALTKALAQMRARFGAINGVIHSAGIEASGLLEHGTSQDWRHVMAAKVSGTQQLMTAISQDPLDFVLLCSSLASLVGGMGQADYAAANRYLDAVAHYWRQQAIPVTSVNWDTWAEVGMAVDYAARRQESVIGLSNQEGCAIFDLAIAGMEAQIVVNKFPPVQRTQLQDLSVISDSASPEEAVRQLWYELLGEETIHLEDDFFELGGHSLLATQMISRLRDHFQHCLTLAEFLEQPTMARVVRSLSDEKKSSVPENAHIRYCLVPINHGGNGNYSPFFCVPGMGGNVTQFMPLAGALPPELPFIGMQYLGLDGKTAPHQSVEEIATHYIACLRSAQKQGPYHIGGHSLGGKVAYEMARQLHAEGESIGSLVLLDSAAPPYAPVPYQEDADIAKVILGIFAYYTNRLEMIDSLDDNEMRALPREALLSYIKEQLKRFSLIQAQNDMGSINGLFNVYRAASDMSPKYRPIPVQLPIPMLLVKAVDPLPKGVVVPEIRETNGWGWEKFSTLPIRIAEVPGNHYSCLMEEHVAHVSRAIIHHFPSIITGGQIZ

SEQ ID NO: 1175 - protein, 449 aa, Photorhabdus luminescens
LPDGRARSTCIAGDNPSLSINNNRRTDMSDSSPTVHLPENRQHKRRLAVILMTLAVDALGIGIVLPVLPDLLREVAPQPPEAGMPLIGLFVSLYAFAQFLFAPLLGALSDAWGRRPVLLATLFGTALSYALVATAPSLGWLVAGIFLSGSTAASTSAASAYVADVTPEAQRAARFGLVSGVLGFGMVAGPAFGGLLGMIAPRLPFVIAGSLAAVNAIAAMFVLNESLTKENRRSFDWHRANPLGSLKLLATDGVLRRLVYASALGMVAYGIFLACFVLLNEMRLGWGPRENGLALTGLGVGIIITQTWLLKMFVARCNEYRTAIIGYGLYTLAFIAYSLAVSPLIVAGAIALHALALISDSTLRALISLRAGNERQGEYLGAQNCMLGLAITASPLLGALLLHFSSRQEQSLYFQGIPFVIAVVVCLCAILILLRGSQADITLRNLYKZ

SEQ ID NO: 1176 - protein, 1066 aa, Photorhabdus luminescens
MKQHQGSYYPLTAAQQEIWLAEQLNVSTGIYNTGCYIDISGAIDIETLNTALSQLIDEAECLRVVVVQHPQGPQQQIVTNLQWKCPLIDLSHHEDALIEAETWMNAELVRPMALTLGPLFGLALLKISDEHYFLFIRVHHLASDAFGTTLLIQRLAELYTQKLTGAAELENPFGPLSDLLAFDEEYRRSENFQHDRQWWSQYMVGRSEPQSLAVGAKPGQFADLGSFSCTPCEIPAKVKDILRTLSEESGSSMAQIIIAIVASWISRMTDKQDITLGMPVTARSGRALRSIPGMISNVLPLRLTIDPAHSIGDISKLVSQEIRQLLKHQQYRSEDIYRDLQRNGSAPRLFAQNINVMLFNSNVSFAGNFGRTKNLSSGPVEDLTVTIYDHGEGDSLQFTLDTNDNLYTPHDINLQKSLFQHFITELLADISRPIGELTLPDWHIGDSLLPARRTVLNEETLTSRFEQRAIAMPDSVALTYQQENISYTVLNQRANQLAHYLVSRQIGPEQRVMVCLPRSIEMMVTLLAIIKAGAAYVPVEADYPQSRLDFMIDDAEPACVITTSEIAQRLTANIPMILLDDPELLTYLEMQSVADLSDKERLQPLISAHPAYIIYTSGSTGVPKGVVVTHHNVMRLLQSTQRWFNFSETDCWTMFHSYAFDFAVWECWGALLNGGRLVIVPWEVSRSPTDFLQLLVSEKVTVLNQTPSAFQALIHADREAPELGQSLVLRTVIFGGEALNAHILEEWYQRHDDNAPQLVNMYGITETTVHVTYFPLSREVVAQPASSLIGEPIDDLGIYILDEAQHPVPVGFVGEIYVGGAGVARGYLNRPELTAERFMADPFIGTDAHMYRTGDLARLRRDGVLDFLGRTDDQVKIRGFRIELGEVAAALNAHPDIVQSEVIVREDEGQQKRLVGYVIAHKGITLESQLIRSSLTTCLPEAMIPAAIVQLDHFPLTINGKLDRKALPKPMWNSVVINESSSSSPQELSLCRLFAELLGLENISPEDNFFELGGESLVAMRVIARVRSDFGVEITLRDLFNAPRVSQLVQRLNALQQENEVVSQTZ

SEQ ID NO: 1177 - protein, 323 aa, Photorhabdus luminescens
LVISQINNKKSLLFPTMPDTLSHQIWSLLGWNEVTLKRFLCAKKIFVTLPHASPNIFFPRAGVSKFVTDKQKEDHEIFHLRVVLTHTNFSDLGWRPYSWWYLNEEGVLIKQSIFSRNKKKKHYIISSQPPLLLDKQYYPSVLGHGIQLAQYADNLALSYIILQAFQEQLSGFSLAARTLYLPLDILILLMQTLARQQPGVHPWLLNLLTHAQSRKLNEYQLEDTHQWENAYVYDNYTNISLLFPLAPTAIVGGIKMQRYWPDIIDSVSIINEKTTTPCPIPQCLAFPQCQEYLLPYRPKQETLRQIQMADIEYSLAMAITEYZ

SEQ ID NO: 1178 - protein, 417 aa, Photorhabdus luminescens
ERSTMKNQQLLRKKFIGFQTYTAFSALAEGMQSVIILWLVFQITHSPLAVSLTIIAGYLPSAIMGFFLLSFADTKNPVRQLTVSNGILTLSALCLPLFFLFSSTQPTLLMLAVVTVQSILSLVKMFNKTSVNRIVRDNFTPEDGSKMLQISAANIQISQTSGAALGGVFLTLDAGNSGLFIAGFFYAASTIATGFFTSFTLSVIPTTVHTDKKQKQLLDKAYLVHVFNRQELRKVLLFSIPASGALQFINTSLPPLADILTESGANFYASLNISCMIAGFISGLLLSRKIVGEKFILNHALLISAIIIVLMAGAENKYLVAALLFCVILFTTCHIICIQVKCNQVPEKQDVGKFIMLRTSIASLSKITFSLGAGALLSLFSLKTTYYLVVGILLLFSLQWYLSQRDLPYKGIKKHEZ

SEQ ID NO: 1179 - protein, 387 aa, Photorhabdus luminescens
TYCVYGGMIMSERALILDTHKIMLEQSINQHQNIDYIRVSEPQVYFASQEKTLAKIDNIMNQTPFHYVVASSESNMAFAGFLRSRYGLPGLNYEQALCVTNKWRMRKCLEDELPAPRCWLSGHFYNNFAQCTQGAATHFIIKPLSSSSCQNVERLTVDQLYQKLTHLDTLMLIEEEIDIEEEFHLDGIVNLSEIAVACLSCYSLPILSARGQTRASIHLPSSHPMFSIAYSMAQRAITKLALKQGVFHMEVYRRGERLIFGEIGLRPPGVGVAESLLRFTGVNLWQAFVNSQLLRPINNIPSQDYHGYSGVIGVYPERLRASDLLRLPNVVAVSELEKTRHKMTRTGAHDFRYLAFASCQSLAEFHNLINQLSDSSPSTHVKREVQZ

SEQ ID NO: 1180 - protein, 459 aa, Photorhabdus luminescens
MKRKHLFLSALAISIGLSAISVPTISNAALPAAIAGQTLPSLAPMLEKVLPAVVSVHVSGTQVQQEQSIPEEFRFFFGPNLPMGRESTRPFQGLGSGVIIDAAKGYILTNNHVIENADKIRVQLNDGREYEAKLLGRDPQTDIALLQLKDAKNLTAITMADSDKLRVGDFAVAVGNPFGLGQTATSGIISALGRSGLNLEGLENFIQTDASINRGNSGGALVNLNGELIGINTAILAPGGGNIGIGFAIPSNMAKTLSEQLIAHGEVKRGILGIKGTEMNSDIAKAFNIDAQRGAFVSEVLPKSAAAKAGIKSGDILISVDGKKISSFAELKAKIGTTIPGKEIKIGLLRKGKPMEVSVTLENSEGQTTKAGNLTLALQGATLSNGEVKGTYGVKIDSVAQNSPAALSGLQKNDLIVGINNERIQNINELRKVIDSKPPVIALNILRGEESIYLLLRNZ

SEQ ID NO: 1181 - protein, 388 aa, Photorhabdus luminescens
MNNTVIVLGYREGIATALAHQGYQIIHIVKRVKPALNGTRYYIVKNLEDAQEVLRCVLNFSLHTVIGIVTGNEDGVFTAAVLRDMLQLPGPKDYRNTLYFRDKFLQKQKLAHLVPHAYCRYVTRDDDYSQLVVELGTPFIIKPANGMGSFATTAINSESEYETYFQQYEKNLSNVAYVAENKITADEFCVDGIWSEGKLHWFSISQYATPVMQCNEGKTLALQILSRRDFPDIYQQIDQFCPRILERLDAVNGVFHLEFFKNGEGVFFSECALRPAGAWVPEMIKLSYGVDLYSAHATLSLGLPYEHHLLEYPSQLFAVVLLRAFDGVSLTKQSFYQNFDLVELDWTEDTQMQSQGIYGRAGYAIITHKDHYTLVENVNKLIAFTGEZ

SEQ ID NO: 1182 - protein, 278 aa, Photorhabdus luminescens
SIAQKPITQREGAEDNMTQHKEKFDGLAKGYDRYRPRYPQALFREICHWLPKDKALSVVDIGAGTGIALEGLANLLGQQHHYTAIDISQDMIDIGKQKLPWVSWLHGSAEQHLANVGNPDLIIAAQSFQWMDRATVLNLVRNSLADNGIIAILQNNRDYRHSEFLNEYENLLEELSPNYSRHYRDFDYALELNTAFLHENALHITLNTRWSMLIPGEAFIGMSRSSTQVQRALAAYGELFIERLKMLVDKYQFEGNLAILYESQLFMVVKQVNSGNEZ

SEQ ID NO: 1183 - protein, 414 aa, Photorhabdus luminescens
MMIHEQPIVNQIIAEHSQKPRVMAKELITVDVDRIYVQDGNSPTIAKLFRQHNLKRVLRPEKIGFFFDHSVIVPDRLMAERVNEAMEFAKSIGVNIFARGEGISHLIALEEQWFQPGNIVIGADSHTCTGGAVQSLALGMGASDVLAAMLTGQTWLKVPETVSLSISGQPHPATRTKDVMLALLRHFGQSPFLYRSVELCGEWSQTLSLDSAASFASMGVELGAKCVFMPDGPGRPANMRPINPEVVDHHLTFLLSELTPHISLPHSPAQSVPLETLSGQKIDYVFIGSCTNSRLEDIAEVAAILDKHRVHQDVHCIVTPGSKRVYLEAMRRGYIEKIVSAGALVTPPGCGACVGTQGTIPAKGERVLSTMNRNFQGRMGNAEAEIYLSSPLVAANVALHGREPLITELEWHDZ

SEQ ID NO: 1184 - protein, 233 aa, Photorhabdus luminescens
GFDAMTIQQNIILEDTTLRDGEQAPGVAFSKETKVSIFNSLVDAGVKWIEAGIPAMKGDEVLALEEMLERKNEVNIIGWNRGVLEDIKYTFSLGFKAIHIGLPTSNIHLKHSVSKDRYWLLMTASDMIKFAKDKGAFVSISAEDVGRTEISFLQEYAATVEQAGADRLRLSDTIGILNSQQYAQRVSAVRQASAIDLQCHCHNDFGLAVANTLAGLEAGARYFHVCVNAMGEZ

SEQ ID NO: 1185 - protein, 444 aa, Photorhabdus luminescens
MESDQKQLVLGAYLTYGTGHHPAAWRHPDVNPQAAQDIGHYLNMARIAEKGLFDLIFLSDTPSVFQDDQRGYGSRVVIFEPMTLLSALAMVTEHIGLVATASTTYKHPFNIAREFASLDHISRGRAGWNLVTSSKSHAAKNFGFAQHPEHDERYHQAAESWDIVTGLWDSWDDDALPRDKQSGIFYDPSKCHELNFQGQYFSVKGPLNISHPPQGHPIIVQAGSSEPGKELAARTAELVFTAQPDMNLAKAFYSDLKSRLSQYERHYNNILIMPGLCFFIGSDEESAKKKFNDLQALIHPEFGLSMLSDLLGGIDLSGYDINQPLPDLPVSNGNQSRRAIIEKMARSESLTIKQLYEKIIIARGHLICIGSYQQVAEQMVQWLQEKACDGFNLMPPYMPGCLEEFVTHVVPELQKRGVFKMGYKSGTLREKLNIPKPPSKFHVZ

SEQ ID NO: 1186 - protein, 252 aa, Photorhabdus luminescens
NNKLRMRCGMSALTDSAVKGIPDNETLDINSRLQNIHEIKLLTKMPVIMDADTGGRVEHFVHYVRKMEQVGIDAVIIEDKTGNKRNSLFGTSVKQELADIKEFSNKIAKGKAAQQKSRLMIFARLESLIAGYGMEDALERANAYVKAGANGIMIHSCQNTSDEVIDFSQSFRKKYPKLPLICVPTTYSATYHHDLSEAGFNIIIYANHMLRAAYKAMEHVSHEILKYGRSAEVEKDCISIKKVINLIPYASZ

SEQ ID NO: 1187 - protein, 226 aa, Photorhabdus luminescens
RITPSPGTKKSHGKNCWIHSGRFLPIHLLRWRACQSAHYWGRTLQAMGYEIRLIPTQHVKALCKNQKNDANDALAICETACRPGIHFVLVKTLEQQDIKALCSARQLKVEQRTALVNQIRALPAEQGIVIPASIQQLRQALPDILEEGNHSLSFVLRRLLHSLQEDMRRFDARIHEIDKEIQTVSNQQSSYSHLLTIPGVVPLIAAAFISEVNAEQFSHGRQLSAZ

SEQ ID NO: 1188 - protein, 217 aa, Photorhabdus luminescens
MSVNPVMPRDETISASEIISRIGQLTRMLRDSLRELGLDKTIAQAAEAIPDARERLDYVVQMTAQAAERALNCVEAAQPRQNELESSAISLKKRWDEWFENPVEMPVARSLVIDTRNYLNTVPEHTAFTNAQLLEIMMAQDFQDLTGQVIKRMMDVIQEIEKQLVMVLMENMPADQVIKTKKEADSLLNGPQVNQNGVGVIANQAQVDDLLDSLGFZ

SEQ ID NO: 1189 - protein, 351 aa, Photorhabdus luminescens
MNKITVLCVDDSALMRQIMREIINSHSDMEVVACAPDPLVARDLIKKHNPQVLTLDVEMPRMDGIDFLEKLMRLRPMPVVMISSLTAKGSEITLRALELGAVDFITKPQLGIREGMLAYSELIAEKIRTAAQAKLSVPIITPVSSAPLSFKPLLSSEKLIAVGASTGGTEAIKNLLQPLPVTSPALLITQHMPPGFTRSFAERLNKLSQITVKEAENGERILPGHAYIAPGDRHMELCRNGADYQVLITDAPAVNRHRPSVDVLFRSVAKFAGKNAVGVLLTGMGSDGAAGLLEMKQAGAYTLAQDEASCVVFGMPRAAIQMGAVDEVMDILKMSKRMLAKISSGQAVRIZ

SEQ ID NO: 1190 - protein, 296 aa, Photorhabdus luminescens
MKSNLIASVTSLPSSPLHHMIQRYTMSDAHFERICQLIYQRAGIVLAAHKREMVYNRLIRRLRTLEIRDFGQYLFILENDLNSEEWQEFINALTTNLTAFFREAHHFPLLAKHASKKNGSYRVWSAAASTGEESYSIAMTLSDVLGERFHRAKIIASDIDTHVLEKARKGVYRLDELRHLTDQQRKRYFFKGIGSYEGYARVRPQLADMVTFQHLNLLDPNWPFEEKFDAIFCRNVMIYFDKKTQERILRHFVALLKPDGLLFAGHSENVTQISREFYLLGQTVYGVGRARRGHEZ

SEQ ID NO: 1191 - protein, 288 aa, Photorhabdus luminescens
SRHSRPGGSWKKSLKPALKERQRKTKVSTVDPESGFMHRTNKPRGFFYLDHRTVDGQVGIITDTYATPGNVHDSQPFIKRLTRQLERFALNPLAVGLDAGYFTAPVCYLTEQLGIIPIIGYRRPNKGPNTFQKKHFTYDQLQDCYVCPQGEKLIYTTTDRQGYRHYQAPAAICQCCPQRDACTHAKGGKTITRHIWEASKEQARENRLTEWGKKVYKRRKETIERSFADAKQHHGHRYAHFRGLQKVQIQCLLAATAQNIKKIALLVAMLCCFYLWRASQSMPAKRKZ

SEQ ID NO: 1192 - protein, 545 aa, Photorhabdus luminescens
  misc_feature (253)..(253): Xaa can be any naturally occurring amino acid
MLGRLRISTSLYLLLMMFCVMQIISSGLSLGIIHADQSYIEQIDLGTQKRDTLGLSWAALLQSRNTLNRIAVGKTLQQSEDHIGSMVANVKETLDRAEMHFAEFIALPKLNDEDGSSVLLASVETSYKEYINALRELSAFLESGNYDAFLDQPTEKYQQQLESDFNHYMQYIGEVITTAVQDGRLYYQISVAMFVGAILMVLVVAWAAHWWLKKNLLRPFANMRSHFQNVAEGKLNKEVSVFTQDEIGEVFLXLREMQRSLVNSITLVKENTNLMYNGIQEITQGNTDLSSRTEEQAASLEETAASMEQLTATVRQNAENARQASELAVSASKTASKGGELTVDVVETMDAIANSSQKISAIISVIDGIAFQTNILALNAAVEAARAGEQGRGFSVVAGEVRDLAQRSAEAAKEIKTLISESVQRVSQGSELVSHAGKTMNELVVSVNQVTDLMAEIAAASDEQSRGIHQVAQAVTQMDQVTQQNAALVEQSAAAAAALEDQADILVQIVAQFELPNNSENKLENELSLTLRSADSEGAVNQTHZ

SEQ ID NO: 1193 - protein, 565 aa, Photorhabdus luminescens
  misc_feature (6)..(6): Xaa can be any naturally occurring amino acid
MFNRMXIMTRLMAVIILFGALQFISGGLFFHELKSNKENLEILDKMREQQTFLNDTWVNLLQARNNLNRAGIRYMMKKDEGVDNYYTLEQLLTDARSNLSIAEQRFEQYEQTAKLPIHESESLNRLKKAYDVYISALHELIVLLEHDRAVEFFNQPTGKYQSAFEEEYNFYLTQNDHLYSDVVFDASISYRNAVIMLGIIMLILVSAMIFSWVSIKHSLLNPLNKLLENIKALSTGDLTQNVTVSGRNEMSTLAVGLKHMQKEFITTVSSVRQSSESIYNGTSEIAAGNNDLSSRTEEQVASLEETAASMEQLTATVRQNAENARQASNLADSASEVARQGGKVVANVVQTMREIAGSSQKISDITSVIDAIAFQTNILALNAAVEAARAGEHGRGFAVVAGEVRNLAQRSAEAAKEIKALIEDSVSRADTGSVLVESAGETMNNIVSSVTRVTDIMGEIASASDEQSRGITQVGLAISEMDRVTQQNAALVEQSAAAAAALEDQAAGLKKLVSLFQLPNLDDKSQSEMKIEHLPVAKTPPAKSNPLVLKKANNVEEQANWETFZ

SEQ ID NO: 1194 - protein, 684 aa, Photorhabdus luminescens
MDITAFYQTFFDEADELLEDMEQHLLQLDPDAPDQEQLNAIFRSAHSIKGGAATFGFIKLQQTTHVLENLLDSARRDEMSLTTDIINLFLEAKDIMQQQLDAYKSSQEPDESAFTYICETLRQLALEVQRENEGGVESATDAVMPEVPESEPELKSEPVATENQQGRVRVHLSGLKEREVSLMLDELSNLGEVYDAEQTRDSVEASLVTSATEDDITAVLCFVIEPEQITFLPVAEPKDKVKNKDTDTAKAVKTTAPEKGSTPPAGRPAPIPPAGSPRQRAESSSIRVAVEKVDQLINLVGELVITQSMLAQHCNALEPTLHGDLLNCMVQLQRNSRDLQESVMSIRMMPMEYVFSRYPRLVRDLASKLNKKVDLTLVGSSTELDKSLIERIIDPLTHLVRNSLDHGIEEPEARLAVGKPEMGNLTLSAEHQGGNICIEVVDDGAGLNREKILAKAISQGLSVSENMSNEEVAMLIFAPGFSTAEVVTDVSGRGVGMDVVKRNIQEMGGQIQINFQAGKGTVTRILLPLTLAILDGMSVKVNDEVFILPLSAVVSSLQPQEEDIYPLAGDEKLLHVRGEYLPLIKLYRVFDIPDAKTDPTKGIIVIVQSAGRRYALLVDQLVGQHQVVVKNIESNYRKVPGISAATIMGDGSVALIIDISALQQLNHDQLALNKAELLAKNKHZ

SEQ ID NO: 1195 - protein, 334 aa, Photorhabdus luminescens
MKTRNVSVIRVKRRKRNGIKHHGGSWKIAYADFMTAMMAFFLVMWLLAISSPQELTRIAEYFRTPLQVAINKGERSSDSSNPIPGGGEDVLHQEGDILRQVEVVEANDEARKLNRLREQLDQLIITDPRLKALRPHLLIDMMDEGLRIQIIDRENRPMFMVGSAKVESYMSDILRAIAPILNDIPNKISLSGHTDDLKYANGERGYSNWELSADRANASRRELLIGGLDEVKILRVVGMASTVRLKQEDASAPVNRRISILVLNKQAEERIEQQNTGSDSLIINDSKEIHEVIGKDSAESRPTQQSNEITVLAQPAPASQSAEPNRVPTKVTKZ

SEQ ID NO: 1196 - protein, 367 aa, Photorhabdus luminescens
KNVNFPQSLPILIHNCWMDLLSTQCEFKWENYSYRLQILLFPPVTCIEITTILDSNCSTSHPLTSLAKGYRVLVLLGYIVVFGAVIGGYLIVGGHLGALYQPAEFLIITGAGIGAFIVGNNGKAIKATLRVLPKVMRRSKYNKVMYMDLMALLFRLLAKSRMHGVLALERDIEHPQQSDIFTQYPRLLKDKHLMDFITDYMRLIVSGNMNPHEIEALMDEEIETYEQESEIPATSLMMVGDSLPAFGIVAAVMGVVNALGSADRPAGELGVLIAHAMVGTFLGILLAYGFISPLATLLRQRSGEHLKMMQCIKVTLLSSLNGYAPQIAVEFGRKTLYLTDRPSFTELEEHVRRVKAPVQQETEEQVZ

SEQ ID NO: 1197 - protein, 237 aa, Photorhabdus luminescens
MENVMLITPFVFHLLSAMCFGALIGAERQWRQRMAGLRTNALVATGAAVFILSSITTSPDSAGRIAAQVVSGIGFLGAGVIMREGMNIRGLNTAATLWCSAGIGVLCGLGQYWLAAIATAIILCANILLREAAQRINLQPRQQAIDQVQCYKIHVVCDSDDEILVRTLVLQALNGVAVRLKSLSFADKVQPGKFEVCVEVLATLDEQKEIEAIVCRISLEKSVSSINWKMASELPIZ

SEQ ID NO: 1198 - protein, 362 aa, Photorhabdus luminescens
GEVMKFLINTDVTNWVSHKDWFNVPLRLFVVLQDDDGSASLENYKSKIVVNGLNEGEYEIVNNNNIFDPISRASEILVKIKTDQRVNATIGFDAEVTDASGGVVAKAALSRFKLKSVGLAAPVYPAHYDNVISGDDIKAGVRVLFTDSNILDKYELKFVFDNDNVEVVPGVQNSGDIRSLPVKNDLLTEGKHDSLYYTISESGTARFSAIQRVLVELDKDSATVQVRRDLEVPYIEEYDENRGRPIGESIIDYDINILVNDVKLKDKELKKGTVHIRGYSADNRDTGELVLKIDSLQGSEDNIFRLAVIKPEENADGQPGGVDFFNYIGNGQVKIHYEISFVGEVNVLHKSKEKVYKVVLDZ

SEQ ID NO: 1199 - protein, 368 aa, Photorhabdus luminescens
VFTLLFHLLMQDNAVMRPEGFLLRVLTLQAEVKELKAKRDKTRCFAMVAKAWFATKTKWSKDYGDSVWKRLETYVFPAIGDKDVAELDTGDLLVPVKKVEALGYLEVAMRIQQYITAILRHAVQQKLILHNPAYDMEGAVQKPQTEHRPALELEEIPQLLKKIAEYRGRRLTILAIQLNLMIFIRSSELRFARWSEIDFKSKLWVIPEQREAIENVKHSTRGAKMKRKHFVPLCKQAMRILKEIRQLTYKEGHDDGLIFTGCYDSFKPMSENTINKALRNMGYDTKQDICGHGFRTLACSALIESGLWSEDAVELQMSHKESNSVRAAYTHKAKHLEQRRLMLQWWADFLDANHNGMVRPFEFTQRRZ

SEQ ID NO: 1200 - protein, 582 aa, Photorhabdus luminescens
GTRKMRSLKFQRLVLISDSKRLANQFSFQKRLNLITGKDNSIGKSTLAKSLLWSLGCDPVFDEEWKSNDIKSILYFTLNNKEYFSCRGSHSIILGAIGDEAQRYINITGDFSKGFSDLVNFKMKLPNRGDGNLETPPPAYYFLPFYIDQIKSWSSPWNSFENLGQYSNWKGPLIKYFTGYLKPEHFDIEENIYEYSEIKKESAHKIEKFQSAVEVIVDNTVDSPITLDNNDFIKIQNEIKNELYDLIDYQTRLYDAQATITSNIYDLESQYALAITSANELEADYKFAVESIPTDYLECPLCGTLHDNSLPNRALLLSEKDSLLNEANSIASKIVELKSSLNSLNEDAQFITNEIERINNKYITDDDAVKKGLIAQVIDTLSTENVSKNIQIKIDNEDLNISKANSSIKELKKDQKKLLSTKEKEELNSSFMSKLLANIEALGSTGINLSKVKSPTDYKQLLGGGAAEAARGLLAYQLSVLQQIHGAKTCVVPPFVIDTPNQQEQAGYRYETVIKELMRSVPQDYQIILCAMENDALNEFKHDANVIVLNSNRLLTASQYDSLRSEYKSIQAIVTDQSDKEZ

SEQ ID NO: 1201 - protein, 368 aa, Photorhabdus luminescens
VRVGFSMERNVLGHAQREISGATTFGKYDFQYHWALCRIIEKHKSNSDYALLIEYHEDVVIADSLYGSSAKFEFFQVKNTGKPFTSDALTKREQGAEGAKSSILGKLLSSCIGTDYEARITEIGLVSSSGFSFEQRDKKLKLDIITSGDLSVDCLSGLTEKLKDELGIALLPENLKFIVPKIKLENQEEFVIGRFAELVNEIFPNSHCNAVNIYRAIIDEIHRKGQNTYDFTVWEKMVEDKSLTSHKVKDVIAVNTTSPKFEDFEKDFEYLAKNDMKWNTLTYRKINKKIKQLFLRRIGHLSAFDMNIMRIVQQALSSVPEEDFTETRDYIESVIVKAQELNIEDQVPEHDDILCEIVYSFLKVMHEZ

SEQ ID NO: 1202 - protein, 353 aa, Photorhabdus luminescens
MIAKLLRSAFLGLLIAVILLMTIPSLRPSGLTSAITNNSNDEVPFSFNKGVRRAAPAVVNVYSSNMGSFSHQGRENHTLGSGVIMSDKGYILTNKHVINNAGQIIVALQDGHFYEALVIGSDSLTDLAVLKIDAENLPVITINPNRVAHVGDVVLAIGNPYNLGQTITQGIISATGRVGLSPTRRQNFLQTDASINQGNSGGALINTLGELVGINTLSFDKSENGETPEGLGFAIPTELATKIMQKLIRDGRVIRGFIGITSQELPHIRSSNGSINQIQGLRVFQVTTNGPAQKVGIKVGDIITSVNNKPAISAVETMDQVAEIRPGSVVPVTLLRNGKILSLQVTIEEFESZ

SEQ ID NO: 1203 - protein, 541 aa, Photorhabdus luminescens
SRHVSHSKEMEFVLIIEYAVEKETKQIMHIDDVPNGAKCNCICKSCNDELIARNGGKLKKHHFAHRNLIENRACRMTQLHLAMQHFFLRLDVLTIPQLTFAYKNHTLKTPLIKTKILSATLEHRIGNYVSDVCLNTDIGLYIVEICVTHKCEPEKVRYFKNNKINSVELVFEYSEDIEIEEWHQRIKNNQVPNEWFYYSESIKAIECHELAVEKEINERRSRRLKNTINSINKTMKNKTVFLPSIHDSISYEESNEVFTENFCLYAKRNRTVDKLSLIQKTDGGFIVRGDILHKGKEFHIWIIYLLSYFNLNLMDEFDGSVIIRFYPEDSNKPQWRWLKHPSIEKEKSRVRSQFIKTCKENIHIKSLTIYMSNRLKNRSYEYLDMTDELFNRDYNTWSKWLISNDLFTPSIQRKWPKLPKMLKEMKESPSLWMFQRWSILVISIMLNIIDNVSTGSSITVYNIFDEMSDILPLDPEFISLEAEAIANKKTIQLPHRHLIFRRHIILEVLRPLIERSILTVKGDIVIKETPLLQLFLQSIVZ

SEQ ID NO: 1204 - protein, 347 aa, Photorhabdus luminescens
FNCQSGKRSLPDKTHEKDNKVLNKIKQQSILGLKNIEKIITLIIFMCTFSGAWFLFSYARTHGVKFIDLIQSNLLISTGALSFFIILFIVGCFLISFNLSPAIARCLYYDILVKEKIKGIKRRKLIYLLYFTSCGVASSFAFYHFYVGVSLVVIIVLTLHFLAITKPFHYKKIAVTLKLFLYTVLLLAISIAMFGFLSITLNFDIETNFSFISIIQALSIFVIIVTLAIIGLADIHQRNRDQKNRIWCYVFFSLLIVFYIATAFSTGVSEKIANMIGLGYVNQCYHEKDLVKYSIPERLVIIQKDKSKIKLFIIADVDGKIYISKDKNHRAEFMFIAKELSEVSCDZ

SEQ ID NO: 1205 - protein, 510 aa, Photorhabdus luminescens
GCLYCMAIFHLDFKIVKRSEGKSSVAKAAYHARCRITDERTGDTYDYSRRTDLCGHFILAPVNAPQHIVKDSTALWNEVERVERQNNGQTARYFDVAIPTELNNDDKKKLVLEYCQKNFVDKSMIADIAFHDLDSDNPHAHVMLTLKTIGPEGFGKKERSWNDRKMSVLWRESWASMANSFLAAAGSSERIDHRSLQAQHEEALEKAAVALDNEEKALWLAKSAETNRPSMKRIHSAKWRSKAAQEQRAAEQAVRDAAKQEAVEVYKTFSELDLEIVVDVRSFTVAVLAEPEEIVLPESRTCSLNAEELKPVLVAPAPHTRARGVKSYRDKTKISKVVAAKKPYVSISDSGTNTLLKTTSSKTPKRPSRIAPEHVKRIQATPRQDNIFKRFTALLVDFIRDKFIWAKTNKTKVDIISEEHDKRIAENYVFDEVLGRRVSRSEYEKQAKFNHDDYKPTPDEISRFPSRINSVKSVSDYDNGTSPSLPLELIKGVNFLKLKPSSSNIIKNKZ

SEQ ID NO: 1206 - protein, 626 aa, Photorhabdus luminescens
KMELNKHIIDNLNYYLNTSAPEYAFMITGGWGAGKTHFIESFIKEYNENAVDNQSGNKIIKISLFGFKTTSSIDEMIFQSLHPLLGHRYTKLAGNILKGALKLGCKIDINGDSKPDIDINASLDKIKFSDIFSTNTDSGEIIIALDDLERTDIPLKEILGYVNYLVEISKVKVILIANEKILYEKDKSHEDKTKDVYSKFKEKVIGKTFQIKHNIDRVLKGFLDQSKCESLKRHRDVIKNIYIRSEDTNLRKLKQSILDFGYIANYIDEEQLKNEEYSSLLIRVFFALSLEMKSGELSEEKLRHNEPFQCEKANSDGSKNVFHKYDISYRNLYTGDLWADILFKGDASNLKSATDELVYFKQPKNNEHPLWFKLWNFNTLNEEQFISLTNQLLLEFDSLQEEEHQVYLHKLALIIYFSKNALISKEIDEINDTVYKYIKTYKDHWAILDNHSIEDIVFGNNTGYSYYNDSDEDFRKLFNLLKSERKSISDKLKYQAEIIRANEIFTYLAQGNKDELINILYTENQFKPFFNKLNAKDLVKCLLQSSNHITSYFTYIIKERYTSGDTLNGLKACNYLKVEEGFWIELQNKISKEIPRMPPLKKHFMEQLDTTIKEIITILSSVPNVZ

SEQ ID NO: 1207 - protein, 323 aa, Photorhabdus luminescens; identical to SEQ ID NO: 421

SEQ ID NO: 1208 - protein, 293 aa, Photorhabdus luminescens
NMNVIGRTRTMTTQKEMDDIRTALSWFDVRRYDALKDLTLEQIYAELERRMFAYKTRQQWDTAGKNNQMQAIYHEATIRCGDVILESKWISDNQRLSHSYAVRPMTRGALFNYGRAMYRLETSEQTDPVAVSSDYISEYLKQGGMNPTNKMLIEIDLEQASSDDLAEHLKVLIALWQKHLKTAKPPKRSFRFGHKTFQRILDYKVIPLMDLISWEQTYNEGKNIPFNILADILHGTGGVRSRDHIKDTDYDYAKSYLDKDEYFKVLNDFYIKNILLKDWKITEVIKINDKAPZ

SEQ ID NO: 1209 - protein, 295 aa, Photorhabdus luminescens
MDNLVEIFCDVDDFCRFFIPQWEQFCLDSGHRLRRRQGHMYPSEIMTILILFHMSHYRDFKHFYLEHIWKYHHKDFPTLLSYPRFVSVAPSVLVPLCSYLTQLKGKPTGIAFIDSTRLSVCHNIRIPRHKVFAGIAKRGKNSMGWFYGFKLHLVVNHQGEILALKVTPGNVDDREPVRELSKELTGSLYGDKGYLSQELADDLAKTDVTFITKKRRNMKASMQAEWDKIMLKKRFIIETINGQLKTLSQIEHSRHRSIKGFLLCVLGGLIAYCLKLKKPSLKVFYSEDDFSMTDZ

SEQ ID NO: 1210 - protein, 351 aa, Photorhabdus luminescens
MTTESYTIKIRRPDDWHIHFRDGEMLRTVVPYTSHYFGRAIVMPNLLTPITEVVSAKAYRGRILAAIPEGDNFQPLMTCYLTDTTESSQIEIGYKEGIFTACKLYPANATTNSSHGVSDIKNIYPLLAVMEKLGMPLLVHGEVTASHIDIFDREARFIEQVMEPLRNQFPALKVVFEHITTKEAAQYVLEGNNNLAATLTPQHLMFNRNHMLVGGIRPHLYCLPVLKRNVHQEALRAAVASGCDRFFLGTDSAPHAQQKKESSCGCAGVFNAPSALPAYATVFEEMNALPHFEAFCSLNGPKFYGLPVNEGFIELTRKPSTVIEHIDCNNEKLIPFLAGEDARWDVKVTDZ

SEQ ID NO: 1211 - protein, 221 aa, Photorhabdus luminescens
LLIDGAFIVSLAKQEQGCAIMKILIVEECYYTRSGIREFLKKNDNVEDLEIVDSPSINEAINIVTHFAPDIVLANLTHYCHHASYCSDLQKFITLTDNTRIYIYLNSAYPYCDNYITLKDNAVILAKRNLTYLLNKISKTTLQEIQRHRATIDQYCSIFSPQEHKVIDYWMKEIPNYQISQKLKISNSTVYSHKRHITEKINVRNRIELCFIYNVFKYLYZ

SEQ ID NO: 1212 - protein, 353 aa, Photorhabdus luminescens
MPVLHNRISNKELKARMLAETQPRTTISFYKYFNILNPLDFRNSLYQQFTDLSVFGRVYIAKEGINAQISLPTHNLEAFKALLYSVDPALDNLRLNIALDDDGKSFWVLRMKVRDRVVADGIDDETFDPSKTGEYLKAEQVNQMLDNPDTLFVDMRNHYEYEVGHFENAIEVPSDTFREQLPMVAEMLQDNKDKNIVMYCTGGIRCEKASAYMLHNGFKNVYHVEGGIIEYARKAREQGLPVRFVGKNFVFDERMGERISDDVIAHCHQCGVSCDSHTNCKNEGCHLLFIQCPECATKFEGCCSEMCREEVRLPETEQRARRAGRENGAKIFNKSRHRLQDGLNSTSLQSVEZ

SEQ ID NO: 1213 - protein, 482 aa, Photorhabdus luminescens
CMQLTFIGHQSWLISHKNTNILVDPVLGPTMGNSRYIKFEIYPPRDIDISNMPSIDAVFISHEHVDHFDIDTLSIFPKGTDIYISLLMPSCIKTALEHLGHNVILHSFKKEIRVKDIKIKSFSAPYETILWESRVTQYLVSDINEEKYNGFIAVDAIISEEYIEGIGDQYPNPQWIIVANNSQCTPKQAQGAYTNLLPLESSRLSGKNYRGVKLLNSILIDYLDGIPEETKILICGNGFINPRENYGPFLFSDNKVLSEIANQLSIKENVCGPYPGEVIEVIDGNLSISLSSWIELNKNKHLDLKNKLIKYMDEESGVELSPFIPVLGELSETEEKNGLATIENELTDMARTLAIDPLVGRLAISMNNYINGELSDNRILIKFKDKDFGYVYSVSSCQFTKTYTHENYLSEYPFGVEIYIQDFVGLCLGKIQIWDLAGTSIRSWYLGGIYENIIVFFYKYFGEQRRPDLALKVYEEYISQKZ

SEQ ID NO: 1214 - protein, 314 aa, Photorhabdus luminescens
MIQAPSFQRSLLHPRYWPTWFGISLLYLLVLLPYPIIYRIGTRLGRFSMHFLKKRAKVAERNLELCFPDMPQEERNALLIKNFESVGMGIFETGMAWFWPDWRIERWFKVTGQENIQKIQTTGQGIIVIGIHFLTLELGARILGLLNPGIGVYRPNDNPVMDWLQTWGRLRSNKYMLDRKDVKGMIRCLKNGEIVWYAPDHDYGPRKSVFAPLFAVEHAATTTGTSILVRLADPAMIPFTPRRLPDGKGYELIIQPTVAGFPKDDEVKAAAFMNRVVEQEILQAPDQYMWLHRRFKTRPKGMPSLYGQADKIHZ

SEQ ID NO: 1215 - protein, 513 aa, Photorhabdus luminescens
MQSSINNTKTRTFFGHPYPLSSLFFTEMWERFSYYGIRPLLILFMAATIYDGGMGIPREQAAAIVGIFAGSVYLTALPGGWLADNWLGQRQAVWYGSIIIALGHLSIALSAFFSHYLFFIGLLLIVLGTGLFKTCVTVMVGTLYKKDDPRRDGGFSLFYMGINIGSFIAPLTTGLLVRDYGWHWGFGIGGLGMLVALLIFRFYTIPLMRQYDKEGGLDSSWDHPTVKRENVGKWVFTTVIAIIAIIALLILGVIPFNPVAVASAMVYVISSCVTLYFAYLFLFAGLSSSDRSRLLVCFILLVSAAFFWSAYEQTPTSFNLFANDYTNRIVMGFEIPTVWFQSINALFIILLAPVFSWFWPRLAKNNINPSSISKFIIGILFAAGGFGVMILAAQNVLATGETVSPFWLISSSLFLTLGELCLSPIGLATMTILAPSRMRGQVMGLWFCASALGNLAAGLIGGHVRADQLDNLPDLFSRVSLALVICAAVLMVLIVPIRRLLNSADKSEAKAQZ

SEQ ID NO: 1216 - protein, 236 aa, Photorhabdus luminescens
MAVQLPSLHLRRYSAETISHSHQGLWQFVFGYNGQLELNVEGQQRTVSFGNVVMIPPDAKHSFFASGENQQLVLELPSALFNPLHSDAFWQPLPDSVLALIKWLHDYPQPPANHADAARLLLAQLPQVGSSSALIVKLHRGLVGRLHEKVTVMDMANICAVSASTLHRKLFNATGMSPMAYLKTCRMEFAYNLLAYSDRTLADIAFLSGYASQSAFTFAFSQHYGCTPARLRKGKZ

SEQ ID NO: 1217 - protein, 297 aa, Photorhabdus luminescens
FSLYGKTITIAGDKFYGGFMSVASNLNEFQEQVRSRYSGLSKRLQQVARYVLDNTNSVAFDTVAVIAREADVPPSTLIRFANAFDFSGFNEMKQLFRMHMVEETASYADRARLFRELDGEQEPPEDPQHILQEFARSNVQAMQQLAARTAPEDLRNAVDLLAQAKNIYIIGLRRSFSVAAYLSYALNHLECRPLLVDGLGGMFREQINLIGEEDVVVSISFTPYAEETLMVSERAAKAGAKQIVITDSQISPLASFSDVCFVVKEAQVEAFRSQSATLCLVQSLAVSLAYRQGNTIZ

SEQ ID NO: 1218 - protein, 504 aa, Photorhabdus luminescens
MEQVQNYVNGQLIPSYSTRFSPVFNPATGKQIRQVALSTAHEVEQAIEIAHQAYREWSKISPLKRARVMFQFKTLLEANIDKLARLISEEHGKIYSDAIGELTRGLEVVEFACGIPHLQKGEHSANTGTGVDSHSLMQPLGVCVGITPFNFPAMVPMWMFPIALATGNTFVLKPSEKDPSLALELASLLKQSGLPNGVFNVINGDKEAVDILLTDPHVQAVSFVGSTPVAEYIYTTASAHGKRCQALGGAKNHCILMPDADLDMASSAIAGAAFGAAGERCMALSVVLAIGDETADALIEKLRQQINKISVGPGIVATTENDMGPVISAQHQAKICDYIDSGEKQGASLLIDGRQLKVPGYENGYFIGPTLFDNVTPEMKIYQEEIFGPVLSIVRVPDYATALTLINCHQYGNGTAIFTRDGETARQFSEDVQAGMVGINIPIPVPMAFHSFGGWKRSIFGPLNVHGNDGVRFYTRMKTVTSRWPASIRLEHHSSNFVMPTMEZ

SEQ ID NO: 1219 - protein, 645 aa, Photorhabdus luminescens
MNKSTMTAAQALVKFLNQQYVEADGEQYPFIRGIFTIFGHGNVVGLGQALEQDPGHLTVYQGCNEQGMAHIATGFAKQKKRKQIFAVTSSVGPGSANMVTAAATATANRIPLLLLPGDLFACRQPDPVLQQVEQFHDHTISTNDCFRPVSRYWDRISRPEQLMSAMINAMRVLTDPADTGAVTICLPQDVQGEIWDFPDYFFQKRIHRIERRPASVAMINDAVALINRKKKPLLICGGGVRYSEAHNAFRQFAEHFNIPFAETQAGKSTVIADHPLNCGGLGTTGCLAANLIAKEADLIIGVGTRFTDFTTASKSLFQHPEVEFLTINVAEFDACKLDAIPVVSDAQAGLNAIAEQLIKLNYRSGYQDEIHQARETWRKELNRLFNIEYQADFTPEIPGHLDDKLEEYSQTLQTRLTQTSVLGLLDKYLEPEAIIVGASGSLPGDLQRLWQPKQPDTYHLEYGYSCMGYEIAAAIGAKLACPNQPVYAIVGDGAYMMLHSELQTAVQENIKITVLLFDNAGFGCINNLQMSQGMGSFGTENRYRNPESGNMDGKLIKVDFAKNAESYGCKSYRVHDEQQLLCALQEAQKQTVPVLIDIKVLPKTMTHDYESCWRVGTAQVAENPAIESAAKKIKEMVATKVRQYZ

SEQ ID NO: 1220 - protein, 329 aa, Photorhabdus luminescens
MFNIALFGAGRIGQVHAANISHHKETSLYSVVDPHQKSAELLVQQYQTKRQTIEQAMSDPQIDGVLIASATDTHADLIELAAKHHKKIFCEKPVHLDIERVRQCLATIKQYQVPLFVGFNRRYDPQFRRVKTLFDAGAIGKAESLLIISRDPSPPSAEYVKGSGGMFRDMTIHDFDMARFIIGEEPCSIYAQGSNLVDPAIGQAGDIDTAFIVMKFPSGAMATITNSRRSGYGYDQRIELHGEKGLLSAGNIKENSVELWENSGCLTAKPEHFFLQRYREAYIAEWDHFVDVMAGRATPECNGTDGEQALYLADKALESLHSGKEIRLZ

SEQ ID NO: 1221 - protein, 572 aa, Photorhabdus luminescens
LEDSMLAFLSFIGFTLLVAGFAYYKTHNARLTESTEGYFLGGRSLTGVYIGSSMLLMNLSTEHLIGLNGLAFRTGFIVMAWEVIAAVTIVLFAIYFLPKYLKLGISTIPEYLERRFDKNTLLITSILFLAMYIISLLPIVLYTGAIALESLFQVSNVFRIDKTTALWIMVWGVGGLGAVYAIFGGIKAIAAADTINGIGLIVGGLMVTIFALLYVGNGNAWQGLVEVYQSNPDKFNSIGSEDSLVPFSTLFTGLIVSNMFFWCTNQSIVQKALGAKNLAEGQKGVMLCALLKLIMPSIIILPGIIAFHIFKGQIDNPDNAYPELVHLILPEILVGFFAAVVVGAVFSTFSGGLNSSVTLFIVNIYKPRINQNATETQTVAMSKYLGIGLALITMIVAPLVANAPDGLFYLIQQLQGIFNAPILSVVLVGLMTKRVPPIAAKLGLLFGMSAYIICNFILKIDLHFFHLVGILFVLNVIFMLAIGYFFPAKPFADVYTEQVNITPWSMVKPVAWLITLCSISIYVFLAHNVPKVIMIIYYLSAALILSYALYQIGKTLFSKLAINSTPKRTGRZ

SEQ ID NO: 1222 - protein, 378 aa, Photorhabdus luminescens
MEEIRIGLIGTGYIGRTHAIAYAQAPTVFPLAGKLVCEMVAEVSAELAAKRSEQLGFRRFTDNWRKLVSDPDIHVVDICSPNFLHKEMALEAIKHGKHVYCEKPLALNSHDAKLMVEAAKKARVKTLVGFNYMKNPTAQLAKEIISNGEIGEVIHFYGTHNEDYMADPFTPIHWHCFKDKAGLGALGDLAAHIINMAQYLVGDIQTVCADMTTVIKQRPEKTGSSIMVAVENEDQAHAMVRFNSGARGIIETSRIACGRKMGLSYTITGTKGALSFTQERMAELKLYRHDEPANRQGFKTILIGPEHPDYAPFCLGAGHGIGFNDQKTVEIRDLINGIASNKAIWPDFTEGWKVSRILDAIAHSYQEQRWVNVTEINZ

SEQ ID NO: 1223 - protein, 647 aa, Photorhabdus luminescens
QRLMLYLIRNCSMEQQKKFDVICMGRIAVDLYGQQIGARLEDMGSFAKYLGGSSGNVAYGTARQGLKSSMLARVGDEHMGRFLREELQSVGCDTSHLTTDKERLTALVLLGIKDKTTFPLIFYRDNCADMAITGDDFSEEYIASARCLAITGTHLSHPNTRDAVLTALNYARRNRVKTVMDIDYRPVLWGLTSLGDGETRYITSEQVTAQLQEVLSLFDLIVGTEEEFHIAGGSTDTIEALRNIRKLTSAALVCKRGSLGCSIFTAEIPNDLNDSITIQGVSVDVLNVLGAGDAFMSGLLRGYLNNEGWEKACTYANACGALVVSRHGCAPAMPDKTELDNYLSRANQILRPDLDETLNHLHRISARKNQWDELCVMAFDHRIQFIELARQANASIKRISSLKQLLLRASREVATEAGLQGKIGLLCDSTFGQDVLNEITGQGWWIGRPIELPGSRPLCLEHGNIGSQLIDWPLEHIVKCLVFFHPEDAHPLRLEQEKKIREIYAACCKSGHELLLEVILPAEMKHSDEFYIRALRRFYNLGVKPDWWKLPPLSSESWDNINYLIEQRDPYCRGVVILGLDAPQEELEMGFNAAAGKSIVKGFAVGRTLFGQPSLKWLKNEIDDNRLIQKIKTNYHNLISLWRQRGZ

SEQ ID NO: 1224 - protein, 833 aa, Photorhabdus luminescens
QMNTSAIKNDLRKQYSTFILFPIETVINLLSSFFSFSILIYIITLPLTNSLEESSIGLIIFLIAILRPALSVINNISLFLINKKQAYILSTFNDCFTSKKDAQQNEHDIVNYSSYDTSVVLIISKVICFIYLSILMVINVEGGTVGLLSLCSILIPLSFFLFKKRAHLSKKLAKIRKLRYGFIGDNFEALTAILLTGYQGGKFLSLNRIIDTEEKVKRIDSLWRAVDIASNAFLKVIPVLFIILIGKEIDNSEKLLILLYSLILVGEYLGLIRLLTPFYDGYLAKLSIISRYKNYQYKPDEYYNLDGTQGFIEKTILGNIFLSKKLINRRILNKLCYEIFQINKYINLSSNINELSRGQLNLIFAVRNVYMAIINNYKGHIYFDVNRTGWDSKLLLDLEDVIYKLKIEYQIDIILLHLHKIKDIELETKNETTKSTLDSKVRKMKDHTKIARFLSIFSYNSLIGIILLLIASFSLFELGRITYNEYDSETYRIISISLLGLISFVSGSYLIEFKIRKKARKDIYRYIKNNSSEEGFNLFKHEYNVIINRFTMYAKDVFWFGSIFSGTLFLFFDSDNFIIILGAMFIFLASIYLLYPTYKDNRNKHYKELHSLSIYFSYPKKLPRCNLVNRFCQDTILSGVHRLYTIASQRYIINSVASILGFLISSLIIFYSLYPNFESDNITAAINLDSRIVIFYFAIFGYLSEIVSIQRITKHVNFYHKRTNLSSNLSILEQRLESDRVIQLVGNNGSGKTFFLKRLSEIKGYIYIDHYFDHYLANDKFLDYLNKSNSDVIIFDEFDCRKLIDKIDKNKKIIIVSHREVIGSKLNISEVVZ

SEQ ID NO: 1225 - protein, 297 aa, Photorhabdus luminescens
MAVQLGINPLTWTNDDLPTLGADTPLETCLTEGRQAGFTGFELGNKFPRQANVLGPILAAHNLVLVSGWYSGELLTRSVAEEIKAVQSHLTLLRELGANVMVFAEVTNCIHGDQNKPVHLRPQFPANRWQEYGEKLTEFARYTQEQGVQIAYHHHMGTVIETEKDVDHLMENTGDEVGLLLDTGHLTFAGADPLAVAERWAKRINHVHCKDIRPDVLNDIKNRKTSFLDAVLNGVFTVPGDGCVDYPAIFQVLKKQNYKGWLVVEAEQDPAVAHPLTYATMGYNNLRKFARDTGLFZ

SEQ ID NO: 1226 - protein, 276 aa, Photorhabdus luminescens
MSKLLSKYHAPDQNKRTQHITPESANWKYVHFDVYELASGEKITLPASENETCLVLVAGKATVTTPHQRFEHIGDRMQPFERKKPYAVYITAGESVEIIADTALELAVCQAPGKGSYPTRLITPQDIDAEQRGNGYNRRYVHNILPDNKPADSLLVVEVFTDEGCTSSYPSHKHDTDNAPQETYLEETYYHRLNPSQGFCMQRVYTDDRSLDESMAIYNKDVVMVPKGYHPVATLAGYDNYYLNVMAGPTRKWLFTWEKDHQWVNSGEYAQKHNNZ

SEQ ID NO: 1227 - protein, 353 aa, Photorhabdus luminescens
ESKNNRLINLKKDIYMSKSTIKTASVLAFERKLSNSDALMFAGNWKQIDGEWKPIAIQEKAVRGTISNRLKNALTSDPAKLDAEIQKANLQRVDVAALPFDADTLKVSFTLRVLGNLSTPSVCNDQDYQAELANVINGYIAEHGFKTLAARYAENLANGRFLWRNRVGAEEIKVRVSGKSGKWWEFDCEDFSLREFGKVEGKLAELAAEIEEGLAGDRSTLFNVEAFVRLGHGQEIFPSQELVLDSNSKKSKVLYQVNEIAALHSQKVGNALRTIDTWYPDATELGLGPIAVEPYGSVTSRGKAYRQPKAKMDFYTLLDNWVVKGKAPEEVEQQHYVIATLIRGGVFGEKGEZ

SEQ ID NO: 1228 - protein, 329 aa, Photorhabdus luminescens
ITGGYAMSHLIILRKIKVENANAITGITYGFPAITHFLGFTHSISRKLQKSYNLKLENCGVICHNHQLHAYRSDPIKDKVFALTRNPLTKEAKTATINEEGRMHMTVSLLIECSGEIAGDTEANELEQYLLEICPTQRLAGGTITEIAKVDVIAFPQEGQDTRKLMRRLLPGFALLDRSELLAKHYEELKQDNPQAEMIDAWLDFSAIKMRAIPKQDDKQPEIGDPAYWEYVPKPASGYLVPLMTGYQAISPLYPAGKVDKTRDPNAPFCFVEAIYGVGEWKSPHRIDDIRQLLWCYDYQEGEGVYRCCNQQTVSRQSKPNKKVRIIDZ

SEQ ID NO: 1229 - protein, 455 aa, Photorhabdus luminescens
EPMNENGLSRFIVDYIESRKQSKLEVFDKEAEKKLAKLTSMEDITPVKQKLAEQRKELEEHYEVRNWLDDAVSRVDQIRLVTHVLKFAHTDARGSSIFAVQSKANVKEDIKYLSMAALDRPAIDAAGNAAALDIAKLLLTEYREGDSLLANINRADYSALAELAKNEQQLELWINGFRQVLSDKRLSSHRLAKQLYFPVGYDKYHLLGPLFSSSLAHTMHQRITEARFGELSKEINKARKEESWRPETIVVYPNTAVQYFGSTKPQITSYLNNMRGGRVYLLPCSAPEWKNITKPPMKHRSIFDLGCEFVSLVRSTVWQMQRYLLSVQKYENTLEIQQCRQEYVDEIIDVLFNYVVGIQNLIELKGWSANEDCALKRAQQLWLDPYRCQQDETFKFEREGGDWKKEIAADFSYWLNQSLKHERLEMGLSERREWASVFKERLREFEDELPEVMPZ

SEQ ID NO: 1230 - protein, 1108 aa, Photorhabdus luminescens
GTTNNCATIESGGTMNILLVSQCNKRALTETRRILDQFAERKGDRTWQTAITQEGLNTLRKLLRKTARRNTAVACHWIKSGGQTELLWIVGNLRRFNSRGVVPTNTTQRDVLKSQDENHWHSVEAISLLAAIAGLFHDFGKANTLFQQGLQGNGRFQPYRHEWVSLRLFQAFVAEQDDREWMTSLSQIEPSDEDKILSRLVKDDIDKKYANPFVNLPPLATTVAWLILSHHRLPVYPSYDDRYVRRPQLKDIDSWLINHLEPSWNSINMDNKVWSDQDKRDVWTFPNGTPIRSQTWRQKAQKFAQRALQSTSLVQYGNLNQRFTSHMSRLVLMLADHHYSSLPATLGWQDVNYGVFANTDRTTGKCKQRLDEHNIGVGQNALLLGRSLPHIRKTLPAITRHKGFKQRSKDEKYRWQDQAFYVACALRERSVEQGFFGINMASTGCGKTFANARIMYGLADEKQGCRFSIALGLRTLTLQTGDALRKRLHLEEDDLAVLIGSQAVKELHQLRQKALEPDVGSISAEALFAEHQYVSYDGSLDDGRLSHWLRKDNKLNKLLSAPVLVATIDHLIPATEGIRGGKQIAPMLRLLTSDLVLDEPDDFDINDLSALCRLVNWAGLLGSRVLLSSATLPPALIQALFNAYRAGRQDYQLACGQPGAPVNICCAWFDEYETTQQDVVNAYQFQEQHNIFVNKRIGRLKKIVPLRKAELVPIISESRKINDVINTIAEVMHHSILKLREEHHQTHSSGKTVSIGLIRMANIDPLVAVAQRLLQMPSPENVRIHYCVYHSQHPMAIRSHLEHRLDSTLTRYDEEELWQVAEIRKVLEETSERDHIFVVAATSVAEVGRDHDYDWSIAEPSSMRSLIQLAGRIQRHRRKEPREPNLHILAKNYKALKATDLKHPVYCRPGFESKDYLFANHDLHELLEPYQYELISALPRIKERDNAGDSSPFENLVDLEHQRLWEELQGGSDNKHGYCSALWWREQASWCAELQRHKPFRQSEPDELHYLWLGEEGEEAKFVALDSGQAGIKESDTFDYVPELEFALGVSAWIELDTETIYQNLADTNEMELKNVSQHFGEIRLRKKDDGEAWRYHPFLGVFGEIGZ

SEQ ID NO: 1231 - protein, 356 aa, Photorhabdus luminescens; identical to SEQ ID NO: 440

SEQ ID NO: 1232 - protein, 685 aa, Photorhabdus luminescens
MELKATQIGQCLAQHPYNRVRLLNAGIEVSGEKHQYLIPFNQLINIQCKRGIIWGELEFELSDGQAVRLHGTEWQQTQRFYHYLLGEWQKWSQEMSDISANVLTAQVSEINRIGQQNRWLKKADLLQLQQQIQATFQALPLPLQRLEQFDHCRDGYQICLRWLENGEKCVEKINLQWTERMLEQHCDFFQRIEASPLNRSQSLAVINGENSVLVLAGAGSGKTSVLVARAGWLLLLQQAIPEQILLLAFSHQAVNEMNERIQSRLGVNDIKVKTFHTLALHIIQQGSNKAPKISVLETDGQKRKDFLIKHWQQQCSEKKAQAKGWREWLTDELKWEVPEGEFWHDEQLANRLSNRLECWLGLMRMHGGSQKAMIEQVQEEYLDRFQKCIRLMEPLLKAWKSELKTEGAVDYSGLIHQAVNILDKGRFISPWKHILVDEFQDISPLWAKLLTAMRTQNSQSCLFAVGDDWQAIYRFSGAERMLTSAFANYFGKGAECVLDISYRLNDRISKITNAFVQQNPNQLRKSLNGLTKGNKKSIVILPEDQLEPLLNKMSGYVTEQETILLLARYHYLKPELLKKAATRWPKLKIEFMTIHASKGQQADYVIILGLHQGQDGFPAPARESVMEWVLLPQPEDFSDAEERRLLYVALTRAKKQVWLMQDKNNPSVFVRQLEQLSVPVQRKPZ

SEQ ID NO: 1233 - protein, 714 aa, Photorhabdus luminescens
VLTAFSGLRRFLYNSHFLYYNRILIALAGTTLVPWFLDKEPKITISLTLGVVAAALADLDDRLTGRLRNLVITLISFFIASVSIELLFPYPWLFTIGLALSTCSFILLGALGQRYATIAFGALLIAIYTMLGSSIFPLWYQQPLLLLTGAIWYNLLTLTGHLLFPIRPLQDNLARCYQQLAVYLDAKANLFDPDIIEEGYQQSVVNVAMANSVLVNTLNQAKTSLLTRLKGDNRQRGTHHTLHYYFVAQDIHERASSSHVQYQSLLHTFRYSDILFRFQRLLSVQARVCEQIAQSILWHKPYQHNPRIERAFNYLESSLQQLSQQQKHNLKITALYNLLKNLRAIDAQLASMSSGRYNLSKDREDETQLSDETLTGWRDICLRLNHHLTPQSALFRHAIRMSVLLCSGYTMIQWLDLQHGYWILLTSLFVCQPNYSATRRRLTLRIIGTVAGVLIGLPILYFVPSIEGQLVLIVISGVLFFVFRNTQYAHATLFITLLVLLCFNLLGEGFDVALPRIIDTLIGCGSAWLAVNFIWPDWKFRQLSQVINRTMNTNCRYLDAILVQYYQGKDNGLTYRIARRDAHNSDAELVSAISNMSAEPKSDQTSQEKAFQLLCLNHTMLSYISALGAHRDKLDNKAILDILNDAVCYVDTALKSILIDDDRIKQIPVNIVKRIEQAPAERNSKEQLVLQQISLLIELLPKITNIIKQINQLZ

SEQ ID NO: 1234 - protein, 204 aa, Photorhabdus luminescens
VICMFLSEVRFTQLKNGFSSFGALTRKPQFGGYSLLADGIMFAIIADGELYLRGNGHAEVLFKARGMKNYIYSKKGVPVTLRYYQVVESLWQDQELLSQYAYLAYHYSFIEMAGKKKIPERLKDLPNLGMSLERQLWKVGICKVEDLRLLGAKASYLKLHQYKRNSNVSLLLALAGAIEGCHSAVLPVQIRNDLLRWHKELACZ

SEQ ID NO: 1235 - protein, 520 aa, Photorhabdus luminescens
MKPENLRTDNKRPFTSKEYLNSLQDSREIYIYGERVKDVTIHPAFRNTAASIGQLYDALHAPETHNALCWNTDTGNEGYTHKFFRFATNPDELRQQRDAIAEWSRQSYGWMGRTPDYKAAFSCALGAYPEFYGQFSNNARAWYKRIQESCMYFNHAIVNPPIDRHKPADEVKDVFIQLEKETDAGIIVSGAKVVATNSALTHYNFIVGSAQDIGDNPDFTLMFIAPMNANGMKLISRASYELAAGTTGSPFDYPLSSRFDENDAILVMDKVLIPWENILIYRDVGSSRHWAVQSGFARLFPMQACVRLAVKLDFITALLQKSLECTGVVDFRGVQADLGEVVAWRNLFWSLTDAMWAEAKPWEGNAYLPDTQAIQTYLVMAPIAYTKIRNIIESNVTSGLIYLPSSIRDMNNPEINKYLEQYVRGSNGIDYVERIKILKLMWDAIGSEFGSRHQLYEINYAGSQDGVRLQCLRHAYSSGNMKKMMDLVESCLSDYDLSGWTKPYLHNNQDINLLDKLLKZ

SEQ ID NO: 1236 - protein, 339 aa, Photorhabdus luminescens
MSLSIEMNLSVDSSFPVLNNLQLVTPPSVPDQNIEKATTEVFSLSETTKQNNRVYQSLINEQSINLNLKSITGIKSEQISGKQSHEIDYMLTLISDDVYISTTMGIGDYIRLSDGELLKAGIEPANLRDKTTGFQAGIYRNDDLYIVAFVGTNDLKDILTNLRQGFGFDEAQYHQAIDLARTARIAFGENLLFTGHSLGGGLAATAALSVGKPAVIFNSAGVSDNMMKNLGFSPQEGRAIAENGLVRHYVVEHDLLDALQQKLPVSQPIGHKILLKYNDDSGESGQGFPHNLIRGLKAHSLEKVLELLTIYKPWSSLNDEQQEESLVMLNEPDLSVSAZ

SEQ ID NO: 1237 - protein, 227 aa, Photorhabdus luminescens
MSAPLTWHDVIGNEKEQPYFLDTLAYVAKERQAGKTIYPPQQDVFNAFRYTELADIKVVILGQDPYHGPNQAHGLSFSVQPGIPAPPSLVNMYKELASDIPDFQHPNHGCLISWAKQGVLLLNTVLTVERGNAHSHANLGWETFTDKVIAAINEHRSGVVFLLWGSHAQKKGYFIDANKHHVLKAPHPSPLSAHRGFFGCQHFSKANTLLEKQGIAPINWTPELPQZ

SEQ ID NO: 1238 - protein, 194 aa, Photorhabdus luminescens
MSSKEQKMPDEQVSEDMEVVSEQQNSADKAEASETESVVDPRVAELEEQLKQAQQRERDAILRAKAEVENIRRRTEQDVEKAHKFALERFANELLPVIDNLERALEVADRTNTEIAPMVEGIELTLKSFLGAVGKFGIEVVGDTNVPFNPEIHQAMTMMESDQHEPNHVMMVMQKGYTLNGRLLRPAMVAVSKZ

SEQ ID NO: 1239 - protein, 293 aa, Photorhabdus luminescens
MNKKFKCIGIVGHPRHPEALATHEMLYHWLKSKGYSVIIDRQVAKDIGLKDAQTGGLTEIGKQADLAVVVGGDGNMLGAARVLSRYDIKVIGINRGNLGFLTDLDPDNALQQLSEVLDGEYRNEHRFLLEAQVRRNGQKPRISTAINEVVLHPGKVAHMIEFEVYIDERFAFSQRSDGLIIATPTGSTAYSLSAGGPILTPNLDAIVLVPMFPHTLSSRPLVISSESSIRLKFSQNSNDYEVSCDSQIVLPIQDGEDVIISRSKQKLNLIHPQDYNYFNTLSTKLSWSKKMFZ

SEQ ID NO: 1240 - protein, 554 aa, Photorhabdus luminescens
MLTQLTISNFAIVRELEIDFQPGMTAITGETGAGKSIAIDALGLCLGNRGEANMVRRGASRADICARFSLSDTPSARQWLEAHQLDDSNECLLRRTITSDGRSRGFINGTAVPISQLRELGTHLIQIHGQHAHQLLLNNGHQKRLLDTYANQFNLQNEMKQAYQQWHQSCQDLARFQQQALERQSRQQLLEYHLKELNELAPQPGEYPEQDNEYKRLANRGQLLSVSQTALQLLSDNDEQNIISLLNYAKHELAELITMDDKFSQLLTMLEEASIQINEVSDELRHYGDQLDMDPNRLFELEQKISQQIRVARKHHVPPEELPSLHQQLLEEQQLLAQQEDDCTHLSEQVNKHHKQALEVAERLHLVRQQYAKELSELITHSMHQLAMPHGRFTIDVSFTPEHLNADGSDKVEFNVTTNPGQPHQSLAKVASGGELSRIALAIQVITAKKMETSALIFDEVDVGISGPTAAIVGRLLRELGESTQVMCVTHLPQVAGCGHQHFYVSKQTDGEETETQMQLLDKKARLQELARLLAGSEVTKNTLANAKELLAAZ

SEQ ID NO: 1241 - protein, 473 aa, Photorhabdus luminescens
QLFKHREHCLTRLVSVSQSFKGYQQMKSTEKPNLIAVPFASAGDYNEIATKSTESSLAKGVATYPSGFPPLTMTAISAGGIPPSGKDMNGILNDITTAIRYSMSGGLYSYNADFSAAIDGYPKGAIVASSDGSKIWWNEVEDNNTDPDSTSVSGWKNLLADPNGLFLQKANNLSDINNKATARNNLGLGEIATQDLIPDATLIEKGITQLTDKTGNSNTLAATQKLVSDVNDNANNKLAKNQNGADIFNKTEFVKNIGLSEMVELAKGAVPNSRKINGKPLAGDISLNAGDVGSYAKSESDNTFLRISSNKTATVGSLLIDSKTPFPKLRFKSKDGYILGINGSEGKLLHIYSDDPKNQRRYNILAPERSGTLALQNTAIKSENGWWQCGDTGVIIQWVKVPSAQQSWIKVNYPISFKNKLFGYIASMSSINTSTGHTLVRNATLSTFEYQAGTPNNDENPGKVVHILFWGVZ

SEQ ID NO: 1242 - protein, 202 aa, Photorhabdus luminescens
MENVGATILAQYAASPKLNSLIRSFNAAVSSVEFINTFYDLIWNIDTENTYGLDVWGKIVNVSRRLTVNENVKYIGFGEALLNVPTTIDPNPFDQAPFYSGESKTKTIELSDLMYRKLIMMKAMSNISDCTIPNINRMLVYMFSDSGRAYITDDGNMKMSYVFEFQLSTAELAIVQTSRALPYPVGVSVAIVQRIPTNEINZ

SEQ ID NO: 1243 - protein, 442 aa, Photorhabdus luminescens
SYKWKGENYCGHDDNNGHEQSINGGKFLMTNSVVLTTSVPGVTFTKTGLTVPDEVDILNGRLNDLATAMGGAMSTSLTTPQGQIAMSDAAIIADKNDQLLAIVNQINPDYATGRFQDAIGRIYFLDRIPASGTTVTATCTGLVNTVIPIGSIAQDKKGYLYHSLTEVKIPGSGSVDVVFQNSTSGPLACQIDDLNTIYSSVPGWSGISNASAGVPGIDEETRANFEYRRKQSVAKNATNSLHAIYAAVLEVNGVADAYVISNDTSVVKTVGVSKYRMVPNSIYSAVYGGKTEDVARVIWKKKPPGIPTNGNTTHTIVDDENYVQPYPEYEINYVIPAPIRVYVDVSLANSDYLPADIETQVKSAIAQAFNGEDGGTRARIASTLFAGRYYSGVYNIDTSSVDIYNITLSRDGITYSTSISFGIDEIPTLDVDNISVKLVGSZ

SEQ ID NO: 1244 - protein, 321 aa, Photorhabdus luminescens
SPLGGARATLQIILPFSRRGDSVTYKQHNITVEFQLVDGKTFDDSGNNILTIENARAYVNMAAWGGISGTQITLQIWGLTTSQMATLSYRGIWIGSAKFNLMRVWADGHAIFEGFISDAYADFNQLPDTPLTITASMMLGLRAKEVEPFTASGDVDIVDIITAMAKKADLTVENYGATGVISNPHYTGNVVNQIQQAASALDIDTDFGIDKVTIWPHGQPKVEKPLLTSPEYGLIGYPIFTGVGITATTLFSNEIILGRKVKIETSLPNVSGTYLITGAEHYLTSWLDGGQWHTSFSGTPVKTEDKNNDKADNKTNGHKQZ

SEQ ID NO: 1245 - protein, 296 aa, Photorhabdus luminescens
RCPAENRWINAGNKLFNGGNWIMAFSLNQTTVLSAFRSGNLLSGVNSMISPGYGIYYASGQRVGDKPFTPTSFIVVEVTREASITTAPIEKGGYTSYNKVQRPGEVHVTFSFEGWTGFSGSVPNLTNLTLTSRSDVLEALDKMVSSAEIYDIETPDTTYTSYDLIKYDFRIRQDNGVTLLIVTAVFQAVQDIAEVKMSSNVANKSNTTKNETAKGPSKNTEQSTGSTKHATLSDVKKALTGLKKSVSSAATQVADKVSSGFKRATETITGPLNDSVLSATNHLNDAVEELSRKLTZ

SEQ ID NO: 1246 - protein, 225 aa, Photorhabdus luminescens
GVFMKNCTISPQIINTMEISNEPWGIKDSSSCFIYGNKALSSIKNFSQSFDYSGLYDHELPWDGAEFAKEYIHHDQKVMKTGKNICSLETHIFGKEQILSSYFCEKMPFYHEDGSCIGVIYHCWRIKDYSLTRLYQYHNKLPSSILLQPPTDLFTEREWDIIFLFLQKYTINQIGIILNLDSSVIENHTDRIYHKININSTLQLEEYCRVNSLYHYIPEKFLLTZ

SEQ ID NO: 1247 - protein, 422 aa, Photorhabdus luminescens
MDKFRVKGPTRLSGEVTISGAKNAALPILFAALLAEEPVELQNVPELKDIDTTIKLLNRLGTKVERNGSVFVDARDVNQYCAPYELVKTMRASIWALGPLVARFGQGQVSLPGGCAIGARPVDLHISGLEQLGAEIVLEEGYVKASVNGRLKGACIVMDKVSVGATVTIMTAATLAEGTTVIENAAREPEIEDTANFLNTLGAKITGAGTDHITIEGVERLGGGVYRVLPDRIETGTFLVAAAISGGKVVCRHAQPNTLDAVLAKLREAGADIAIGKDWVSLDMHGKRPKAVTLRTAPHPGFPTDMQAQFSLLNLVAEGAGMITETIFENRFMHIPELIRMGAHAEIESNTVLCHGVKKLSCAQVMATDLRASASLVLAGCIAEGVTVVDRIYHIDRGYEHIEDKLRGLGANIERVKSTGKZ

SEQ ID NO: 1248 - protein, 708 aa, Photorhabdus luminescens
KLMANIIDELVITLGLDAAEFSAGETAVIAGIGGLAQVMQKLIDSFNDGEKKTSKSLDKTGKKTEKVAKEMEAAGKKASSFFSSIKSQILALAGVTVSLGGLKSFVTSFAGNLNQLSTAADAFGMSAKALDGWTKAGQAFGVSANEIVGAFSRINDAKARLKSGVALDPALETLLKTASQAGVDIDIASESTESIMRKLSGVFPRLNKDQQQAYGGELGVGYAAQQWFSSGHVLKDVDKFTANSGVDDKSVAAARRFREQWTEISQSFEKTGYILFNALLPYINDFNIWLKNLADWMNKHPEEIKKAVSGFLDKMSFIISVANQAADAVGGWGNVIIGLIGLKFAGWLWGIYRVASSMLKMGKGGGLPGKGIAGKAGIYGAITYALYDPVESVATSIVGEETKNTLDSYGLYLASDWTPFFSKKEYEAYQAKLDGKTSKPDTTVVKEVKKEEKRSENDRIIRAEDERQQRLEYSNNWLKAALDKLTDSINKLIDSLVPQVAAAEMSPNTTGMKLLGWLSPKLAQLEQQFGLPEGLLRSVAMTESGGNQYAVSKAGAKGLFQFMPGTAKHFGLMDDDVFDPVKSSEAAAKYLSQLMRMFDGDLSKALAAYNWGQGNVIRKGLGAAPKETRDYIPKVLANMPQLGAHVAAQRYSNTVNNNRTSSVSESYHIGTIQISSNANNVKGVVNDARQKIGGSTLATSYSTGVTGZ

SEQ ID NO: 1249 - protein, 504 aa, Photorhabdus luminescens
TLKQWSLFMAIPISKDVRINPGVLSAVGNAVDLNGLLLTDNIYAPVGVVLSFSTKEDVAAYFGGASEEYSMAAIYFSGYNNCTKTPGQLLFSRFNRAAVSAWLRSGSFNEVAITDLQKMSGTLKLNINGTAINAAINLDGVKSFADAAKSIETVIGKAVTVVFDTTRKAFIINVASGSIKPEDTNITYGTGDGAEALKFTGALGATVSQGATVSAVPDLFAVIKTQSQQWACFTTVFECTDEQHLALSAWASSQVYRYFYVAWTTSGTAKVKGSQETIAHKIIGIHSYGSVVPVFCSDNMKPAAVLGYAAVLDFERTEGRVPFKFRELSGLSPDVIDSDVYDALIANGYNFYGNYAANNITENYWADGTITGDFKWLDSFCGQIWLNANLQGAVIALFKSNKTIPYNTAGRALVEASMSDVIQRFKLWGGIRAGVTLSAAQKLEIINAVGSDVSTSIIAKGYYLYIGEMSASMRANRTSPSCTLWYCDGGSIQKFEMASTEVQZ

SEQ ID NO: 1250 - protein, 208 aa, Photorhabdus luminescens
RVVDSADFGRVAELVQIRCYIAAWGTIVVTISVTQDDITTALRGFLMALIPRRSVILSQINRSPMSDGDFIVMTPLNSTGLSTSVVIYNAPTAAGMGKSLITRTTRWTCQIDCYGQFAHEDAHIIATTVRTEYAIELFKRSGIDMAPLYASDPIQTTMINGEQQYESRWTFEFTAQINPVVTTEQLFFDSITLNTKTVESIHGNSNQZ

SEQ ID NO: 1251 - protein, 354 aa, Photorhabdus luminescens
ISQNGDLELMKRHTDFQYIEGEYGIVVPQAVDYLNPQYARNYTLAMDAQPAMVTVSNAGVPAYLTNYLDPELVRVLVTPMRAAEIIGENKKGDWTTLTTQFPVEESTGEVSSYGDHSNNGMSDANVNWVERQSYHFQTFTVWGERELDMYGTARINRAAQLNTASALTLNKFMNKSYFYGIAGLKNYGLLNDPGLSAPVVPAANGKSNGTTWETKDGQAIYDDISQRLFKQLTKQTEGLVERTEPLKLCMSPTAEVNLTKTNQYNVNVTDQLKKNFPNLTIETAVEYSTEAGELVQLIADTLDGEKTAYASFTEKMRAHAVVVSSSSFKQKKSAGTWGAIIRYPHAIAQMLGVZ

SEQ ID NO: 1252 - protein, 452 aa, Photorhabdus luminescens
TNQLINPRNIMNHGLALDRASVRSYDRDGRLHVTESPISKATVSSYYGREIPNWQGLRLDPNRIYKLLRAPDELEKGVATFNNLPLLKKHIPVTAAKPSTELIVGTTGSDSMFDGTYLKNSLAIWDAESIAGIESDEQKELSAAYHYVADMTPGMYDGIHHDGVMRDIVGNHVALVEEGRVGADVVVCDSLPLELKHMKLNKKMVAVAVRAALGAYLQPKLAQDAAPKEIASLLKAGGSAKSIAEAAKNKFGTLLAQDMEIDSAELASIIEAVADDAETQEPAELPAQDDDICAQVLELLAGKLPEEDLAKIRALISGTPAQDDDPDNKPEPKEEDSVSKPAMDAAIRAATRKAEKDTVNRINAIRIAEAEVKPLIGDVVAMDSADEIYKVALDEVGVDTTGVHPSAYRSLVKMQIGIAESAKLKAHLAMDSAAIDSFEKRFPTASKLVRIZ

SEQ ID NO: 1253 - protein, 293 aa, Photorhabdus luminescens
PTMKTARITLWKSMMKSTKKTTSKKRATRKTSSDPLQTLRQIKPNAGVRVWYSKQLYKLVDEMNNSVIYWVSANYKNSGAAMAMDVSPEMLMRSAMRKLTRRWLKQFDALADKLAKKFAALSMDNMDASLNHALDAAHISIPFTMTTEMNNALQTVIGENVGLIKSIPRQYLSQVETLVMQSVARGRDLGTLTKALQERYDITKRRAVLIARDQNNKATFVMQSARQRSMGFKTGIWRHSHAAKKFRQSHLKADGKEFDLSKGLYIDGKWIMPGEEINCGCGWQVVIPKLTNZ

SEQ ID NO: 1254 - protein, 546 aa, Photorhabdus luminescens
PVKSCRWCSTNITIYGMRYVIRWMVISQAKTTHFVYLKICWANLMFFKFRHKKKAEVLPVEQDIDQASPQPMNIHPDTVGSITERKVARPVEPYRPPPGVVPTEQLSALMAMDSTPYEYMTGTGGISGDVGFPGYPYLAQLSQLPEYRKMVGTIAGEMTRKWIKLTSVGDNDKSDKIKALNEAIEKFHVRERLKKAIEHDGFFGRGQIYIDVRTSRGVLAATDPVELESRLFLSPKKITKGSLIGFNVIEPIWTYPGIYNASNPLSNDFYKPSSWYVMAKTVHDSRLITFITRPLTDMFKPAYNFGGLSLTQIAESYVQNWYRTRDSVSDLIHSFSVSGFKTNLQSTLQGQTKNPDQLIYRAELFNKMRDNRGVMMLDNEEEFFQFNTPLSGLDSLQAQSQEHMSSVSSIPLVIFTGITPSGLNASSDGEIRVFYDFIATLQMLVKDGLARMIDIIQLSEFGEIDPDISFTFEPLYQMNDEQKASIRKTDADTDSVLIAANVISTDEARERLANDENSPYHSLEINDEIDKEDDIEEEGNTENIIZ

SEQ ID NO: 1255 - protein, 442 aa, Photorhabdus luminescens
CLGFSHGEIARGKTGSPVIIDGVLYAFSSDWATEVLYDRALGSVRWRWTYGGRGGGKSVEIARALVLLGAIEPMTILCAREFQNSINDSVLALLEAQIIDLGLSHFYKVKNNEIEGQNGTRFTFKGLRNNIQSIKSMHGIKICWVEEAQTVSQDSWDILGPTVRANKSEVWVSFNPREEEDPTYKLMTRHQEDPSDGGVIIRKVNYCDNAFFPDVLRQEMEYCKRIDYEAYEHIWLGLPKALSEAVIFSGKYRVEAFSDELWLEADRLFYGADFGFANDPSTLVRCFIIGTKLYIEYEAYGVGVELDEMPQFYDSVPLSRKWPIHGDSSRPETISYLSRQGFVIDGATKWPGSVEDGITYLKGFEEIIIHERCKHMIDEARLYSYKTDRLTGEILPVVLDKHNHLWDAVRYSLDGYITGKNNPLRISKNLLGEFNVFQIQTZ

SEQ ID NO: 1256 - protein, 315 aa, Photorhabdus luminescens
QLTHTLLFNSKRKLLMELFAITDTSKIVRIVTDSETQKSVNALFKKQKEYFENNYTTSVEFSGGYITSPVEYFCIDNFDDVIGVLDAIQTPTSIQEWSPQEISIFNIKALFSGEITSSETEDNIKAYLQCFDKRQIIDNKKTLFHSILQDKNTFKLSDSDGLIIDNKLTAILEGNKLKFKSFHMLRRIFDVDGYFKEATDDDLREFSNHDHFHISNNFDLTSLADTVIRKKVSLINKSRVLENYTVDALLAAANENGVVFDLDIHEDNGKRKIAMPQEKKHIKRLLCFLDEDYFTSQITQTLYRTNSKKKVNQSZ

SEQ ID NO: 1257 - protein, 210 aa, Photorhabdus luminescens
MLKRLLMVVLLVIAPLASAVDQTNPYKLMQDAAEKTFTRLKNSQSQIRQNPDYLRKVVKEELLPYVHIKYAGALVLGKYYKDTTPEQRKIYFAAFESYLEQAYGQALAMYHNQTYQIDPEKPLGDSNVIAIRVTIIDPNGRPPVRLDFQWRKNSKTGQWQAFDMIAEGVSMITTKQSEWASILRQQGIDGLTKQLEISARQPITLEEKKZ

SEQ ID NO: 1258 - protein, 179 aa, Photorhabdus luminescens
MTKTSKLSAAVIGLVLSGAGATAILSQFLDEKEGNRLSAYQDAGGVWTICRGVTRIDGTPARQGMRLMPNQCRDLNAQEAKQAIAWVKRNVRVPLTEPQIAGIASFCPYNIGPSKCFSSTFYRKLNAGDKKGACAEIKRWVFDNGRDCRQTKGQANGCYGQVERRAQESELTCWGLDEZ

SEQ ID NO: 1259 - protein, 414 aa, Photorhabdus luminescens
LKALVKSIMTDMPAITVIMFMEIQHPGQFIASYFSNLSLMIKPRYCVPHWQRLRLHAATLPVWNISLYQFVTTILSVMTVVTIMGAVKMANLPETPQWSEGVYQIETSDPVLGGPDGISNRQAKQLVNRTNYLKQKLEQNGNELREHSEVQDPHTQYAPKDSPIFTGTPTAPTPAKNANNTQIATTAFVQSLTDTANQSAVAANNNANSRVPSIRKVNGKALSSDISLNAGDVGSYAKSESDNTFLRISSDKTATVGSLLIDSKTPFPKLRFKSKDGYILGINGSEGKLLHIYSDDPKNQRRYNILTPERSGTLALQNEAIKSENGWWQCGDTGIIIQWVKVPSGQQSWIKVNYPISFKNKFFGYIASMSSINTSTGHTLVRNATLSTFEYQAGTPNNNENPGKVVHILFWGVZ

SEQ ID NO: 1260 - protein, 171 aa, Photorhabdus luminescens
LASRFDDIDLTQLMVYLIDTADRSTLHWLANQFSLFGDGWELVESDNARRTLIKSAIELHRYKGTPWSIREIIRRFGFGEVDLIEGTGQINYDGHASHNGNYVHGDSTSWAVYRVILQQPITNDQASLLRTTLAAFAPARCHLASLEYQSVSIRYNNTVSYDGSYNYGSSZ

SEQ ID NO: 1261 - protein, 368 aa, Photorhabdus luminescens
MALTEPDFIERDVEKITTEMIAKYEADVGKTLYPAQAERLLINLFAYREALTRMQVQEAAKQNLVEFARAPILDYLGELVGVYRLSAQPAQTILQFSVDEALEQDVLIPVGTRVNASDSIIFATNTDAVLKAGTRFVNVTATCTDTGLSGNSWQPAQISTLLDEIDDIDPQVTNTIVSSGGSAEESDERLRVRIKMAPESFTNAGSRQAYRFHAMRAHPNIVDVAVMSPIPGVVELFPLLATGLPDESILTLVKSFCSDEKIRPLTDIVHAKPPVKVDYTIKAKLTLYSGVNAPGIQSAAEQAIQTWVAERATTLGKDIVPSQIISTLSVSGVYQVVLESPTFQIVDENEWANCIGITVVVTGVADGZ

SEQ ID NO: 1262 - protein, 202 aa, Photorhabdus luminescens
MSSVTRQVGTISAVDPATVRARVRLPECDNMRTNWLNVLQRNTQNNKDYWLPDVGEQVEVLLDANGEDGVILGAIYSSVDQPPANNKNIRGVTYADDAAFYYDRTSHTLTINGGIQHIKIAAGANVVIYAQQATIDAPETIVTGNMLVKGQLIYQNGLSGSGGNSGAATIQGNVSVNGNIHATGSIMDEGGNSNHHFHEFLZ

SEQ ID NO: 1263 - protein, 403 aa, Photorhabdus luminescens
RCSNCRGYTTVAKIIDTKQTPSITGVSEVLSPTFTLRYLQKDITNDITPYVTRVSYTDNIKSESDEIEVELDDTDGLWLDKWYPGKGDTLTLKLGYFGERLLNCGSFYIDEIEVSIPPSIVSVRGVATSINTALRTKSNRGFENTTLAAIANRIAKKHQLKLIGSIEIIKIDRVTQYSETDVAFLKRLASEYGYAVKVVSEQLIFSHLATLRSQEPIKKLHPRDVAQFSLRDTINKVYKKAKVKHQKADDKKLIVYEADGTTSTSSQSNPKDKNSGKETSADTLKVNSRAANKDSAEIKAKSALDLHNEYQQNGSLSLMGAPQLTAGNKIELIEFGKLSGQWLITSAHHSFDRNSGYITELEVARGPVTSSKSKKDKKDKTQKLVVYKPDGSSDTIIEEESKZ

SEQ ID NO: 1264 - protein, 295 aa, Photorhabdus luminescens
MFAVLGDIEFELITYWDGFDVTFGVDYAEHARIQGKPGLQFVGEKPDEIQISLVFHQHYCTPDIELNRLREAMRKHQALALIFGNGDYRGWFVITDVTASSEQTDSVGNIFALNASVTLREYIGDPKKPLKPPAIKSHVPNTKALSNAIPKPSGMAKKVRDGVNYAKQAQSALQTTISAVRIAQKMKDNPAVALTRVPSLLTGLNNIAGPLGKSYPAFQSLGDSLPDAIQLTRATGQAVTFVNNAQSSLSRADSCNIAAALDSVSTQLESASSTFTSISPALSKMAAQITTRALZ

SEQ ID NO: 1265 - protein, 852 aa, Photorhabdus luminescens
FVSTEFSIGVIIGGAISSAFSSAMSGTRRTLGTLGETTRQLENRQQALNRAVERYGQLGSRSAQRLNADLQRISRTLEQLNRQQQRLQSAASMSDAAKANRMALYAQGAETYALTHTISSPVVQSVTKYASFESGLRDIAVTGNLSPKEEQKIGIILRQNAKQTNQLQETLLEGVSTLVAAGKSPMKSTDMSGLLGRVATASKANINDLAKMALSFESLKIGGDQALKEAFNRAVFGAKSGRFELKDLAQYFPEMAQQFAGKGIYGQEAVSQIIASLEVGREGAGTEGEAATNMRNWLASMGRGDIAKRYAEADVDYQTSMSRYVSSGYSQYEASIMIADRFIKSKGADLMKEWKKAGARGDEDAQRMLMESFGLSSIFTDVQTVNHLLAMQQRWGDYQRIKTGMGTDSAQKSVDTDFDKQNDTLEAQWRRTQIEFNDSAISIGQSLRPALIQLAETFIPLMDKTGKWLAANPELISNVVTLVGGFLAFKAASIGVRLGLNLLLSPITDIWKGAMLMRTRWLLLRMAIGSGGRFGVVANILGKIAGAALWLGRILGSALYKGLMVAGRAILWIGRVLLMNPIGLIITGIAVAAYLIYRYWKPISNFFKPLWILVKFAFQMGWQGIKNIWSNVKGWFTARWNDITNAFDGGIFEVSKLILNWSPLGLFYKTFADVMKWFGIDMPDNFTDFGKNIVNGLVNGISNMLTTAKDTIKNFGGKVSSWFKEALGIQSPSRVFMGFGDNIVQGAVVGIDRTMPLAARATQRLAEGMTPDVPQISPPEIMSGNPIKRTGYKDASNSNNGFSISFAPQIYIGDKQQTAIPDISQALNLSMRELEKLLERIVIQRERRRYGZ

SEQ ID NO: 1266 - protein, 476 aa, Photorhabdus luminescens
MAANYLHGVETIEIEKGSRPVKTVKSAVIGLIGTAPIGPVNAVTLCLSEKDAAQFGTQMNGFTIPQALDAIYDHGAGTVLVINVLDPEVHKANVASESISFDKTTGTAKLANPVVSNVLLKSTSGSAPYVEGQDYSLDAQTGSLKNIGKNIAAGATVIASYDFADPTLVTPADIIGSISAAGNRTGMKLLNDTYNLYGFFAKILLAPVYCTQLSVTTELIALATKLGAMTYIDAPIGTTFVQAISGRGPSGTINFNTSSDRVRLCYPHVKVYDAESNSERLEPLSSRAAGLRAKIDADKGFWWSSSNQEIMGITGIERQLSAIIDDPQSEVNQLNEQGITTVFNNYGSGLRLWGNRTAAWPTVTHMRNFENVRRTGDVINESLRYFSQQYIDMPITPALIDALTESVNAYGRKLIADGALLGFKCWFDPTHNEETELASGHLLLSYKYTPPPPLERLTFETEITSEYLLNLKGNNZ

SEQ ID NO: 1267 - protein, 312 aa, Photorhabdus luminescens
MSDYLKGKRIVDPVLTSVARGYKNAAFIGEHLFPVVEMEKEGASVPTFGKSAFVEYDTTRAVGANSNVLIREKGSSLDIVLNEHDLAAPVDYREKSESLFNEEAKAIRRSTNGVNLKRELYAARLAQDPEVYLSDSVKSLTANERWAGGKGNPIKVIEAGVDAVRTTIGVRPNLMTMGASVMSLLKFHPEIQAAIGANERKRITIEILKDLFQIQNVVVGEPVSTPSIKENPVDIWADNLMLHYVSPPQAGAESADEHEPSFGYTFRRKGMPVADKYEGVGGKVNYCRYTDIYKVAVVGGDAGYLITNIVKZ

SEQ ID NO: 1268 - protein, 263 aa, Photorhabdus luminescens
MLMLTQALAALGRRAIEVFASFGRAGFMLFRAIIGKPEPARQWPLLRQQLYSVGVRSLLIIIVSGLFIGMVLGLQGYLILTTYSAEASLGMMVAISLLRELGPVVTALLFAGRAGSALTAEIGLMKATEQISSLEMMAVDPLRRVIAPRFWAGFISMPLLSLIFVAVGIWGGAMVGVDWKGIDSGFFWSSMQSAIEWQKDLLNCFIKSVVFAITVTWIALFNGYDAIPTSEGISRATTRTVVHASLAVLGLDFVLTALMFGNZ

SEQ ID NO: 1269 - protein, 371 aa, Photorhabdus luminescens
RNRGSKMKSLHIFKSGTHTDMNGKQLPFSPADLQACAKAYDSSLHEAPIVIGHPKDNLPAYGWVKSLTSSGDDLIAEPQQVDVQFAELVDAGRYKKISASFYLPDSPNNPKPGVLYLRHVGFLGAKPPAIKGLRQVEFSEQEYGVVEFSDWSDITNASLWGRLREFLISKFGMDEADKALPSWQVDSLREEAYSTTQPAPAFHEPNNTHQHEENIVTNEEKKALKDENTRLKEQLTARDAADAKRKQTEQHAGNVAFAEKLITDGKLAPAAQSIVIALLDAVTQGDSPVEFAEGDVKKPLATAFKDLLSSVQPVIDFGEHATKDRVDQNTSSDIAEFSDADPERLALHQKAVALVKKEGISYDVAVTRCLZ

SEQ ID NO: 1270 - protein, 290 aa, Photorhabdus luminescens
HGFCLCLTSGGACMSITTPELAYCMTLPPKRAIGYLQSKGYKITWDWEELWQETHARAFTVAKVTRLDILEDIRQALQQALDEGKTDRWFRQELEPTLRRKGWWGTKETDDPVTGERVTVQQGSPWHLETIFRTNMSVLYSAGRWAEQMENIDDRPYWMYTGINDNHTRKSHLALHGLVFRSDDPFWQAFYPPNGWRCRCSVIALSHDDVRARGVKVMHSGKAMGWELKLVSQKTGEMQPVATFNTGITKVATDVGWSYSPGAAYRPDLARYHGELSGLARRELGRQNEZ

SEQ ID NO: 1271 - protein, 520 aa, Photorhabdus luminescens
QRSGEGKFPPTPSVCTYAGGILMARGIWVSPTEFINFSESKQSFTEQIASRSRSIDFYSLGTYLPNPDTILKAQGRDIRVYRELRTDPLVGGCIRRRKAGVKALERGVERSNAPVRVFNFIRDMLADLDMSRIIGEMHDAVLYGYQPCELMWNQNQSWSVTDIVSKPPDWFHYDRDNQLRFRARDAGVEGERVPLYKFVTPRQDATYDNPYGFPDLSMCFWPVTFKKGGMKFWVRFAEKYGSPWVIGKHPRGTPQSEIDLLLDSMEAMIDDAVAAIPDDSSVEIKEAAGKSDSSDIYQNLITVARSEISIALLGQNQTTEANSNKASAQAGLEVTDDIRDADADVITSAINQTIRWVVELNFGNVECPVYRLWEQQSVDETQANRDVKLSQAGVRFTPQYWKREYQLQDGDIDETTLSTTPIPPLPLAFSEAVHADLAAQDTLDEALDILMNEGSLNESLESLLLPLFYRVQNGVNPSDLTGELAELYPHMDAEGLQEQLARVLFVSNIWGRLHEHNHAZ

SEQ ID NO: 1272 - protein, 535 aa, Photorhabdus luminescens
CRENCTQRWIICRSSCCITSGNIGNCDMSQLAPVLPDTSSIAAPVVLLPYQQRWVADSSSFKVNEKSRRTGITWAEASDNVLIAASSAAAGGMNVYYIAYNQDMTIEYIQACAMWARAFNYAASEIEEGFWEEDEDDKHIKTFTIKFPDSGFRVVALSSRPSNLRGRQGIIVIDEAAFHEQLDELLKAALAMLIWGGKVRVISTHNGDSNLFNELLNDIRAGRRDGVIHRITFKEAVAEGLFHRVCLRTGREWSQEVEQQWMMSVYKFYGAGASEELDCIPANGGGAWLSRALIESRMSPDTPLLRLTCPKGYELKSDEIRRTDTEEWLKANLKPLLDALPSDARSFLGRDFGRSGDLSVDYPLLQQKNLVRRVPFVLELRNVPFKQQEQITWYLMDGLPNLLGAAFDARGNGAYLAEYAVQKYGVSRVQQVMLTEGWYRDNMPPVKAALEDGNLEALPKDEDTLDDLRAVQVINGVPRVPDQRSKAKADGGKRHGDAAIALALAYFASREINKGPVKANSRRRRQSARMLEGYZ

SEQ ID NO: 1273 - protein, 269 aa, Photorhabdus luminescens
DGYYGIRRKPRQLVSIRGSGSVMLNLRMLGVERQHGKKIDIIPNAYYWNSRLVIWLGEVPAVPIKLWAKPVVLILSLIGMFALAHWRGHTIGFQKATETGNTALAQQKAEFLQLEKQRTERELAALNALQQRYQMQVNSAHQAEANYLNDIEQLRTQNQQLKRKIDHVTQSWMDEKQQFHPVNCVFTRGFMQQYNAALGLSSEQTRSVSVTSGADETFRGNESSDAQLRPSGITQRDILANIIDNGEQCLALKAQVNGLLDYIEGLQQZ

SEQ ID NO: 1274 - protein, 248 aa, Photorhabdus luminescens
NTHERRKISRSDWLPYGICCRSDTPCTDCCRYLSERSYRVVIMNWRQIIGIVLLWCSGMVSLALADELPHRSRQYRNDLIRASRVIWGLNAPVADFAAQLHQESDWKSRAISPVGAQGMAQFMPATADWISQRIPELSNKDPFNPIWSIRAMVHYDYWLWQRIKAADKCQRMAMALSSYNGGLGWLLRDKKKTEAVGLNPWVWFGHVESQNAGRRASAWKENRHYSKRILLELAPRYLAWGGTSCANZ

SEQ ID NO: 1275 - protein, 273 aa, Photorhabdus luminescens
PGKPNSFSANGKGLRIMKEQSLPIVPWIGGKRRLAKHILPLFPEHTCYVEPFCGAAALYFLKVPSKCEVINDLNGELVNLYRVIKHHLEEFVRQFKWALVSRQIYKWLQITPEETLTDIQRAARFYYLQKQAFSGKVAEHTFGTSTTSPPRFNLLRIEEELSMAHLRLARTIIENMNWTQCVQRYDRPHTLFYCDPPYWGTEGYGIDFGLENYDLLAELAHTIRGEMVISVNDIPEMRKAFKGLKMQVVNIGYNLKVTGKAKQSKELIICNFZ

SEQ ID NO: 1276 - protein, 308 aa, Photorhabdus luminescens
LAEDVQLADDLQVNLNAMTTHRLQIMEQFGDGLPYERDRIVHETRFYMAQSAEAMLEAGKRLIILKENEPHGEFVNIVKDQLGLEPRIAQKMAQAALKFLSPGLETKAKTFSLLGRSKLYELMLEDDDELSELAEGGTVAGLTLDDIDRMSVRELRKTLRDTRADLEISRQTVQEKKELVSNLIEEKSAIQHKLQRRINHEKPEEEGAALTQEVNSLSFAIDAAITNLFNGFETLNDHTTRTDISHVGFMAGVLDDLEVKIRNLRNHFNLPEYREHSIVPDWAKESAEAEEEKFERPEWMDKEEAHEZ

SEQ ID NO: 1277 - protein, 595 aa, Photorhabdus luminescens
MNTTMTERLVSIAQAAHKAGHGSKEAIYRAACEELCMSRSTLIKKLGEVSGKKPRKKRSDAGNSALTREEATLISGVLMEATRNTGKRLYSLEQAVNDLRSNGLINAGHIDTKTGEFSPLSIDAISRALRQYKLHPEQLKMPAPSLQLASLHPNHVWELDASICVLYYLKNPNKNNGVDSGLRMMPVAEFNKNKPKNLARIINDRVWSFELTDHTSGWIYVEYLFGGETSQNFTSVLINAMQDRGDADVLHGVPQILFTDPGSALTAPTLRNLCKVLGIQMIQHKARNARATGSVEKARDIIERNFESGLRFRQVDNIDELNRLARLWRMKFNRSAIHSRHGQTRTDCWLKITAEQLVKAPAINVCRELAISTPESRKVQATLRVSFRGREYDVSTVPGVSVGDSIMITRNPWRDEEAQVVITGEDGFEAFHLVNEVTKDEYGFAIGAPVIGSEFQAIPQTIAQRNLAEVEQKIMGTNNTAETEIARKLKTLPLNGRFDPYLDIERNDAPTYMPKRGQASTVHSPRIEQLMNPVDVVKILRERFQSHGKTWRGEFYQQIVKRFPNGVPTDQIDELVDEFIGKSTTVVCNIVNGNZ

SEQ ID NO: 1278 - protein, 395 aa, Photorhabdus luminescens
RGIIMLVFKQQLQVHQLTQSAAASAAGISAAALAQIVNHNIWPRQNADAIRQRITDFLAKRGIDTAKSFEVVQTTNKSDIYTDNKNTTLISEEENMLLKKQVLFPATKKHFGLFRDPFEDSAIQSAEDVFVTPDSRYVREAMYQTARYGGFLAVSGESGSGKTTLRRDLIDRINRENTPVIVIEPYVLAMEDNDVKGKTLKASNIVEAIVNTLAPLENLKRSPEARFRQLHKILKDSSRAGYQHVLIIEEAHSLPLPTLKHLKRFFELEDGFKKLLSIILIGQSELELKLSERNQEVREVVQRCEVVNLFPLNDYLETFLDFKFSRVGMKTNKILDNSVIGAIRDRLCLSRHSGKETVSLLYPLAIGNLIIAAMNMAAINEIPMVDANIIRSVSZ

SEQ ID NO: 1279 - protein, 268 aa, Photorhabdus luminescens
MNQQTANLIEVRGMYFSRGNRLIFADINLIVPRGKVTAIMGPSGIGKTTLLRLIGGQLRPERGEIWFDGDNIPALSRSHLYAARKKMSMLFQSGALFTDLSVFENVAFPLREHTNLPEEIIQTTVMMKLEAVGLRGAANLMPSELSGGMARRAALARAIALDPELIMFDEPFVGQDPITMGVLVKLIDELNKALGVTCVVVSHDVPEVLSIADYAYIIAEQQVIAEGTAQQLHSNPDRRVRQFLDGIADGPVPFRFPAGDYKTELLGZ

SEQ ID NO: 1280 - protein, 402 aa, Photorhabdus luminescens
DIMRVGISGFQSERLTQIREARGLSKINLGRLVDRSPSTITKWENGNHSPDAEVLHSLSQILNCPVSWFTKPIVKYEKKPVFFRTLSTTAKDLCIASERYMGWFQELSCKMQEYLDYPEVNIPHLNVKDYRAIDDQLIERMAFECRKAWGLGIAPIDDLLLVMENAGIVCSRFEQGSSVMDGYSQWNDLENRPYVVLASDKDNYYRSRFDAAHELGHIVLHRYINKFDNINFNPIEEQAHKFASSFMLPEESFSVELPPYPTLQNFISLKNRWGMSAQFMILRARNLELISSLEYQRLYKNISARGWRKGEPLDDLRKPESVRLLPRCLNLLLDSRTFSKKTLLEEFGFPKGDLEDLCSVPKGFLSESQVLDFQSRIQLKNSINISTTQQDTNVVNLFNRKZ

SEQ ID NO: 1281 - protein, 456 aa, Photorhabdus luminescens
MNELNLESAVISGLLSGGATQDAYDVFATLSEEAFSSSFLRRVYVEIKKQAFSSSLIDPIFIAEAMSEDGNTLANILELSKSPVWNANLKGYANKVSEYWYVRRVTAVINAGQQALLETKNHTQAQHVITGFMSTMGELIRDTGNLAPVHIKTLIEGYIDILGRRNLGEDSRGMIMTGIEPFDSLTGGFNPTDLILIGGRPGMGKTELALCMIEGMTRNGGAVLLFSMEMAAQQITERIVAGSAQLSVSKLRRGEFYDEDWARISNAISELIDRDIHILDASELSAEQICAISETHKRRYPNLKGIFVDYLGLIERPKAERNDLAIAQISRALKGLAKRLHTPVTALSQLSRDVDKRPIHQRRPVAADLRDSGSLEQDADRIIFTYRDVVYNPLSPARNYAEIILDKNRHGETGTIFQEFKNGHYLPTDQIVAAEICRTQQQAKQKERRYADKAFZ

SEQ ID NO: 1282 - protein, 257 aa, Photorhabdus luminescens
NTWSLIMSMSLMVKAMSIKVGNPLRKLVLIKLADNANDQGECWPSVAYIAEQCEISERSVQNHIKQLVKDGIVCVAERKTQNGLNQSNVYFLNLDKSSHGYSENVAPYGASLAPSGANSAGVSGAGDAPRTSHPFEPVTEPKTPLTPRKGKREKLKFDPITAKPKNVSDEVWADWVTFRLEIKKPLTETMCKQQEKKLADCTNPDSVICTSIANGWQGLFPEKSQNIKPKFTQNTHTSYEGITYEPQDSYWSENIDZ

SEQ ID NO: 1283 - protein, 356 aa, Photorhabdus luminescens; identical to SEQ ID NO: 52

SEQ ID NO: 1284 - protein, 600 aa, Photorhabdus luminescens
DWQKKQFIKEARPMFTYICVFEPTKKAQKNGAVPLAIALEANSEKMAKAMAIVYLGEEYADDMSNFNTSKPIICKDIQGFPRPPIGKFDEKFATEYEFNGTTWQARTLEPKKNPSITTRDFNHTYATLDLEIALALLDGDFHCWAIMSHSMKEAKQLITNNNEAWRQWSTAFRIRTDALSIPRETLFRVVREGKHHPEFLTDAVAIKEFLNCTLSDTDIPVELPEEKPKVSNYSVSTSEASITDVTPDEVETQQAALQVKEKKSEAKSLKTRKTKQTKEDKAVEETAQDNTTADDEVTSLPPVATLSTNDDNFQHRANLLEETIKAQGNEQQTNLRIWKAVQRTDPHFTKPLEGMGFNGTSINSNYMFMRATELFGPFGYGWGCNVTEEKLINGAPMSEPIYDDKNKQIGSRFLRDSDGTLICEQNHSIKILFWYLVECDICAEIESYGATPYMYRTKYGIKTDGEAIKKSLTDAIKKALSMLGFSADVFMGMHDNPEYLADNNIEFEIKAASDKAEDLVRLRKELDDKFTRNTETMRTAVSKNEIRGIASTLIRELSIHLGNSKAKGDKDYEKYLSGRLRRLNEIEKECLTQLEEANQZ

SEQ ID NO: 1285 - protein, 363 aa, Photorhabdus luminescens
GVKCREPLSNLEVTPKNIKYAERKLGEIYNKIERDIFIYAEFFPNSSRLKIFGNVNKGRTIKDYLDEYLKICETRNLSPSTINGYKKCKTALSELHKIPVVELTPAILKTWIQKRSTALKTIRNNLSFLRSAIDEAVTDCLISMNPVNLVTASRYQTERIENDSEYIVDPLSPNEVTALLSAAGNKQKQWENLFLFAIHTGLRSSELCALRWQDIDFIGKTAHVQSAKVVGIIKGTKTKAGTRKVELNTDAMSALLNQKAFTFMKGNVIFEDPKTGEAWAGADAIRKKAWVPTLRKAGIRYRNPYQTRHTFATKHISQGVNLFWLAAQMGHKGPEMLFRHYGSYLKDYDGSTYKPKQVSGGTZ

SEQ ID NO: 1286 - protein, 500 aa, Photorhabdus luminescens
MTPINRLYLSGDEIHLVDANIMLELASCGRGFITAETTTDYTGKLVRLDVGYTDLVLRWFTGYVARSQPAQNGYQRLFVRELVGVFDRLWSCSFQHPTLSQIVDWLQEHSGLTFILPDAPYTETPIPHFTHHGTGYQLLANLGQVFSIEDYLWHQLPEGSVYVGSGAHSMFAGKPVEIPNAFSQCQSAGNAMTIPMIPSLRPGVVINQYRLNKVNLNNENMVITWEAVNKLTGQSQTKTPMQRQIDAAYPELSAGLHLPKFARIEAHPENTVSGDISDSFRPRYAVDVQLLADDGQDAAVPVYHAVPLPLPMAGSESGMFQYPPVGTVVEIAFEAGRPDKPFIRQTLSQGNTLPDIKPGEQLQQQRAEVSQRVTQEGNWIRQTDQTINESSMHREVRADTETRNVVARETTIQATDKTTVLGTSTLLAGAVRQIADGDYSMATSSNFVASVGKEASIEIGQKLIEKIGLLKQSIAGARQEIIAPVVWVGSQQINVMTLIZ

SEQ ID NO: 1287 - protein, 247 aa, Photorhabdus luminescens
ATRVMNWQRKIMRISPNMTGMHCAMLSVHPFVYGIGQKADSGHYLSPANAINYLANKIRGTGNMSAVVLMICAKTHNEFIQHLTPFSAVLPLSVFSQVTRMAKTAERLAITKMQLPGKPDSGLPPFQPFSTSTSRMAVNARLIAQAKTQVSAGSSIAGLKSQLTNFTTVRQNTLQQVTAALNGVRNKSARVWAFSGKGNGALLAEKLRQDIPEQDAVYTLATLFAGDDIRALERMLHNEPNYHTGPZ

SEQ ID NO: 1288 - protein, 275 aa, Photorhabdus luminescens
KPACQQISDLYYEGKVMTKYSADIQMARFDEDGLAIVSGWVAVYRCHPETREYIGADMDSVSRGFSVAANAYLDAPELPDTHDVAICRRVDEKSWRHVPDYRGKTAYATDTGQPINITAIGALPDNLTLQSPQTPFDKRENKQWVTDKSALKSHQTEQAEQQKIARQQQADAAIKPLQDAIDLDIATDAEKSALVEWKKYRVRVNRVDLSTAPISTGLSNPRDELATENNAHLSEYDGDALRDVVRPSVRIRYRAESGQRSLPESGKRHQLSGKZ

SEQ ID NO: 1289 - protein, 600 aa, Photorhabdus luminescens
SCCPITVPTNLVELAAGKPVVLDEFVFAYVPDLDPTLAINRDETLPAESHIVHRQAVNKTGLASENAVAYSVTLGTEVGHFDFNWIGLINKASGIIGMITHAPAQKKIKTANGLQGNVLTRSFLLEFEGAAKETAIMTTAETWQIDFTARLSGIDEMQRLMNTDSYGEAAFFGDGFSVVCRGDRYTVKKGLAYIGGLRGELAFDQTLNRLRDTRVYADFSYQGNVVSQWKTVVHIIAANDLKNYIDAAGYPHYVFAVAGIDGHGDVMDLRIKGSLNDRDISAIHQEIDSVKREYVTQQALESGLHGKQPKGGYATNAALTVVSENADSRLAKNQNGADIPNKNEFVKNIGLVETVERVMNAVPNDRRINGKSLSADISLMAGDVGAYHQTTYMTELPGRHYSGPFSCGRENGWAKGVSIGVGGDTGQIWIDADAQLHTRFLNANGAVEQKITIGIPIGATIEWHTAAPIPAGYEPNEGRSFRAADYPELAKIFPDLKLPDDRGLFKRGLDRGRGLDSGRSLGSVQGDAIRNITRSLGNPTIESGSNASGAFSYQYKAGGRAAGAGGGVISWTFDASRVVPTANENRPVNKSVIYITRVKZ

SEQ ID NO: 1290 - protein, 325 aa, Photorhabdus luminescens
MLLTFLLLITGLILLVYGSDRLVYGAAIFARTLGLPPFIIGITIVGIGTSLPELMVSVTAMLDSQPDMAVGNVIGSNITNLLLITGAAAFIRPMEVKSDILRQELLLMLLLTVFCGYLMSDHYLSRMDGLVLLASAIVYILLMIKMVALPRRAEADIYTQEQAAELPVEGNKHIALLWILLGLLILPMATRMVIDNATVIARIYGISELVIGLTVLAVGTSLPELATSIAAAFKGEDDIAFGNIIGSNIFNISIVLGLPALLSPAAISPESFHRDFWVMMVASIIFTAFCLGRKHRLNRFKGVLLLSCFIAYFIVLFISNYSIEZ

SEQ ID NO: 1291 - protein, 195 aa, Photorhabdus luminescens
MVDKYGTGQDPYTYPGIDTLINKLAIRDPVILEQAERELTELAILNISFQKPPYDLVFWRKLHKQIFSDLYDWAGQLRIIDISKGDTRFCHAKCIEIEGNRIFDILENENYLVGLNYQELIKKLAEYYAELNVIHPFREGNGRTQRLLFEYIVINCGYKISFESINAKQWIEANISAYQCHYQPLIRIFENCVSZ

SEQ ID NO: 1292 - protein, 220 aa, Photorhabdus luminescens
MAKHRFSDNIFLSCIWIMWSIALGFYLAGNFFGCAVTAILSFLALIFFFIHMRSRLKTMFGKKAEAAAVEPVSQFVDDKKNAGAEARRCTIVAKSSVFKGDIDVEGDIQIWGKVIGNIRVKEGAIRIMHAGRVEGELSAPEIIIDGDVVGTCCAATLDILEHGELRGISRCSSMSIKRGGLFFGQSEQVENKTASERVVPIKDTNNDKSKDKAAVKTSAZ

SEQ ID NO: 1293 - protein, 650 aa, Photorhabdus luminescens
MKRAFIFAPGMLALSISAISNAHTYDHLYVFGDSLSDGGNKGRYMINGTTSQLYNDFIAQYLGTKLTHSQNGGTNYAVGGATAVPDLNKDNNTQNQVDNYLASHGGRADPNGMYVHWIGGNDLKAVMLGGDPKIVRNSAMNASAQVHKLLDAGAGIVIVPTVPDLGKTPMIMKAVVSQGLTKLPISLTPDQVEELKDMIRAGTNEYPTINEDIRSQVIQGIFEKLATRASKGDAKTAEEYKRQLLDKYNETSRKASGLVDKYNELEDTALSKKGGNIVRVDVNALLHEVIDNPLRYGFSNTLGYACVRDKEANSCRSDDTGFDASKSFLFSDDFHPTPAAQRMIGEQTISILNAPHQVMSLTNTNNVPVKGALASLDGRLQQLRSVGNEQSKIGVFGGYSGNHNSTLTLGSDYQLTDNILLGGMISRYQDKRSVNHFRADGRGYLFTTYGLWRYYDKGWISGDLHYLDMKYEDITRGIVLNEWLRKEHASTTGHQWGGRITAGWDIPLTSTVMTSPIIQYAWDKSYVKGYRESGNSSTAMHFGDQRYDSQVGTLGWRFDTNFSRFNPYAEVRFNHQFGDKRYQISSAINSTETSFVSKSQKQDTNWREYVIGMNAAITKDWGAFASISRNDGDVQNHTYAFSLGVNASFZ

SEQ ID NO: 1294 - protein, 256 aa, Photorhabdus luminescens
MMKNRIYIGLFASLLLHAGILVFMAWHLLRDDSANNQSVNSPIISMSVEMVASAAPAGQEQPVDPEPIPLPPEIAVAESPHEAKIALNKPVDRPRKQELPKKQADAKPKNKSQPQKELVEDPQPKLAEQTEGSSQLAGRDAVDSQAGARQATTSQPMIGMGADELQNYQSALRREIEKHKRYPRRAKKMKQQGIVQVRFSLLDSGDLTNHQLVQSSGADELDRAALAAIQQARSVGLKPAGLPRDLTLAIEFNLKZ

SEQ ID NO: 1295 - protein, 1016 aa, Photorhabdus luminescens
KMTGIFQSPLWQIMIMYKLNNKYSKITFMLALAYSMMPYRVDAETSIASAQPSKQSTENKADLGKINVSATSEKDEAGYDAVYDKDITNIYLGKDLVERYKGASPADVLKSAVGVFSGDSRNSGALDPNIRGIQGQGRVPVTIDGTEQAITTWRGYNGANNRNYIDPNLISSIEIEKGPSLTRGVKGSIGGAIMIKTLGIDDVVPIDERFGINLKLETSSNAVKERVPSLTWGQDYRDIPGFTKGFNYVDPALEITPKTSKDNKLLGLKDNAIRLAIGTRQELFDLMAAYSYRSKGNYFAGKGGAHRYDDPISKKDIEILDGGTRSYDPYLPFVARIYRPGNEVPNTSSEMESWLVKNTWYLANQQTIGLGIRDTKTIYGEIMPSRIGWVRAKDNVVSQWPLANVHQQAFNLDYKWKPDGNKWVDFDMKFWITRTISDTNTAGGYPREPRERDEVWDVNNKQRDPNIDGRLVDTASTNAHNNRWGVDLSNAFALTPDLDLTLSANLQRERLGSHDDYEAKSFSSFRSLPRKGRRQENNIAFNFDWRPTSWLALSAGAKRVSYWSKDDFLNERLAAHDLRYSQDKKVVGKGLQYMRTLTDQEAVLYKKYSNCADDCFDDLDEFLEYEEKKITESEERDSILRPMAPVDVLWKYHDDGKLYKQDNPYFNGELDMNERVIDPVTNKEVYKYEYSTAQQNSRYVDDSGEILSNSDGGVYREKSEQERWSKQPKRKDHAWAPVFSATAYISDNARIYTRYAEAVRMPSIFEDTVGFSSGLIDKPTRASKPERSKTVEVGYVHDLSQLLGAERNADIKFAYYNTVIENIFDRDSNFVFTQLDKQKLSGLELQGRYDNGSFFTHFGLSYNLKNKVCDKTASLMLDPRNQFGVPECIDGGFPGGFLRTAIPPRYSLNLNIGGRLLNENLEIGSRVLYHSSVENKDEKWLMKKIPGAYKGINNNPMRWNSVMTVDAYINYQVTPDVIIELSGTNLTDRYYLDPLTRSMMPAPGRTFKLSVTSRFZ

SEQ ID NO: 1296 - protein, 501 aa, Photorhabdus luminescens
AVILPMLNTSIVRFTLLISCLFIEPSLVLADEDTGRRLWYNVQRNLQDQEKALVTDETVDKKTDHLLIVLNGQTFSVENNVNDIGQALYLAINHQQVQDVERFLSMYQKLPGHDTQLVHFAQANLARLQGDLVAAEQHYQAILQQQPDFTRAKLELARVYYENQKNREASLLFNEISAVSRDNENKLPPAVIKNITNYQEAINLRNSWRGSFSVGYIFNDNTNMSSDKPPVCTLYRENGECAVERKLPMAKKANGISYDATLRKIYPLSGHHGVFLRSMTYGESYRHHSEENENTTSAYFGYSYKAQKNDFLMGPVVEFNSVGNHSRYRTTGIKSEWMNILSENLVLNLEGEYKQFRYHKLYNHNDGNMASVYATLSYYLTDQTITFAGGDWVNKTSVEKADDYQQKGVRAGISTQLYPGINAVVFTVLRQRQFGDYSVPLNARRKDNEQFYAAIVSMPKFEVFGLTPVITYRFRKNNSNVDWLYSYNKNEVLVKFEKYFZ

SEQ ID NO: 1297 - protein, 254 aa, Photorhabdus luminescens
HKEYAMNKVKVLIAVLGTCGLVTQAIAAPGFGQTQKFDENKPSVNVGVTEPRGGGHPTLGGEPGIGVQSISNGRIISFSSLAAYVKADTNGIHKISMPGSGSHGGMGVFNFSKVADADVYFGEWSQTGKVNDTTHTAYYSGKDVTTNLPTGGIATYTVKGINQYSGSNALHGTFTADFGQKRLTGSIANSALTVGINSVIKSDGSFVGSATAGGAVGRNSGHFFGDNAASLAGTATFAADHSKDTAFGGTKNPZ

SEQ ID NO: 1298 - protein, 454 aa, Photorhabdus luminescens
MAKFSNWRELKQLLFFSFPIIVSQIARTAMSFVDIVMSGHYATADLAAVTLGSSIWFPIFVLGYGTIIMLAADVAKQKAQHDDEGIKDSLKNYLFLAVILSIPIIILLMLVSWLLSFIGIDEHILEITQGYVIALACGVPSVMIFNVFRSFLQGLEDTKIAMYLSAGALLLNIPLNYILIYGKLGLPEMGGIGAGITTAIINNLIAVCLIIYFLLKKEYRRYRPDFSLPKYNSLIRTFYIGMPSGLALFVEMVFLDVIAITAAPLGAQVIAAHNIMLNITSIIYTITGGIAAAVTVRVGSYIGKRDKISLTGTIKISIALILSISAVIGVLIYYFAGSFISLYTNDNGVIIIALNIIFLLCLFQFFDSCQAALSGILRGFHDTRSVFYAPLFGYWLVGLPLGFILALTDWVTERMGIIGFWYGLVLGLFVNAILLFIILKVRQRGMISRLISYZ

SEQ ID NO: 1299 - protein, 425 aa, Photorhabdus luminescens
MKPETLAIHGGYSPDPTTKAVAVPIYQTTSYAFDDTQHGADLFDLKVEGNIYSRIMNPTNDVLEKRVALLEGGIAALTVASGMAAVTCAIQSIASAGDNIISVAKLYGGTHNLLAHTLPRFGIETRFAEHDDIAALESLIDDRTKAVFCESIGNPAGNIVDLKKFADVAHRHGVPLIVDNTVATPVLCRPFEYGADIVIHSLTKYMGGHGNSIGGIIVDSGNFPWKKYKQRFAILTTPDPSYHNVVYTEQFGKAAFIGHCRVVPLRNMGAALSPFNAFLILQGLETLALRMERHTENALKVAHYLQEHPQVSWVKYAGLPNHPEHQLAQQYMNGKPSALLSFGIKGGQQSGARFIDALKLIVRLVNIGDAKSLACHPASTTHSQLNDEELIKAGISQDMIRLSIGIEHIDDIIADLAQALDASKZ

SEQ ID NO: 1300 - protein, 265 aa, Photorhabdus luminescens
MKIQLTYTLLLSTLFSGYALAQIPNEFSPTPLFEDNFDGTILNTQKWDYRGLGVRKNCINTQSAVIVRNGHLTIKTYSDSSSGKLQNYCGMISTQKSFLQSYGYWEAAIRFNRAEGNQVAFWVQSPTMGLDLTNPKKSGVEIDVFEHLAEATQDQYDHAIHWNGYGSAHKEWSKRLSTNKLADGQFHKFAVAWTPNGYTFYVDDIPQNLSGLDQVPISIANQYIILSSEVPRSYPAQGYGPINETTATFDIDYIKVYPYIGNKKZ

SEQ ID NO: 1301 - protein, 323 aa, Photorhabdus luminescens
MPKIDFQQAGKKVLHIERDGLTELEQHINGDFDRTCELMFNCEGKVIVMGMGKSGHIGCKIAATFASTGTPSFFVHPGEASHGDLGMITPKDIVLAISNSGESSEILSLIPALKRQKIPLICMTNNCNSSMGKAADIHLCIKVPQEACPLGLAPTTSTTATLVMGDALAVALLQARGFTAEDFALSHPGGTLGRKLLLLVSDLMSTGDDIPKVNRNATLREALLEITRQKLGMTVICDENRYIDGIFTDGDLRRVFDMGVDLYNVKISDVMTTGGIRIKPHALAVDALNLMQSHHITSLLVAEDNKLLGVLHMHDLLQAGVVZ

SEQ ID NO: 1302 - protein, 701 aa, Photorhabdus luminescens
GKMMMFEKNSPHKKNRLSHCIRSAMPLFLLATFNGYAAETAADVHDHVKGAKTNDGDVITVTAPLYSPLAIVTSPKTPRQPVPASDGSDYLKTIPGFSQIRNGGTNGDPVFRGMFGSRIKLLTDGAEMLGACPGRMDAPSSYISPESYDLLTVIKGPQTVLWGAGASAGTVRFEREHPRFDEPGVKFNASGLTGSNERWDGNVDASIGNELGYLRLMANKSRSNDYKDGGGYRVPSRWDKWNSDLALGWTPDKDTLFEFTAGKGDGEARYAGRSMDGSQFKRESLGVRFEKSNLGEVLDKVEAQVYYNYTNHIMDNITLRSPNSAMSMGMSSAGCKHGCGMHMNMNHGMSMQLDRRVIGGRVMGTWLWQDFKLESGADTQTNTHRNKAGNVWQKDAQFYNYGLFSELTWYATEQSELITGARLDRSRVKKFAGNSEKERNDTLPSGFMRLEHTLAAMPMMFYAGIGYTERFPDYWELFSPTYGPTGSTSAFDGVKSEKTTQLDIGAQYTGERFNGWVSAYVGCVSDFILFRYSPTNARISQADNVNANIMGGEMGFGYQLTDHWKTDASLAYAWGENRTDNKPMPQIPPLEARFGLTYERGDWSSTGLWRLVSSQHRIAVGQGNVVGKDFQDSSGFGVLSANVAYKVNKDIKVSAGIDNILDKEYSEHLNLAGNSTFGYSANTSVNEPGRTVWAKVDIKFZ

SEQ ID NO: 1303 - protein, 528 aa, Photorhabdus luminescens
MLIDFCLGANGKGIYTDPENRKSEYVLVKNFLIDTAVLVTLTLTADLDNPFAEELVIERNFLPRKQIIRRINGHQKTADEFEAALTEQLFPGHFGKKPTFPQIISHNIRYRELSVINTLRTLSEFTRDDEYETLYLFLLGCNFDQGDTKQNLLASIRMEMSFKGRLESKQTRSAYEASMALLSTEIAKLNEKKSEFYINPNFESDLETLDEIKYKINVSSSVISRLKLRRSLIDEAIREINSSHTEIDTNQLKALYGEVTERLSGVQKSFEDLLEFHNRMVDEKARYIAKEIPALEQELVVRENKLASLLNEEQTLAAKISKSGSLEELESLIIELNEKHRRMGEFETIIEQILTVDTTLRNLNKSLNEIDEELFSADFESAIQMQLNKLNKYFSSISQELYGEQYALKVDRTTTRTGQRIYKFSSFNTNFSSGKKQGEITCFDIAYTLFADKEGIPCYHFLLNDKKELMHDNQLTKIAMLVEREHKHVQYVASILKDKLPPELNQEKYFVLRLSQDDKLFRIESSNZ

SEQ ID NO: 1304 - protein, 229 aa, Photorhabdus luminescens
RSFTNMKNNYSLSPQVINTMEISNEPWGVKDSSSNFIYGNSATKKFIHNFKASFDYEGLYDHELPWDGAEFAKEFILHDKSVMTKGERVCSLETHVFGQEQTLSSYFCEKLPLYHDNGHCMGIMYHMWKAKEYSLTCLHQYYDKLPPSLLFQPPSDLFTQQEWDIIFLFLQKQPKKQIGKILNIAYHEVEEHMLRIYRKIGIHSSQQLEEYFRANNFEHYIPERFLLSZ

SEQ ID NO: 1305 - protein, 235 aa, Photorhabdus luminescens
RIFMNKSGLKQVPFITRQLTHVWDRSPDPWFVKDKESRFIYANTKFIKIIQLPENFSIIGYTVEELPIAVNGFAHHFKEHDRKVLECMQKVCSVGTYPQGNGRPPKSYFCEKYPLMSEDNHCVGIISHARELEHFTVYHYIKEHIPTSASLRPPNDLLNEKEWMVIFLFCCGMNNNETSIEMNVSCHAVEKYFESIYEKLSVSSLTELRLLCKEKGYDLYVPSRYFLSIGHFILZ

SEQ ID NO: 1306 - protein, 379 aa, Photorhabdus luminescens
VNTYPLPSLSMEQAQHKQFHLVDIICRHFPGADFLTTGDLGLVPGLNRPQITQRVEQVIADFFSAEAAVLVQGAGTGAIRCGLSALLNAGDRLLVHDAPLYPSTAIIAEQMGLHLVRADFNQSEQIRAAILQHLPVAGLVQHTRQKIDDAYELADVISLLNAASLPVLVDDNYAAMKVERIGCEWGAALSAFSSFKLFGPQGIGVVVGQQAAIERIRRSMYSGGSQVQGFQALEVLRGLVFAPVMHAVQAQVSETLVVRLNQGIIPQVKQAFIANAQSKVLLVEFYDEIAEQVLHVAHQLGALPYPVGAESKFDIPPLFYRLSGTFRQSDPTLERRMIRINPNRSGAETVIRLLSQSCAQAASLLHPQPLPIYRFPSVZ

SEQ ID NO: 1307 - protein, 445 aa, Photorhabdus luminescens
MEIDPFKAGLLAVIGGISAMMANRGIAVFHDGLRPLMPEHLEGRMNRKTLAATSFALSFGLVIGFGIPFSLTAPIILVHSLLLGTDVIGTWCANSKKGFILSAVLGALYAVALMTGLRSVVDIFAHLPVNFMGNLSKVGDPIVACFALFPAIVVAYQYGYGKGIWVLIATLVGYIATKAVGSLSFGGALSKPVQLDPNGIALLISMIVMFYFAMKQRVPKAGEGSAPAKGANETLVGLFSTRIQRIQNNIWLLVLSGGLTAVAASMSLSLLAEGPVSLQLMAQGEGANAMLVALARAISFVPLVGMTAIATGVYSPVGMKFVFVAGLVTNNLWIAFIAGSLIMFMEIKLLARIAIWLDKYPGVKACGEHIRTVITRMLEVALLVGGMMAANAILPGMGFMVVAGIYLLNRTAKRPLVEMAIGPIATIVVGVLANVIYLFSPFILZ

SEQ ID NO: 1308 - protein, 342 aa, Photorhabdus luminescens
LAVSSQGIRSWKGFMTARETLSRLMENMVCEQTQFHSLRLRTALLMTQKNRIDASGYTYVHEHLHLDLSSFKNNIDCRLDQYELICEEMKTLVSLGVHNIVEMTNRYMGRNPQFMLDLMRDSGINVIVSTGYYQSAFFPEHVAHTTARQLADEMIAEIEQGIDDTTLKAGVIGEIGSSKGVITPDEEKVFHAAAIAHLATGHPISTHTTLSTMGLEQLALLKKHGVDAERVVIGHCDLKDNLDNILRIIELGAYIQFDTIGKNDYYPDEKRIAMLQTLAQRGLLNRVMLSMDITRRSHLKANGGNGFDYLITTFVPMLNRAGLTQTDIDLMLRDNPMLFFNZ

SEQ ID NO: 1309 - protein, 393 aa, Photorhabdus luminescens
MFIHALNKQNPALIEAAQTLWAQGVLLPDTYVIDVDQVLENARRLLAVAEHYGIALYLMTKQVGRNSWLARKLMELGYQGVTAVDFKEARALMSGKIPVTHAGHLVQIPRNMVSSVMQQHPEVITVYSLEKAEEISSLARREGNVQRIMLKIYDDHDHLYPGQEAGFHLSELHTIVQHIMAMPGVKLTGLTHFPCLLWQEDQQQTLPAPNLFTLLKAKDILRQTGVEVTQINAPSASSCSTLPLLAKYGVTHTEPGHALTGTILANFRGEQPERIAMLYLTEISHRFNGNSYCYGGGYYRRGRAHNALIFLPNGQIAATHLLPMDNTSIDYHFPLSGEFPVGCAVVLCFRTQIFATRSDVALVSGIQSGHPVLEGLYDSQGNPIPINGEHGLZ

SEQ ID NO: 1310 - protein, 302 aa, Photorhabdus luminescens
MSHGLLKKEGVAQACLARYLLGERCGNRLKTIEELSSDYGLSVGLVQFALKKLESSGAVYVERRGRNGSYLVSMDHKALLAHADISNVVCAMPLPYTRLYEGLASGLKAQFEGIPFYFAHMRGSDARVECLRKGIYDLAVVSHLAAQTYLEQGDVCTVLELGPHTYVGAHQLIYRKGGEHNIRRVGLDHRSADQKIMTEVYFAGQDITLVDISYHESLYKVAKGDIDAVIWNVSREVELSSRELIAVPLSGSACFTRASEAVILTRADDILMQQLLRTMVNTTELLVHQQRVLAGQQDPSYZ

SEQ ID NO: 1311 - protein, 557 aa, Photorhabdus luminescens
MMKMLLIVDPSLGLAGSYLVKTILSAAAAEIGQILTENPAEADLVVVTGSRIPTDNTLNGKLVYLGDTEQALHAPKNFFQQAKADAKPYQIPATDISCDTKRIVAVTACPTGVAHTFMAAEAIETEAKKRGWWVKVETRGSVGAGNVITPEEVEKADLVLVVADIDVDLAKFAGKPMYRTSTGLALKKTAQEFDKALAEAKLFEPEGQKVKTDRREDNTGIYRHLLTGVSYMLPMVVAGGLCIALSFAFGITAFKESGTLAAALMQIGGSSAFALMVPVLAGYIAFSIADRPGLTPGLIGGMLATSTNAGFIGGIIAGFLAGYVAKLLNSKVKLPQSMAALKPILIIPLFTSLITGLIMIYVIGKPVAGIMAGLTYWLSHMGTTNALLLGAILGGMMCADMGGAINKAAYAFGVGLLSSQTYAPMAAIMAAGMVPPLAMGVATLIARQKFDNVQRESGKAALVLGLCFISEGAIPFAVRDPIRVLPCCIVGGAVTGAISMAISAQLMAPHGGLFVLLIPGAITPILGYLMSIIVGTLLAGLIYALIKRPETTTTKPZ

SEQ ID NO: 1312 - protein, 253 aa, Photorhabdus luminescens
GVFSGYTTPACSRSCICNTPSNLLSSATNKDVIWCDCIKFNASTARACGLMRIPPVVITSEILTLYKSTPISNTRRKSPSVKIPSIYLFSSQMTVIPSFCRVISSSASRKVALRLTFGISSPVLIKSLTSSRSLRPRVPPGCDSAKSSAVKPRAWSNATAKASPITSVAVVLVVGAKPSGQASCGTLIHRWISAAFPILLLQLLVMQISGIFWRFNAGISDKISLDSPEFEMAKTMSLGVIMPRSPWLASPGZ

SEQ ID NO: 1313 - protein, 376 aa, Photorhabdus luminescens
MFQLALQNIHTGAIATSKEDAIRQVAAMLAANGNVGDAYVDGMLQREKQISTYLGNGIAIPHGTLDTRDLVMKTDVQVFHFSQGVEWDQGAMCYVVIGIAARSDEHLALLRQLTHLLSDDRIAKQLKTIESAQALHSLLMGEVQQSEFKFDTSLITLDVNACDLMTLQALNAGRLQRAGAVDTTFVSKVINSKPLDLGQGIWLSDSPDGNLTSAVAVSRLFTRDNEPVVMLLTVAVADDQPLSVLHHLSNLLLAQKAECLLKADAPTVLALLTSGALAQSTISSGEFVLCNEHGLHTRPGAVLVNVIRQFSSEITLINLDGAGQPVNGRSLMKIMTLGAKKGHRLHITANGDDAPQAIAAIGEAVASGLGEGPREZ

SEQ ID NO: 1314 - protein, 207 aa, Photorhabdus luminescens
MGQRRHLTQYEVERMLEVAKKGPNGERDYCLVYMSFVHGLRVSEARYLRISDLDLEDGSLYIRRLKGGFSTIHPLLGYEIQAIREWLKVRKTFRGAESDWLFLSRSGNPLTRQRIYQLISQLGRLANISVGSHPHMLRHACGFALADRGIDTRLIQDYLGHSNIRHTVRYTASNAERFHGVWGVKRNRHRELHFDYVPNENPCPTEZ

SEQ ID NO: 1315 - protein, 514 aa, Photorhabdus luminescens
MKRIINTLQNLGKSLYGPVLILPIVGLFIAFGNVLGNGNLAEYLPFLNHGLIQQSGKLIAQSAISILSNLALIFAVGIPIGLAKRNKGYAALIGLVTFVIFINAMHVTLALQGKLVPETQMRNVGQGMVLGVQVLEMGAFAGILIGALAGYCYNRYSSKQFNGVMAIYSGHCFVAILMIPLAVISGYLMSDIWPYAQRSISALAHGIHESGAFGVAIYGFLERILIPLGLHHLVYTPFLYTELGGIAEVCGTVHQGARNIYFAEMACPAVHQLSHSVVWDARGISKMFGLTAAALAMYVTARPEKKSTAKAVLIPAAMTTFLLGVTEPLEFSFLFVAPLLFGVHAVLTGLGFMLFYLLGVHAIGANGIIDFILYNLPLGTEKSNWPMYIAVGLIMSVIYFFAFRFLILHYDLKTPGRENNDQETRLYSKQQYQVANDDKPGQQIICGLGGTANIVAIDNCYTRLRITVHDTTLIDKNRLKSTGAKGVICQGNNVQVIYGLHVQKMREAVEEALZ

SEQ ID NO: 1316 - protein, 453 aa, Photorhabdus luminescens
MANAPFILTIAGGGSTYTPGIVKSLMVRLNDFPLAEIRLYDIDTHRQNTIAPVVEKVIREHSQTIRFVVTSEAKTAFSGTHFVFAQIRVGQYKMREQDEKIPLHHGVIGQETCGLGGLAYGLRTIMPMVKLIDLVERYADNAWIVNYSNPASIVAEGIRRLRPHASVLNICDMPVAAMRNMAAILDVDRHDMTVDYFGLNHFGWFTKVWVNGKDHLPELRRHIAQHGLLTANAAQTDPQHADPSWVKTWRNIKPLMDHFPDYVPNPYLQYYLMPNHIVEHQNPDYTRANEVMDGREKKLFKAAAEFKHTGILPDAFHVGVHGAFIVDVACSLAFDLRQRHLVITENRGAIANLPYDAMVEVPAYITAQGPEPVCIGNVPLFHQALLAQQLASEQLLVEAALEGSYEKVLQAFTLNRTVPTMQQAKAILDEMIEANLGYWPTLNPAWHQGEAIZ

SEQ ID NO: 1317 - protein, 261 aa, Photorhabdus luminescens
KMTDNRLAPLLQHSERITRAEYRVLSYLTAHPLLIGQITVRELAKATFISPATIMRLCQKLGFSGYSEFIWYCKQLLSSGTSISGNIQPHHTEIIPDAFEHFVTNYRKTFSLITPEKMSRFSTLLREKENFFLYSAGFSRLFADYLTQKLQILGKTAFKSGPGDSRKIFLSNAVKYEVFIAISRSGQTEQVLDKVRIAHNVGMTVIAFTRSSANPLASLADVHFALYDEAIYFDAEINEITSFESNLIMLIDLLLLQATSZ

SEQ ID NO: 1318 - protein, 235 aa, Photorhabdus luminescens
RSNMSQSGCKKAPFITPQLTNMWDKSSEPWFVKDKEFRFIYANKMFIKANKLPENIDIIGYTDKELPSPVSQFSHLFEEHDHKVLQGMQRISSLSTYPQAKNEQATSYFCDKYPLMDENKQCIGIIAHAREIHNFTVSHYMENNIPISIRFQKPNNILKEKEWIIIFLFCRGVSNRYIADEMKISYRTVEKYFESIYEKLSVSSAIELRTLCKENSYDLYIPPQYLQSIGHILLZ

SEQ ID NO: 1319 - protein, 419 aa, Photorhabdus luminescens
MEFFHFLMSDVLSEPAILVGFIALVGLIVQRKPVTECIKGTIKTIMGFLILGAGAGLVVSSLGGFAEIFQHAFGIQGVVPNNEAIVSIAQKSFGKEMAMIMFFAMVINILIARFTPWKFIFLTGHHTLFMSMMVAVILATAGIKGSMLVAIGSVVVGVAMVFFPAIAHPYMKKVTGSDDVAIGHFSSLSYVLSGFIGSKLGNKAHSTEEMNVPKSLLFLRDTPVAISFTMAIIFMISCLFAGGDFVREVSGGKNGFMFSLMQSITFAAGVYIILQGVRMVIAEIVPAFKGISDKLVPNAKPALDCPVVFPYAPNAVLVGFLSSFVAGVIGMFVLYALGMTVIIPGVVPHFFVGAAAGVFGNATGGRRGAILGAFAQGFLITFLPVFLLPVLGDIGIANTTFSDADFGALGILLGIIVRZ

SEQ ID NO: 1320 - protein, 351 aa, Photorhabdus luminescens
KNILMKKTRKRRNTGRVTLQDVAKYAGVGSMTVSRALRTPEMVSDKLREKIEQAIQELGYIPNGAAGVLASGQSNIIAVLVPSLTDKASATFIQSLQQVLNKHAFQVLLGCHEYDHNKEAEIIMTLLQSNAAALVIFSSQLADKTYSNISHINIPIINVAGSHQQQTAINIETDFSAAAYMLTEHMLNNGRKHIGYIGAQMDSRLRNQQINGWHKAMLHHYQNADQNITTSDTASMQFGRQAITEMLLRQPELEGVICSHEVIALGVMFECQRRLLKIPADLAVACLDGSDNCDHTQPTLTSIRINYPQIGRDTGKLLIKLLTQQGEDETKHQNNRYHLFSYKFEPRQSAZ

SEQ ID NO: 1321 - protein, 352 aa, Photorhabdus luminescens
MPTLFDPIRIGDLDLPNRIIMAPLTRNRAEGEGRVPNALMAEYYAQRASAGLIISEATSVTPQGVGYENTPGIWSDEQVAGWRLVTDAVHAAGGRIFIQLWHVGRISDPVFLNGERPVAPSAIAADGHVSLLRPKRPFVVPQALESEEIPGIVEAFRRGAENAKTAGFDGVEIHGANGYLLDQFLQDNANLRTDQYGGSVENRARLLLEVTDACISVWGSSRVGMHLAPRGGHYSMADSNPVATFGYVARELGKRGIAFIFSRDAVVDGDLSKVIKEAFGSTYIANEELTKESAEQVLADGRADAVAFGQLFISNPDLPHRFLVKAPFNEQQPETFMVPGAIGYTDYPALTZ

SEQ ID NO: 1322 - protein, 574 aa, Photorhabdus luminescens
MNLLDGLQKKLDGYFNKTSEINYVKIFDTPQIWGLPFGKEIMPQAVKRAAEFEDAIVSILENMRYRCDISSLNAPDAEWRKVILSAIDSAFTKKINRKERTQIRFLFAQTPTSLLNGVNSYFEGTPEYLALKEDIIKLIQERRDHWECVPEIWIGRFYRIVDGLKVSLEKKVLPEEMFPEDDTRMTWNHTKIIAVDGIESFVGGHNLNMDLFKNYPPVHDVSVKVIGTASLSSQLFLNNMWVADTDLLTKEFFDIDKNRWVNANGIVGKPEDPLKKEYVTEYIDRKKEESLKNPPKDPEYKKTSRILSVGKYWSGPDMRTDYKKGSEIMKEFIIKNAKKKIRMSQQDLVSAWKKQWRDHHVCRWLIEALLANPELEVQIVVSPLDAAAGAAGDQYSFGSGAKRTFEIFKYYLTHDEHTDKKLEDPDGIRQAALKRIEVAPFFFTDKVPEDLLIEGTTYRWPTPDENSYTATLKEPSLSERPPQIGAIGRPFRSLIKASGPVYPKVPPAPGNHAKVTIIDDELYVVGSDNLYPGYLSEFNYLIEGEDAVKAFIESYWEPLWKYSGTHSFNYKNTZ

SEQ ID NO: 1323 - protein, 242 aa, Photorhabdus luminescens
MAILNAENLAKAYKGRKVVENVSLNVNSGEIVGLLGPNGAGKTTTFYMVVGIVSRDTGTITIDNEDISLLPLHERARRGIGYLPQEASIFRRLSVFDNLMAVLEIRQDLTQEQRKERAEELMEEFHISHLRDNLGQSLSGGERRRVEIARALAANPKFILLDEPFAGVDPISVIDIKKIIQHLRDYGLGVLITDHNVRETLDVCERAYIVSQGHLIAHGTPNDILNNEQVKRVYLGEGFRLZ

SEQ ID NO: 1324 - protein, 444 aa, Photorhabdus luminescens
MKRTEIQQLLNEYPLVKNLMELEEIFWFNPCNTTLKEGLPFVGLGADDVEDAEARLDRFASYLCKAFPETAVTHGIIESEIVAIPTMQKTLEQHYGVGITGRILLKKDSHLPISGSIKARGGIYEVLTHAEKLALQAGLLAENDDYSKLFSEELRRFFNQYSIAVGSTGNLGLSIGIASAKLGFNVSVHMSADAREWKKQKLRSHGVNVVEHELDYGVAVARGRKEAESAPNCFFIDDENSQTLFLGYSVAGGRVKAQFEQMNIVVDEDHPLFVYLPCGVGGGPGGVAFGLKLAFGDHVHCIFAEPTHSPSMLLGVYTGLHDNICVQDIGIDNITAADGLAVGRASGFVGRAMERLLDGFYTVQDQEMYNLLGLLDRDEGIRLEPSALVGMAGPARVSGNLDYLNNKNLSAEKMKQATHLVWATGGGMVPDDEMTKYLATAKIZ

SEQ ID NO: 1325 - protein, 446 aa, Photorhabdus luminescens
VDSQPWVIGTLLTSIALIVFTIIKLKIHPFLALLLASFYVGALMGMNPVEMVNAIQGGIGDTLGFLAVVIGLGTILGKMMEISGAAERIGITLQKCRWLSPDIIMVLIGLVCGITLFVEVGVVLLIPLAFSIARKTNTSLLKLAIPLCTALMAVHCIIPPHPAALFVTNKLGADIGSVIVYGLIVGLFAALVGGPLFLKFLGSRLPFKSVPAEFSEIAVRQEEDLPSLGMTLFTVLLPIGLMLTKTAAELNMEKGTTFYTVLEFIGNPITAMFIAAFVAYYTLGIKQNMGMSTLLTKTEDCFSSIANILLIIGAGGAFNSILKVSGLSDTLAVILSSLDMHPILLSWLVAIILHAAVGSATVAMMGATAIVSPMLPLYPDISPEIITLAIGSGAIGCTIVTDSLFWLVKQYCGTTLSETFKYYTTATFIASVVALVGTFLLSTIVZ

SEQ ID NO: 1326 - protein, 313 aa, Photorhabdus luminescens
MYTDDNFMVVNKLLNGSQLSKLHTFEIAARHCSFVLAADELAITASAVSHRISSLEQELGFKLFQRFHRKIELTCEGKRLFWTIKSTLEHLNQEILEIKNQELSGNLTIYSRPTFTQCWLVPKLADFNQLYPSINLNILVGNENVNFRGYGIDLAIYFDDIISNELSHQYLMSEYITPVCSPQYAEKHDLMGNIDNLRYCTLLHDKQAWSYDSDTKEWNTWAEHFDITLEPSQKCIVFDRSDLAAVAAIHHAGVAMGRKNMIWEKIENNELVAPFPNTEVLCKQYYYTCTLPQQQNEKVNAFIQWLKSTIDEZ

SEQ ID NO: 1327 - protein, 285 aa, Photorhabdus luminescens
GIYMSQKNDFKAFSIDNNANVVSQERYEESLNLNTGFQPDNVPTHLLNKVLRQSSTISSVVANFIATQSNNDILDDGNITKLTTQLHKALEQKVTTAIPNASLTQKGVVQLTNVVGNDDTLAVTQKFAQNIINSLNENINGKVPNTRKVNGKVLSSDINLTAGDVGSYDKSESDEKYQPRGNYGSRNTASLRTTNGWWRCGDTGLIYQWGQSPEEIDETSNIYYFPIVFPSTCAIGVATPDHHKIEAGVISAYFKIMDNARFKLTLDQASNDQSAKVFWFAIGWZ

SEQ ID NO: 1328 - protein, 469 aa, Photorhabdus luminescens
MAENIHTSLSTKTGETQLQRNLSNRHIQLIAIGGAIGTGLFMGSGKTISLAGPSIIFVYMIIGFMLFFVMRAMGELLLSNLNYKSFSDFSADLLGPWAGFFVGWTYWFCWVITGIADVVAITSYISYWQPDFPQWITSLLCVSLLLSLNLATVKLFGEMEFWFAMIKIVAIIALIATGAVLIGMHFQSPAGHTASLANIWNDGGFFPKGLSGFFAGFQIAIFAFVGIELVGTAAAETKDPMKSLPRAINAIPIRIITFYVLALIIIMSVTPWRSIIADKSPFVELFVLIGLPAAASIVNFVVLTSAASSANSGVFSTSRMLFGLAKEGDAPQQFSRLSRRSVPASGLIFTCLCLSCGVVLIYLIPDVMHVFTLVTTVSAILFMFIWSMILCSYLVYRKRRPALHKASTYKMPLGIIMSWVCLTFFAFVLILLTLRDDTRQALIITPVWFLILIIGFQIVKKRRTRLYSZ

SEQ ID NO: 1329 - protein, 200 aa, Photorhabdus luminescens
MTKILVLYYSMYGHIEALASAVAEGAKKVADVEVTIKRVPETIPPEAFTKAGGKVDQSAPVASVQELVDYDAIIIGTPTRFGNMAGQMRNFLDQTGGLWAEGKLYGKVASVFTSTGVGGGQEMTITSTWTTLAHHGFIIVPIGYGIPEIGDISQMQGGTPYGASTIADGDGSRIPNENELKIARYQGEHVAKIAKKLKDZ

SEQ ID NO: 1330 - protein, 413 aa, Photorhabdus luminescens
MDNNMLLNQSLEENKLPNSEVPAATLNILTGQVQGAARSAGIFTKEDLINIKLYVKNGLELPFTLPTVKEYIHYNDTNIEGLKPENIKTLFEEIHNHALSWSKVEDKVQQQSIDLENAGKQITQKGESIIKIIEKMPITDSIETLKNTYNNRKPTNEQLFKITYTDVDKKVAVGLKSILESMEKDVKGYRENSQQVKDAITDFKITLFGGTLSDGKTADGLLPQVDTKKKLMDDNNLSTTVKELQDEINEKKRDIEQLQKDYDQYVKLSLSGAISVIGVVITGSIFGPKAENARKQKNELIEKVKELQEQIKGASALQTALQNLSLHFLNIRSCMQDAEVALKHLDVMWSTMLEQINLSKKSFAEIDNASMLLMFEETFKQAISPWKEVQGSAEKLVKIFDEALAEYKKRSKZ

SEQ ID NO: 1331 - protein, 213 aa, Photorhabdus luminescens
KVSESIISQKEIQYPKVNIKSLDETVNKIWLLAKQQTSGITAIAEKAERVSSYSRELSELVSESLSKLPPILSQFLAGDIFQSIRKIDKALEAHDLSDEKRSDILKARDQFIQKLSKDIDNVIANFDDRINKLTGKINDINDIVIAGHFEDVLAKTKKQKAELQSDIEQKTKERKKLDAERDKIIESQDVIRAKILRICLKIISQIPMTSMAZ

SEQ ID NO: 1332 - protein, 343 aa, Photorhabdus luminescens
MKALVLEKAGQISIQDWETPEILGENDVEIKIHSVGICGSDVHYYQYGRIGPFIVEKPMILGHEASGVITAVGKNVTHLKIGDRVCMEPGIPNLQSPQSRAGIYNLDPEVRFWATPPIDGCLRERVIHPAAFTFKLPDNVSFAEGAMVEPLAIGMQAATKAEIKPGDIALVIGAGTIGIVTALAALAGGCSDVIICDVFDEKLEIAKQYPGLHPVNSKVLTEKVNALTEGNGVNILFECSGAKPVIATISEHIAPGGIAVLVGMPIDPAPFDVVSAQAKEITFKTIFRYANMYPRTIRLLSSGKLKVTPLLSATYKFKDSVQAYERAAEGRPTDIKIMLEMEZ

SEQ ID NO: 1333 - protein, 504 aa, Photorhabdus luminescens
MALYAGIDCGTQSTKVIIVDSQKTPILGEGSSPHPIISDSNGRREQQVHWWTEALESAFSQAIEQAGISGTEIAALAVSGQQHGFVPLDAEGHVLAPVKLWCDTETAAENQEIIDALGGTQATLAQLGLMPQTGYTASKILWFKKYRPELWEKLNAVLLPHDYLNYWLTGRLVAEYGDASGTGLLNIRKREWDNQIAQFIDPDGRLWNALPELVSAETCIGTVRPEIARRLGLSPTTKVASGGGDNMMAAIGTGNIIPGITTMSLGTSGTLFTYSDKPIVADSEMIAGFCSSNNGWLPLICTMNVTSATTTIQKLFNMDIQTFNDTLNQSKPGANGLMMLPFFNGERVPPLPHAKASLHNLNTSNMNQQNFILAAVESATYGLRFGIELFRKQGIEINEIRLTGGGARSKKWRQIVADVMNTPVICVTNQEAAALGAAIQAMWCDSLTEEKDKQMQLAHFCQHFVHLDEETRTIPTPETAALYDVFYQDYLSLLTTEYPEVKIZ

SEQ ID NO: 1334 - protein, 481 aa, Photorhabdus luminescens
MKQSLQLRLSQQLAMTPQLQQAIRLLQLSTLELQQEIQQALEMNPLLEQDEEHQEIGNQELPDNETEAMDTLDALQQKDMPDELPLDVSWDEIYTAGTPSGTRNDYNDDGELPLYQGETVQTLQDYLMWQAKLTPFTEIDAAIATSIIDAVDDTGYLTVPLEDILASLGDNQLTLAEVETVLKQIQHFDPIGVAARDLKDCLLVQLSMFPPETPYLKEAKLIVCNHLELLGHWDFRNLIRLSHLTEDTLKEAISLIQSLAPKPGLAINTGESEYVIPDVLVRKESEHWQVELNTDSIPRLHINQHYAELGQHTRNESDSQFIRNNLQEAKWLIKSLESRNDTLLKVARCIVEQQQEFFEHGEEYMKPMVLADIAFQVDMHESTISRVTTQKFLHSPRGIFELKYFFSSHVNTESGGEASSTAIRALVKKLVAAENSAKPLSDSKLTSMLADQGIMVARRTVAKYRESLSIPPSNQRRRLVZ

SEQ ID NO: 1335 - protein, 495 aa, Photorhabdus luminescens
MTVNTPMLITFIVYITGMLLIGFLAYRSTKNFDDYILGGRRLGSVVTALSAGASDMSGWLLMGLPGVVYFAGISESWIAIGLALGAYLNWKLVAGRLRIQTEINNNALTLPDYFTSRFDDSSKILRIISALVILIFFTIYCASGVVAGGLLFESTFGISYQKAMWLGAAATIAYTFLGGFLAVSWTDTVQASLMIFALILTPVIVIFSVGGIDTSLALIAAKSPAYMDMFKELNFIAIISLLGWGLGYFGQPHILARFMAADSHYTIRKARRISMTWMVLCLAGTIAVGFFGIAYFEMHPELSGPVIANRERIFMELAVILFNPWIAGILLSAILAAVMSTLSCQLLVCASALTEDLYKPFIRKSASQKELVWVGRFMVLLVAVIAMVIATNPDNKVLALVSNAWAGFGAAFGPVVLISVIWKRMTRNGALVGMLVGAVTVLVWMKYQWFALYEIIPGFILASIAIVIVSLLGKAPSSAAQQRFVDAEAQYKTKZ

SEQ ID NO: 1336 - protein, 1327 aa, Photorhabdus luminescens
MGSTTMGVKLDEATRDRIKAAAQRIDRTPHWLIKQAIFNYLERLENDEQIAELSSNQDVKEEKIIAEETVTDSAHQPFLDFAEHILPQSVKRSAITAAYRLPETQAIPMLLQQAQLPEDQAQATHKLAYSIAEKLRNQKNSMGRSGLVQGLLQEFSLSSQEGVALMCLAEALLRIPDKATRDALIRDKISNGNWHSHLGQSSSMFVNAATWGLLFTGKLVSTHNEAKLSNSLNRIISKSGEPLVRKGVDMAMRLMGEQFVTGETIAQALASARKLEEKGFRYSYDMLGEAALTEEDAQNYMVSYQQAIHAIGKASNGRGIYEGPGISIKLSALHPRYSRAQYERVMNELYPRLLSLTLQARQYDVGINIDAEEADRLEISLDLLEKLCFEPQLAGWNGIGFVIQAYQKRCPFVIDTVIDLAQRSRRRLMVRLVKGAYWDSEIKRAQIDGLEGYPVYTRKVYTDVSYLACARKLLSVPNLIYPQFATHNAHTLAAVYHMAGQNYYPGQYEFQCLHGMGEPLYEQVVGKIADGKLNRPCRIYAPVGTHETLLAYLVRRLLENGANTSFVNRIADTTLPLDELVADPVTKVKKLAETDGQIGLPHPKIPLPHNLYGKDRANSAGLDLANEHRLASLSSALLSSATEEQYSEPRLGGNYHHQGELPAAKPVINPATPSDIVGYVREATEQEVSHALDVATEAGAIWFATPPSERAAILVRAAELMENQMQPLLGILVREAGKTFNNAIAEVREAVDFLHYYAGQIRHDFANDTHRPLGPVVCISPWNFPLAIFTGQIAAALAAGNSVLAKPAEQTPLIAATAVKILHQAGIPLDALQLLPGQGETIGALLVGDERVRGVMFTGSTQVASLLQRNIAGRLDAQGRPTPLVAETGGLNAMIVDSSALTEQVVMDVVASAFDSAGQRCSALRILCIQDDVAERTMTMLKGAMSECRMGNPERLSTDIGPVIDAEAKAGIDRHIQAMRTKGRTIYQAAQDNVVDNQEWDQGTFVKPTLIELESFDELKQEIFGPVLHVVRFKRHELDKLLDQINNSNYGLTLGVHTRIDETIAQVTAKAKVGNLYVNRNMVGAVVGVQPFGGEGLSGTGPKAGGPLYLYRLLSCRPQNAINQTLERQDAEYPLDANVRSALMAPFDALTEWAANQHNEELNQLVQQYKLLAQGGTTRLLPGPTGERNTYTLLPRGQVLCLADNQQDTLIQLAATLSVGCQLLWQNDELHQQLFRQLPDSVRKSIHLVQDWQSEDTAFEAVIYHGDSDQLRQVCGQVAQRKGIIISVQGFARGETNLLLERLLHERSLSINTAAAGGNASLMTIGZ

SEQ ID NO: 1337 - protein, 241 aa, Photorhabdus luminescens
VSDLYTAEGVMDKNSLWKRYVPLVRHEALRLQVRLPACVELDDLLQAGGIGLLNAVERFDSLQGTAFTTYAVQRIRGAMLDELRSRDWAPRSVRRNAREVTHIIRKLEQDLGRPASEQEVAKELKIDLVEYRQILLDTNNSQLFSYDEWHEMHGESCEPVIEEGHETNPLQQLLESDVRQRVIEAIDSLPEREKMVLTLYYQEELNLKEIGAVLEVGESRISQLHSQAIKRLRARLNPEKZ

SEQ ID NO: 1338 - protein, 356 aa, Photorhabdus luminescens
MAQVINTNSLSLLTQNNLNRSQGTLGSAIERLSSGLRINSAKDDAAGQAIANRFTANVRGLTQAARNANDGISIAQTTEGALNEINTNLQRIRELTVQSQNGSNSESDIKSIQEEVTQRLKEIDRISEQTQFNGVRVLREDSKMTIQVGANDNEVIDIDLKKIDKEALNLGKFTISAEVPHGEVVKQVDDGAGGKKNIDHTADAKVKGLKSVEVYEALKDDGSVNPGKYVVKGTDDTDGKVKYFEATITKEGKLTADADITAKASEKPLETLDSALAQVDSLRSSLGAIQNRLESTVNNLNNTVNNLSAARSRIEDADYATEVSNMSRGQILQQAGTAVLAQANQVPQNVMSLLRZ

SEQ ID NO: 1339 - protein, 474 aa, Photorhabdus luminescens
MASISSLGAGSGMDLGSILDKLQAAEQKRLVPLAQQQTSYKGKLTAFGTLKGSLEKLETASESLKKFDKLNTTTASEKHDAFVASTDSKASPGNYSIEVKQLAQAQSLQTEKVSNIKEYLGESLGEGKTRTITITQPGEKKPMKIELTDGQTSIIEIRDAINKQEGNVNASIIKAKDGENYLVLTAKKAGTESVMTIKVEGDNKLSELLNYPGTTSKLTQTVEAKNAKLTVNKIPIERQTNHITDAPEGVKLDLKKTTEDKDKPGEHKPEILVISRDIEPMKEAIKNWVDAYNELQTTFDSLTKFKPVKQGEEPSKDNGALLGDSTLRGIQNQLRSQIFSSQAANDIPTLNKLGIKQKPDGKLEIDNEKLEKNLKEKPTNVKAFFMGDGKKTGFATQTHKLLKDALDSHEGTLATATDGINKRLKTLDQQVDRTKQNINETIERYKRQFSQLDKMVSSLGNTGNFLSQLQKIRZ

SEQ ID NO: 1340 - protein, 274 aa, Photorhabdus luminescens
GNNMSEVIKLENECQFDPKQYECHSVVAPVGSFSWALIQLKLRKLVARSVWRDKKMYLAITPRVNDLTVEEGSAYVVDGVAVGTKYDYLTHIDLRNEHGNFVPWQPTQEDMMACDWEFVGEKPVKPKPHIEPAYQLKARLTVGKASSMKTEYFGYANKLNYSLGYSMGKWEEISNNTLLLKNIIEFDVAHTASTPPNCFVIHVEDNSSKIKEQFGSKRLIVKCLGKEYDLGVAETKYLLTLLYTKTDDSSELEALFVESVGKTLEIELNFFDEZ

SEQ ID NO: 1341 - protein, 568 aa, Photorhabdus luminescens
MSAATTDVENQTKGFSAIINQIKADPKVPLLVAGSAAVAIVIALFLWLRSPDYRVLYSNLSDKDGGDIVTQLTQLNIPYRFAENGAAIMIPAEQVHETRLRLAQQGLPKGGAAGFELLDKEKFGISQFSEQVNYQRALEGELSRTIESLGPVQNARVHLALPKPSLFVREQKSPSASVTVGLLQGRTLDEGQINAIVHMVSSSVAGLPPGNVTIVDQTGRLLTQADATGRDLNTSQLKYIQEVENRFQHRIETILTPVVGRGNVHAQVTAQVDFSRREETAEEYKPNQPPNQAAVRSKQLSESEQSGGPQVGGIPGALSNQPSSPPSAPIDKPNTKENNKNDKSDKKASSAGNSNERTVNSNRNNRRDETTNYEVDRTIRHVQQQAGGVERLSVAVVVNYVTVEGKNGPETQALTPEQLTKIEALTREAMGFSKERGDSLNVVNTPFTESKENIEVIPVWQNPVLLEKAFDFGRYLLLILVAWLLWRKMVVPQLAKKRAAEKAALDAQKVQKRQVTESSAEMDEKTRQKLTRQRVSAEIQSQRIRELAEKDPRVVALVIRQWMSNEQZ

SEQ ID NO: 1342 - protein, 331 aa, Photorhabdus luminescens
MSLNGTEKSAVMLMTLGEDQAAEVFKHLNSREVQQLSITMAGMRQISNQQLVDVLAEFEEDAGQYAALSINASDYLRSVLIKALGEERASSLLEDILESRETTTGIETLNFMEPQMAADMIREEHPQIIATILVHLNRGQAADILALFDDKLRNDIMLRIATFGGVQPAALAELTEVLNNLLDGQNLKRSKMGGVRTAAEIINLMKSQQEENVIEAMRAYDNELAQKIIDEMFLFENLIDVDDRSIQRLLQEITTDSLLIALKGCNQQLRDHFLNNMSQRAAEIMRDDLANRGPVRMSQVENEQKAILLIVRRLAESGEIILNGGDDSYVZ

SEQ ID NO: 1343 - protein, 241 aa, Photorhabdus luminescens
MVATIAMSDKLNHADWQPWKPNELTQWEKLRAKPEPVDDSQEESERNEILEQAAMLDNLKEQARQTGHEQGFTEGQAQGYEQGYQAGLEAGLEQGRKEAIQQQQPITEQWQNLLADFQHSLEGLDTIIASRLMQLSLTAAKQILGQPAICDGTALLNQIREFIQQEPMLSGKPQLRVHPRDMPMVEQQLGNTLSLHGWRLLADNKLHPGGCKISADEGDLDASLATRWHELCRLAAPGELZ

SEQ ID NO: 1344 - protein, 455 aa, Photorhabdus luminescens
MTARLGRWLATLDTFEQKLAKTSPVRRYGRLTRATGLVMEATGLHLPLGATCLIERQNGSNIEEVESEVVGFNGEKLLLMPLEDLEGIVPGARVYARPYSEDCGGGRQLPLGPELLGRVLDGAGRPLDGFPSPDTSYRAPLTTPPINPLQRTPISDVLDVGVRAINALLTVGRGQRMGLFAGSGVGKSVLLGMMARYTQADVIVVGLIGERGREVKDFIENILGAAGLARSVVVAAPADISPLLRMQGASYATRIAEDFRDRGKHVLLIMDSLTRYSMAQREIALAIGEPPATKGYPPSVFAKLPALVERAGNGVNGGGSITAFYTVLTEGDDQQDPIADAARAILDGHIVLSRSLAESGHYPAIDIEASISRAMTALIDKQHYRRVQQFKQRLASYQRNRDLINVGAYAAGSDPLLDKAIELYPYMAQFLQQDIEERSEYDAACIQLQQLLPTZ

SEQ ID NO: 1345 - protein, 284 aa, Photorhabdus luminescens
MVLMIVSGRSGSGKSVALRALEDMGFYCVDNLPVVLLPELANTLADRDISAAVSIDVRNMPESPEVFEEALTKLPASFSPQLLFLDAERNTLIRRYSDTRRLHPLSSKNLSLESAIDQESDLLEPLRSRADLIIDTSEMSVHELAEMLRTRLLGKRERELTMVFESFGFKHGIPIDADYVFDVRFLPNPHWDPKLRPMTGLDRPVAAFLDRHTEVHNFIYQTRSYLELWLPMLETNNRSYLTVAIGCTGGKHRSVYVAEQLADYFRSRGKNVQSRHRTLEKRKZ

SEQ ID NO: 1346 - protein, 444 aa, Photorhabdus luminescens
IMNLTLLPADLKPTENQPTRSNSLTDADQPSAFAQFLNLETELAQKGGVKPGKVSSKEEEVTDDTDHDLSPLLSVPNELSAPNELSIANELSTSNKIPTEPITSSLIPLDVKADTNKQPVAVDEKLMSAEELAASLPIQLSGLAIKPENQKTSLQPDGLVKHNDKNRQISVKELVVIELSTEENPLTAIAKQPKQEEEKADAFFKTKPENGLGQNSSVKPKIAAAAIQHETATPTHPRESALTQTTAQAEIQPAPAATENQQTGQISSVATSPLLSAGHNQTAQFQLSSASTPLLNAQLGSEEWQQQLNQQIILFNRNGLQQAELRLHPQELGALQIRMSVEDNQAQLHLASAHSHVRAALEAALPGLRHALAESGIQLTQSSVSSDNASPWQQEQRAGSQHSDGTASRNADATSENHSATESTVHLTPHQLASARGGVDIFAZ

SEQ ID NO: 1347 - protein, 335 aa, Photorhabdus luminescens
MSDNILSQAEIDALLNGDSASDDVENTSSGENEIRPYDPNTQRRVIRERLQALEIINERFARHFRMGLFNMLRRSPDITVGAIKIQPYHEFARNLAVPTNLNLVHLKPLRGTALFAFAPSLVYIAVDNLFGGDGRFPTKVEGREFTHTEQRVINRMLRMALDSYRDAWSAIFKIEVEYIRSEMQVKFTNITTSPNDIVVTTPFQVEIGALSGEFNICIPFAMIEPLRERLTNPPLENARQEDSLWRESLVKQVQHSELELVANFADIPLRLSKILQLQPGDILPIDKPERLIVHVDGVPVLTSQYGTLNGQYALRVEHLINPVLNALDEEQPNEZ

SEQ ID NO: 1348 - protein, 252 aa, Photorhabdus luminescens
MTRDKFALSCRLGMILAALILPMDAAAQLPGIISQPLANGGQSWSLPVQTLVFITALTFIPAALLMMTSFTRIIIVLGLLRNALGTPSAPPNQVLLGLALFMTFFIMSPVFDKVYQDAYLPFSEDKISLETALENGAKPLRQFMLRQTRENDLALFARLADQPPFETADSVPMRVLMPAFITSELKTAFQIGFTLFIPFLIIDLVVASVLMALGMMMVPPATISLPFKLMLFVLVDGWQLLLGSLAQSFYGZ

SEQ ID NO: 1349 - protein, 261 aa, Photorhabdus luminescens
MISFNSEMLIQFVSEFFWPLVRVLALFSTAPLFSEKQAPKKVKIGLAVMVTLLLMPNLQPAQVPIFSVTAFWVMLQQILIGASLGLTMQIAFAAVRYAGEVIGLQMGLSFATFFDPSGGPNMPILARIFNLLTLLLFLAFDGHLWLLSVLADTFQILPIQPLQLSAQGFLLLAQSASMIFINGMMLALPLITLLLTLNLSLGILNRMTPQLSIFVVGFPLTLTTGILVLTLLIPMLAPFTERMFSELFNRLAVIISGMVIZ

SEQ ID NO: 1350 - protein, 699 aa, Photorhabdus luminescens
QNNMKYIIENDFPFEQIDPIAEIESYRKEINRPIYHIHKWWAKRLGSVFRSIVSGALTEGQWKDFYEYQKYTGKVVLDPFMGSGTTLGEAAKLGASIIGCDVNPVSTFLVTQAMASVNINELKKEFKSIERDVKEEILSYYTTMVPDASKSTPALYYFWVKVVATPEGEEIPLFSSYVFSKNVYASKKPDSQIWCPSCESIIVGKYNSTDIKCPCCSHNFNPQNGPARGTKIIDSRGNEYKIKELVSSKECPPKHKLYAIMALNEAGEKVYIKPTQYDYDLFNETRERFSLIKGDLPLPTMKVRAGYNTNQARGYNYNNWCDFFNERQLLCLGLLLQRILKIKDKVIRDHFVCLFSGTLEFNNLFCSFKGEGTGAVRHMFSNHILKPERTPLENSIWGTPGKSSGTFSTLFESRLIKAKTYLDEPFEVFIENNGAKCFSKKVVCSDPIRVNPTQSWETFKNASQGALILNADSSSLPIPNSSVDAVITDPPYFDFVHYSELSDFFYAWLSNALSGEYEYLNRKDSSHENEVQDRDNESFTRKICSIFKECNRVLKEDGLLCFSYHHSTIDGWMAIYDSVTKAGFDIVAAHPVKAEMSVASPKSAAKDPINLDAILVCKKEVNPPKIENPQDEIFSRFSDYIERFNAVERNLSSGDRFVIACSQAITVASCLRMDRGSTIDLVKWSVETCVQRKKISLKZ

SEQ ID NO: 1351 - protein, 251 aa, Photorhabdus luminescens
GLCMYHNEHQIMKAVYDNFYGQINDNGVIPVDLRVPSLVGTVQDDPFDCLIEQKLQQAFPELEVVRSGKLTTPDIIIRDKRTGIIVGLEVKKLIQKPNGADSRGLTMDYNSCLPCGTALIKMGNAMVEIPCYYMYALLSNDNSSIVTFILMHGDFINYDFNLYKKAKVANQTKYNHGPYGEGSVRHRAMYTYPNPLNYKLKCFHTRKVFVAKKFDCENLQISHLATEEVSRYDIYENNFLYNIIDNGKPDZ

SEQ ID NO: 1352 - protein, 376 aa, Photorhabdus luminescens
SQVLKQHRGKWVMTLTLSLRWITSRLSPDYPECEDKMRLKLLLLLSGVIFMLSAQANEPRLYIRSLFDIQYAFCDIKTNGVTGMDNRDSAQEGRGFGTASTASMLFLANGENEVSLEFGALGWFSSDALSDKDRNHFNPEAKCTLELTAMRGKKSEVLTAIEVAIDKNGQPVATTPANEAKYAAISTPVVRHVVQAQNVEDGHVEKKYFNPKEFPPNMTLYRFSRSVKISGLPDWEWVKATLYTDTPEQRRQLQQAYMAVWQAYNAKDINTLREQQKIALRAWAWATDESEESVFADQPINSDIKEKSFKMIPINWDDYIVKIMNKGRMVKLVNKSILEYSPISYYTVNNEDGDTYFSTTAPIFSLINGRFVQVIZ

SEQ ID NO: 1353 - protein, 538 aa, Photorhabdus luminescens
KVIDMAEQTISSRAGVACMTCDNPDPCIYKISVTFGQNTQVWPEKPAIKMSLIDHGKGQKGTIQIEGKCNNTVKHHAVLTGGQKEKTLEFNAPQEVTLFYKDQLKDAEIESDLDSVWFYLSNLANPTDMYSEPRYYKLITQGCLDSRQYATIAVYPSVSFMVSVGLSFDFSHGERSVKERRDEQKKARQAMENVKPKNGNKLRSGWTTHTDPFYLTRQTAINVEYALTVQDMDYSAKFAEVNQVRKTLPNLEAINRVEKLLGYTKEYLAPDPDSKGTRSYQLLELKVDPINIGLAYAYGRTTSMDDRTHFLGFSAAPFMGMTAKLDLIQMGAAYCKIKKVVAKFREALARRNSNDKNYLDLECCLILTCNLSFQLGAAYKQKQWTFDAGNKNDLKLSLEGKVNVAFKTHIMIMEVAMGAGVAVKTAAGFELDQHDKGIDLAGYHNGIVAEIQVAVDARRNSSRNSIIEVKKKWKWVIADPLKASESPLRINLIGEERPINRPEIVPGAETASWEMGYDPNFKPKMDNIPFITGLPGMZ

SEQ ID NO: 1354 - protein, 311 aa, Photorhabdus luminescens
RLMAAEKYYAVIDGAIEYRLFFILENFNPPAVCLYDESLPPERLKVAPYLVEVTEKVGLYLEEWQTCWGICLHSKADMKTLRQHLRKYLQVLLPDQDKPVFFRFYDPRNIWEFLSVLSDWEIHCFLGPINKISTSLMGVKHEDNFHAVRKQFPVEAGSRQKMLRITTKQYAQLNELFEQRYINKLTRFINEVNYYNSAGTIDLPYDSLSAHSDRILKNPFPDTHYSPAYMDEATFIQHKTLAEDCFYFCRDNEITDERAIGGFLYLLMARHINQFEQIPLAWLTALRDPQWPGYYRMETLLKSELGFIPDZ

SEQ ID NO: 1355 - protein, 656 aa, Photorhabdus luminescens
MADSGLVFTLTAGHLPEKTFAVVEFTLDEALSTLFCLEATLTSADPDINFADVLDNFATLTVYRDGKPERSITGIVTQFEQSTTGRHRSYYALTIQPALWRAGLRVNSRIFQHQSVAEIIDILLKENGVRNFYCQLRYEHPEREFCVQYDESDLAFLHRLLADEGMFYYFDFTEERGEPIIIFIDSHRINNKFSLPYHPELDATGSQCSINRFCWREQVGIANIVLKDRTFKNPLWGADCYYHERQINHQRSDLPSYTYYDFPGRFKDERGERLSQYRLEALRTDAMFGRAQSDCFALAPASGFTLTDHPKEQFNTLWLVIKISHHGRQPQADESRFGEMGTTLTNSFTFGDRNRVWRPSPYPKPRIDGLQIATVVGPEGEEIFCDEYGRVRVQFAWDQYGKFNDQSSCWIRVSQAWAGKRWGMIAIPRVGQEVLVDFLHGDPDQPIIIGRTYHASNVVPNPLPIAKTQMSIRSKTHKGDGFNELRFEDEKDREEIFIHAQKNLAIKVLNSWDERINYNRTTSIGHDDELVIANNRKITVDGQQEHKTTGNYVVQIEGDKTLQVDGNVAQKVQGMLSIDTNGDITVQSGNKISLKVGNSFIVIHADGVDIKGPSINLNSGGSPGDLLRPADPVILQAAASAGSLFVAHCPKEDNDZ

SEQ ID NO: 1356 - protein, 357 aa, Photorhabdus luminescens
MKVTSHEKMDALAIANHSINEINADQQRKHRVKNAETTVSAYMSQCFISVSVADSVLSVKSHLIDQLEGEQIPTYLYVIDAEGYLNGILPVKGLLTVADDLFVSDIMRQSYFSVSPEQSRHDVYNLINHSGMDSVPVTHFGKLVGVLRSQDIAELVEDENTLDAHLQGATLPLERPYLSTSPITLWRKRVGWLLLLFVAEAYTGAVLKAFEDQLEAVISLAFFIPLLIGTGGNSGTQITSTLVRAMALGEVSLRNLWAVLRKEISTSFLVAITIGFAALIRAWILGVGIEVTIAVSLAIIAITLWSAIVSSIIPMVLKRLSVDPAVVSAPFIATFIDGTGLIIYFEIAKLVMTELVZ

SEQ ID NO: 1357 - protein, 550 aa, Photorhabdus luminescens
MTPINRLYLSGDEIHLVDANIMLELASCGRGFITAETTTDYTGKLVRLDVGYTDLVLRWFTGYVARSQPAQNGYQRLFVRELVGVFDRLWSCSFQHPTLSQIADWLQEHSGLTFILPDAPYTETPIPHFTHHGTGYQLLANLGQVFSIEDYLWHQLPEGSVYVGSGAHSMFAGKPVEIPNAFSQCQSAGNAMTIPMIPSLRPGVVINQYRLNKVNLNNENMVITWEAVNKLTGQSQTKTPMQRQIDAAYPELSAGLHLPKFARIEAHPENTVSGDISDSFRPRYAVDVQLLADDGQDAAVPVYHAVPLPLPMAGSESGMFQYPPVGTVVEIAFEAGRPDKPFIRQTLSQGNTLPDIKPGEQLQQQRAEVSQRVTQEGNWIRQTDQTINESSMHREVRADTETRNVVARETTIQATDKTTVLGTSTLLAGAVRQIADGDYSMATSSNFVASVGKEASIEIGQKLIEKMGLLKQSIAGARQEIIAPVVWVGSQQINVMTLMLETLDVVKALAEQTAAHTHHNTGAPENASAIRNTGYKSDGLKQKYSPVIGZ

SEQ ID NO: 1358 - protein, 322 aa, Photorhabdus luminescens
VRVSTNILYDQKMTSITTAQSKWMQQGAQLSSGQRVINPSDDPMAASQGVMVAQAEAQNQQYITARSFAKNAISMQLSVVSKAVGVVQDIHESLVATVNGVLSDEDRNSLAIQLTGFKEQLVNLGNTTDGNGRYIFAGYKTDMKPFDESTTGTVSYLGGSEEITQKVDSNRSMIIGHTGKQVFLSSTSNPIKEPDGNQSESDIFKTIDMAIQSLKTPFVEADQKSRDDALELLNKANRGARNALNNISSVESVLGLQLREMEDLDNLGAERSLANKSRLSQLVDVEWNSAISNYYQQQAVLQASYKTFADMKGMSLFEIFRZ

SEQ ID NO: 1359 - protein, 551 aa, Photorhabdus luminescens
LMSSSLINIAMSGLQAAQIALGTVSNNLANSKVPGYNRQSTVVNQNGGTMTSVGFIGNGVTVTSINRQYNEFINQQLSEARAKQGEFTTYSQQISQIDNLLADKANNLSNTIDDFFTSLQNVVSNAEDDAARTTAIGKSKGLVNQLQSADAFLRKMENNINRGIANSAESINNYAQQLAKLNGEITRMRGGGSAEPNALLDQRDQLVNELNKLVGVSVIQQDGDSYNVSFAGGLTLVQGTTAYRVEAISSNADSSRITLGYDRGFGDVVEIDEKFIDKGQLGGTLRARSEVLDNSRNQLNRLALVLGDQFNQVHRAGFDLKGKPGEDFFTFNNPDVIANSKNKGSANFKVEYTDTSVVKDSDYHISYDGANWKIQHASGKVKVDIAAKVTGNTLEFDGLKVEIDPTNVKENDRYTLKTVSGVIGNMAVNIKDASKLAAAGNKDGGASDNVNAKKLIELQNKKLVEGNASFSGAYASMVSTIGNQTSEANVDLETQNNITKQLYADQQSVSGVNVDEEYGALQNLQQYYLANAQVIQTVTTLFNAILELRRZ

SEQ ID NO: 1360 - protein, 315 aa, Photorhabdus luminescens
LMNDFLTLPGAAYDVQSVNALKSNLAKDPQQGLRQVAQQMEGLFVQMMLKSMRSALPKEGMLSSEQTRLYTSIYDQQIAQNIAQKGLGFADMMLKQLANNKIAPGEMAGKVPMTLDNDVLQTLPRQALEQFIRRTVPKPEVAPKPLPLNSTNFVSTLSTPARIASQRSGIPHLLIIAQAALESGWGQREILTADGKPSHNLFGIKAGKGWKGPVTNILTTEYINGEPQKMKDNFRVYGSYVEAIEDYVKLLTESPRYANVARSATAEQGAYSLQQAGYATDPGYAKKLVSVIQQLKGAGEQAVKAYTYDLSKLFZ

SEQ ID NO: 1361 - protein, 372 aa, Photorhabdus luminescens
MVMIKQFAVSLLLVLLTLVTTTASAERIRDLTTVQGVRENALIGYGLVVGLDGTGDQTTQTPFTTQSLSNMLSQLGITVPPGTNMQLKNVAAVMVTAKLPPFGRAGQNIDVVVSSLGNAKSLRGGTLLMTPLKGVDNQVYALAQGNILVGGAGASAGGSSVKVNQLAGGRISNGAVIERELPTQFGENGVLNLQLNNEDFSLAQQISDTINRTDGTGTATPLDARTVQLRMPRDKSAQVKFLSHVQNLTVRVDVGDAKVIVNSRTGSVVMNRNVMLDSCAVAQGNLSVIVDNQVVVSQPNTPLAGGSTVVTRNPAVAVREQNGALQQVNASASLSQVIQALNALGATPNDLMSILQAMESAGCLRAKLEIIZ

SEQ ID NO: 1362 - protein, 274 aa, Photorhabdus luminescens
SSIRTAGEHSVSPLFRDKLRVSKMDTMAVAETSAVCQFRHLRKNMANKWRCSIALAVLSLTGCAYIPQKPLVEGATTAAPSVATAPVPNGAIFQVVQPVYYGYQPLFEDRRPRNIGDTLTITLQENVSASKNSSANASRNGKNTFSAALTPRFLKGLIGGDKTDLDMEAENTFGGKGGANANNTFKGTITVTVDRLLANGNLHVVGEKQIAINQGTEFIRFSGVVNPRTINANNTVSSNQVADARIEYVGNGYINEAQNMGWLQRFFLNVAPFZ

SEQ ID NO: 1363 - protein, 261 aa, Photorhabdus luminescens
MIRSLWIAKTGLDAQQTNMDVIANNLANVSTNGFKRQRAIFEDLLYQNIRQPGAMSSEQTRLPSGLQIGTGVRPVATERIHSQGNLSETNNSHNVAIRGKGFFQVQLPDGTSAYTRDGSFQEDQNGQLTTANGFLIFPTITIPDNATDLTISSDGIVSVKVQGQSVPQQVGQFTLTTFINDSGLESIGENLYVETSSSGVPIENTPGINGAGLLQHKYVETSNVNIAEELVNMIQTQRAYEVNSKAVSTSDQMLQKLTQLZ

SEQ ID NO: 1364 - protein, 252 aa, Photorhabdus luminescens
MDHVIYTAMGGARQTLEHQAVTANNLANASTPGFKAQLAALRAVPVEGAAFNTRTLVVASTPGSDNRQGPMNYTSRPLDVAIGQGGYLAVQLEDGSEAYTRNGSIQISAEGQLTVQGNLLMGDNGPINIPPQAELTLATDGSISALIPGDPPTQLGQLGRLKMVKPESDQLVRGDDGLFHMTEQAQGLQGDVLPASDEVKLMPGVLEGSNVNPMESMVSMIANARRFEMQMKVIHSSDENAQRANQLLAMSZ

SEQ ID NO: 1365 - protein, 405 aa, Photorhabdus luminescens
MAFSQAVSGLNAAAGNLDVIGNNIANAATYGFKSSTVAFSDIFAGSQVGLGVKVSGVNQNFKDGTPTTTNRTLDLAITQGGFFRMQGGDGGIYYSRNGQFKMDENRNIINMQGMKLTGYPAASVNGGAPEIQKGANPEPITIPQGILMAKATTKVTMTANLNSMHKKPTEAFSPENNDSYNYPTSVTTFDSLGNPHAIQVFFVKTNDNEWQVHAQDSAVEGAKAASLGTLKFDGNGKLIGDNNQFTFNVPSLNGSNAADITIDFNGSKQQKIDTDSISAPKQDGYAAGEFKGYRIEQDGRVIGTYTNEQSQLLGQIVLTNFANPEGLAAKGDNVWVETSASGNPVVGIADSGGFGKLLSGSLEASNVDMSQELVNMIVAQRNYQSSAQTIKTQDQILQTLVSMRZ

SEQ ID NO: 1366 - protein, 232 aa, Photorhabdus luminescens
MAITGSVNESLNNTIVGEPVLAGKKKGSEELNSNFMKLLVAQMKNQDPTNPMKNNELTSHLAQINTLAGIEKLNTTLGSIVGQINNNQPVQASALIGRGVMIPGNTILAGLDKEAGNVSTTPYGIELERPADSVQVTIIDKQGGVVRQIDLGGLEAGVHSFRPWDGKKEDGTNVEDGAYNFTITASYKGEQRVFQPLRFAKVNGVTRDADGAKLDLGRIGAVTMDQIRQILZ

SEQ ID NO: 1367 - protein, 247 aa, Photorhabdus luminescens
ATRVMNWQRKLMRISPNMTGMHCSMLPVHPFVYGIGQKADSGHYLSPANAINYLANKIRGTGNMSAVVLMICAKTHNEFIQHLTPFSAVLPLSVFSQVTRMAKTAERLAITKMQLPGKPDSGLPPFQPFSTSTSRMAVNARLIAQAETQVSAGSSIAGLKSQLTNFTTVRQNALQQVTAALNGVRNKSACVWAFSGKGNGALLAEKLRQDIPEQDAVYTLATLFAGDDIRALERMLHNEPNYHTGPZ

SEQ ID NO: 1368 - protein, 220 aa, Photorhabdus luminescens
MQAINIIGLFAFFFITSMAWGNNLPQAMEHYFQQIHRDNHYKVSVNIRTPEQQWPQCERPEIQPAIGGQNWGNLSLPVICHQQRKFIQVAVSVTGNYLVTRRAISRNDVLSDKDFQVRRGLLERLPHDLVINKNEIKNSIAIRNIPAGQAITHNMLRRPWVVRSGQSVAVIIQGNGFQIRNEGKAINNAAISDKVRVRINSGHVITGQALENGNVKIMLZ

SEQ ID NO: 1369 - protein, 398 aa, Photorhabdus luminescens
LSKLTARTFFISLIYLGNNTLMHKQLKKRKSSGQQVPKTPQQQFKTYWKSIEKYQLKIAKLQQQQDELFMRFQQEILPVEHQYMQSRYDKAARLLSFADKKSLGKNQRRELFSWIEEELAELYTYPFNENLDLNKLTDHFSNLNALKEEEIPTPEQMDDIRQTFSEYFDFSEEISDEELLDMIKNPEKMRSTIEQRFQRESEHFHDEYDAEETSDFDPAAEDQKKLDSLFKSQEVSQMYRKIAKVLHPDREQDLDEKKKKNQLMVQLSKAKKDNDVWTIIDMYHKYIDPTFSFNSRDISNINKLLKARIDILANELNQLKKSDSLPGMIWRTLGGNTSKTIENNLREHCKKLRQNIENEIQLRENLRSLTVLKSYLAERRDTFEFEQEMIDYFFKQYZ

SEQ ID NO: 1370 - protein, 494 aa, Photorhabdus luminescens
GHMMTDKEISSVDSLKASFKSGVRLMPEAFSHLIDEAYKAYEIIDGAQGDNLTTGLKRDGKGKLTLNTQHSGGLNSNQGALALSLKPEGGLSFDGGGYLKLDADRQVQFADFFSLSRRERMEITQVLGLKRTMITRIVSPFPKENEYFGSSVSLNAAGDCLAVGMNNQVCVYTRRKSGEWNIRKPIVFEAFEDEYHRSSWDVCLDAAGDTLALGNMLPYPTYNQGRVCVYTCTKGVWDTKHPVVFPIGVEYFGVNVSLNAAGDCLVAGGKDYSPFRMFTRMNGIWDTKKPILFPAPSDSYEFGWIAHLSATGNCLAVRDNGYTIYVYTRMNGIWDGENPIKFSASENNLLMGRAFSLNAEGDRLAVGMEFYKSTDGWVYLYKRTNGIWDKENPIKFSAPASDVTYFGRVLELNDAGDCLVVGAYSRVYVYTCLNNKWNMETPMEILNPSDNLSGFGGSVGLNKAGTSLVVGAGPIKLGSESEAGAVYVFENVKZ

SEQ ID NO: 1371 - protein, 493 aa, Photorhabdus luminescens
GNVMTDKEINTVDSLKASFKSGVRLMPEAFSHLIDEAYKAYEIIDGVQGDGPTAGLKRDDKGKLTLNTQHSGGLNFNQCALALSLKPEGGLSFDGGGYLKLDADRQVQLADFFSLSRCERMEITQVLGLKRTMITRIVSTFPKEDERFGASVSLNAAGDCLAVGINNQVCVYTRRKSGEWNISKPIVFEAYEDEYYKSSWDVSLDAAGDTLALGNMSPYPTYNQGRVCVYTRTKGFWDTKHPVVFPIGPEYFGVNVSLSAAGDCLVGGGKPYPPFRIFMRRNGIWDTKKPIPIPIPSDSYEFGWIAHLSAAGNCLAVRDYAPVIYVYTRTNGIWDGENPIKFKVPENNLFVGRAFSLNAEGDRLAVGIEFYNSTDGEVYLYKRRNGVWDTENPIKFSAPANSVYFGSSLELNDAGDRLVVGAYSRVYVYTCLNDKWNMETPMEILNPSGNLNGFGGSVGLNKAGTSLVVGATSESVDSKSKAGVVYVFENVKZ

SEQ ID NO: 1372 - protein, 497 aa, Photorhabdus luminescens
LSNTAFEENMMTDKEINIVDSMKANFKSGVRLMPEAFSHLIDEAYKAYEIIDGAQGDGPTAGLKRDGKGKLALNTHHSGGLNLEQGALALSLKPEGGLSFDGGGYLKLDAARQIQFADFFSLSRGARMEITQLLGLKRTMITRIVSPFPRTDEYFGSSVSLNAAGDCLAVGMNSHVYVYTRRKSGEWNISKPIMFEDVEYDLSSWRVGLDAAGDCLALGDIWPEVVRVYTRTKGVWDTKHPVVFPRDAVRFGANVSLNAAGDCLVAGGKYSSPFRMFIRRNGIWDTKNPILFPAPSDAYEFGAIAHLSAAGNRLAVCDDYISAIYVYTRTNGIWDIENPIKFRRPEGGSSSFSGVFSLNAEGDRLAVGTDFYKPYNGEVYLYTCTNGIWDRENPVKFSAPVSRISFGGSLELNDAGDRLAVGAASRVYVYTCLNGKWNMETPMEILNPSGNSDNLNGFGGPVGLNKAGTSLAVGAASEGVDSKSKAGAVYIFENINZ

SEQ ID NO: 1373 - protein, 501 aa, Photorhabdus luminescens
MMTDKEISSVDSLKASFKSGVRLMPEAFSHLIDEAYRAYETIDGAQGDGPTAGLKRDGKGKLALNIHHSGGLNPHQGALALSLKPEGGLSFAGGGYLKLDADRQVQFADFFSLSRRERIEITRVLGLKRTMMTRIVSTTLSPEAREFFGYSVSLNAVGDRLAVGMNTKICIYTRRKSGEWNTSTPIVLESYQSDSSWDVSLNAAGDCLALANRFRQRVGVHMRANGVWNVRKPVWFPAPSRIEFFGLGVSLSAAGDCLVTGCEFKSALHSTFHMFTRTNGIWDSENPIKFPVPSSSYEFGKAVRLSAAGNCLAVHGYDDFTISTIYVYTRTNGIWDSENPIKFSHLEGQSSVFSKVFSLNAEGDRLAVGVGFYKSTNIVREVYLYTRTNGIWDRENPIKFSAPSSDVTYFGRAIELNDAGDRLAVGAASRVYVYTCLNNKWNIETPIEILDPSGNSDNLDSFGGAVGLNKAGTSLAVGVISMKIGSASEASAVYIFENVKZ

SEQ ID NO: 1374 - protein, 488 aa, Photorhabdus luminescens
MMTDKEISFVDSLKASFKSGVRLMPEAFSYLIDEAYKAYEIIDGAQGDGPTAGLKRDGKGKLALNTHHSGGLNLEQGALALSLKPEGGLSFDGGGYLKLDAARQIQFADFFSLSRGARMEITQLLGLKRTMITRIVSPFPRTDEYFGSSVSLNAAGDCLAVGMNSHVYVYTRRKSGEWNISKPIMFEDVEYDLSSWRVGLDAAGDCLALGDIWPEVVRVYTRTKGVWDTKHPVVFPRDAVRFGANVSLNAAGDCLVAGGKYSSPFRMFIRRNGIWDTKNPILFPAPSDAYEFGAIAHLSAVGNRLAVCDDYISAIYVYTRTNGIWDIENPIKFRRPEGGSSSFSGVFSLNAEGDRLAVGTDFYKPYNGEVYLYTCTNGIWDRENPVKFSAPVSRIDFGRSLELNAAGDRLAVGAAARVYVYACLNNKWNIETPTEILDPSGNSDNLNGFGKAVCLNKAGTSLAVGADSESVDSQPRAGAVYVFEDVNZ

SEQ ID NO: 1375 - protein, 348 aa, Photorhabdus luminescens
LNAVGDRLAVGMNTKICIYTRRKSGEWNTSTPIVLESYQSDSSWDVSLNAAGDCLALANRFRQRVGVHMRANGVWNVRKPVWFPAPSRIEFFGLGVSLSAAGDCLVTGCEFKSALHSTFHMFTRTNGIWDSENPIKFPVPSSSYEFGKAVRLSAAGNCLAVHGYDDFTISTIYVYTRTNGIWDSENPIKFSHLEGQSSVFSKVFSLNAEGDRLAVGVGFYKSTNIVREVYLYTRTNGIWDRENPIKFSAPSSDVTYFGRAIELNDAGDRLAVGAASRVYVYTCLNNKWNIETPIEILDPSGNSDNLDSFGGAVGLNKAGTSLAVGVISMKIGSASEASAVYIFENVKZ

SEQ ID NO: 1376 - protein, 929 aa, Photorhabdus luminescens
LEAKSASGGFGAGGERPLEKTGGNWLRALGKSVFGGQLRNGMGCYKQYLYATSAINAAKNLTLVAAGNLLTSGASLTSGSDMLLSAGGNVRFESRQEFIREGNIERFTQHASRLNSGGALTIRSQGSILFQATALIAKGVMDIAATGGFLYAQAMEEVYRREETEKSCKGLGPIKSCKVFGSKTEHRIQIKKTNKVTEFTAGGDINLMAKDEVTLEASRIETGKNAKITSQTGKVNFKAMPNIDFEQSITTSKGFFITQRDKGHREETWIIPSVHVGGTLTVEAATGINADVKVKEGQLLEDALGVLSHTPGTEWLKNLQGRNDVQWNQVKDAYSSWDKKSESLNPVVGAVIAIAVAAVTAGSGLAAWAGSGAVGATGATGATASAVYGAAYGGMIGLTSQAAVALVENKGDLTKTLAALAKREAVKSLVTQIAVGGALGGLDHTMGWGKLVEGKGVVDPLKAQLPLLSNQNWSQVAQRVAAQSIVSSTIGTAINGGSFTDNLQTALLSNIGNQINAEGAKLIGDNGEILGHSGKILSHTVVAGISAEIAGGDAKGAAVGALAAELAAITMESRLFEPAYKNETERQIHKLQEALTGNEVKAQTAKFIGALSGALISHTPEGAYSAANSAELVYRNNMTEHMLYQLSVENQKDILAAGKGDKAAEARVIARQDAAIAVTAVAAGGYALVYGGQILIAASAEMATAGRVALEGCKTNPALCLNNVGIFVADAIAPEAAVGTGVLAAGTVKVLGSTKEGAKDLAEGLSHAGMQVAEALTPGGVGAAGIIGAGKTAAEAVQTEAVAVIAAKNLLNKSVAQKIDAGKFGKLGLAELAETGTKIDPAAKAGNFTVAGRALQKHGSREGSAFPAAKGNPEQVNQQGQKILEEIIKTPRAKVQQGNRFGGFDIVAPDGRGARFDPQGNFRGFLEPZ

SEQ ID NO: 1377 - protein, 235 aa, Photorhabdus luminescens
LRATGVTGALVENKGDKAAEARVIARQDAAIAVTAVAAGGYALVYGGQILIAASAEMATAGRVALEGCKTNPALCLNNVGIFVADAVAPEAAVGTGVLAAGTVKVLGSTKEGAKNLAGELHNAGMNTLKNVSTGLPSPQGLSKEIHLGQQGKHITGHNNYIPGRSPLAEGVDPQKLLNGVHSGEYPIIRMTPRNQPIVNFGKPIGKYEGQPTNYGIIHYGKNGAHIVPANPIQHZ

SEQ ID NO: 1378 - protein, 606 aa, Photorhabdus luminescens
GNNMASVITVDFEKWKAQQAAAGKPVVLDEFVFAYVPDLDPTLAINRDETLPAESHIVHRQAVNKTGLASENAVAYSVTLGTEVGHFDFNWIGLINKASGIIGMITHAPAQKKIKTANGLQGNVLTRSFLLEFEGAAKEAAIMTTAETWQIDFTARLSGIDEMQRLMNTDSYGEAAFFGDGFSVVRRDDRYTIKKGLAYIGGLRGELAFDQTLNRLRDTRVYADFSYQGNLVNQWKTVVHIVAVNDLKNYIDAAGYPHYVFAVAGVDGHGDVMDLRIKGSLNDRNISAIHQEIDSVKREYVTQQALESGLHGKQPKGDYAVNAALTVVRENADSRLAKNQNGADIPNKNEFVKNIGLVETVEQAMNAVPNDRRINGKSLSSDISLMASDVGAYHQTTYMTELPGRHYSGPFSCGRENGWAKGVSIGVGGDTGQIWIDADAQLHTRFLNANGAVEQKITVGVPIGATIEWHSTAPIPAGYEPNEGRAFRAADYPELAKIFPDLKLPDDRGLFKRGLDRGRGLDSGRSLGSVQGDAIRNITGSLGKPTIESGSNASGAFSYQYKAGGRAAGAGGGVIAWTFDASRVVPTANENRPVNKSVIYITRVKZ

SEQ ID NO: 1379 - protein, 444 aa, Photorhabdus luminescens
LKWFYIHKKRILEVNVGIAINGGSFTDNLQTALLSNIGNQINAEGAKLIGDNGEILGHSGKILSHAVVAGISAEIAGGDAKGAAVGALAAELAAITMESRLFEPAYKNETERQIHKLQEALTGNEVKAQTAKFIGALSGALISHTPEGAYSAELVYRNNMTEHMLYQLSVENQKDILAAGKGDKAAEARVIARQDAAIAVTAVAAGGYALVYGGQILIAASAEMATAGRVALEGCKTNPALCLNNVGIFVADAVAPEAAVGTGVLAAGTVKVLGSTKEGAKNLAEGLSHTSNPLLSNAKSDTHAVASLIENEKLYIERNSSTATEAVAVGMAKNGTQGATNQLVDGKWLDANGLPLPVPPSVGAAGRVPTVLQTGGNTLNKSTANTLNNQLGENLTSREWGRALEALKKENGLRNDFHGRILDNGNYIDDAGKVIGNIGDYLPZ

SEQ ID NO: 1380 - protein, 560 aa, Photorhabdus luminescens
MGKLPFYHRSLTGLILLTISALAQAAIPVSSADQETITQQQKALLQQAQQQREALRNNITVSPSPVLTSDAAEFVCHTIQQIEFVGAESLSKSVKQNVIHPYLSHCLTLQEINELVRKVSNAYIKRGYVTSRADLKAQDLSSGTLMITVNEGKIESISLDDETPYSLKMAFPGMIGKTLNLRDIEQGMERLNRLPSQQVAIDIQPGKQPGYSAVILKRTSTRLPISASLGGDNSGQKSTGTGQINASVNLDNPLHLADQWSLSASHNSDFRHSHQNRSLTSNVTIPYGYWLFSYQYAWNDSFQNIPADSQAYRYEGDSQTHRLAINRALYRDGEQKLALDLGLTRRQTTNLLAGEKLSISSPTLSSINLGINYSSVLAGGYITFNPAISHGLPVFSATKEDPHFPDAPRSQFRKFSLSASYFMPVTDSIYYLSSLYGQTTPDNLYASERLSLGGQYSVRGFKEQSLTGNRGGYWRNELNWRMAELPVLGELTLTGALDTGWLRGKAGQIDGGNVTGTALGFSLTNRRFNQAITVGKPLTYPDHLKPAHWVVYWSASLIFZ

SEQ ID NO: 1381 - protein, 224 aa, Photorhabdus luminescens
RPFSGAKNCILKFLGYKHKTQYAMMIKLNKKQAKKGFYRFYRFYRFYRFYRFYRFYRFYRFYRFYRFYRFYRFYRFYRFYRFYRFYRFYRFYRFYRFYRFYRFYRFYRFYRFYRFYRFYRFYRFYRFYRFYRFYRFYRFYRFYRFYRFYRFYRFYRFYRFYRFYRFYRFYRFYRFYRLKLSLKLSLKLSLKLSLKLSLKLSLKLSLKLSLKLSLKLSLKLYTDZ

SEQ ID NO: 1382 - protein, 356 aa, Photorhabdus luminescens; identical to SEQ ID NO: 52

SEQ ID NO: 1383 - protein, 478 aa, Photorhabdus luminescens
VKYDFIVVGSGAIAGSIAYELASRNLSVCRVGETDRTNAASKAAGAMNGCFGEITSGLLASEHGKLKLNMDCISKELWPAWAQRLADSSGDTRSLFTAKGTHVILNTAGMEEIDSINYDAIEQTLNDYAAPYETIDPREIEWLKPNDLVRPLRALYIPDEHALNSHLLLEKLDAALVAEGGSLKEENVKCVLIEEGLATGVELLSGERLMADKVVVAAGAHSLDLLSNIPSIVRQIPPIFAGYGVSILVKMPKGRELPTSVIRTPNRAFACGLHCVPRGDGVLYLGATNILSEKPRSQALISDVQFLLDCALDQLDINLHDAEILSIQVGNRPIPADGFPLIGECGVNGLWLATGTYRDGLHQSPLLADYVANALTGVENTLINLDDFNPVRPPLVGFSRDVMAKETAQQMFATGYEYRWDIKPYWLPLLNEGMMRNYQNLIESLHPQFTPPPELVAFSHIYQSMRERLRSYYEAWSZ

SEQ ID NO: 1384 - protein, 287 aa, Photorhabdus luminescens
GLVMSFSLKDQVVIDNARKLLSEADVWDVETDLTCLIDRYLERRCKDRARDEFMLAVHERCNRIPLGHIVGTVDFDGLPLTVGTGVFIPRPHSQVIHKWLENEYQAPHGAVVLDLCSGSGAIGLAIAKRRPDLKVTCVEYDDVAFQYLTRNIYRLANWAIKADALKADLRDWQAFSQFNGSVALIVANPPYVPEQQEILPEWEEHHPYASVYSGDDGLDLARLIIKQAKQLLQSEGWLVIEHGESQGESVRALFSDVGFSSVRTIIDEDISDTTGSSVITVGCKRIZ

SEQ ID NO: 1385 - protein, 426 aa, Photorhabdus luminescens
IMDVKHKQDWMTIRRSRTTGALAQAIDEGLTSFTVVERQGKQITTEEGKVFTEFVSCSYLGLEHHPALIEAANQAMAKTGIHLSSSRGAMRPQYLGQLEKLLEEIYQGGAVAVFTSTSNVHLGVLPLLGSGSLPNYPLSRPVHWLMDKTAHASMQVLRGILEQFGPVSRVDSADAQSVQQALQNCKENQRTPILLIDGIGSMNGLIPVAELTRQLAAAGGYVYVDDAHGISIMGRHGAGYAFAALDHILPSNLILAGSLSKAFGGAGGFVVVAGADDVEVISTLANPLVFGHSIMVPMLAANVASARLHLSLEIDIRQEQLWNNINLFDSLMENSLMNAGVQSPVRGALFENEAEGLEAARLLRDNGILLFPVFYPLVPDGNAMLRFAFSSEHQAGEIKQLANTLFEIREKGLNWVEPQAVVPQVZ

SEQ ID NO: 1386 - protein, 692 aa, Photorhabdus luminescens
MKILLIDNYDSFTQNIAQYLYEVTGSVPSVVTNSLTYEELTIDEYDAVVLSPGPGHPAESSDFGVCAEVIAHAKVPLLGICLGHQGINLAFGGVVEHAPNPVHGYRSRIRNTGEGLFLGLPEQFEVVRYHSLVCTRLPDNLKCTAWTDDGLIMAIEHTERPIWGVQFHPESIDSEYGRELLSNFVRIAETYKENNEQEVTAQNICTDINEAYLAVGGRQDLNLNYRECKEIVDPESLFIQRYGNDTHAFWLDSENSDRPNARFSMMGSGNEQGAVRLEYSVQTENLRLIGPDGERIVQGDFFSLMSQLLDVVAISTPKSMPLVFKGGFVGYLGYELKALTIGSNKYRSEHPDASLIFTPHFFVFDHQQSKLYECFITPIGQPHHWSPELFVTNTKNTGEVIPDFIPGAVDQNKICLEYGAEKYMDGIHKSLQYITDGESYEICLTNRAKMTYSGHPLDAYRRMRHASPVPYGAYLACGDFSVLSASPETFLRIDDARNIESRPIKGTRPRGKTAADDQHLQMELSQSTKDRAENLMIVDLVRHDLNQVCRPGSVHVPELFKVESFSSVHQLVSTIRGQLCEETSSIEAIRACFPGGSMTGAPKKRTMEIIDALESSARGVYSGALGWLSFSGEVELSIVIRTAVLHQECAEFGIGGAIVAHSDPYGEFEETLVKASVPYFSFSHMAEEVCEZ

SEQ ID NO: 1387 - protein, 346 aa, Photorhabdus luminescens
YAPRYYIKSVLNSALGGQLLLILILMANLKRHWSKRVCHISVLVIWRRKCVSNHKVVILGGQGAIGSLLERLFTQYGHIVYSVDKRTQGVRSHYYHSHYCQIDILNPAADVGAVLSGAKAVVFALPEAVAIQALPWVLSAIGDDVQIVSTCSVQAPFYSALRAAAPGQPFIGVNPMFSPSLPEQKRPVAVILDNCHVSEHWIERVLMQADMRISRMTPEEHDQVMALCQALPHAAILIFGLVLAKSPLDIRTLAAIAPPPMRTMLALLSRILRNPIEVYWDVQYENPMAAEPRQELLHAIQQLDSIVQAGDQTEFGNNLRDIAQQLGEQLDISAADCQHIFSTLEZ

SEQ ID NO: 1388 - protein, 511 aa, Photorhabdus luminescens
MSLNRVAEANGRAGLRNWLGLLILMLPVLLVTVDNTILSFALPKIAEALGPSASQQLWIIDAYSLALAGLLVSMGSIGDRVGHRSLLLFGSLGFTVISVFTALSTSPEQLILGRAVLGFFGAMLMPSTLALISVLFEDREQRRLAVAIWATTLTIGSAVGPVVGGVLLQFFDWSSIFLLAVPVLVPLLIFGPMLLPESDKKQTGIIDVYSVLLSIVAMVGIVYAIKHLASDGFEISVILELSVGLIAGVLFVRRQQRLPVPLMDLSLFRNGMFTGSIIVNLLSLALLVGFVFFATQVLQIVLGMKPILASLALVPGQIMAIVMGMAIVPIAQRVPAHYLVPILLSIAGIAFLLVASIGSDLVTLIVAFALLDISVGAIASVSNDLVLSSVPSSKAGAASSISETAYEVGVVLGTTILGGLVTAFYRMTLQLPNEISQEQTGLALETLAGAYVVANSLAESEGQKLMTAAAESFTSAIHMMSWMTVVLTAGVVLLAWRLLKAPQKEQVLEYZ

SEQ ID NO: 1389 - protein, 447 aa, Photorhabdus luminescens
MKITDQIAEQRKQLENAVSQALELAKAGCDAAEVAVNKTTGISVSTRFGEIENVEFNSDGALGITVYHQQRKGSASSTDLSPDAIARTVQAAVDIARYTSQDPCAGPADKALLAFEAPDLNLFHPTELDADKAIELAARAEQTALQADKRITNTEGGSFNSHYGIRVFGNSHGMLQSYCSSRHSMSSCVIAELDGDMERDYAYTINRRFEDLKSPEWVGQECARRALSRLSPRKLPTMKAPVLFAAEVATGLFGHLVGAISGSSIYRKSSFLLDHLGKQILPSWLTIEERPHLLAGLASSPFDSEGVSTCNRDIIKDGILQTWLLTSYSARKLGMASTGHAGGIHNWCIAGQGQDFAGLLRQMGTGLVVTELMGQGVSAVTGDYSRGAAGFWVENGEIQYPVSEITIAGNLKDMWANMVTIGNDIETRSNIQCGSVLLPEMSIAGQZ

SEQ ID NO: 1390 - protein, 442 aa, Photorhabdus luminescens
MYKFKLRRIHMDKIRTVAETLAILYQYHYPFGLERQPKQLKTSDFDGKVIFSNDPETATVPPAFFTVQTIQELKALGGVPDSEYGPGKMEPHHPLPEPFSAERLANVTGNHIDLCKAFRAYIYSDSALVKDYEEILNAKRFPMKVALYSGEKMTISSDNPLVVEDKDDYGEPVVLVYEQIIIEPGGQIIYRTNGRIEANTIVGNENTGKENVVNRGSNGVDGLDGAPGNQGANGSDGKDGKDSKNGCLISATSGTDGASGSVGGLGGDGAAAGNANDLTVTTSQSFTGTVNAATIGGNGGNGGRGGLGGRGGNGGNGGNWGNGTIKWCPAGAAGNGGTGGNGGNGGRGGKGGDSGNIYINYSDGSPVLQVVSINGLGGEGGKAGWGGIGGEPGNSTRVLGVHGLQGDYGKDGLKGEFGDDGNTGKIYVNGHERESDRKLNRZ

SEQ ID NO: 1391 - protein, 466 aa, Photorhabdus luminescens
IPGSIDNDVTGVRECSQLKDDGYKFKFWRISMDKIRTVAETLAILHQNHHLIGVERQPKQLKTSDFDGKVIFSNDPKTATVPPAFFTVQTIQELKALGGIPDSEYGPGKMEPHHPLPEPFSAERLANVTGYHIDLCKAFRAYMYSNSALVKDYEEMLNAKRFPIKIALYIGERITVTADAPLLVEDKDDYGEPVVLVYDQIIIEPGGQIIYRTNGKIEANTIVGNSNNDKKQSIISKGSDGGDGFEGEQGSNGVNGSNGNIGSENKHGCSVKSTPGTDATGGSSGAPGMDGKRGGSANDVIINVDIFTGVVNAASIGGKGGKGGYGGNGGNGGNGGNGGAATNKCSAGYGGRGGDGGNGGDGGNGGNGGDSGNIYINFTQGQPVINALSYRGDGGNGGGGGKGGIGGVGGVGSRGLNANSYLGVSGEAGNDGESGNAGTSGKIYVNGNARQHSDNQTLDWLEDYKZ

SEQ ID NO: 1392 - protein, 224 aa, Photorhabdus luminescens
RAFPHYSASALFSQRRKIDEVCMSLAVSVVDFGPFTNIVGFLMELDKLKKVQRRIKLLDNHRQENSAEHSWHLAIAAMSFAPYAQEVDIQRVIQMALIHDIVEIDAGDVMVYDLTAREAIHEQEVKAANRLFGLLPEPQKNHFMSLWQEYEAGESQDARFAITLDRLMPILMNLHNKGQSWVENNIRFEQVINRNKFIANTYPELWQYLLPQLETAQKKGWLKZ

SEQ ID NO: 1393 - protein, 330 aa, Photorhabdus luminescens
MAYKTPFSSQFPLSSSTLPLTLISLDDWGLVTATGPDTEKYLQGQVTADISALATNQHVLSAHCDAKGKMWSNLRLFHRGESFAYIERRSVLENQLTELKKYAVFSKIALAQDENALLLGVAGKNCRQALSSFFPTLPDADNAVVAHEATTLLHFSLPSERFLLVTNTATAEQLTEKLQAQLNNSEQWLALDIEAGFPIIDAANSTQFIPQATNLQALAGGVCFKKGCYTGQEMVARAKYRGANKRGMYWLAGSASKIPMAGDDLEWQLGDKWRRTGTVLAAVKLNNDNVWIQVVMNNDMESHSVFRVRDDEGHSLTIQPLPYSLNEEKZ

SEQ ID NO: 1394 - protein, 297 aa, Photorhabdus luminescens
LTNPLIEQFLDAIWLEHDLAENTLASYRLDLQALDNWLIHHGHNLLSVQTIDLHSFLAERVDGGYKASSSARLLSAMRQLFLYFYREKMREDDPTALLSAPKLPKRLPKDLSEKQVEDLLNAPCTDQPVELRDKAMLEVLYACGLRVSELVGLTLSDVSLRQGVVRVIGKGNKERLVPLGEEAIYWLENYLEYGRVGLLNGATLDVLFPSNRGRQMTRQTFWYRIKHYALLAGIDTGRLSPHVLRHAFATHLLNHGADLRVVQMLLGHSDLSTTQIYTHVATERLKLLHQQHHPRGZ

SEQ ID NO: 1395 - protein, 236 aa, Photorhabdus luminescens
MKKSVLCFPLLLAWFSGNALADDGAVHRIMQKLGIKAESIQPSPIVGLNTVVTEQGIIYLSDDGKYLLQGPIYDVSGSAPVNVSNQLLMKKLEAMRDQMIIYKAPEEKHVVTVFTDITCGYCHKLHENMKEYNKLGITVRYLAFPRQGMQHQSAKDMQSIWCSATPQKSLDAAFKNEDVSPIKSCKVDIANQYKLGLQFGVQGTPAIVLKDGSLLGGYMPPEALAAALAQRGKSVZ

SEQ ID NO: 1396 - protein, 578 aa, Photorhabdus luminescens
VNIETQLRRRLAVNDSHLPQQIHPLLRRLYAIRGIQQANELERGVQGLLNYQHLSGVEQAVALLLTALHEHWRIVIVGDFDADGATSTALAIRSLRSMGYRHLDYLVPNRFDNGYGLSSQVVEEVVKKGADLIITVDNGISSHEGVAAAHQHRMKVIVTDHHLPGDVLPAADAIINPNLADCSFPSKSLAGVGVTFYLMSALRAALRKDQWFEKQGIALPNLAEMLDLVALGTVADVVPLDTNNRILVYQGLNRIRAGRCCAGIRALLEVSSRDAYKLTASDLGFFLGPRLNAAGRLDDMSIGVTLLLTDDIAKARQIACELDSLNQTRREIEQGMQQEALQICDKLERTSTELPYGLALYHPEWHQGVVGILASRIKERFHRPVIAFAPAGDGILKGSGRSVQGLHMRDALERLDTLHPGLILKFGGHAMAAGLSLEQDKFEQFQYHFSTLMADWLDISQLEGVIWSDGELAINELSLDIAEMLRDGGPWGQAFPEPIFDGKFKLLQQRIVGERHLKVIVEPLNGGPMLDGIAFNIDPTRWPDNSVREVELAYKLDVNEFRGNRNVQLLIQHLWPYZ

SEQ ID NO: 1397 - protein, 345 aa, Photorhabdus luminescens
GGIFDYDVKKERLEEVNAELEQPDVWNEPERAQALGKERSSLEEIVETIDQLEQGLEDVQGLLELAVEADDEETFNEAVVELEQLEEKLGQLEFRRMFSGEYDSADCYLDLQAGSGGTEAQDWASMLMRMYLRWAESKGFKTEIIEESDGEVAGLKSATIKIMGDYAYGWLRTETGVHRLVRKSPFDSGGRRHTSFSSAFIYPEVDDDIDIEINPADLRIDVYRASGAGGQHVNKTESAVRITHIPTNIVTQCQNDRSQHKNKDQAMKQLKAKLYELEMQKKNANKQEMEENKSDIGWGSQIRSYVLDDSRIKDLRTGVETRNTQSVLDGDLDKFIEASLKAGLZ

SEQ ID NO: 1398 - protein, 505 aa, Photorhabdus luminescens
MSQQQQGAEQAPDLNNELQTRREKLAALRENGIAFPNDFRRENISEDLHAKYDDKTQEELEALNIDVTVGGRMMTRRIMGKASFVTLQDMGGRIQLYVARDDLPEGIYNEQFKKWDLGDILGARGKLFKTKTGELSIHCTELRLLTKALRPLPDKFHGLADQETRYRQRYLDLIANEESRKTFQIRSQVLLALRSFMVSKGFMEVETPMMQVIPGGAAARPFITHHNALDIDMYLRIAPELYLKRLVVGGFERVFEINRNFRNEGVSPRHNPEFTMMELYMAYADYKDLIVLIEELFRTLTQNILGNTLVKYGEQEFDFGKPFAQMTMKEAICKYRPETNIADLDDMDKVVAIAESLGIEVEKGWGLGRVQCEIFEETAESHLIQPTFITEYPAEVSPLARRNDANPFITDRFEFFIGGREIGNGFSELNDAEDQAERFAEQVRQKDEGDDEAMFYDEDYVTALEHGMPPTAGLGIGIDRMIMLLTDSHTIRDVILFPAMRPQKZ

SEQ ID NO: 1399 - protein, 208 aa, Photorhabdus luminescens
MKEKHWSKIQFLHEAVTNQSIVIKGTHSYYSDCWSGGFEESVVRYLYGDKISLQWESKWPIDKLYIGDYVCIGAETIILMGGNNTHRADWFCLYPFMEYIEEAYVGKGDTHIHDGVWLGMRSMIMPGVTIGEGAIVAANSVVTKDVEPYSIVAGTPAKLVKYRFAPHIINELLALKIYDWSEEKFNALKPYLCASDIRALKSAVRSYZ

SEQ ID NO: 1400 - protein, 180 aa, Photorhabdus luminescens
MAKQPEDWLNDYPAEEEEEEIIWVSKSEIKRDAEALKKLGTELVELSKSALERVPLDEDLLAAIELAQKIKREGRRRQLQFIGKLLRTRDVEPITIALDKLKNRHNQQITLLHKLEELRDKLIDGNDDVIDEVVALFPQTDRQQLRTLIRNAKKEKAANKPPKSYRQIFQYLKDMAESAZ

SEQ ID NO: 1401 - protein, 336 aa, Photorhabdus luminescens
MKRKNTPTPHDAIFKKFLSHIDTARDFLEIHLPATLRAVCDLDTLRLESGSFIEDNLRVHYSDILYSLKTTQGESYVYCVIEHQSSPDKMMAFRLMRYSISAMQWHLEQGHKKLPLVIPVLFYHGKIRPYPWSTNWFDCFDASALAEEIYSSAFPLVDVTVIPDDEILTHKRVALLEIVQKHIRQRDMAELQQELTMLFAYDYYTYELLKSMLNYILLVGDTADPEGFIRQLAEQFPKYEEVLMTIAQKLQHKGHQEGLKEGLQKCQDAREEGLQEGLQKGEKKGEKKGEKKGEEKGEKRASLKIARALMDNGIDRETIMKSTGLSQNELEQIHHZ

SEQ ID NO: 1402 - protein, 275 aa, Photorhabdus luminescens
QHMNFSSLLNLNLNKENFSMKNTSKEHPAALSSLINASSGEKPTLAFVIFPGMTPLDMIGPATVLGVGGWLNIEYVWRDLLPVRTELAHISFSPSTTFEQLNKVDILCVPGTGNPYALLAELDMLDWIHKVGSKASWVTSVCTGSILLGAAGLLKGYQAATHWSMIDDLNKFDAIPVNKRVVIDRNRVTGGGVTAGIDFGLTLLAEIKGEEYAQAVQLAMQYSPEPPFNSGMPEFADKEITHATLQAIFSNVEKQTPDYKEILIKSAKRISDIYZ

SEQ ID NO: 1403 - protein, 324 aa, Photorhabdus luminescens
MNIKTLYFLIFPNVNLLDLSGPLQVFTTANELAEKFGHRRPYAIKVVACDPGQVMTQAGITVQAEPLPKLDSPADTLIVAGGIGVESAANHPPLRNWLKGHASLARRIVSVCSGAFILAACGLLDGRRVVTHWSSCAELARRYSKLRVECDPIFIQDGPVWTSAGVTAGIDLALALLEEDFGHKLALDVARDLVMFLKRPGGQEQFSAPLALQSSTSKFADLHAWMTNNLAGDLSVATLATRANMSERSFVRHYSQHAGITPAKAVERFRLEAARHLLVESTLSLKCIASRCGFGCEDTLRRSFFRAFSSTPQDYRKHFKTTFZ

SEQ ID NO: 1404 - protein, 556 aa, Photorhabdus luminescens
MAETPSAERDNRDKPVIWTVSVSRLFDLFRDITPEFDHQANITPIQLGFENAVQHIRQRLTTECCDAVLCAGSNGAYLKSRLSVPVIIAKASGFDFMQALARARQISSRIGVITYQNTLPALEEFQQRFNLRIEQRSYVTEEDARAQVNALKAIGIKVIVGAGLITDLAYEAELVGVFVYSADSIRQAFHDALDIARMTTLSQASISAYPTENNLRTRHTLNDIRGDSAVMEHVRNTIMLYARSPATVLIQGESGTGKELVAQAIHHEYALRYGQVAGKHQRPFVAVNCGAIAESLLEAELFGYEEGAFTGSRRGGRAGLFEVAHRGTLFLDEIGEMPLPLQTRLLRVLEEKSVVRVGGHRPIAVDVRIICATHCDLDTWVQDGRFRTDLFYRLSVLRINIPALRERGHDIGILALEYLRRAFAALNLPVSQSRVQELATCQEALQAYHWPGNVRELRNLMERLTLYLSAHPEHILTPELILALSPERQSILKQAEQSMKSSPSSIQQSSLVVPLSVHETLKRFSGNHHATAEYLGISRTTLWRRLKKEIAREREZ

SEQ ID NO: 1405 - protein, 297 aa, Photorhabdus luminescens
MTLSSAGLAFRRAIDAESPLQVVGTINANHALLAKRAGYKAIYLSGGGVSAGSLGMPDLGISTLDDVLTDIHRITDVCDLPLLVDADIGFGSSAFNVARTVRSMIKAGAAGLHIEDQVGAKRCGHRPNKEIVSKEEMVDRIKAAVDARTDKHFIIMARTDALAVEGFAAALDRAKAYIEAGADMLFPEAITELHMYKAFASTTGVPVLANITEFGATPLFTTEELKSADVSIALYPLSAFRAMNKAAEQVYITLRREGTQKSVISMMQTRNELYESINYYDFEQKLDLLFSQKKSQZ

SEQ ID NO: 1406 - protein, 389 aa, Photorhabdus luminescens
MSEQNTMTELTTFKPKKSVALSGVSAGNTALCTVGKTGNDLHYRGYDILDLATQCEFEEVAYLLVHEKLPSRAELAAYKAKLTALRGLPGSVKAALETLPAAAHPMDVMRTGVSVLGCTLPEKDDHNLAGARDIADRLLASLSSILLYWYHYSHNGRRIEVETDDVSIGGHFLHLLHGKKTCESWEKAMHTSLILYAEHEFNASTFTSRVIAGTGTDIYSAIIGAIGALRGPKHGGANEVSFEIQQRYENPDEAERDILARLARKEVIIGFGHPVYTISDPRHKVIKDVALQLSKEAGTTKMFNIADRLEAVMWANKKMFPNLDWFSAVSYHMMGVPTAMFTPLFVIARTAGWAAHIIEQRIDNKIIRPSADYTGPENRVFTPIGKRGZ

SEQ ID NO: 1407 - protein, 484 aa, Photorhabdus luminescens
MSTSVASNHPEYDQVIADIVDYVMEYAITSSVAYETAYYCFLDTLGCGLEALEYPACKKLLGPIVPGTVVPNGVRVPGTQFQLDPVQAAFNIGTMIRWLDFNDTWLAAEWGHPSDNLGGILAVADWLSRNAVAGGKKPLTIKDVLTGMVKAHEIQGCLALENAFNKVGLDHVVLVKVASTAVVAEMLGLNREEILSAVSLAWVDGQSLRTYRHAPNTGSRKSWAAGDATSRAVRLALMAQKGEMGYPSVLTAKTWGFYDVLFNGQPFKFQRAYGAYVMENVLFKIAFPAEFHAQTAVEAAISLHQQLKDAGKTINDITKITIRTHEACIRIIDKQSPLNNPADRDHCIQYMVAIPLIFGRLTAADYEDSVAADPRIDALREKIVCIEDLDFTRDYHDPEKRSIANALTVTFTDGSQLDEVKVEFPIGHARRRKEGIPLLLKKFRTNLARQFPETQQRRILSVSLDCSLLESMPVNEYLDLYVIZ

SEQ ID NO: 1408 - protein, 235 aa, Photorhabdus luminescens
TRLGKLRDKINPCRAAHTTNLFIDQPHQNLFQSSKMLGILDLLPILEDSKSNRDLPLDGILNTNHSHFGNIFMAGNTLFYLPRSQTMPGHINHIIRTPQNKIIAVTITDTPIECGINSMLKVSPIGIDKTGIITIDSLNTTRWQRSFNHEHTFFVITTRLSSQFIDELDMKAIHREAGTAKSTRPVIQRTGDSHNWPTGLSLPIIINDRDVDSLSNPAGGMFIKRFSRQIQCLKZ

SEQ ID NO: 1409 - protein, 629 aa, Photorhabdus luminescens
MSFNAFYQQSIDDPNAFWAEQAQRIFWQHPFEQVLDYSNPPFARWFCGGKTNLCYNALDRWLESQPDAKALITISTETNSEKVFTFKELHQEVNRAAAMMLSLGVKKGDRVLVYMPMIAEALFVLLACARIGAVHSVVFGGFASQSLATRLDNAEPVLVVSADGGARGGKIIPYKPLLDEAIELANHKPRHVLMVNRGLAEMVWVPGRDIDFATLRQKYFDADIPVTWLESNETSCVLYTSGTTGTPKGVQRDVGGYAVALATSMDIIFGGKAGEVFFSTSDIGWIVGHSYIAYAPLIAGMATIMYEGLPIRPDAGIWWKIVEKYQVTRMFSAPTAIRVLKKYPIECIGKYDISSLKTLYLAGEPLDEHTARWIAEAINVPVIDNYWQTETGWPIMAIARTLDDRPSRFGSTGFPMYGFHVKLINELTGEACGDNEKGMLVIEGPLPPGCIQTIYGDDTRFINTYWRHFEHAVYSTFDWGIRDSDGYYFILGRSDDVINVAGHRLGTREIEECIASHEDVAEVAVIGIKDAIKGQVAVAFAVLKDGKEIQNAEHFAALEKVLMGLVNKQIGSVGRPARIYFVSQLPKTRSGKMLRRTMQAICEGREPGDLSLIENPASLDVIREAVFCZ

SEQ ID NO: 1410 - protein, 437 aa, Photorhabdus luminescens
MEIDEIFNNYESKARSYCRRFPVIFRNGIGSTLIDIDGKSYIDFLCGAGALNYGHNNTIIKQQIFKYIQDDGIIMGLDLYSEAKMEFISTFVDKILKPRQLEYRLQFTSPTGTSVIESAVKLARKYTKRENIVCFTNAFHGMTGVSLSLTGSQHHRQPGLYSQITRLPFDGYIDGEFDYIGYFRKLLTDSSSGVDLPAAVILETVQGEGGLNVASVEWLRALRKLTQEFNILLIVDDIQSGCGRTGTFFSFERASIKPDLVCLSKSIGGIGLPMSLLLISPDIDVWKPAEDNGTFRGNNLAFVASKAMLNEYWGDSSFQKIIEHKAELIRAYLDSLAKEYHEFVLRVKGIGFMQGIEMVDSSLTQYLVKHCFENGLIVELCGPNDEVLKLMPALTIDEDTLVKGLRIIEQALASLKSRNSNNCESEFQRVSASSNYZ

SEQ ID NO: 1411 - protein, 482 aa, Photorhabdus luminescens
MSLTSVSEHLLAANKLSHQDLFSVLGQLAERRLDYADLYFQSSYHESWVLEDRIIKDGSYNIDQGVGVRAISGEKTGFAYADQITLNALQQSAQAARSIVHENGNGKVHTFGEVTYSQLYAAIDPLQSFSREEKIALLQRVDQVARAEDPRVQEVNASLTGIYERVLVAATDGTLAADIRPLVRLSVTVLVEDNGKREHGTSGGGGRYGYEYFLEVASGQIRAEQFAREAVRMALVNLSAVAAPAGTMPVVLGAGWPGVLLHEAVGHGLEGDFNRRGTSVFSGQIGEKVASELCTVVDDATIKGRRGSLAIDDEGVPGQYNVLIENGILKGYMQDKMNARLMGVAPTGNGRRESYAHLPMPRMTNTYLLAGHSTPEEIISSVENGLYAPNFGGGQVDITSGKFVFSTSEAYLIENGKITKPVKGATLIGSGIEAMQQISMVGNDLDLDKGVGVCGKEGQSVPVGVGQPTLKLDNLTVGGTAZ

SEQ ID NO: 1412 - protein, 290 aa, Photorhabdus luminescens
ECRIMSRVVELTKFNQLEFHHTLARGYAIVYRGLLQDWPAIRQWNSEYFQDKFPQIDVVIKFFDANGVRFEQAKMYRYLEILHAYKKGEMGNNIPYCHDIPIFLQAQQLLNDVSDFPLTILPKLYRNEWWKFVQFFMSPAGAITPLHFDTLRTNNLFFQIKGSKRFSFIPWEERAACSRRGWRWFEYNPEIQDVGEIANINKSTIEVHQGDILIMPAGMLHHVRTLTDSISFNIDFHTRSSALVSFKSIKEKMPRENLYYNWLSLCGLLGLMKRESFFEKYRPYLNYISZ

SEQ ID NO: 1413 - protein, 3300 aa, Photorhabdus luminescens
IIKTKNDIFQRDCSMLLDKVEPLVIPLNQQQKEIYLDHINREDTAAFNIGGYVEIKQSINIKNLECAIKHTIQEHAVLRCSIVDKYSMPHHIDSDALKDTVEFAHIVQDHHFELSHLDLSGEEEAESKALAIVQRIFSEPFRLAQDVLYRVGLIQLATNRFWLYFISHHIIIDGVGYANWFRRIFDAYQQLSLGNAPKENTGVRFLDLAAQPLPENYSQQFAKAAKYWKELLHHLPDVPFQCRKEGPGTADSRKNSRLVHFIKPDRYKSFLTKASQCNLPISPLFITAIASLVNRINQSDGVLIGTPLHNRTTSAQRNMVGSFISMLPVMCVQNEQMSVAESVAMTARTIKSGYRYRSYPSSALYKDLSLRAQGRERLFDIVFNYQQIDFDFSASGLDTETHYLSHGREDIPLTVILCDYGDKQSTQLQLDYRHDYFSSHQAEHLLQSIMTLVEQMVAQPEALLTSLDLVGKDVEQALWNLSQSVVTGEKPVCPTITLVHEQIEQYAKRHPDAIAIVDGERHMSYATLSNKANQLANYLIEQGVRPDSRVAICLPRSSEMIVAMLATLKAGAAYVPMDPDYPDGRLQFMLTDAKPVVCITVSSIAHRFAACEITTLLLDDAQLNEHLALRSVANISASNIGLQLEHLAYVIYTSGTTGQPKGVMVEHKQLSHFVAHISKAYRLTEHDKFLQFSSVSFDISVEECFGSLCNGGTLVLRADDIHYDFDAFWAFCRHHEISVTSLPTAFWHQLVNYSRQPIESSLRLVILGGEMVKSVSAREWFERGPAIELINTYGPTETTVTASAYCMTSLADVTTMIPIGKANYGTQLYILDTNLKSVPAGFQGELYIGGTGVTRGYLNREQDSAKYFVANPFGPGRLYRTGDIVRQLSNGNLEFIGRNDNQVKINGFRVEPEEISNQLMDYPGIHEAVVYPRQLGSDDRLQLIAYIVAEGTININAIHLAMKSKLADYMLPVAVVQLEKLPLTQNGKLDFKQLPLPQKQDYSQQEFVAPEGEAERVLAQLWQSLLALNKVSRHDNFFALGGHSLLIMSLRAELAQRGYELPMRAIYRTNTLAELALHLSCVRKDEDTLTYREVAVNKLAEHVEHITPDMLDMVTLSEKEIAVICQQVEGGAGNIQDIYPLSPLQEGIFFHHRMNGEHDPYIIPILIKFSDEQKLTAFLHALDKIVERHDVFRTSIHWQDLTTSVQVVHRTASIPLHWQAVIPGLSALETVQQAAFERHYMKLDRAPMMQAIVAKGTESGECFLLLKQHHLLSDHISVLLQIEEMQALLEDPNVVLPTPVQYREFVAHSLRINQSDKGVDYFKAKLSDVVETTAPFGLLNVYHDGLEVNSAGELVGPHLAQQIIGLATQQRISTANIFHLAWALVVAKCSGKDDVVFGSMMSGRMQAIHGSDRILGMLINLLPIRINLTNLSVSEALTQISDELIELADYEHFPLSEALRYSSLPGGTPLFTSLLNLRHKNKLAIANQSHHFEIIEAREYTNYPLEMGVDQLDNDFMMQVHVEPQVGAANVLTYMRTALVAIINAFNQAPQTPLLTLSITPISEQQRIINEFNSPVAAYDKTVTIHQRFEHQVVKTPAAIAAVCNTNYITYAELNQRANQLAHYLIEQGVARNHIVAIYAERSIEFVVAILGIMKAGAAYVPLDPTNPLERLSYMLADSGVNVVLTQHHLNGLTFNGQKYFLLDTDWSSLGDYPNTNPEVECYPNDLAYMIYTSGSTGKPKGALVHHAGALNHIDAEFDVLGFMDSDNQLLPRNFLQSAASSSDVSVWQFLAPLMSGGKTVILPNAMDLPEYVRVLQNEQIHLIQTAPSVLKILLEHFLNKGGISIPLPDLKWLMIIAEPCPVPLVNRWLQNYPQIPVMNGYGPSEASDDITYFIIDEPLTEQVKNIPVGKPLPNLTMYVLDQRMQILPTNVVGELCVSGIGVGKGYWNNPEKTAESFKDNPFHTMGGHGTRLYRTGDLGYWRADGNLELVGRIDNQVKIRGFRVELGEVESALVKLPQVMEAAVLVHKDRVGENCLVAYLVLAANVVQIQQSINDIKQGLSYHLPDYMIPGYYEILTRMPLNAADKINRHELPKPCFVNHHSKWIGPANALEQSLAEIWQSVLNVDQIDRNDNFFHLGGHSLLVIRVISKIRAELGHDIAVKAIFDHPTLIELAAMLKQQTTKTVVDSIQKQPRTDELLPLSFAQERLWILSQIDQSSAEYNMPIAFAVKGKFDVSAAERALNQIIERHEILRTVYIKKEGNPFQKVLSGRKLTLNYIDLIYMSKEQQDRHVAELMIEDVNRIFDLSSDLMIRATFIQCQVNNGVLLFNAHHIASDGWSEDILIREFVARYEAIRNGNHFEIEELDIQYADFAIWQRNRLQGEYLESQICYWKQQLSELPPVHGVPLDKPRPKVRQYQGAVVTSILPEETTRALVSLARRHQMTPFMLFHAALALVLSRHSSSHDIVIGTPVANRLQAELETLIGFFVNTLILRVDTRHSALSDYLTHVKQVHLDAQDNQDVPFEQLVERLLVTRSTAYTPLFQIMLTMNTDYGLNHDISTTAFNLPEVELSAIAPNHILAQFDLDLELSISDQGLLMHWTYDTSLFSHEHIEQLNDHLSRLLSGLVNVAENVAETDDFTSISLANLPILSDTETEYLLHTLNDTHANYPKNKCIHELFEQQAEENPNNIALEFGDSQLTYQQLNEKANQLAYYLLEHHAIQPDTPVGLCVERSLEMVIGMLAILKAGGAYVPLSPECLEERLVCILEDTQLNVVLLQSCLQQVLPDFSGQRVILDNLSNIDGQTSTVYSHYPIANPNRHSLGLTANHLAYVIYTAGSKGRPKGVMIEHGNTVAMLSWAQSQYTKEDIACVLASTSLNFDLSVFELFLPLVSGTRVCIVENIIALYEGIDHEVTLINTVPSTMSYLVDQNAIPSSTRVINLVGEALSANLVNEIYEKNKDVVVYNLYGLPEDTTYSTWAKLDSSINATPTIGRIINNSQAYILDKEHQLVPYGSIGELYVGGASLARGYFNRIELTKERFVTNPFHDPNTPNSSERLFRTGDLVRYLPDGNLEFIGRIDVQVKIRGFRIELGEIEYQLNRQTGVSSSLVLAEATSTGDKQLVAYVKPVLGKLKLMSEMNDAEKQRAQTQFIQDIKSTLAKSLPDYMMPSVIVMAEEWSLPSNGKIDRKVLSELNIEHGKNDDFVEPIGETETLLAEIWQEVLNISQVSRNDNFFAIGGHSLLAIKLISEINSVFVIELSVMQVFHTPSLCELAELICNQQLQEKIKRELVTAGEEGWLZ

SEQ ID NO: 1414 - protein, 3271 aa, Photorhabdus luminescens
MDMLKLVQDAYEQGVLLFSKDGKLGFKLKGTHFPDELKAKIQAHKAALITFLDEGKVDASGNKIAIKPAPRTQPLPLSSSQQRIWFIDQFGGDSTAYNMVSAYTVSGKFELAAANLALQTIIDRHEVLRTVYLSDENGTRQVIKPEWSFEIVQSDISDIEQAQQEAWIEQAIQDEMACQFDLSKDMMVRCRYISISAEQGVLLFNMHHIASDGWSIGVLVKEFVSLYQAYRQGQANPLSALEIQYADYAVWQSSPERQAQLAAGLAYWQQQLSDLPPVHGLPLDYGRPANQTSHGRSYEFSLNNEVSKRLQQLALTQGCTLFMVLHAAFTVLLSRHSGQRDIVVGTPVANRLQISLTPLIGCFMNTLVLRSECGLEQSFIDYLSSVREINLAAQRHQNVPFELLVERLQPERSTRYSPLFQIMFSMNTNDSVELQLEGISLRPRPEQTRNAMYELTLEAQQTEEGLIFSFEYNTDLFAEETIKRLAARFTTLLMGIVASPSEKLGDLALLPPEEQDYLLHHLNQTAVEYDRSRCIHEWIEAFAEQTPDAIALVFGDQKLTYAQLNARANQLAHQLRAQGVSTSGRVAVLLQRSIDMITALLAVMKAGAAYVPVDPSFPVDRVQYMLNDAEPQCIISNREYASRSVGFAELTCLLDHIDLSQSPTTNIPKQSIGLAASALAYVIYTSGSTGKPKGVMVSHSAVNNFLISMQDNLQCVAQDNILAITTISFDIAVLELYLPWLSGATCVVAAQQDVTDPARLVALLEQHSISLLQATPTTWNMLLESGWQGRSSLKMISGGEALPLATATALLSKGSALWNMYGPTETTVWSTIAKLDVQLLEQQLVTIGLPLNNTTIYLLDEQLKPVPFGAVGELYIGGDGLAEGYFKREDLTTERLINLTFSDGLTAKVYKTGDLARYTTEGSLVYLGRNDYQVKLRGHRIELGEIEQVINLFPQITRSVVVALNDQQTQQYLAGYVVAEQQIDIDALRQHLEQKLPAYMLPRAIIQLETLPLTLNNKIDRKALPTPQDSDIAVKASTPPIGETEAALAAIWCEMLDIERIGRDDNFFMVGGHSLIATKVITKINEQFECRLQVRDIFEAATVALLAERVPYAAWDKRYQTIPIIERKTNLLPQSYAQQRIWFIEQFGGDSTAYNMVSAYTVSGKFELAAANLALQTIIDRHEVLRTVYHSDENGTWQVIKPEWSFEIAQSDISDIGKAGQEAWIEQAIQHEMTYRFDLAQDVMVRCHYISTSMEQGVLLFNMHHIASDGWSMGVLVKEFVSLYQAYRQGRTNPLPALEIQYADYAVWQHSAAEESQLAAGVAYWQQQLSDLPPVHGLPLDYARPANQTSHGRSYEFSLDNEVSKGLQQLALTQGCTLFMVLHAAFTILLSRHSGQRDIVVGTPIANRLQTSLTPLIGCFINTLVLRSECELEQSFIDYLRSVREVNLAAQRHQNVPFELLVERLQPERSTRYSPLFQIMFSMNTNDSVELQLEGVSLWPRPEQTRNAMYELTLDASQTEDGLTFNFEYNTDLFAEETIKRLVVRFTTLLMSIVAAPSEKLGNLDLLPPEERDYLLHSLNQTAVEYDRSQCIHERIEAFAEQTPDAIALVFGDQQLTYAQLNAKANQLAHYLVAQGAKPDSMIAICIERSIDMVVSVLAILKSGSAYLPLDPAYPQERLAYIIDDAQPLMVITNSHNQKLLPENSLFSIDVTTTSFAELSTDNIPAVELGLCSTHLAYVLYTSGSTGMPKGVMIEHQALVNLVVGLADAYLYSKQDRVLQFAALSFDMSIEEIFGALGNGSTLVLRGEDWLMDIATFWQRCREYQISAVNLPTTFWHEVVSEETVLVPEHIRQISVGGEQIKPDKVVAWYQRPGHLPRLVNAYGPTEYTVNTCIAYDLRGDTLSIGHPIQNTAIFLLDKNQQLVPFGAVGEICVAGDGVARGYINKEQLTRERFIDNPFVSRYPKLYRTGDLGRYSLAGDIQYYGRDDHQVKIRGFRIELGEIETRLRSLPTIRDAVVIAREDEPAHKYLAAYITLDGQQKVAEIRHLLSQQLPSYMVPAAFVVLEEIPLTANRKVDRKALPKPDFVIQGEIEYIAPATEQETLLAEIWRTLFGLAQVSAVANFFELGGHSLLSMKMLSHLKKQGYRLDIRALFEYPKLRDMAKQLQAIEQESLKLTAHEALESRVSLSETERALIVSQSPGGEQNIAGIYPLAPLQEGILFHHMMCGRSDLYVTPMLYSFPSNTEMESFIGALDKIVQRHDALRTGIFWQGIDEPVQIAYKEVPLPVVDIDLRDDVDIQQQLAQFMDPSQQWMDVTQAPLIRVTRFIDRQQKQFYAMVQEHHLISDHVSLEIIQEELLVILAGDEKSLPEALSYRDFVLNAISKTDTKAAQQFFTEQLAGIDEITAPFGITSGMVDNNLFTEIQIGLPADLSAQIRRSSSAWRISPALIFHMAWALVLAKTSGTKDVIFGTVLSGRLQGIDNVERVVGLFINTLPLRIDLSQLSVAQLMQEMQQKLVSLLQFEQVPTAIAEQCSKLAGSSRLFDSILNYRHSEVSGETSELNQRWQKTGIELVDVKERTNYPITLSIDDFGDDFAVAAQIDSRFDAERLVAYLINASRQLVAALQSQEQVAALSLDILDAEERAFLLHSLNQTEFPYDNSQTLIDRFEAQVKATPDEIALNFAGETMTYRELNQRTNQLAQYLVNQGAKVNTPVVMFIERSFEMVITIIAILKTGAGYVPLDTSLPTERLNIILSDLSDEILVTTCALNDRIAVKRQKMVLLDDPCTAEILGKQLISNLAIESSLDNLGYVLYTSGSTGKPKAIEMPQRALSNLLQGISQLEPALTGPNRWLQFSSIGFDLSFEDIFMPLLSGGSVQLIDKSTQLDIRLLAKQIQQAQLQVLNLPYAVLQNLAEYSGVNGLQFPELRVIVSSAERLKITAAIRQFFTTHRHCKLVNHYGPAETHVVTSKTLQGEPASWPDLPTIGRSLPNVAGYILDEYLQPVPMGAIGELYLAGDCLSRGYYQQPQLTAERYLDCDWVLGKRVYRTGDLASFHQNGEINYFGRNDHLVKIRGFRIELGDIEAQLSKFDGITGTVVIAIDTEAGDKQLIAYFIAANPLDLSEIKTYLSASLPDYMLPSAYVRMAAFPLNTNGKVDRSRLPQPEADNFVKAKYIAPVTELERSVAKIWQGLLQQDRVSMADSFFDLGGHSLLAMKLISRIEQAFSVGVPIAIVFERSRLEQLCDWLEKEMVIQRNKSIGAVVAEYEVTEWZ

SEQ ID NO: 1415 - protein, 1140 aa, Photorhabdus luminescens
GNRVVIMNLKGFIDRLSEQEVRLFVENGALKSQSAPGAITPEQGKFIKQNKQAIIDFLSHTEVAGQQKFSLLQRRHLTKAPLSFAQRRFWLVEQVSTVERQYKISTAFNLYGQFSLEAASQAIDAILKRHEILRTVYQESQGTPAQVVLNDYVFQIDKDTLADGVDQQQHIEDWLERQRQRKFDLSRDLPLRVAYLASDLKPDTSDKPLTGVLFFDLHHIAADGWSLAILVDEFTLLYQQIVQGKPALLTELELQYSDYAYWQNQAETQQMFDEQLQYWQQQLANLPLVHELPLDYARPQKLDMRSAMHTQKIPMETVSKLKRLAVDANATLFMLLHTAFAVMLARYSDNPDVVIGTPITSRPVQKLESLIGCFLNTLVLRLDCTPTLTFNALLNNARQVHLDAQSNQAIPFELLVEKLLAEQSTAFTPLFQVLFSMQNYESQPLELADVEFKELMEQGGQTQFDLTLTAAEDQDGLSLIFEFNQGLFNSDTIARFAENMQLLLAHIAVNGDRPINQLAIVSEQEQAVLDKSHQSAWQLPEVQPFVHQLIQQRVAEYPERVAIRYQEQSLSFAELDARANQIAQLLLTKGADNNPLVAILMEPGIDFVVSMLAILKAGCAYLPLDPTYSVARLSFILADSHVGLVIVDNKSIDKVNLPADSVCTILLDETEIAAQPRTEPMLTSSVTADSLAYVIYTSGSTGNPKGVMIQHGALSASTAGRFNSYSIVPEKFLLVSSFAFDSSIPAIYWGLGSGATLHLMAPQDAKDASYVAKLIDSQQISHVLFIPSFYDAVLDYLVGPSLRKVICAGENLSDNVKTKHFQCQPQATLVNEYGPTETTVWSSLKIFEKATEPVTIGRPAPHVSLHVLAKDRSQCPVGVVGELYVGGVGLAKGYLNRPELTAERFIDHLDAKGNRERLYRTGDLVKVLPSGEIAYIGRNDFQVKLRGFRLELGEIEHCIRTHFDVADVVVCVRQDDKQRQSLVAYLVAPSMLDIREQRDKVERILPEFMWPGFYVLLPEMPLTENGKVNRKALPAPSRENIAKEPFTSPETATEKQLAGLFHRELGLTPINIEARFVQLGIHSLQFVKLGSAISEELKIELSVKDFYVYDTLFALAQYVEQQFAERQKQIGGEREVVELZ

SEQ ID NO: 1416 - protein, 3272 aa, Photorhabdus luminescens
VNIAAFLADLKQQDIMVYLESDSLKLNAPKGAVSQNMLTELRTHKVEIIAYLQGQQSNPLPIKTADRELTRLPLSFAQQRLWFIDQLFGSSEHYNMATVLEVNGEFDLTIAEKVMQRIVERHEILRSVYREEQGEVWQEIQSAVKAKINVRHLTCEPAELKAIFYQYVSAPFDLQKDLMIRIDFFTTNTQRQFLIINLHHIAGDGLSFSLLMEEFVIHYQEIKQNLPESLPVLPVQYADYAYTQQSWIADGVFDEQLDYWQQKLADIPQVHQFPLDLQRPVKQTNYGVKVRFRLDRQSSSMLRKHAGDAGATLFMLLHAAFSVFIARYSQQTDIVIGTPATNRKQKELQSLIGLFVNTLALRTEYQGKVDFMQFVQHVKQVNIEAQMNQDLPFDVLVEKLAVSRNIAYSPIFQFMFTMDTTEAGESRLDDVVFTPVSSGEAFSKFDLELDAIDDGDTILFEVVYNSSLFHEHTIARLLKSFEVLLIDIAENPYKTLDSLALLDEDEKRRLGQQLAIPSSIATTTESVQCRFERQAAQRSDATALVWQVAGETQTLTYRELNQRANRLAHHLIEKGVRPGNIVALCLPRSPEMIVSILAVLKAGAAYTPIDIDNPQSRINHIITDCQPVVVLTNNTYADKFAELNVIVELLTSEMELFSGTASDDPNISHSLDELAYVMYTSGSTGKPKGVMVEHTQLSHFVAAALAMYAVKPDDNILQFSSFAFDISIEECFVTLCAGATLVLRDDDWLNSADLFWQQCGQHNITVMSLPTAFWHQVSSGDALVPDTLRLVIVGGEAINAEIVRHWFASANRPPVMNTYGPTETTVLASYYLIESALQIEQSVPIGRVGGHVKAYVVDEHLNLVPQGVIGELVVGGKGVSRGYLNRPEEQQRSFIQVAFFDGEVERLYRTGDLVRFNVHGEIEYIGRKDSQIKIRGFRIEPGEIENQLIAIDGVRQAVVTADEINGNKQLIAYYVADVPLEPAALKEQISQTLPEYMVPNAFISLDSIPMTVNGKVDYKALLSVETQEPLPENYCLPQGELEEQLADMWQQLLGHPKVGRTDNFFKLGGHSLLAIKLVSEIQKTLAVQISVRAVFESQTLAELAQLIVEQRITTGGNAAIAPITPVAEMARLPLSFAQQRLWFIDQLDGQTPQYNMPLALTVKGEFNLAIAERAINIIVQRHQVLRTVYRHDTAGAWQEVLDKVTVKIDRIDYRSLGEKSGQQQVQEFIQQHAEQPFDLANDVMLRAAYLKIAEDQCVMVFNMHHIASDGWSIKVLADEFVDIYRQLLEGIQQPALPSLAIQYKDYAVWQRQQLQGETLQTDLNYWLTQLNELPPVHDLPLDHSRPLQLGSRGGLFEFSADKSLLTGLKSLAGQHNTSLFVVLHAAFTLLLARHGQSPDIVIGTPVANRLQAEVEPLIGFFVNMLVLRTQYQADLTFAEYLSYIRQVNIDAQAHQLLPFELLVEKMQPERSTSYSPLFQIVFSMDTNESQVLQLSDVEFESLDSEHVTAQFDLTLDAGESENGLDFSFEYNCELFERSTITRFSQRFLTLLSALVSEQYQTAPLTKLPVLTEQERQYLLVDINDNWQSYPVDKCIHQLFEEQAERSPEQTAVIDGELHLTYRQVNAQANQVAHFLLDKAYTPDSFIAVCMERTAASVITVLGILKAGLAYVPFDADQPLQRIEYILQDSGAPLVVVDDIQCLPTEVASAYNVWRLDEILSRSRLNTHIAVTQRHSTATNLAYMTYTSGTTGHPKGVMVEHTAMIARLYGWDAVFGLFQRPPTVLQMAGLAVDIFLGDIVKSLTTGGRLVICRKSDLITTEDLYQLIEQQHVTFGDFVPVILRNLLDYAEQNRVRLNSLRHILVGSEAWYGRDLNRLQKLMHTDARCFNIYGQTESVIDASYGDVTHLCLPDDAYVPIGTPFANTHIYILDAYGEPVPMGVVGEIAVGGPGLARGYNRNRELTQQKFVKDNLSGRCGYIYHTGDQARLKFDGTLEFLGRNDDQIKLRGFRIELAEIDAKLRALPDVQNAIAVVREIEPGNKQIIAYLQTPRPLLVERIREQLRHQLPHYMIPSAFVCLNAFSVSITGKVDKEKLPVPEASAFTSTEYVAPQNDIERTLASIFAVVLKQEKVSRYDNFFALGGDSILIVRVVAMAKQAGLALSVKDILAYQSIDEITQQLPDLNRNIVSSKEAYHAFSLLTDDERAALIEQSTLDDAYSLSSLQMGSIYHQLKDESYHIVEHYLINAVWSEQAFRQAFNAIVQRHELLRATYNFELGRALQYIHKTIALPVTLNDWRHLSVQEFEHQLDHCLEQENSHFFVENELMWRVNVCIDANNTFALVLSHQHAILDGWSVANLQVEFMENYLSVLSGGSIPPRADLPHYGEYIAEELAAIDDPEQKAYWQHIANAAVLPDWTGKASTQHYSARLELSYLHDDLQQLATCLKVPLRTLLLAIHVYVLAKINGTDSITSSVVSHGRLEVKGAESCLGLFLNTPPVNADIHQQTWASLIQQLTEYSTASWPYRYYPVAVMQEEFKCDYSGALFNYVDFHVSDELQTTQDAEPEQAYDHEYERVDYGYDFVCHHSSANRFLVLQLALTQSVFGAHQAGQILACYETAIKSMLASQHHRLGHADYLASGQIQHLYQLAHNASSIANDCPSVTQLFARIARRIPDEVALSGPWGSMNYAQLALAADKLATLLIARGIGVNDTVGIYLSRTPEVVISVLAILKANATFVPLATDYPTERIAHIINDADIQLIVSQRSESHTLPVDEQRIVMVDEIDSVDTAVVAREVALSAQERVAYIMYTSGSTGTPKGIKISHHNLLSYYQAVQRCYPANSAHAVLQIANIGFDIFIEELMLSVFSGGRLVLDNHKTAYSVKQLCQIIDAQKVTLISVPTALWHEWTYQLTADDVEQLVEHLKVCIVGGEAMRMELLALWQQKTQGKIRLFNTYGPTETTIVATAIDVTQFDTLTNSVVPIGRPLAHCQTYVLDSQGGLVPPDVIGELYIAGDALSLGYVNNPEQNAAQFVEMAILPEQTVGLYKTGDRVYWNNEGELVYVGRLDNQVKIRGFRIETREIESALSAIDGVATSIVRVTVDATSEKQLCAWLVMPEGTETDAVIPPIREQLKTRLPEYMVPTLYAVIATIPTTANGKVNFAALPEPKPCITRGLDRVAETEIEKQLVQLCADALKLPSSMVSLAASFIELGGNSLTLLRFLHQIQQTFAVVISIADVMTATNLAVLALMIERKQLQQTEQSHQGCNTVAEEGWLZ

SEQ ID NO: 1417 - protein, 616 aa, Photorhabdus luminescens
GGIMRVIDIIRQASAAGVQLFVERGKLGFKVISGYVFTPELKALVVANKAEIIAFLAPDEAIKLVSLGTDQTPLFLVPGADSLASSFVDLAEKIKTDFCLKVFDATSLLLGGETLSVKTLAERYAALLLQAYPQEHYRLAGYCVGACTAFEVALVLESEGKTVDLMVIESFLTAYDRQPYTHEEIDDVSTRLIQGIEGEALDRFIEAYKIYSIMACNYVPSAKLNGRMTFIYCESSIQLRAEKKKIIASLQDYVTQTITYGMVSGDHYSVLKPGAVETLADAILLQHYRPEPSFKKLNLTYQALLDMVQYRADIYRPIGDINSYHRVVISQVGCWFIEITDERVHIDFNANNTMCAQYDFYSEIEISVDTLIACATSEEPSAAIAKAILDNKIQVQRGENLYHLLWIVFGVTEPDEIFDWIEQQDSQDEHLGVQTNGRTFNDKWHIDSHICTRYMPAHYSVIHKALMSLPIEYSDFQFIDLGCGRGRAIICASSYNFSKITGVEIVESLALIAQQNVNAIKQKSHIEIIQADVNDYRFNENHVVIYNFDSFVNDQLKQLLQWLKIDVYDKGYKVLILQINGDDAIYQHCFWLTPKIISRGFMGGWNITLWQSEGCZ

SEQ ID NO: 1418 - protein, 567 aa, Photorhabdus luminescens
NFTWELISMISDLVKANRLKIIFNSIVGAFSAFFSIWLISLITDDALEQISADLVSWTVKFFIGLACLFVVSSFANYLMTKLSVKIIFEVRSTLVKRILNTPYAILERIGGHKVQASLTSDVSDISRAISTMPQFIYHVITVIACLGFLAFKSIELFMVTLVTLPLGLLVSRYFISKAEAYDEVYRDDYDSLHEQFKSLVDGVKELNNNEKRKHSFFNRGVLPSLEKINDSDLKSEIFWKLNENWGQILLFLVLGSILFSHVMWEIGESNDILTFIFIMTFLLGPVDFILSSQETIVKALISLRKIDRLRFSENLSMEPTLTNTGEFKEWSRISLRSISFKYAGEGNCFSVGPINLDIQRGEIIIIKGGNGSGKSTFAKLLIGLLNKSEGDIFIDDKVVNEDNRENYLNMYSVIHSDFYLFDTVINRKGELADDELTRQYLKKLDLAEKVTVKDGRLSTTKLSHGQRKRLALVISYMEDAPIYLFDEWAADQDPNYRRFFYHELLSEMKRNGKTVIVISHDDKYFHIADRVITMDNGLVDNIEINVHPDKVENAALESAISTMYTQZ

SEQ ID NO: 1419 - protein, 264 aa, Photorhabdus luminescens
KMKGIVIIARRYQEVIMLELFEDQLAGIREKYGSDCLKRVEDMFYPLLQQRAPLQADAKYIMPGLSTTPWLDTNSFPQLQPLVTSLMNNADKIKQEINAVISGESQYITDYEHYLGTQKDWKALYLFKNGQPNNAVANILPATWHIFNNELRDWHCPLLEVHFSVLQPGTVIKPHCDLWNFTLNLHFAVDIPASHCEIIVANEARCWKEGECLLFDYSYQHEAYNRSDKHRICLLMDIWHPNLSFAEREALVLIITGIRKLFGZ

SEQ ID NO: 1420 - protein, 344 aa, Photorhabdus luminescens
IWVCCWLLATQFKRIAFMNRKRQYMVSDIQESNDFVFELDSTEQTYLKQQFLESTLKYDIDNFEEFYWKCFYQSFNLPVRLQKKLFDFRALENENYLLIKGLPIPDDLCLTPLSYEQTNSSEVAGVRTLISTILSRIGYIYSFVNKKNFNFIDDVFPMEKYKDMQLGTNKEFLEWHVEDGFHDAKADWVALYCLRGDKNAETYLFQTKNIHLDAETIAELQKSNFEIDVDPTFVSNVSGRRCVAVLSQHKEPEMIFDPAYMRCLTPKAEAALEKLNQCINENREAFILSPGDMLLFDNRKVAHARSEYEPRYDGYDRWLLRALILESKFKARDYFYTGTLRAKZ

SEQ ID NO: 1421 - protein, 837 aa, Photorhabdus luminescens
SLVTQSINIGIKIQSQRLLLYRYFKGKIKMTSFKTILFKTISFKSITLLLITLLTISCSGFKSYSEKTKTAFEAKIVRTHYGVPHIYAHDLGSLSFGNAYAQAQDNICIMADDYVRIRGERARFFGADRDKQGDSLNLIQDFGYKTLALVEQAREKWPQLSADSQVIIDGFVAGYNTYLSHVKEGRYTLPKACRDQEWVAPIQREDVLAYVFSIAVFPGSAQFLADYYAADPNKEDQKQLSLNISRNNGYSIGSNGWALGRDKVEEVNGMLLANPHFPYEGNMRFWQVHHVMNGKIDVMGASLIGFPGIINIGFNHNIAWTHTYSSAEHVIVYKMQTAANNPLNYVIDGVIKPVMSKPIHIEVKTDSGIKTVTKDHFYTDIGPIIENEDFAWSESEFYVVKDVNLYNLDMIDHWLALNRADSLADAKQSYKDFNGLAFNNTLLTGKEGVGIFIGDKAVPALSLEAIQLLNDNETLAAAREKYGVTILPGNSSSMIFTEALGYDQIPQLVETSYVQNSNDSHWATNLEHLLEGFSPLLGNERKPLSFRTRMGLQLIQDAAGDNKRFSLMELEQALFSERSYLAELILKDVVALCDKTQNRLIRLVNGMKVDITQACQLLSQWNGEFNADSRGAIIFRELAFLIDQQKHFAVPFDIAHPATTPRQLKQSEEFVTLLARAVANVNNVGLALDTPVSKFQFIESTAPDGKPADNRMSWPGLFGEEGGFNKIAAWDWDETLFPKHHYTVGNDVVTGEALESELTDQGYHIRYGSSWIMLVAFDQQGPNARGLLTYSQSSDIDSPHFADQSRFYSHYKQLLPLPYRPKEIKRSTISELVIKHZ

SEQ ID NO: 1422 - protein, 286 aa, Photorhabdus luminescens
MRNVNVALLQLCSGENIKHNLAQIEQQIKQLPDTIKFVMTPENALLFANADSYRRHAEQQGHGPLQQAVSEIARRYGVWLLIGSMPLISRENPERLTSSSLLFDDQGKICARYDKIHMFDVNINDEHGSYNESSVFQRGEHITVVDTPVGRLGMTICYDLRFPGLFQALREQGAELISVPAAFTRLTGKAHWEPLLRARAIENQCILLAPAQVGVHGTRQTWGHSMAVDGWGKVIKKNPDAVSALQLNVRADSLKIMREQMKVVKHNRFRPQLTSLIEKIPQIKEZ

SEQ ID NO: 1423 - protein, 288 aa, Photorhabdus luminescens
ILFILWNDINMMDFSNSGYQKCVEFTMPSIEDVFACMINRVPFIIRGGAEQWVARTKWTWDYFQQKFGHHLIKVFRSSNNKDNKYMSLGDYIDYIKDMEEPDPYYASAWPFSLYFKELVSDYEVPDYFSCLIRQRVSDNILHNEAALLLLRWIYMGPKNSGSRMHLDIASTHAWNAVMSGRKEWVFYGPEEAMKIGYGNVDAFNPDLALYPDFIQAQGIHCIQNPGDIVFTPCTHYHQVKNLEAGISITENFINDTNLELVKHSINNDDDISPEQANFIRMLIPELSZ

SEQ ID NO: 1424 - protein, 323 aa, Photorhabdus luminescens
IMNRSTYFNLCEEKLSFLCTRVELRGKLNLLDLHLHCEDFYVHFFNLLFGYVLKNVNQYTHNAEGIDLIDSVQKVVLQVSSTATKQKIESALSKNLTTYRGYSFKFISISDASALRRLSYKNPHSLVFEPIFDIHDVRSLLDHILHLDIVKQQAVYEFLSKELSSVGVKNPLTETNIAAVINILAKENLSDMPSVDKPTPFNVDEKLVFNDLNTAAMVVEDYKIHHGRLSRIYAEFDVAGQNKSKSVLDSLRNSYIKLCTTYSADELFFNIVDRAVTVVKQSANYVSMPLEELELCVNVIVVDAFIRCRIFKNPKGIENVVAZ

SEQ ID NO: 1425 - protein, 258 aa, Photorhabdus luminescens
MKTLITLLLANTIQFGLVYSANAEPTLDKIKSTGTLRIATEGAYPPFTYRDASGTLTGFDVDIGREIAHRLHVKPTFIEGKWDGLIAGLDAGRSDAVINQIAITPERKKKYDFSIPYITSQAVLIINKNNNNIRKFSDLKGKTSAHTLTNNFAQIARDNGAEIIGTNGFSQEIELVSTGRADATINDSLSYLDYKKHKPNAPVKIVAATPNAGQTAVLLRKGEPELKVAIDQAITDIKTDGTYQRIWTHYFGDNLPEZ

SEQ ID NO: 1426 - protein, 979 aa, Photorhabdus luminescens
PWQRRQHTKYQDKMEKTPATQTQAEPSLDKTYNPKEIEQPLYNHWEKSGYFKPNGDTSRESFCIVIPPPNVTGSLHMGHAFQQTIMDTMIRYQRMQGKNTLWQSGTDHAGIATQMVVERKIAAEEGKTRHDYGREAFIDKIWQWKAESGGTITNQMRRLGNSVDWERERFTMDEGLSNAVKEAFVRLYQENLIYRGKRLVNWDPKLHTAISDLEVENREVKGSMWHLRYPLADGVTTAEGKDYLIVATTRPETMLGDTGVAVNPEDPRYKDLIGKEIILPLINRRIPIIGDEHADMEKGTGCVKITPAHDFNDYEVGKRHALPMINIMTFDGNIRHKAEVFDTHGEISDSYSSDIPAEYQGIERFAARKTIVAEFERLGLLVEIKAHDLTVPYGDRGGVVIEPMLTDQWYVRTAPLAKVAIEAVENGDIQFVPKQYENMYYSWMRDIQDWCISRQLWWGHRIPAWYDTNGNVYVGRSEEEVRRENNLGTDISLNQDEDVLDTWFSSGLWTFSTLGWPEQTDALKTFHPTDVLVSGFDIIFFWIARMIMMTMHFIKDENGKPQVPFKTVYMTGLIRDEEGQKMSKSKGNVIDPLDMVDGISLEELLEKRTGNMMQPQLAEKIRKRTEKQFPAGIETHGTDALRFTLAALASTGRDINWDMKRLQGYRNFCNKLWNASRFVLMNTEGQDCGQHGGEMALSLADRWILAEFNQTVKAYREALDTYRFDMAANILYEFTWNQFCDWYLELSKPAINKGSEAEVRGARHTLIEVLEGLLRLAHPIIPFITETIWQRVKIVKGIEADTIMLQPFPEFAQEKTDELALTDLEWIKEAIIAVRNIRAEMNIAPGKPLEVLLRNADAGAQRRVAENLNFIQAMGRLSSVTLLSTDEEAPISVTKLINGAEVLIPMAGLVDKEAELSRLNKEIEKLDKEIGAIEGKLSNEGFVSRAPEAVVTKERERLANCNTSKEKLLAQKETIAALZ

SEQ ID NO: 1427 - protein, 507 aa, Photorhabdus luminescens
MEFSVKSGSPEKQRSACIIVGVFEPRRLSSIAEQLDKISDGYISALLRRGELEGKVGQSLLLHHVPNVLSERILLIGCGKERELDERQYKQIIQKTINTLNETGSMEAVCFLTELHVKGRNNYWKVRQAVETAKESLYAFNQLKSNKNELRRPLRKMVFNVPTRRELTSGERAIQHGLAIAAGIKAAKDLSNMPPNICNAAYLASQARQLADSANSHITTKVIGEEQMKELGMNAYLAVGQGSQNESLMSVMEYKGSSDKHAKPIILVGKGLTFDSGGISIKSAGGMDEMKYDMCGAATVYGVMRVVSELQLPLNVIGVMAGCENMPGGRAYRPGDILTTLSGQTVEVLNTDAEGRLVLCDALTYVERFDPELVIDIATLTGACITALGNHYSGLLSNHNPLAHELLNASEQSGDRAWRLPMTDEFFEQIDSNFADLANTGGSGGGAITAACFLSRFATKYHWAHLDIAGTAWRSGKTKGATGRPVALLSQFLLNRAGSAGINNDDZ

SEQ ID NO: 1428 - protein, 367 aa, Photorhabdus luminescens
VIIIRYLVRETLKSQVAILFILLLIFFCQRLVEILGAAVEGNVPANLVLSLLGLGVPEMAQLILPLSLFLGVLMTFSKLYTESEITVMHACGLGKRVLVVSALILALLTSALAAVNVIWVMPWSSKYQEQVVADAKANPSLAAIMEGRFKPSEDGNLVLYIGNVHGNKFENVFLAQLRPVDNQRPSVVISNGGHMVERPDGKQVVVLNHGTRYEGTAMLRDFRITEFRDYQAIIGHQTSIVDNNKVEQKSIIQLWQDNDKDSRAEFHWRLTLVLSVLIMAMMVVPLSVVNPRQGRVLSMLPAMLLYLIFFLLQSSLRSNGSKGKLDPMIWMWLTNGTYLMLALVLNIWDTLPVRRIRARFNGRGVAZ

SEQ ID NO: 1429 - protein, 361 aa, Photorhabdus luminescens
LMFGVLDRYIGRTILQTILMTLFMLVSLSGIIKFVEQLRKVGQGEYTTISAGLYVLLSVPKDIQIFFPMAALLGALLGLGTLATRSELVVMQASGFTRMQIAGSVMKTAIPLVILTMVIGEWVAPQGEQMARNYRAQKMLGGSLVSTNKGMWTIDGDDFIYIQRIVSDTEIKGVNIYHFNDDKKLLSVKYAASAVYDKDNDLWKLSQVEESDLTDSKKITGSQRISADWKILLTPEQLNVVALEPEALSISGLYQYIKYLKQSEQESGRYQLNMWKKIFAPLSVAVMMLMALSFIFGPLRSVPMGVRIVTGISFGFLFYVLNEIFGPLSLVYSVPAVLAALLPSLLFLTVSIYLLLKRRQZ

SEQ ID NO: 1430 - protein, 429 aa, Photorhabdus luminescens
IAAFAIFILFVNSLEICLIGQFKMNKQFFKIFSISAMMLALAACSSSNKIYSAKFLQPKKQPLKWEVFEGNARTKKLASQLVDQYAQDIFNSSNAQGMAMVVIDNNQTVYRSFGETRPGNGIRPKPDSIIRIASLTKLMTSEIMIKLEEDEVLRSTDPLQDYSYYGVKVPQYSPLQPIRLFHLASHTSGLPREQPGGRWGRPVFVWPTQANRWTWLKTAQLDSAPGTTASYSNLAYDLLADALSKATGKPYTRLLYDKITGPYCMKDTTLTPNRSQCARLMESYKPSPCLNTVAAAGSGGIYSTPKDMQHWMQQFLSSDSQLRKQTASREQGIYFKRSALASIKGMDVAGQADGVGLGWVYMNARGDVPGIYQKTGGGGGFNTYMAMIPEQNIGVFVVITRKQHSLFSSVTTGVNQLVTALSKNHHQAZ

SEQ ID NO: 1431 - protein, 419 aa, Photorhabdus luminescens
MALTDVVARTAKPREQAYKLADAHGLYLMISPGGSKRWYLKYRFEGKESRIAFGAYPLISLAKAREKRDEVRLLLADGINPAEKRGEGKKEAQDALITFEKVARDWHRNISQNRWSETHAGRVWRDMERNILPAIGHRHIADLKTKDLLEPLKAVEQNGHLDLASRLRQRVTDIMRYAVQNDLIERNPAQDLSGAIAPPKATHRPALKLDKLPDFLARIENYKGRTLTTLALKFTLCVFIRSSELRFARWTEIDFKRAMWTIPAEREAIPGVKHSQRGAKMRTEHLVPLSRQALALLKEIQAISGGHELIFPGDRRPTKPMSENTVNNALRVMGYDTTTELCGHGFRTMACSALVESGQWSRDAVERQMSHQERDSVRAAYIHKAEHIEERRLMLQWWADYLDANREGYVVPYEFMGAZ

SEQ ID NO: 1432 - protein, 318 aa, Photorhabdus luminescens
NTMLFKKIKTYFLYIILSMFLITNTFLVRHEFIFKKTFIVLFLFLTIVICFYQKDAFKKIIYYFIYFNNDKIVKKISGGLSLLAWLFFVSSLFLLNIGLVWLARWFILVFIIFVVISGVFTFYDLERENNIIFSKLKIVFVSSVSLLYFITSTYAASYFMQMSNMDISDSPLLEFGWKLAFFAIYFFMLLQPVSYGIFLLVSNKLKGHQLMTFFGIIMLTSLLLFALPRWAENFIVVVLDWATSSEWHTSATCGSLNISDSTDHYFGFNTNKYTVYFSNRDGKWGFEEINCIKDDKNQDSLKRVPVTESSMPKWFKEZ

SEQ ID NO: 1433 - protein, 1278 aa, Photorhabdus luminescens
FADITALVTKEMRVRRLPGVLLATAAIVIIIVALLVSGLRFILPHINDYRPQLFAKIESIIGVPIDAGYIAGEWESFGPVFELRDISVKTANADVKAKKITVALDIWLSLLRMRWNFRDLTFYQLQVDYYQPLFNDQNGNMFSQSDLFSDLFLEQFDHFNLQDSRFTFLTPSGERADLLLPQLTWLNKDNRHRAQGKISLSSINNQHGDIQVKFDLHDTNGVLDNGTIYLQADNVDVHPWLSHWLQDNTGLKDAEFSLSSWIMLKDGRIDGGQLQLRQGKANWKVANKSHNLSVSDLVLRMRRQDGGWLFDAPELANLITDGQQWPSGKVSVLYLPEAKRVDGHDHWRVRAKNIQLERLSSILPTFSFLTPDIVKDWQHRQPQGLVKYLALDITPKMADDSRISMQWQNVSWQRWQELPSIDNFSGAFNGSLRQGKLSFTLKNSVVDYRDMFLAPFEISQSHGEILWRQGRRGLQLWSQGLDLQAKSLWVNGDFRYQQPKEQPPALSILAGVRVYDAGDAWRYFPEPLMGTPLTDYLTASIIKGQIENATFVFQGNPKDFPFAKNNGQFQVFAPLRHATFQYQPNWPALLDFNIDLNFQNNGLWMFAPQTALGEVKASNLSAVIPNYRSKKLLIDADLLGDGKDIHEYFTRSPLANSVGETLDILQVGGQIAGNLHLDIPLNGGNVDARGEVTLKNNHLLIKPLDSEMKNVSGRFRFDNGNLQSGKLSAQWLGQPVTVDFSTKSLPKNYRVDVGLNARWAVAKLSKFSPAIAKAFSGSVDWEGKVGVSLPFQGKPQYDMKIDVDLSQVDSYLSVLKADEPRALHILADGDMEQLQVKGTLDKQYAFNTQWRLAGKSTQLSRGILQGSDKIPELPEKSLLELNLPAVEGEEWLGLIAPLTSGSSLAGMSMLPQHLHISLPSLDAGGQRWNQLSLDVEKQLWGTQITANSREINGKLNIRNSGSWQMNLSHLYYSPLQHSSQQAESDLPKQSQTGTTLRYSLNQWPSLDIICSECWIMGLKLGKVSGSLIPEGNSLVLRDGIVENSVSKLTLAGRWQEGAVGNNTRIMGQFSGEKFDEMASYLGIVVPIVNSPFTFGFDFNWWDTPWKPNFQTLNGNLKSDLGKGAIEKLGGGSASQLLKLVSFDALLRKLQLDFSDTFSQDFEFDSIRGDVSVKNGILKTENLRVDGLIADVITKGEIDLVRQQINIEAIVTPEISATVGVATAFVINPMAGAALFAATKVLGPLWNKISVIRYRITGNLEQPKIDEVLRQLKENRGTZ

SEQ ID NO: 1434 - protein, 381 aa, Photorhabdus luminescens
MTGLLGVSANAREYSKRGSETMSKSVTDTEAEFKTSLPLRKGSDGFDTQQDYLIKGYLPASSVANAYGASGSYKSFLAVSWGCHIATGKPWAGKPVTQGAVIYVVGEGGIGVPRRIRAWEQTLNGGSPIDALYRIDCPVFPASPESVQQVIQAAKDVKAATSMPIRLIILDTLARCFGGSDENAAKDMGAFIQGCDYIKAATQATVLIIHHSGKDQDKGARGSSAFRAALDVEFNVRREGDGGALILSCTKMKDAEEPPRRAYDLHSVDLYVDDDGDRITSLVLNDEGREARENDVTSDPDLIGISRLTENHFALWQAIRSRTASGDSCTRALVRDDMKAMGFDVSKKFTRWLDKLEKDGLIALDGERITPLSQRDKTRDZ

SEQ ID NO: 1435 - protein, 293 aa, Photorhabdus luminescens
EKLAMSKLSREMKMLAKQVGGSFKTVHDRTRIIDRFCRHLIALNIQVRDVQHLKAKHIESYIADRQATGISARTLHNDMSVFRLAGREKLVTSIRLANKTLGLSGASRAGTKFAIPDERFQAVLRSAQQHDRGLTCALQLARLLGLRSQEAVQCASSLKTWEKQLERNQSTLTIVFGTKGGRPRETRIIDRHAVQQAVKEALLVTKTHNGKLIDKPDLKTAMNFWRSHTTRLGLTGHYSPHSLRYAWAQDAIRYYLSQGFSRSEARALTSMDLGHGDGRGRYVERVYTRKEDZ

SEQ ID NO: 1436 - protein, 463 aa, Photorhabdus luminescens
GRYFLIDIIRVWLISQSWFWRFRARIAKISFLFENSTYKRRTYVSKAKANVRILGSFTWVGLNSLFWVVLTLSILGFVEDYLRSKTVLLKPLSADDKKFYIDQLRLYAQLLTAIFSIYFATIGIILSTGYTRLRRDIIQLLTTEQVGSIYSRVLVLSAVFCLGATTLQLVGFEPGLFITAIGTFLTLISSLALFPLGQRLFNFFNLNQLARSEILPRIAHHIEGAANPNNSISLANHHSKVARSAFEQLCYIDDRMKGEKVGLGDNLPALSDDYMVLLLHYIHQKHRIDHQSYWFPRRQKHNQWFLAGDLATTTALQTNSQLSIEEEANHQWLENVIIERLAGHIELAFEMGDFKLGLKLISRFSSRISTYAEQFQFDIGMRELQRMKELIEEAFVSSDIIPGNEEVTLRIGIADSWAALGSNLCLETLRRMITFEKELRQFFNNDIWTEKSLQTLPPFLAGZ

SEQ ID NO: 1437 - protein, 297 aa, Photorhabdus luminescens
FSQVCITIGSCLTGLMKFLNILERCGEYNHYPEKHYELPNINIADMIARLTYGRDEAIAMLGRADIVGHIFAGEHNDELPDHFGQIYFELAEACIQYLEQNDEKKFSKVFPMFMSLALLAIDSKFVDPALNVNDEFRLHLISSVINDLASVLGFAILYSNYFDNMKLSEAALDKFKLLIDKTANKQQYLTRMVRLSNSYSFSLSASPRNMIRSKWKMAFEHRARHDGFSDQMGMSGGKSHKNKIVRAFLYSDSDASHLFFAIEALPQLFSPTDFEIDYHITSLARFLDEECDEGSEZ

SEQ ID NO: 1438 - protein, 335 aa, Photorhabdus luminescens
RGFRMKIVRTSPFDRYYFADVNLSFIDRLFIKLKSERPTFNRSMFDQDFARIFCSGSRQSSNLFSIESNDDELTKTLFRYIKTRHRSHNIDKKMRELVEEIARSLVSFGTAYYFLHDFPEEENICIASFSGIGVFSFLNIYFQLVPQRCEKNWNSEDREYPRELRILDRAKLMHFSMPRSIKRMLSEQNRTLAVLDGHQYDGTGFFPKATHENPNPKNDFDFCVWRDTQERALYRATRETGWNGRKYDSSKRSDFFVCHRLIRFRRNQLILRDYILELLGNEFTRIGRQYNAEFHVAISPTNALPKVDKLDDLEARLLKEEASFSEVFDFCYERZ

SEQ ID NO: 1439 - protein, 422 aa, Photorhabdus luminescens
MKLNARQIEAAKPKDKAYKLADGGGLYLEITPRGSKYWRMKYRRPTDKKEDRLAFGVYPVISLADARAKRNEAKKLIANGIDPKATQKETQAEASGEFNFETIARKWHSSNKRWGDYNRARVLRSLEQYIFPHIGKIDIRQLKTRELLVPIKAVDDADKVDVAKRLQQCVTAIMRYAVQCGIIESNPALDMAGALSTTKTEHHPALPPSRLPELLERTALFKGREVTRIAIEFGLLTFVRASKLRFVRWDEFDFDNAIWEIPGKREAIENVKFSERGMKMKTPHIVPLSSQAMALLEKLKEYSGDNRCLFPGDRDPNKVMSENTVNKALRVMGYDIKTEICYHGFRTMARGAMGESGIWADDVIERQLSHLERNNVKAAYLHTSHHLDECRLMLQWWADYLDANRQGFISPYDYAQSTGRGZ

SEQ ID NO: 1440 - protein, 742 aa, Photorhabdus luminescens
MANTNFLIGRGELLTHDIPSPKRRMDKSEVYTLTEAKKRLTPQIQTTNDIFKKLPAHSCPHDYAVAKLTMNPSYIARSYFPTAMLRNTDLKSVGSKTVKIVPEKWKRKIDVIEHPTTQLFVAGKRSAFRNLSEWISELENNSAESIDFARIEAFEAYLPEERFIIPENIQETHFEVGIHLLQNDDEDFVQRKFIDYAKSLDITVYSDLTFTAGSLWFLPVQGNISAIKKLAQFTFVRVIRPVPKLRGLRPLRRTSGTAIPCTLPEEAPLSNDIRVAILDGGLPDKHPIKPWLKSYRVLDEHANDNPDALEHGLGVSSAFLFGPIKSNVKPPIPYAYIDNLRVLDNKAYEEDPLELYRTLGLIEEVLLSRQYQFLNLSLGPDLPIEDTEVHAWTSVIDDLLSDGETLMTVAVGNNGDMDKESGNARIQIPADCVNALAIGASDSTNDDNWQKASYSAIGPGRSPGVMKPDIVAFGGETSEYFHVLTEGSKPNITPERGTSFAAPYALRNAVGIRAILGNNLNLLAIKALLIHSSKNKDHPSIEVGWGKIPEDLNDIIVSPNGVARIVYQGELKPGKYLRAPVPLPISGLTGKINLTATFCYATATDPQDSASYTKAGLEVSFRPNDSRIKDGKKNAETAGFFELKKFATESEQRSDMGKWETVLHASKNMLGSTLKSPVFDIHYNARESGGSVPGNKADKIQYALIITVKAAKHQDLYNDILRAYNKILVPIQPQTSIPIRSZ

SEQ ID NO: 1441 - protein, 380 aa, Photorhabdus luminescens
IRGFKKMGELIGIQADLARLVRLVINEQYDDVRLYVARLVRKYRENTPELSAQLDLYLRSKPFKKTQSLRKATTPPNIISEALPVDEDSRLTLLKTSPTTDAIPKPLLNTGIEDALDQLILERKNINKLEKIGLQPTRSAIFVGPPGVGKTLTASWLAQKLGVPFYVLDLTAVMSSYLGKSGNNLRAALDFAKRGPCVLLLDEIDSIAKKRSDDSDVGELKRLVTVILQEVDQWPSSSVLLAATNYEELIDPALWRRFDLVLHFEKPDSETIKEAIQRFLGSDYAIFARWIDILVILFKNESFSNIERSINKFRRSIALGIASDEVLIEDFIKDSLSKLDKTEKRNVAINLSKNSKLSQHAISDLTGVSRDTIRKYSAAZ

SEQ ID NO: 1442 - protein, 278 aa, Photorhabdus luminescens
YFRKKTMYCLSEQDRRGEIRGIPDLFIHHLPQPFYRVQIRAVWRQVMKSNIHHISPVFHQSASVVTGSVKDNMNLLTDRISLTDGNEELGDVITVDTVILTYYRFADISQIQGPHQVQTGTASCGFHCGFLPFAHPAISEFGPLRGMDAINEQDGFMVSGFLLEFPVGFHKGPLLLRVELVRHAGRSFITKSIMVQPFIHAGNSVTDIPCFFDKADNRLCGGQKIRGQISDKFLSLCFAEMALRAAIFGLDFAVIKVITDMTINGRFMKTQGLSDHHZ

SEQ ID NO: 1443 - protein, 305 aa, Photorhabdus luminescens
SSVMIAQALRLHETTINRHISDYLNHRKIKPENGGSQSHLSETQTQELIAYLTANLLPTTQAVIRLVKETWDISYTVPGMNKWLHHNGFSYKRPTGVPHKFNAEQQRAFMETYGKLKQEAGDHEPILFIDGVHPTQGTKLAYGWMRKGQKTAVKTTGSRTRLNLMGALNLADISKTVVREYDRIDSYHIAEFFIAIRETYPVSQKVHIILDGAGYHRSRLVKDWAYVMNIALHYLPPYSPNLNPIERLWKVMNEQVRNTPYFASTVLFRQAIHRFFTEILPELARNLSGRINDNFQVLNPASSSZ

SEQ ID NO: 1444 - protein, 490 aa, Photorhabdus luminescens
MTAELLVNITPSETRVAYIDGGILQEIHIEREAKRGIVGNIYKGRVSRVLPGMQAAFVDIGLEKAAFLHASDIVPHTECIAGEEQKNFHVKDIAELVRQGQDLMVQVVKDPLGTKGARLTTDITLPSRYLVFMPGASHVGVSQRIESEEERNRLKNIVADYCDEHGGFIIRTAAEGVGDEELAQDAAFLKRLWSKVMERKKRNVTKNKLYGELALAHRILRDFAGAALDRIRVDSRLTFTQLQEFIREYIPKMTARLELYNGNQPIFDLFDVENEIQRALDRKVELKSGGYLIIDQTEAMTTIDINTGAFVGHRNLEETIFNTNIEATQAIARQLRLRNLGGIIIIDFIDMNSEEHRRRVLASLEQVLSKDRVKTTINGFSQLGLVEMTRKRTRESIEHILCGDCPTCKGRGTVKSVETVCYEIMREIVRVHRAVDADRFLIYASPAVSEALKGEESHALAEVEIFVGKQVKVQTEQLYSQEQFDVVMMZ

SEQ ID NO: 1445 - protein, 490 aa, Photorhabdus luminescens
WYCISRSTCLFFGERLMNLSPTAQATLLLTSYFSKASSDDVKPLTNAEWGRFALWLKEKSTTPADLLVSEPKSILSTWQDSRISTERIIQLLNRGHSLALAVEKWHRAGLWVVTRSDPEYPKRLKQQLKTDSPPVLFGCGNKALLNVGGLAVIGSREANNADLSYTELVGSRAASEGIAIVSGGARGVDETAMVGAMLGGGNVIGVLADSLLKAATSAKWRKGLMNGSVMLISPFYPEAGFSTGNAMARNKYIYCLADSSLVIHSGKKGGTLSGAEENLKKCWVPLWVKPTNDSSAANTDLVAKGGHWCEADVHNLKVSDLFSVENSTASQKEAEQVDLFFMPAQSELFAKPASEFDLEVAENRIIVAHSIEQDEIQGSIDHEAEAEAAAAAAEAEAEAEAEAEAEAEAEAEAEAEKTVMQAVDFYQLFITELHRLTVSPITLDTLIENTGLHKSQLKEWLKRAIDEGQVKKLGRPVRYQIEKKNQKVVZ

SEQ ID NO: 1446 - protein, 708 aa, Photorhabdus luminescens
LYKQGVIMNRAQAQQLLQTALANPNAEFHDGQWEAIDALVNQRQKLLVVQRTGWGKSSVYFISTKIFRDRGMGPTIIVSPLLALMRNQIESAQRLRIIAETMNSTNTADWQTVTQRIINNQIDCLLISPERLANDNFIETVLHPIADRIALMVIDEAHCISDWGHDFRPDYRRIVNILRQLPPNTPVLGTTATANNRVVADIQTQLGNIQIQRGPLIRESLSLQTMVLPDQSSRLAWLAQVIPTLHGTGIVYTLTVRDAEQVANWLNVNGINARAYHSSIEADGFENSNDYRQYLEELLLTNQLKVLVATTALGMGYDKPDLSFVIHYQAPGSIVAYYQQVGRAGRGIDNAIGVLISGIEDQDIHKFFRNSAFPSETQVNEILQVLDNSDGLSLRSIEEQTNLRYGQIEKVLKLLSTENTAPVIKVGNLWRRIPVPYAMDRTRIAHLTNQRKQEWAEVQAYLSDTRCKMTFLRRVLDDHDPTPCGKCSSCIGQPVVNQAINPVLVHQAGTFLKHAEMIIQPRKQVATSNRAFPTYCFPRQLGCLVAQPGRVLSRWGDAGWGKTVIENKHSGYFSDELVDAMAEMISQRWQPNPSPTWVCCVPSLRHPNLVPAFACRLAQRLNLTFVDAVAKVQDNQPQKEQQNSFHQCHNLDGVFEITQIIQNQPVLLIDDIVDSGWTLTVIAALLQQAGSGIVYPAALASSSVKDSZ

SEQ ID NO: 1447 - protein, 1110 aa, Photorhabdus luminescens
IIQRAMMAAISLSNDILRTWQRIEFFQPYTLEKKDKSLLIPLKTLYQLGDKALPWLSSELRQQHDIPDQKVLYNLYVGLFDKAIANAISQAVFGPDEGYYAEEFEQRLDKEGTTCFAKIPLGTEGNPALDKFSVSSLPWALGHLRDERFEQLNTKVFSASCEHLKNTLGNFSVSLKPIRENGPGILKANDILTLLTTHLVSWADFEPQWQYALQIDWMEGNGDCTEASQENSDEIEEEVSSNDKTFALPILNSFFFEDIEYAITALKRGDRCKALRAYLSHHSVPRNPDLYSQDGLASIISKLHPAKMPHGRWPSDPKHAMSLMQQFAINTAIEELADGGLLSVNGPPGTGKTTLLRDLIAHNIVERAKILTRYQKVDDTLDNSGFIVNALTGFEMVIASSNNAAAENISKELPQKKSLAEEFQSLDYLAPTANQIAAENRPKREHKKSKNSQGKVRTYHLYRPLKEEKQCWGIISAALGNKPNRTKFSDRLFFDEHFLRDTPTEASRPAEENFLSLWRWRHYHNPISFATAKKRFLVCLEKTKKLQQQLEMLVYLIEKQHNDSLDTLSLKLKQTEELYATQLNRLEQVETKQDVLEKQLQHAEQQQKIIESDAPGWLMRLMNRKRVHAYKETLRCAQHEVLRLMGLQTEQAQRIAEQRKSVNGIAEKKRILQQDIEKIIQQRVNDHRSLQTLKQQFSDITLPDINQPITDATLQRTALWQNAQINRQRSALFITAMELHQAWLYEALGVPRFRDFIIFNLAAFLAQPHSKITPIRWWQTLFMFVPVLSTTFASIGRMFHGVESEELGWLMIDEAGQAPPQQAVGGLWRAKRVLVVGDPLQIEPVFTTPPPLVERLCLDALNEKAKDWNPGLLSVQQVADRVNHWGCELEVMNNLIWLGIPLWVHRRCIEPMFSLANKMAYNGRMIHGLDADKIRCQPVNNILENHWLASVGGTGEKQYRDSHGKDLLKLLDQLLVANVSLHSIYVITPFKAVKSALCELLGKRDLATWRQSMPLMTRKELNVWQKNCIGTVHTFQGKENDIVIFVLGCDENNDGGAKWAASKPNLLNVALTRAKKHIFIIGDPAVWHGLPWFRDVAKELPVGTYHHLQZ

SEQ ID NO: 1448 - protein, 256 aa, Photorhabdus luminescens
MQLATEKLSAGYGEKRILNDLSLTLPTGKITALLGPNGCGKSTLLKCFSRLLTPLSGKITIDSEPLTHFSSRKLAKHLALLPQHPLTPEGIAVHELVAYGRSPWLTFWGRLAPHDRHLIQQAMEKTQISHLADKCVTDLSGGQRQRAFLAMVLAQDTPVVLLDEPTTYLDINHQVELMKLLRELNNEGKTVVTVLHDLNQASRYCDHLVLLSQGQVVAQGSPEEVMTPKLLQRVFSIEAEIHPEPVSGKPMCVVCZ

SEQ ID NO: 1449 - protein, 432 aa, Photorhabdus luminescens
SAQRWRCQCPYAWREPDATAHLRQSGSTDSGRGLRQCSGTNRVYWSANAPSGAVLGWLRSAPHTANVHVAGSGIYATCGFTGPCAGLARRTPGRCGTGADWRSLLCLASKEANMNRQVILLLVVLLAVTLVLALRMGTQPLPWDALISGWQPGDKHHFVLTQYRLPRILLAIAVGAALALSGVLVQGIVRNPLASPDVLGVNHAASLASVSALILFPSLSVQWLPLLAFGGGMAALILLRAIAGPSSPLRLALVGVALSATWTSITDYLMLSRPQDINNALLWLTGSLWGRDWQFVAIALPVLMILIPLSLRFCRDLDLLALGDDSASTLGVSLPHVQSWGLMLAVALAATGVAVCGPIGFISLVVPHLVRRLVGGRHRWLIPASMLMGAQVLLLADLLARTIAPPIELPAGVLTAIIGAPYFFWLLVRTRZ

SEQ ID NO: 1450 - protein, 333 aa, Photorhabdus luminescens
MRRRHHPVWLWGLPLVALLSAFWLSLFCYSAIPIPAISALKALVPGHTPTLPEALVINLRLPRSLVAILLGAALALAGALLQTLTHNPLASPSLLGINSGAALAMALVSAFSPAPLAGYSISLVAACGGGISWMMVMAASGSWQQKYDRNQLILAGIALSALCMALTRITLLLAEDHAYGIFYWLAGGVSHVRWPEFWQLFPFVVVTVPVVLLLAKSLNLLNAGDVSAHTLGVNLTRLRIFVSLAVLILVGACVSVAGPIVFIGLLMPHLARFWVGYDLRRTLPMCMLLGAVFMLLADLLARALAWPGELPAGAVLALIGAPCFVWLARKRTZ

SEQ ID NO: 1451 - protein, 303 aa, Photorhabdus luminescens
MSALIRVTFIALLFFTSLPHAIAVTVQDEQGSFTLNTVPQRVVVLELSFADALAAINISPVGIADDNDPQRILTDVRQRIKPWQSTGTRAQPSLEAISALKPDLIIADSQRHAGIYRALKGIAPVLLLKSRNETYEENLQSAAIIGKVMGKESEMQKRLAEHRERMKGYASQLPQGVSVVFGTSREQQFNLHSSDTYTGSVLTALGLKVPASVNHAAMVSLNLEQLLALNPDWLIVAHYRQESIVKRWQQDTLWQMMTAQHKHQIAAVDSNTWARMRGIFAAERIGSDAVKIFHHQPVNETPZ

SEQ ID NO: 1452 - protein, 779 aa, Photorhabdus luminescens
LRALHKATPLVMAIRLSLLPVACLTSGITYAAVEPASTHYDINAGELDKVLNQYSTHAGITLSVDASLTRGKQSRGLHGNYSITDGLNTLLIGTDLQVKTLGDNTFTLKPAPVAQKDVLTVVGDWLGSAREADVFEHAGARDVIRREDFAKTGATTMREVLNRIPGVNAPENNGTGSHDLAMNFGIRGLNPRLASRSTVLMDGVPVPFAPYGQPQLSLAPVSLGNMDAVDVVRGGGAVRYGPQSVGGVVNFVTRAIPQDFGIDASVEGQLSPTSSQNNPKETHNFMIGGTADNGFGTALLYSGTRGSDWREHSATHIDDVMLKSRYAPNEVHTFNSLLQYYDGSADMPGGLSRADYDANRWQSTRPYDRFWGRRQLASLSYQYQPDQQHKFNIQGLYTHTLRSGYLEQGKRITLSPREYWVRSIEPRYSQLFNLGPSAHEVGIGYRYVNESSHEMRYYTATSSGELPSTSSPYDRNTRSGTEAHAWYIDDRIDIGNWTITPGIRFEHIKSFQNNNVKGTRQEVSYDAPLPALNVLYHLTDSWNLYANTEGSFGTVQYSQIGKAVKSGNVEPEKARTWEVGTRYDDGALAAEMGLFLINFNNQYDSNQTNDTVTARGKTRHTGLETQARYDLSELTPKLNNVSVYASYIYVNAEIREEGNTYGNQVPFSPKHKGAFGIDYKPGNWTFNLNSASQSSQFADNANTVQESANGSTGRIPGFMLWDTRVAYDFGPQMANLSVAFGVKNIFDHEYYTRSYDDNNKGIYAGQPRTFYMQSSLKFZ

SEQ ID NO: 1453 - protein, 322 aa, Photorhabdus luminescens
MNTMLTHSRRQALKSASHWYAILSSDQVSPLQTEKWQRWYEQHQDHQWAWQQVENLRNQMLVVPGNVASHALQETHLSRRRVMKSILLLLGAGGGWQLWCSEVGEGLRADYHTTKGDIQHHRLSDGTLLTLNTDSAVDVHFTPQQRLVHLRYGEIAITTGHDTEAKLLRVQTRHAQLTALGTKFTVRQEANTTLLSVQQHAVEVILTSADRKCIVRQGESLRFSATDFGELTAATDEDNVWTQGILCFSDQPLSEVIATLARYRSGILRCDPAVSSLRLSGTFPIKNTDTILTVIEKTLPVKIQYITRYWVNVLPAEKSLTZ

SEQ ID NO: 1454 - protein, 338 aa, Photorhabdus luminescens; identical to SEQ ID NO: 778

SEQ ID NO: 1455 - protein, 345 aa, Photorhabdus luminescens
MKPIFSRGPSLQLRLFFAVIVAIALVVADSRLDALSKVRNYMDTVVSPFYFLANGPRQVLDGVSETLASREQLRLENRALRQELLMKNSDMLLLGQLKQENSRLRELLGSPLRQDEHMMVTQVISGRANPYSDQVVIDKGSREGVYEGQPVISDKGIVGQVVAVSQFTSRVLLICDTTHALPIQVLRNDIRAIIAGAGCTDDLQFELLPSNTDIRVGDVLVTSGLGGRFPEGYPVAVVSSVKVDNQRAYTVIHARPTAELQRLRYLLLLWGADNNPSEPLPPSEVYRVANERLMQMMPQVLPHANEMGPPAPSSVSDEATKTTERVKDAESTITSAKFINSGNRZ

SEQ ID NO: 1456 - protein, 356 aa, Photorhabdus luminescens
RCLILSEMEIIILAMKIFITSEQKIKLERLHDTTRDGQVRDRIKAILLASEGWSSVMIAQALRLHQTTVDRHISDYLNQGKLKSDNGGSDSLLSREQTDFLINHLSQHLFHHTHEIVAYVAQLWNITFSIPGMNKWLHRQGFSYKKPCGVPHKFDAEKQRQFIEYYENLKVTAKDEPILFLDAVHPTQGTKLSYGWMRKGEKKTVKTTGSRTRLNILGALNLNAIGRTVFQEYQTINDYNICCFFNEIRKSYPDYHQKIHLIVDGAGYNKAHLVKEWAYVSNIELHYLPPYSPNLNPIERLWKVIIKQVRNNRYFADKHEFRDNVFKFFTTTLPDIADSLMSRINDHFQVLKTASZ

SEQ ID NO: 1457 - protein, 419 aa, Photorhabdus luminescens
TMSDIVKYNDVSAPIPYAVYSNAVYAFEWDSSAILKQAVVKGLSYVPHVGKYLSYIVGFFWKDKEKDIWQEVVGKVQQLVEDSILKAVKGILSGNINELKEKMNEVIRSLEKNLGTQEARDDYMHLARSMVGKEASLIFHENKTNFHILPMYSTLALMQIMYWTVGIERRKEIGLSDIEVENLRSYIKKLVSDAEHHVNRVYKLELDSVVSDSDVNRVADNIMYVHGYCQIHGLEYMDIIKNIQSRGNNITGFYPRTISYSTFFGSPTSDARILALRPEKDMPEPFKPKFLNERFNKIASVKGYIVRIGGAKRVGGLEITFENGSKYQQGQATNEHEIVNLKGNLIKTLEVWGNGAIDEAKFTLTNGDVLTIGQRNSSNYRKFSLDGHYICGVFIANDRSGLAGQAANIAVSYHQLVEZ

SEQ ID NO: 1458 - protein, 530 aa, Photorhabdus luminescens
KTITVRRVPMKGITLTVGVFFDGTGNNRTNSYDLQLAYSNCSSLAGEERAKACVEYERRSKSGLGNQSYQGGLTNIARLDHLYKTDTVLKDEQTEAQVKAYISGIGTADGESDAVFGIALGSSLIKQFEGVVTKTNRALDEIVSALGEFIRRNRDQATIEKVQFDVFGFSRGAAAARHFANRVMNQDAAIASAIDRGLDTHNHHGKPSGEVRFLGLFDTVAAIGHLLNFYNINGRNNPGVNLELRPSVAQKVFQISAMHECRHNFSLNSIAGMWPELMLPGVHSDIGGGYNAEENEDTLLTMPNFEVVRDDMAETSTAIYRKTEAMREALYQLPALKYQLPHGEVKTRMIAWPLVNRDKAREHIFEKKVGAAVFLTRKSIPNDWEKVCMRVMLDAAQDAGVIFSPILSSNKELQLPSELTPLCEKAIAQGRAVRRGETPVSFTTDELHIIGRYLHCSANWNIDSDRSLWVSPSTGEVFLRHNYAPTDGRSFVWPNAPGKGWVRTVWKMDDQQQWEERVKVNADELDGLFZ

SEQ ID NO: 1459 - protein, 251 aa, Photorhabdus luminescens
MLHLLAWPDLFICIFVVFFAYLVFGMAGFGSALIASPVLAFYIPVAKIVPVLALVDLTAAVINITREGKKSEFSEIKLIIPLMVVGSLIGAAILLMARPDVLVLVLGVFVVFYSLYSLFFSKTYRQFPAKAAIPFGLSGGIFSALFGSGGFLYAIYLTGRISDKQIFRITQTTLIGFSTLTRVIIFVVMGIYLDTSFLLLILVFIPAMLLGIYFGRQVTLKISRETFLKFINVIVLASGLMLIYRYIFTFZ

SEQ ID NO: 1460 - protein, 420 aa, Photorhabdus luminescens
FVVFSSFHIYSLYFCWIDINKMNSRDYRNNNFFAIFTITSSVAVIGIVIGLTIPMIALRLNSQGIDELYIGLISAAPALGVLLSAPVVQKIVALVGKKHVMMIATGVSAGSLLPLLGSLPMELLFPLRLVTGAASGLMICLGETWINELSEENKRGRVLAVYTTVFTVSQLLGPSIIAFYGIADKTPILICTLIHIFSLVLFVMVDQKKGDELPQYGKKSNFSIVQFVKIAPAICGGVLFFSFFDGTILSMFPIYGMSCGYTEAVAALMISVVLAGDAVMQLPFGWLADHMNRMRLYQICGVATLGASALLPFVMTYQYLIWPLLIVLGATAGAIYTIALVQIGQYFSGNDLIVANAAAAMLWGIGSLFGPLLAGIASSVTPSGLPILLVVIAALFLISTMDRFNPQSNKSDKSEVFSRZ

SEQ ID NO: 1461 - protein, 449 aa, Photorhabdus luminescens
MFGIQAPVKCKLDKYFKLTERGTTVRREILAGITTFLAMVYSVIVVPGMLGQAGFPHTAVFIATCLVAGFGSLLMGLWVNLPMAIGCAISLTAFTAFSLVLGQQITIPVALGAVFLMGCLFTVISVTGIRSWILRNIPMGIAHGAGIGIGLFLLLIASNGVGLVIKNPLEGLPVALGSFTSFPVMMTLLGLAVIFGLEKLKVPGGVLLVIVVISVIGLIFDPAVKYQGFFKIPSLGDDGLSLIFSMDIMGALQPIVLPSVLALVMTAVFDATGTIRAVAGQGNLLDKGGQIINGGKALTADSVSSIFAGAIGASPAAVYIESAAGTAAGGKTGLTATVVGILFLLILFFSPLSYLVPAYATAPALMYVGLLMLSNVRKLDFDDFVGAMSGMLCAVFIVLTCNIVTGIMLGFSSLVVGRICSGEWRKLNIGTVVITIALVAFYAGDWAIZ

SEQ ID NO: 1462 - protein, 550 aa, Photorhabdus luminescens
MEIFFTILILILVVSVSGVLTKVIPFRIPLPLMQIAMGALLAWPHFGLHVTFNPELFLVLLIPPLLFVDGWKMPTREFFQYGREIFILMLVLVLVTVVGIGYLIYWLMPGIPLIAAFALAAVLSPTDAVALSSIVGKRRMPKRMMNVMEGEALMNDASGLVALKFAVAIAMGTMAFSVTGMTIEFFKVAIGGLLSGIAVTWLYSKSLRLMNRWSGGDPATQIVFMLLLPFASYLIAEHIGVSGILASVAAGMTISKSGVIRNAPLAMRLRADSVWSMLAFVFNGLVFIMLGLQLPGIWQTSVIQAEIDPTVETWMLFAAVAVIYGALLLLRFCWLWLMKNISKVFMRKNPLNFATYTTRELWLASFAGVRGAITLAGALSVPLFLADGTPFPARYQLIFIAAGVILFSLLIGVLSLPFLLRGMQTSDKEADISEVRMARAAMAEVAIVSMNKMEERLSASPEEQLDAEVITEVASRVIGYLRRRTVGQDEIEHNLLVEDLERRFRLTALRAERGELYHLRATRKISNETLQTLLHDLDLLEALLVQKEHZ

SEQ ID NO: 1463 - protein, 312 aa, Photorhabdus luminescens
MIEIKHLKTLQSLSHCGSLAAAANHLHQTQSALSHQFSDLEHRLGFRLFIRKSQPLRFTPQGEVLLRLAEQVLPLVQNALRECKEPGQTNLRIAIECHSCIQWLTPALKHFRETWPQVNVDFKSGVTFDPQPALLQRELDVVLTSDILPESHLHYTPLFDYEVKLVVAPDHPLANKLHIQPKDLIDETLMIYPVQRQRFDIWRRFLQPAGVVPTLKNVDNTLLLIQMVAARMGIAALPHWVVETFERQELVVTKTLGEGLWSRLYAAVRQGEQHQPETDAFIHSARQHAMDNLPFVKGISKISVDDLITTQZ

SEQ ID NO: 1464 - protein, 759 aa, Photorhabdus luminescens
MTTINHTLGFPRIGLKRELKKAQENYWAGKISQQELLETGRELRARHWEQQKQAGVDLVPVGDFAWYDHVLTTSLLLGNVPPRHQNPDGTIDLDTLFRIARGRAPTGEPAAAAEMTKWFNTNYHYIVPEFQQGQEFKLSWTQLLEEVDEALSLGHQVKPVLLGPITYLWLGKVKGQVFDRLSLLQDILPVYQQVLAELAKRGIEWVQIDEPALVLELPAEWLTAYPIAYQALQGQVKLLLTTYFDSIGHNLETIKSLPVQGLHVDLVAGQDDIAQLHESLPKEWVLSLGVINGRNVWRADLTAKHQLIKPLVGSRTLWIGSSCSLLHSPIDLSDETALDAEVKSWFAFALQKCEELALLTAALNQPDGSKQAELDAYSAPIRARRESKRVNNQAVTERLAAINPQDSERNQPYLQRAEIQRQRYNLPLWPTTTIGSFPQTTEIRGLRLDFKKGRVDGTSYRTNICEHIKQAINEQERLGLDVLVHGEAERNDMVEYFGEHLDGFVFTQNGWVQSYGSRCVKPPVIIGDVSRPEAITVEWAKYAQSLTEKPVKGMLTGPVTILCWSFPREDVSRETIAKQIALALRDEVDDLQEAGIGIIQIDEPALREGLPLRREEWQSYLDWAVEAFKLNAAIAKDDTQIHTHMCYCEFNDIMPSIAALDADVITIETSRSDMELLDSFENFSYPNEIGPGVYDIHSPNVPSVEWIEALLRKAADRIPVERLWVNPDCGLKTRGWTETRQSLANMVQAAKRLRESVKZ

SEQ ID NO: 1465 - protein, 282 aa, Photorhabdus luminescens
REDYMDVNKLQGKKSSSRRNFLKSSAVITATAALAPMNLARAEEKLSPQHGIGVCTLAPEQISGPYFRNDKIVRRDITDSELGIPFLLKITVIDEKTCKPVDNLFVDIWHCNSRGKYSGWSYISPDVVPNVAGVASINRTDDKNFLRGAQPSDKNGIVNFTTIYPGFYAGRATHIHIAIRKLSTNVDDKEHFAFVGQMYFPEGINTEVYKYDLYSKRRVIRTKNNEDEYFKNMNGHLSEIKVTKIDEYDINRGILGEIVLSIDLESISNFITKDDLYSHTVZ

SEQ ID NO: 1466 - protein, 409 aa, Photorhabdus luminescens
LEPSQLDEIILAFIASLNHLKTSTENQGEIMALIHCTAKYILTAILILLPVFAQAKVITVKDVAGRKVKIDAPVSRVMLADSRILIALNILHPDNPLKGIVAWDNALEIKSPDLATTYEKDFPQLRDIPVFPNPYHSDFNVEKALTYKPDLVIFDIGLQTKLNDSGTIMLLEKAGIQVIFIDFHQYPLTNTIPSMILLGKVFNEEENAQKFIEFYQERMKIINQRVGTLGKEQRPPVFIERHAGMLGAEHCCKTFGNGNFGEFVTAAGGDNLGARWFSGIDGEVNEKQLIVSNPEFYLMTAANWDKVRSGSFSVPLGYTGDLKQSQERLKKLLTRPKLSVLRAFREKQVIALYHQYYDTPFNIIAVEIIAKFLHPKLFEDIDPQADNLYLHKTFTALDGNGVFWVTAKZ

SEQ ID NO: 1467 - protein, 368 aa, Photorhabdus luminescens
VVGRVDGFRSVPSLQDYPFAMFKKFRGMFSNDLSIDLGTANTLIYVKGQGIVLNEPSVVAIRQDRAGSSKSVAAVGQEAKQMLGRTPGNIAAIRPMKDGVIADFYVTEKMLQHFIKQVHSNSFMRPSPRVLVCVPVGATQVERRAIRESALSAGAREVFLIEEPMAAAIGAGLPVSEATGSMVVDIGGGTTEVAVISLNGVVYSSSVRIGGDRFDEAIINYVRRNYGSLIGEATAERIKHTIGSAYPGDEMLEIEVRGRNLAEGVPRGFTLNSNEILEALQEPLTGIVSAVMVALEQCPPELASDISERGMILTGGGALLRNLDRLLIEETGIPVIVAEDPLTCVARGGGKALEMIDMHGGELFSEEZ

SEQ ID NO: 1468 - protein, 219 aa, Photorhabdus luminescens
MTTQKTVLITGFEPFGKETINPSWEAAKQLQGRELCGARVEARQLPCVFDVSLACLYAAIDDVQPDLVIAVGQAGGRPNITVERVAININDASIPDNQGNQPINTPIVATGPAAYFATLPINAIVKGLRDAGVPASISQTAGTFVCNHVMYGLLHHLACIYPEIRGGVLHIPYLPEQAARYSGTPSMALETVITALEIAIDEALKNSEDIANNGDTAHZ

SEQ ID NO: 1469 - protein, 252 aa, Photorhabdus luminescens
MSDVFHLGLTKNDLQGATLAIVPGDPKRVEKIARLMDNPVHLASLREFTSWRAEIDGTAVIVCSTGIGGPSTSIAVEELAQLGVRTFLRIGTTGAIQENINVGDVLVTTAAVRLDGASLHFAPMEFPAVADFECTTALYEAAKDLGVTVHVGVTASSDTFYPGQERYDTYSGRVVSRFKGSMAEWQAMGVMNYEMESATLLTMCASQGLRAGMVAGVIVNRTQQEIPNVKLLEKTESNALGIVVEAARRLLZ

SEQ ID NO: 1470 - protein, 265 aa, Photorhabdus luminescens
LRVIMITTSLLHPSVLPLNGGINFRDLGGKKVASGGKIKSGLLFRSGSLDRLTEKDQSFLANKNLFQIIDYRDTSEIEDKPDLVWNGANYHHAPANPLSDEVNANLEKLASEMLEQFNPQAFMFRLYELLPLKNSAYKTLVNLLQQPEKGGIVQHCAVGKDRTGVGSALVLFALGADLDTVMEDYLVTNCTLAPYREYLLNEHAKTMSDDVVDKFAYVYSVREEFLMTALNSINQHYGSVDIWLEKDLGLDFTARKKLQDYFLEZ

SEQ ID NO: 1471 - protein, 205 aa, Photorhabdus luminescens
LCSRGFAPLPSRCILKSIGDIDQYRNMNLSLHEIVDLVIAFVKAHDTWIMPIVFLLAFGESLAFFSLLLPATIILLGLGALIGESGLNFWPIWLAAAAGAFLGDWVSYIVGAYFKGDVGKIWPISRKPQLLTRVHHFFERWGIWSIFFGRFFGPFRAIVPLVAGICTMPLRYFQIANICSALIWSFGVLAPGAFGLQWLVKWVSZ

SEQ ID NO: 1472 - protein, 452 aa, Photorhabdus luminescens
VGIQLLYALIGALGGLLGGGILVWFSVHQRIQQQELELRKLDSQLAVANEKIEQSAYWRVECEQLNQELRAQREVNSVQESELREVTTRLEESRLAAEEKQRLLINSELRLNTQFENLANRIFEQTGRRTGEQNQQSLNTLLAPFREQLDGLHRQVQESFGQEARERHTLAHEIRNLQQLNAQMAQEAINLTNALKGNNKIQGDWGEVVLSRILEASGLREGHEFCTQVSIKVEGNRRFQPDVIVHLPQGKDVVIDAKMSLVAYERYFNSGDRHQQELALQEHIDSIKGHIRGLSRKDYQQLPGLKSLDYVLMFIPVEPAYLVALNKAPELLDEALKHNIMLVSPSTLLVAVRTINNLWRYEYQSQNTRLIADKAARMYDKMRLFVDDMQGLGQSLDKAQLSYRLAMKKLTEGRGNLISQAESFRNLGVEVKRPIDPELVDKASQPFCANDZ

SEQ ID NO: 1473 - protein, 260 aa, Photorhabdus luminescens
LNKKWANNMVDQTKQTTHFGFRTVAKDEKAGMVAEVFHSVAAKYDLMNDLMSFGIHRIWKRVAIDASGVRRGQRILDLAGGTGDLTAKFSRIVGEKGEVVLADINESMLKVGREKLRDVGIVGNVSYVQANAEALPFPDNYFNCITISFGLRNVTEKEKALRSMFRVLKPGGRLLVLEFSKPLFAPLSKAYDAYSFHVLPKIGQVFVQDAGSYRYLAESIRMHPDQDTLKTMMEEAGFEQVTYTNMTGGIVALHRGFKFZ

SEQ ID NO: 1474 - protein, 212 aa, Photorhabdus luminescens
LSTVINSTLTPVLTAVMETSLNYLLYREPVLRPARMRLVDKVLSIELKEMNTPLTLVFSEKQVDVLSQWSGSADCTVKTHFSALLKLRDRQQISKLLNSGEMVIEGDMQVVQQWSALLDMVEWDLAHYLSPYFGDIAAESISQVLKKGFQCVSSSMECQKNYLAEALTEEWKLAPNQLEVAYFSEEVSMLAKDIEQIEQRLAVLEGKYDSRZ

SEQ ID NO: 1475 - protein, 546 aa, Photorhabdus luminescens
MTPGELRRLYLIIRVFLSYGLDELIPRIRLTWPLRFGRYLLFWIPNRHKDKSLGERLRLALQELGPVWIKFGQMLSTRRDLFPPAIADQLALLQDRVASFDGALARQYIETALGGALETWFDDFEPIALASASIAQVHTARLKENGQEIVIKVIRPDILPIIKADIRLMYRLANWVPMLLPDGRRLRPREVVREYEKTLIDELNLLREAANAIQLRRNFENSSTLYVPEIYSDYCRENVLVMERVYGIPVSDIEALEAQNTNMRLLAERGVQVFFTQVFRDSFFHADMHPGNIFVSYEHPEDPFYIGIDYGIVGSLNKDDKRYLAENFIAFFNRDYRKVAELHVDSGWVPSDTNVEDFEFAIRTVCEPIFEKPLAEISFGHVLLNLFNTARRFNMAVQPQLVLLQKTLLYVEGLGRQLYPQLDLWKTAKPFLEEWLHSQVGLPAVIRALKEKVPYWAEKLPELPELVYDSLQQHKHLQVSIEKLSGHLRGQQIKQRQSQYLLGVGATLFLCGSLFLLSGLANIPWLFIGAGTVSWLFGWCRLCKIZ

SEQ ID NO: 1476 - protein, 261 aa, Photorhabdus luminescens
MAVDDTQPLISHLIELRKRILNSLLTVLVVFLALVYFSNDIYQMISAPLIKQLPQGASMIATDVASPFFTPIKLTIMVSIFVSAPMVLYQVWAFIAPALYKHERRLMIPLLVSSSLLFYLGMAFAYFVVFPIAFGFFAKTAPEGVLIATDISNYLSFVMALFMAFGVSFEVPVAIILLCWSGVVTPESLKKKRPYILVGAFVVGMLLTPPDVFSQTLLAIPMYLLFELGILLSRFYTGQRKLGDRSEEDEQEAPEVNTEKZ

SEQ ID NO: 1477 - protein, 338 aa, Photorhabdus luminescens
MSYAFPGTFPGRRMRRLRCHDFSRRLVAENQLTVNDLIYPVFVMEGINRRQEVPSMPGVYRLTMDLLLKEAEEIARLGIPVLSLFPVIEADKKSLDAEEAYNPDGLVQRTVRALKDAIPELGLLTDVALDPFTTHGQDGIIDQDGYVMNDITKEILVKQALSHAEAGAEIVAPSDMMDGRIGAIRELFETEGHVNTQIMAYSAKYASGYYGPFRDAIGSNRNLKGGNKKTYQMDPANSDEALQEIAQDLQEGADTVMVKPGMPYLDVIRRVKDTFGVPTFAYQVSGEYAMHMAAIQNGWLQEQVIVESLLCFKRAGADGVLTYFAKQVAQQLYEQKRZ

SEQ ID NO: 1478 - protein, 326 aa, Photorhabdus luminescens
MKALLLKQQQNQLSTSIEEVDASHLPVGDVTVDIHWSTLNYKDALAITGKGKIVRQFPMIPGIDFSGIVHSTEDPRFHIGQHVLLTGWGVGENHWGGLAEQARVSGEWLTPLPAGLDSRQAMIIGTAGFTAMLCVIALEQGDVKPESGDVIVTGASGGVGSTAIALLSQLGYSVVAVSGRQENHEYLLSLGAKKVLPRHEFSQPPRPLEKQLWAGAIDTVGGNVLATILAQTHYNGTVAACGLAGNANLPTTVMPFILRNVRLQGIESVTVPSVKRPAVWQRLQKLLPASFYQQATTEITLEQTVEYANKLIANQVTGRTLVRVRZ

SEQ ID NO: 1479 - protein, 494 aa, Photorhabdus luminescens
MNSMKYRDLRDFLTLLEHKGELKRISFEVDPYLEMTEIADRTLRAGGPALLFENPKGYSMPVLCNLFGTAERVAMGMGQKDVKALHDVGKLLAFLKEPDPPKGFRDLLDKLPKFKQVLNMPTKRLNTAPCQEHVSVGDDVDLTRIPIMHCWPEDAAPLITWGLTVTRGPNKERQNLGIYRQQVLGKNKLIMRWLSHRGGALDFQEWCQAHPGERFPVAVALGADPATILGAVTPIPDTLSEYAFAGLLRGYKTEVVKCLSNNLEVPASAEIVLEGYIEPGELAPEGPYGDHTGYYNEIDMFPVFTVTHITQRHDAIYHSTYTGRPPDEPAVLGVALNEVLVPILQKQFPEIVDFYLPPEGCSYRLAVVTMKKQYPGHAKRVMMGVWSYLRQFMYTKFVIVCDDDINARDWNDVIWAITTRMDPVRDTVLMENTPIDYLDFASPVSGLGSKMGMDATNKWLGETQREWGRPIVMSEEVRTRVDKIWDELDILGPZ

SEQ ID NO: 1480 - protein, 234 aa, Photorhabdus luminescens
MTTLSCKVTSVEAITDTVYRVRLLPDSPFSFRAGQYLMVVMGERDKRPFSMASTPSEKAFIELHIGASELNLYAMAVMDRILDQKVIDIDIPHGKAWFRQSSINPLLLIAGGTGFSYTRSILLTALEEQPERQISMYWGGREPQHLYDLAELQLLTERYPNLTVVPVVEQSENGWCGRTGTVLKAVLEDFGSLANYDIYIAGRFEMAKIARERFCGERDASTDNMYGDAFEFIZ

SEQ ID NO: 1481 - protein, 389 aa, Photorhabdus luminescens
MENVVIIDGIRTPMGRSKGGAFRQVRAEDLSAHLMKKLFKRNPAIQQHEIDDIYWGCVQQTLEQGFNIARNAALLADIPHSVPAVTVNRLCGSSMQALHDGARMIMTGEANVTLIGGVEHMGHVPMTHGVDFHPKMSLSVAKAAGVMGLTAEMLAKIHHISREMQDEFALRSHQRATQATQSGAFANEISPIYGHDADGILKRFDYDEVIRSDANLKDLAALRPVFDPVTGSVTAGSSSALSDGASAMLITSESYAKNLGLKPRARIRSMAAVGCDPSIMGYGPVPATQMALKKAGLVLGDIGVIELNEAFAAQSLACLKGLNLLDSMDDKVNLNGGAIALGHPLGCSGARITTTLLNLMERRDVQFGLATMCIGLGQGIATIIERMDZ

SEQ ID NO: 1482 - protein, 713 aa, Photorhabdus luminescens
VKTVVIKRDGRQVPFDETRIRDAVKRATSAVGMTDDEYCIQVASAVTQSMADYRQVDVQDIQNAVEHQLIANKHDHLVHRYIQYRHDRDTVRELHSRLNQEIRGLVEQSNVSLLNENANKDSKVIPTQRDLLAGIVAKNYAKQYILPRNVVLAHEKGEIHYHDLDYSPFFPMFNCMLIDLKGMLTHGFKMGNAEIEPPKSISTATAVTAQIIAQVASHIYGGTTINRIDEALAPFVKASYEKHLAIAEEWDITDKKSYAEVRTEKECYDAFQSLEYEVNTLHTANGQTPFVTFGFGLGTSKESRLIQQSILRNRIAGLGKNHKTAVFPKLVFAIRDGLNHKLGDPNYDIKQLALKCASKRMYPDILNYDQVVKVTGSFKTPMGCRSFLGVYEERGEQIHEGRNNLGVISLNLPRIAIEAKGDEKHFWQLLNKRLALAKQALMTRITRLESVKARVAPILYMEGACGVRLKADDNIAEIFKHGRASISLGYIGIHETINALYGNQVHLFDDQQLRVKALSIVDHLRKATDQWKKETGYGFSLYSTPSENLCDRFCRLDTAEFGVIEGVTDKGYYTNSFHLDVEKKVNPYDKLDFEAPYPSLTNGGFICYGEYPNLQHNLKALEDVWDYSYSRVPYYGTNTPIDECYECGFTGEFSCTSKGFTCPRCGNHEPSRVSVIRRVCGYLGSPDARPFNAGKQEEVKRRVKHLTNGQLGZ

SEQ ID NO: 1483 - protein, 318 aa, Photorhabdus luminescens
EQCMESQDIYSKFIGKRIKLWMDERFPLQNAPLFFIFYIISYSVAFYSIGEKPILSWEILLGCLMSFSYFLLLRIFDEHKDYQLDCEHHPQRILQRGIITLKNLRVLGICCIALQLGGSLFLDRGIGSVTFAWLLVFIWTCLMGKEFFIGEWLNQHLTWYAISHMLVMPLIIWWLSNIASPNLTLNFPIWVLMGLCFFSGFSFEITRKCKGPDEERLEIPTYSSIFGRKGAVAIIAALLTVMLILQIWLIRITTDGIALWALITLVVCYALCLWQLGKFLHNPTIQNRKRDEAIVGIFMVLGYSVCTASILIKLGFAZ

SEQ ID NO: 1484 - protein, 850 aa, Photorhabdus luminescens
HFNKAWVCLGIKGNTVMLQKNLQSYVCDVSDNTTAHTENCARSSILELSHDTFSLKHQEATQVELLPRRHLYTYTEKARQKRLDYLAKHTGHTLKHVADTHLDATQLTKTIEGFIGSIEIPVGIAGPILIKGQYAQGVYYAPLATTEGALIASISRGSSAIMQSGGTTARVLGQRMIRAPRFEFCSVSHSIMFSDWINEHISELRYEIGRHSKHAQLVEVKPQIIGRSVHLQFIYNTAAAAGQNMTTICTWYACQWIQQQLAKMAFIPLRHFIIDGNTSGDKKVSYQSFIEGRGTRVVAEVYLEAESCQQILRVTPQQLVTAYHHVCEGAIASGMVGININAANVIAGMFTALGQDIACVHESSVAHLHMTLTADNRVYCSITLPSLIVGTIGGGTNLPHQRECLNMLGCTDENGTARLAEIIASYCLALDISTLSAVAADEFAQSHEKLGRYRPVTTNNITAHTPQELDLPFFQQANFNPVLQGAHLTTIKPKFSGDDGYSMLTHLSSNYAERLIGLFPFSMTTSAQNNLSVMLKLKPLGSEVVNMVLDIAKHCSSELFAVFQDFEHQLEFNQSHSRELAIMNQQDPRLMRYIPVIYGVIENEATGTYALIEELLHDMVLMNNINLETPWEQHHLEAAIRGVADIHSIWLGREEELTWKFSQLQIPNADTVSQMNPLWQKLGNFIHQTFPELFTAEQHEDFQHWVDNAATWWKEIEQMPRTLIHGDFNPRNIAFRQQETGLHLCAWDWELSTLHLPQRDLAELLAFSLDPQSDADKVAYYIELHRVELEQKSGLSLDPIIWRRGYELALHDLWMRRIPFYMMAHNVVGYPFMERTMKTLRWLISLTRNZ

SEQ ID NO: 1485 - protein, 928 aa, Photorhabdus luminescens
CKQDILLLHWWNNMKYLYTQDNAIELAEHSLGGKAANLLWLTQNGFPVPNYWVISSEVLNNLLINDTFASNIIEQLATVPHDISQEKLDAIAAPLRQWLQSIPLPAKLEEELALLSENHPDEFFAVRSSAIGEDAANASFAGQMDSYLFQRGKSALANSLRAVMASAFNTRALQYRLHKRLPMGNISSAVIIQNMVAGEVSGVMFTAHPVTGSRQHCLISSAWGTGEGVVSGECDTDEFSVHLTSPEIERHITQKETATVFNTTNGSGTVTIPVAKEKQSEPTLLDNKIYALRDIGKEIAAARGCPQDIEWTIQNHQIFILQTRPITRLPRLDDKSEHHIIFDNSNIQESYCGITTPLTFSFARAGYATVYEQTIRALGCSDKQVNQHRSMLENMLGLVKGRIYYNINNWYKGLLLLPSFQTNKKDMERMMGLEDPVDFIEDKTLSLGDKIKKLPKMGWALLRLLYAFRTMDQRVELFLEQFKWHAAAIKQSELHTCNSGQLIEKLKYLDEHLLRRWTTPILNDFYVMMFNGRVHRGLVAAGIENSSALLGDLLSGDEDIESTQPTKVLLKMCQYARQHPELCNLLTLGDARTLLTQVRPLDESFHQQCIDYIKKYGDRTMGELKLETITLKQDPSFLFLILKNYLAIDTLTPETLSSRERKLRTQAENTAFQQIQQRLGSKRMNTFKKNLQKLRQAIRHRENMRFTRTRMFGLYRDIFLQLGQAYALEGILAEPRDIFYLTLEEIYSGYEGTAIQTQLEPLVAMRKQEYANYETEDEPAHHFFIRGSLYQQQDYSYPYQEQQAPTDSSMLQGIGCYPGQVETTIRLIKNPQDEMSLAGQILCTVRTDPGWAPLFPTAGGLLIERGSTLSHSAVVARELGIPAIVGIPAVTQILKDGDRVRMDGATGTVVRLHDTTVEELTSRSEHAZ

SEQ ID NO: 1486 - protein, 357 aa, Photorhabdus luminescens
HQGVNMPNIFMGEWSPANPLPEGFLDLPPSIYRDWPLWPGEDREKVQQQFSPKNSWFDHSKAWIGCIPGKARLVGFLVPHSVDGQSAAFFGFWETDNDIASNTMLFSALEQWAKENGACNLYGPINFSTFGHYRVRLDHFDVPPFEHEPYNPPYYPLLLKELGFDIRYRYTSIFDDTQATEDNFQQAHQRAQRLPEVQATLLPLTPELWMQEQVKLYSFIDSVFGENFAYATPSWPAFQQHCGEEFIKPFCHYPASFLAKTPSGEIAGIILSLSVLQNGQPTIGLLKTVAVAPQYRGSRLYNMLYHSFEQSARRIHPRLGGAMMREDNTSLKTAKRLFNTPAATKHQYALYYRRIAZ

SEQ ID NO: 1487 - protein, 557 aa, Photorhabdus luminescens
YIAQNCQTAFQYTCCHQASICALLQEDRMTNICQPIVDAAQKYPEHLALQAPHSRDHSSGLSFQTFFSHASHFQHQLTQAGFVAGDRLLVIIQPGLVLYPLLIAILGLGLVPVMLERGLAKKQLREILRHSQLSAVITQPTLGKFWFLLPELWRLRRFVIGQRILGMKVLETPNQHLPLSSFICRDLPPDTTGLITFTSGSTGTPKGANRTHDSLLAQLYAITALFAEGKNEIDLHSFPVMVLHSLCCGNSSILPDFDFSHPATVDPQQIVKQVQGEGITCLSGAPAYMSKITDYAKNKGLSFPNVRTVIVGGAPANKALLENCLTVFPHARHLVVYGSTEVEPISTVEMTTQLNHWATHDGYLVGKPVTQAEICIREITANPQQITPLATGNVGEILVAGPHVLKDYIDNPQATKENKLPRKQGGIWHCTGDVGYLDTTGQLWLLGRVKDKVVLDDGRIIHPYVLEKRINELPGVTQSAFVLHPLGGAALILESATLPTDLPAILDELDLTLVTRIYCANPIPVDIRHNSKINRIALINMLRKGQLSSVPYKEKLZ

SEQ ID NO: 1488 - protein, 450 aa, Photorhabdus luminescens
MLDKIVIANRGEIALRILRACKELGIKTVAVHSSADRDLKHVLLADETICIGPAASAKSYLNIPAIISAAEITGAVAIHPGYGFLSENADFAEQVERSGFIFIGPKAETIRLMGDKVSAINAMKKAGVPCVPGSDGPLSDDTEKNKAFAKRIGYPVIIKASGGGGGRGMRVVRSDKDLEQSINMTRAEAKAAFNNDMVYMEKFLENPRHIEIQVLADGQGQAIYLAERDCSMQRRHQKVVEEAPAPGITPEMRRSIGERCANACIEIGYRGAGTFEFLYENGEFYFIEMNTRIQVEHPVTEMITGVDLIKEQLRIAAGMPLSIKQKDVVIRGHAIECRINAEDPNTFLPSPGKITRFHSPGGFGVRWESHIYAGYTVPPYYDSMIGKLITYGENRDNAIARMKNALAELIIDGIKTNIELQQAIMNDENFQNGGTNIHYLEKKLGLQETZ

SEQ ID NO: 1489 - protein, 221 aa, Photorhabdus luminescens
ERPIVLRSIQGKIMNNNHFIIHLNRADYITIVGAVFSALAVAAALQHWHYLAIAFLYLAMLGDALDGILARNLNIVRPFGRYLDGFMDQLIYLISPAIILYLSGYQSWYSLFIILMIISGCLRLSVFNEVGNIQNENQLSYLGMPVFWSLFIISGYALVSLVAEPWLSHLLLTLALLTFSIAMLWDRPFYKFKSLNTIISTTLAGFVLFTGLHFWSLYAQZ

SEQ ID NO: 1490 - protein, 224 aa, Photorhabdus luminescens
RSLHSVSPCYGTARFINSRVSILLSVQHLQGSSYLLVFISGVFMLNSFYHGWILMIPVILGGCLHMVIVTKNYFSRWAIPVHQRYFGRNKTWRGFIVVPIITALFSLLWLVPSTGTQDTVIPQTISSCLFAGFLAGLGYVLFELPNSWLKRRLGAPPGQHPEQNKRLFILFDQLDSAIGVTIAYFIYLNLTYIDAFFVFLCFLISAFVVKNILFLFSLKKTRFZ

SEQ ID NO: 1491 - protein, 347 aa, Photorhabdus luminescens
MQMYWQTFRRVLMGMLEKPMWMLMLVSLCMMSLVYVRPTVWDLPVAVIDQDHSSASRALIRQLNSTAKIAVHSYDNLADARHDLLLREIFAIIIIPADLEKNILNGKNITLPIYGDATSRLANGQIQQELTSAHRQLLNEYNSKLLLKYGFSPEQTELLLMPIRSETIGLFNPGVSFAAIVFPGLLVMLLQHSLLISCVRVSITIRGTPKGKPPLPVYLGALSALLPIWLFLSIIFFVLWPWVLGYRQEASIPLLLMLTFLFMLAVLGLGKLVTECMRSVEMIYLTIALLTTPVFYISGTVWPVQAMPDWVRAISSALPSTWGTKSDCPVLPRWDCQYRMYWEISLZ

SEQ ID NO: 1492 - protein, 383 aa, Photorhabdus luminescens
LMRSKVAWRGFERAFSQEIRAVIRSPVFHWLGWLFPLMLFVLISANFSEGTLLNLPVSVVDNDQSPLSRHLIRNLDAASHAQIKSYDGGLQESLERLGSAKDYSLLYIPHDFEANALKGDQPTVRMYYNALFYGAGSYSIQDLSGLMAEINAKYRSILATEMGHQLPPLANVTLVYDSLFNASGSYIYYQQFAATIHLLQLFVVTCTIYSMARSKTLMTMKPFTFALLGKLAPYTLFFTLLLIVELAALIGVFDAKVNGNPIYMVIVGFFYVIAAQSIGLLLFTFTNSALTAYSLIGVLVSIATTFSGMSVPELSMILPARIIANIEPLTHALNAMFDIFLREVSLLGILSVCALLLIYPVVCFLLVRNRLFKRLGLPQGNEZ

SEQ ID NO: 1493 - protein, 324 aa, Photorhabdus luminescens
MKKRTLFTILLVILLTAMAVLFRSHNQYLLLQGEVDAPEVIVASKAKGRVIKRHVERGDDVKAGQLLITLESPELLAQVASLEAARDQAKAQLEQSLHGTREESIRNLEAGLAQAQAEYDNAVREYDRIQSVASKGYVSRNDLDNAHRSRDVAYQKMQSAKAALDEGMHGDRIELRQKYAAALRQAEQQLIELQTQSHDLQVKAPVAGEVGPIPAEVGELFNANSPLVTLIRVPEAYFIYNLREDILAKVQKGDKVKLRLPALGDKEIEAEIRYISPMGNYATKRATRATGDFDLRTFEVRLYPLQAIEGLRPGMSALWRWDEZ

SEQ ID NO: 1494 - protein, 238 aa, Photorhabdus luminescens
TFNNIISCFCKLITFTNPPGKSMYEFNLVLLLLQQMCVYLVIAWLLSKTPLFIPLLQVTVRLPHKLLCYVAFSIFCIMGTYFGLHVGDSIANTRAIGAVLGGLLGGPGVGALVGLTGGLHRYSLGGMTAFSCMISTIIEGLIGGIIHSYLTKRGQINRLINPWTAAIVTFCAEIIQMGILLLLARPYSEALALVKNIAAPMIVTNSIGSAMFIRILLDRRAIFEKYTRLCPSIKLWPZ

SEQ ID NO: 1495 - protein, 383 aa, Photorhabdus luminescens
HVFSESQSHIDYSISAYCGTHPSAFSAQALKIAVYTEGILRKGFNENNSMRVAKVIYQQLEIGAVAITDREKLLAFIGIGSDHHLPGTPISSEQSRRAIENNEVVYADGNEIPYRCSINPICKLGSTLVIPLQGENQQVIGAIKLYEAKNRLFSSINRPLGEGIASLLSAQILTGQYERNKQSLLQSEIKLLHAQVNPHFLFNALNTLQAVIRQDSDQASQLVQYLSTFFRKNLKRSEEIVTLSDEIEHVNAYLQIEKARFREHLQINIELPESLLHTKLPAFSLQPVVENAIKHGTSQLLETGRVTIRAHQQNQLLILEVEDNAGLYKSASMGDGLGMSLVDKRLRLRYGENYGVQIDCQPEKFTRVILHLPLIKEANKTVZ

SEQ ID NO: 1496 - protein, 241 aa, Photorhabdus luminescens
VNMNILIVDDEPLARENLRCLLEEEHDIQIIGECANAVEAIGAIYHLKPDVVFLDIQMPRITGLEMVGMLDPEHRPYIVFLTAFDEYAIQAFEEHAFDYLLKPLEKNRLTKTLQRLRQGHQKQDISILKTEEPLKYIPCTGHSRIWLVQLDEILYVTSRPSGVYVMCTNGQEGFTELTLRTLETRTPLMRNHRQYLVNMTHLREILFGDHGQAELILRNGETIPVSRRYLKPLKEALGLKZ

SEQ ID NO: 1497 - protein, 601 aa, Photorhabdus luminescens
MQHALTFVIATLCILVICYRLYGVFFVKKVLKADDSEVTPSHLLEDGKDYVPTKKWVNFGSHFAAIAAAGPLVGPVLAAQYGYLPSMLWLLIGCVIGGAVHDTVVLFASMKHSGKSLSEVAKTELGPIAGWCTGLAMLFIITITMAGLSMVVVHALERNPWGTFAVFMTIPVAIGVGLWERFTGNMRGATWVGIITIMACVIVGPYIQASAFGEWLSLRTSTVSLALPIYAFFATALPVWMLLTPRGYLSSFMKIGVFGALVVGVIFINPEIQFPAVTEFIHGNGPVLAGPVWPFISITIACGAISGFHAFIGSGTTPKQIDKWSDILPVGFGAMLAECVVGVMALIAATSLYPADYFAINSSPEVFATLGMDVIHLPKLSQEIGLDLYGRTGGAVTLAVGMADIFTRIPWFSQLASYFFQFVVMFEAVFILTAVDSGTRVARYLLQDFLGDIWAPLKRIDWLPGSIGCSIVACLLWGYLLNSGDINSVWALFGVSNQLMASIGLMIGATIILRLSEKRWYMLTCLIPLAYLYVTVNYAAYWMVKNVYFNSATKGFNIFNGTISIVMVILGIVIMVSSIIQWLKLWRVRSTSNSVEVLTNZ

SEQ ID NO: 1498 - protein, 645 aa, Photorhabdus luminescens
MRHHYMTTETEISFADLGLSAPILSALEDLGYEKPSPIQQQCIPHLLNGRDVLGMAQTGSGKTAAFSLPLLHNINAELKAPQILVLAPTRELAVQVAEACADFSKHMRNVNVVALYGGQRYDVQLRALRQGPQIVVGTPGRLLDHLKRGTLDLSNLSGLVLDEADEMLRMGFIEDVENIMSQIPAEHQTALFSATMPEAIRRITRRFMNDPQEVRIQASVTTRPDISQSYWSVYGMRKNEALVRFLEAEDFDAAIIFVRTKNATLEVAEALERNGYNSAALNGDMNQALREQTLERLKDGRLDILIATDVAARGLDVERISLVVNYDIPMDAESYVHRIGRTGRAGRAGRALLFVENRERRLLRNVERTMKLTIPEVELPNAELLSQRRLERFAANVQQQLESSDLDQYRTLLSKLQPAEDLDIETLAAALLKMAQGERPLILPPDPVRRPRREFNERDDRRRNGFDDRGERSDRPRRERRDVGEMELYRIEVGRDDGVEVRHIVGAIANEGDISSRYIGNIKLFATHSTIELPKGMPGDLLSHFTRTRILNKPMNMQLMGDAQPFERRERRGGGRNGNGNGNSSGSGPRRDRENFNGGGRRFNGERRGGEGRGEGQSRSNFRGRGDDHGSSAPRRRYNNSNAQZ

SEQ ID NO: 1499 - protein, 265 aa, Photorhabdus luminescens
GRQGEIMVIPDLFIHHLPQPFYRVQIRAVWRQVMKLNIHHISPVFHLPASVVTSSVKDNMNLLTDRIGLTDGNEELGDVITVDTVILAYYRFANIGQIQGPHQVQTGTASRGFHCGFLPFSHPAISQFRPLRGMDAINEQDRLMVSGFLLEFPVGFHKGPLLLRVELVWHAGRFFITKSIMVQPFIHAGNSVTDIPRFFDKADNSLCGGQKIRGQISDKFLSLCFAEMALRAAIFGLDFAVIKVITDMTINGRFMKTQGLSDHHZ

SEQ ID NO: 1500 - protein, 295 aa, Photorhabdus luminescens
MNLFLRWCYAVAILLLAGCSSKDWRKNEVFAIPLQPSLQQEVILARMEQILASRSLTEDEYAQLLYERGVLYDSLGLRALARNDFSVALSIRPNIPEIFNYLGIYFTQASNFDAAYEAFDSVLELDPTYNYARLNRGIALYYGGRYKLAQDDLQAFYQDDPNDPFRSLWLYLVEKEFYPKGAMLNLSQHYEKANRGQWGWNIVEFYLGKISEYTLMNRLKENATDNTSLAEHLSETDFYLGKHYLSLGDKDSASALFKLTVANNAHNFVEHRYALLELALLGQEQDDLSESDQQZ

SEQ ID NO: 1501 - protein, 710 aa, Photorhabdus luminescens
LLNPIVRKFQYGQHTVAIETGMMARQATAAVMVNMDDTAVFVTVVGQKKVKEGQDFFPLTVNYQERTYAAGRVPGSFFRREGRPGEGETLVARLIDRPLRPLFPDGFLNEVQIVATVVSVNPQVNPDIVAMIGASAVLALSGIPFNGPIGAARVGYINDQYVLNPTSDELKNSRLDLVVSGTAGAVLMVESEADILTEEQMLGAVVFGHEQQQVVIDNINALAAEAGKEKWNWVPESVNQALHDRVAGLAEDRLGDAYRITEKQERYAQVDAIKEEVTAALLEQDEALEEAEIHEILGSLEKKVVRSRVLRGEPRIDGREKDMVRALDVRTGVLPRTHGSALFTRGETQALVTATLGTERDAQIIDELMGERTDRFLLHYNFPPYSVGETGMMGSPKRREIGHGRLAKRGVAAVMPKANEFPYTVRVVSEITESNGSSSMASVCGASLALMDAGVPIKAAVAGIAMGLVKEDDNFVVLSDILGDEDHLGDMDFKVAGSCEGISALQMDIKIEGITREIMQIALNQAKGARLHILSVMEQAINSPRNDISEFAPRIHTIKINPDKIKDVIGKGGSVIRALTEETGTTIEIEDDGTVKIAATDGEKAKHAISRIEEITAEIEVARIYTGKVTRIVDFGAFVAIGGGKEGLVHISQIADKRVEKVADYLQVGQEVSVKVLEIDRQGRVRLSIKEATVGVIVEDTPVAPQSAEZ

SEQ ID NO: 1502 - protein, 316 aa, Photorhabdus luminescens
MGRHRRGRDIHGVLLLDKPQDISSNDALQKVKRIFNASKAGHTGALDPLATGMLPVCLGEATKFSQFLLDSDKRYRVIARLGQRTDTSDSHGQIISERAIQLSQVQLDAALDKFRGDTMQIPSMYSALKYQGKPLYEYARQGIEVEREARPITVYELQFIRWENDELELEIHCSKGTYIRTIIDDLGELLGCGAHVIYLRRLQVANYPNDRMVTLEQLYELQKQAKDQEIPVGELIDSLLLPMDSAIAHFPEVNLIPVVAAYFKQGQAVRSAKSPALVESMVRVTEGDERKFIGIAVINDDGLVAPRRLVVESRDZ

SEQ ID NO: 1503 - protein, 234 aa, Photorhabdus luminescens
SKCRMPWGIQESNHATVSFNMVSTDMLGNTTRLTRSNFRRTNIIQQRSFTVVNVTHDGHNRRTRFSNSFTCIAVAHQRFFQLILTTQDNFMAHFFSNQLCSFLIDHLINGCHCTHFHHGFDDLRTFDSHFIRQFSNSNSFTYHNITVNSSYRLIETLLQCTGFTLLAFCTTNCTGFFTICFRFRMFIIFLLASSLTTTTAGTTITFNFSIIFVFCCTGMTGGSDMIIVAINGIZ

SEQ ID NO: 1504 - protein, 910 aa, Photorhabdus luminescens
MTDVTVKSLAEEIQTSVDRLVQQFADAGIKKTETDFVSQKEKEALLAHLNREQGGSAGKPDKLTLQRKTRSTLNVSGTDGKSKPVAVEVRKKRTYVNRDAVEQAKAEEQAKREAEEQARREAEEKAQREAEAAAKKLVEEQAKREAEEKAKREAAEKAKRQAAESEKVTNQHTEHKQKPAQTDKTIQSEKARREAEAADLKRKAEEEMRRKVEEEAKRVAEEARRMAEENQDKWSSDSDSIDSDDYHVTTSRHARAAEDENDAKVEGDRRARGRSGKATRQKKNNKHSESKADREEARAVGRTKGKQRKTSTLQQSFNKPVAAVNRDVVIGETITVAELANKMAVKGSQVIKAMMKMGAMATINQVIDQETAQLVAEEMGHKVILRRENELEEALMSDRDTGEAVAEPRAPVVTIMGHVDHGKTSLLDYIRSTKVASGEAGGITQHIGAYHVETDSGMITFLDTPGHAAFTSMRARGAKATDIVVLVVAADDGVMPQTIEAIQHAKAASVPVVVAVNKIDKPEADPDRVKSELSQHGVQPEEWGGETQFINVSAKAGIGIDELLDAILLQAEVLELKAVRSGMASGVVIESFLDKGRGPVATVLVQEGTLNKGDIVLCGFEYGRVRAMRDELGREVFSAGPSIPVEILGLSNVPAAGDEATVVRDEKKAREVALYRQGKFREVKLARQQKSKLENMFANMEEGEVSELNIVLKSDVQGSCEAIREALEQLSTDEVKVKIIGSGVGGITETDATLAAASNAIILGFNVRADASARRVVENESLDLRYYSVIYSLIDEVKQAMSGMLAPEYKQQIMGLAEVRDVFKSPKFGAIAGCMVTEGTIKRNNPIRVLRDNVVIYEGELESLRRFKDDVNEVRNGMECGIGVKNYNDVRVGDMIEVFEIIEVKRSIAZ

SEQ ID NO: 1505 - protein, 254 aa, Photorhabdus luminescens
LVTFSLSAAWRLAFSAASRLAFSSASRLACSSTSFFAAASASRCAFSSASRRACSSASRFACSSALACSTASRFTYVRFLRTSTATGLLLPSVPETFSVLRVLRCNVNLSGLPAEPPCSRFKCASKASFSFWETKSVSVFLIPASANCCTKRSTEVCISSASDFTVTSVMLFLPATVYYASSPNQQIFRAAMMSSPVFSSFKPSISDRSSIPCSARSSSVQMPRAARSNARVRFIPVRFNNSSVGCLSLRLSFZ

SEQ ID NO: 1506 - protein, 503 aa, Photorhabdus luminescens
MNKEILAVVEAVSNEKSLPREKIFEALETALATATKKKYEQDIDVRVSIDRKSGDFDTFRRWLVVEEVTQPTREITLEAARFEEPEIDLGSYTEDQIESVTFDRITTQTAKQVIVQKVREAERAMVVDQFREQQGEIITSVVKKVNRENITLDLGNNAEAVILREDMLPRENFRPGDRVRGVLYDVRPEARGAQLFVSRSRPEMLVELFRIEVPEIGEELIEIKAAARDPGSRAKIAVKTNDKRIDPVGACVGMRGARVQAVSSELGGERIDIVLWDDNPAQFVINAMAPADVASIVVDEDKCTMDVAVESNNLAQAIGRNGQNVRLAAQLLKKHRGDDKWELNVMTAEELQAKHQAEAHASIDTFTKHLDIDEEFATVLVEEGFSTLEELAYVPIKELLEIEGLDEETIEVLRERAKAALTTLELAQKESLSDKQPTEELLNLTGMNRTLAFDLAARGICTLEDLAEQGIDDLSDIEGLNDEKTGELIMAARNICWFGDDAZ

SEQ ID NO: 1507 - protein, 446 aa, Photorhabdus luminescens
MSNRKYFGTDGIRGKVGDSPITPDFVLKLGWAAGKVLARHGSRKIIIGKDTRISGYMLESSLEAGLAAAGLSASFTGPMPTPAVAYLTRTFRAEAGIVISASHNPYYDNGIKFFSIDGTKLPDDVEEAIEAEMEKPLTCVESAELGRANRIVDAAGRYIEFCKGTFPSEQSLNGLKIVLDCANGATYHIAPNVLRELGADVVTIGCEPNGININEKCGATDVRLLQQRVVEEKADVGLAFDGDGDRVIMVDHLGQKVDGDQILYIIAREALRQGQLRGGVVGTLMSNMGLELALKQLGIPFLRAKVGDRYVLEKLQEEGWRLGAENSGHVILLDKTTTGDGIVAGLQILSAMVRNHMSLHDLCSGMKLLPQVLVNVRFSGSHDPLKSENVINITKSVETELNGRGRVLLRKSGTEPLIRVMVEGEDDVQVTALAHRIADAVKHAGZ

SEQ ID NO: 1508 - protein, 282 aa, Photorhabdus luminescens
MKLRARDNVLDLSRPQVMGILNVTPDSFSDGGAHNTLNMALQHAEKMINEGAAIIDIGGESTRPGADEVSEQEEVDRVVPVVEALAQRFNIWISVDTSKALVMSESAKAGAHLINDIRALQEPGALESVAKSGLSVCLMHMKGQPRTMQDAPHYENLLIEVNQFFTEQIERCAMAGITKDKLVLDPGFGFGKNLKHNYQLLAHLNQFHQFGLPVLAGMSRKSMIGQLLHVPPQERVIGSVACAVIAAMQGAQIIRVHDVKETVQAMHIVGATLSAKEEKKLZ

SEQ ID NO: 1509 - protein, 654 aa, Photorhabdus luminescens
LSDMAKNLILWLVIAVVLMSLFQSFGPSDSNSRRVDYSTFINELAQDQVREVRITGREINVSRKDNSRYTTYLPVQDEKLLDTLLNKNVKVVGEPPEEPSLLTSIFISWFPMLLLIGVWIFFMRQMQGGGGKGAMSFGKSKARMLTEDQIKTTFADVAGCDEAKEEVGELVEYLREPGRFQKLGGKIPKGILMVGPPGTGKTLLAKAIAGEAKVPFFTISGSDFVEMFVGVGASRVRDMFEQAKKAAPCIIFIDEIDAVGRQRGAGLGGGHDEREQTLNQMLVEMDGFEGNEGIIVIAATNRPDVLDPALLRPGRFDRQVVVGLPDVRGREQILKVHMRRVPLDTDVDASVIARGTPGFSGADLANLVNEAALFAARGNRRVVSMVEFEKAKDKIMMGAERRSMVMTEEQKESTAYHEAGHAIIGRLVPEHDPVHKVTIIPRGRALGVTFFLPEGDQISASRQKLESQISTLYGGRLAEEIIYGPDSVSTGASNDIKVATSIARNMVTQWGFSEKLGPLLYAEEEGEVFLGRSVAKAKHMSDETARLIDQEVKAIIDHNYQRARQILMDNLDVLHSMKDALMKYETIDAPQIDDLMNRTNVRPPAGWESDNGSSNNSRPTGNTPPPQAAKPTDDINTLAQGGEQVGQSGNKDQZ

SEQ ID NO: 1510 - protein, 358 aa, Photorhabdus luminescens
NCLIFAQMKLMVSVMKIFITDEQKAELEHLHHTCRDKRECDRIKAVLLASEGWSSVMIAQALRLHETTVNRHISDYLNHRKIKPENGGSQSHLSETQTQELIAYLTANLLPTTQAVIRLVKEAWDISYTVPGMNKWLHHNGFSYKKPTGVPHKFNAEQQRAFMETYGKLKQEAGDHEPILFIDGVHPTQGTKLAYGWMRKGQKTAVKTTGSRTRLNLMGALNLADISKTVVREYDRIDSYHIAEFFIAIRETYPVSQKVHIILDGAGYHRSRQVKDWAYVMNIELHYLPPYSPNLNPIERLWKVMNEQVRNNHYFALTALFRQAIHRFFTEILPELAGNLSCCINDNFQVMNPASSSZ

SEQ ID NO: 1511 - protein, 214 aa, Photorhabdus luminescens
LERTMANKKRSASSSRWLQEHFSDKYVLQAQKKGLRSRAWFKLDEIQQSDKIFKPGMTVVDLGAAPGGWSQYAVSQISDNGRVIACDLLPMDPIVGVDFLQGDFRDELVLKTLLERVGDNKVQVVMSDMAPNMSGTPAVDIPRSMYLVELALDMCRDVLAPEGSFIVKVFQGEGFDEYLREIRSLFTNVKIRKPDASRARSREVYIVATGRKLZ

SEQ ID NO: 1512 - protein, 528 aa, Photorhabdus luminescens
DYPEFTIIFYILIYHSNVDLVMGHRLLFPTLRLSIVVCLHPYAKFMSFFKIAGRLICVTALYLTIPNANATPVEEYTQYLPDGTNLALIAQKAGSSTPLIDYHGQQMALPASTLKVVTALAALLQLGKDYRFITTLESHGKISNGILRGNLIARFVGDPTLTRQQLRNMVTVLKQSGVEKIDGDLLIDVSAFASHDKAPGWVWNDMTQCFSAPPAAAIVDRNCFSVSLYSAEHPGDTAFIRVASFYPVNMFSEVKTLAKGSPESQYCELDVVPGELNRFTLTGCLTQRSEPLPLAFAIQNGTSYAGAILKNELQIAGIEITGNLKRQSLPTEPGKVLAQNQSAPLHDLLKVMLKKSDNMIADTVFRTIGRQHFDIPGTWRSGSDAVRQVLKQKAGIDLGNTVMVDGSGLSRHNLITPATMMEVLQFIAQHDQELDFISMLPLAGHDGTLRYRGGLDEAGVNGKVSAKTGALQGVYNLAGFITTASGQQVAFVQFISAYAVPPKEHRNRRAPLIRFESRLYKDLYQHNZ

SEQ ID NO: 1513 - protein, 392 aa, Photorhabdus luminescens
MKFVDEARILVVAGDGGNGCVSFRREKYIPKGGPDGGDGGDGGDVYLLADENLNTLIDYRFEKSFRAERGQNGQSRDCTGRRGQDTTIKVPVGTRVRDAVTGEVLGDMIRHEQRLMVAKGGFHGLGNTRFKSSVNRAPRQRTMGTSGETRELMLELMLLADVGMLGMPNAGKSTFIRAVSAAKPKVADYPFTTLVPSLGVVRMDNEQSFVVADIPGLIKGASDGAGLGIRFLKHLERCRVLLHLIDICPVDGSDPVENARIIVNELQQYSEKLAEKPRRLVFNKVDLLEPEEARQRAQAIADELGWEGDFYMISAINRQGVKALCWDIMEFMKTQPRNMSRTEGETQPEKVEFMWDDYHKKQLEQVSEVDDDWDDDWDEDDDEGIEVIYKRZ

SEQ ID NO: 1514 - protein, 324 aa, Photorhabdus luminescens
MNLETIIKLTADDMAAVNETILSQLNSDVTLINQLGYYIISGGGKRIRPIIAILASRVLGYQGDKHITVAALIEFIHTATLLHDDVVDESDMRRGKATANAMFGNAASVLVGDFIYTRSFQMMTALNSMRVLKLMSEATNVIAEGEVLQLMNCNDPNISEDDYMRVIYSKTARLFEVAAHSSAILSNATPEQEMALQNYGRYLGTAFQLIDDLLDYNADSDTLGKNTGDDLNEGKPTLPLLHAMNHGTPEQSALIREAIEKGNGRHLLETVLTTMKQCGSLEYTRKRAEEEADKAIAALQALENSPYKQALVGLAHIAVQRLSZ

SEQ ID NO: 1515 - protein, 313 aa, Photorhabdus luminescens
MKVAVLGAAGGIGQALALLLKTQLPSGSELSLYDIAPVTPGVAVDLSHIPTEVKIKGFAGEDATPALEGANVVLISAGVARKPGMDRSDLFNINAGIVRNLVEQVAKTCPKSLIGIITNPVNTTVAIAAEVLKKAGVYDKNRLFGVTTLDVIRSNTFVAELKGKKPQEIEVPVIGGHSGVTILPLLSQIPGVNFTDGELAALTKRIQNAGTEVVEAKAGGGSATLSMGQAAARLGLSLVRGLQGESDVVECAYVEGDGKYARFFAQPVRLGKNGVEERLNIGELSDFEQKALEGMLDVLRKDIELGEKFINNZ

SEQ ID NO: 1516 - protein, 457 aa, Photorhabdus luminescens
MRIHILGICGTFMGGLAILARSLGHEVTGSDANVYPPMSTLLEKHGINLIQGYDPAQLDSVPDMVIIGNIMSRGNPCVEAVLERGLPYTSGPQWLHDYVLPERWVLAVAGTHGKTTTAGMLAWILEACGYKPGFLIGGVPGNFETSAQIGESPFFVIEADEYDSAFFDKRSKFVHYSPRTLIMNNLEFDHGDIFGDLAAIQRQFHHLVRIVPGSGKICVPDNDVNLKQVLSMGCWSELELVGETGNWQAKKISTDSRHYQVFYGGKVVGEVNGSLVGEHNMRNGLIAIAAAHHVGVQPADACCALSEFINARRRLELRGEENGVTVYDDFAHHPTAILATLEALRSKVGGTARIITVLEPRSNTMKMGVSKNEIAPALGRADEVFLFQPANIKWHVSEIADHCVQPAYWSADIDSLVHMIVDKAQQGDHILVMSNGGFGDIHEKLLSKLNKKAYQSZ

SEQ ID NO: 1517 - protein, 335 aa, Photorhabdus luminescens
MKTLGEFIVEKQQDFSHATGELTALLSAIKLGAKIIHRDINKAGLVDILGTSGVSNVQGEVQMKLDLYANEKLKAALKARGEVAGIASEEEDDIVIFEGDRAENAKYVVLMDPLDGSSNIDVNVSVGTIFSIYRRITPIGQPVTEKDFLQPGHRQVAAGYVVYGSSTMLVYTTGCGVHAFTYDPSLGVFCLSHEKVQFPPNGNMYSINEGNYIKFPMGVKKYIKYCQEQDEATQRPYTTRYIGSLVADFHRNLLKGGIYIYPSTASHPSGKLRLLYECNPMAFLAEQAGGKASDGANRILDITPSKLHQRVPFFVGSKSMVEKAESFMAEFPDEZ

SEQ ID NO: 1518 - protein, 177 aa, Photorhabdus luminescens
MSLNLVPAGKELPEDIYVIIEIPANADPIKYEIDKESGALFVDRFMSTTMFYPCNYGYINNTLSLDGDPVDVLVPTPYPLQPGSVIRCRPVGVLKMTDESGEDAKLVAVPHSKLTKEYDHIKDVNDLPELLRAQITHFFEHYKDLEKGKWVKVDGWDNVEAAKAEIISSFERAAKKZ

SEQ ID NO: 1519 - protein, 1258 aa, Photorhabdus luminescens
MRWMKKVSIAFLLIVTLLVIAVAGLVGTQSGLHFMINSAARWVPGLDITSVSGGWRDLTLKGVKYQMPGVNVNVDQLHLSLRLSCLKKSQLCVNALTTEGVKVAINTKQLPPAGEPSPKSEPFTELRTPYPVSLDLLSVKNVTVTVNDTIFALDEFRTAAHWQQKALTLKPTKINGLLVELPKTPPERLKIAEAEGKAKRGSEPEKSLAEILKKLFSQPLLATLPEVPIPLDITVAGISGKQLRLTGDTNITINQFLLQLSNQGQQIQLNKLNVKMPEGSLAINGSATLAQQWPIKLVIKGELNRQEIQGQKVNVKLNGALQEQLSLGLNLSGPVSAKLDAQAELAKVGLPVRVTLESQQLSWPLTGKPEYQLDGVKMRLNGKASGYDLSLRSGINGSEIPPALLVLDAKGNEEQFKLTRLRLSALQGKSELVGVADWSKAVSWNAVLTLSGINTAKQWPEWPAKIDGKIVTRGSLHGGSWQLQIPEITLDGNVKQNLIKAKGKISGNAAGQWNIPQFELALGRNKMNLQGQLSKQWKLDGDIRAPKLDGIFPGLGGVVNGTLKLRGNIQAPQLLVDLNANGLKWQDLRVDRVNVKGDVRSAEQIQGNLAAKVSELKQADLIVRNFTLDAKGNEKQHDLQLKIDGKPIAGQLALHGSFDRKQQRWKGSINNTRFDTPVGEWRLTKAITLDYLNQQQKVTVGPHCWLNPHAQFCVPKSIEAGVSGSASIVLERLDLALIQPLLAPETHLKGIFSGNADVKWSAESGLPQANVNLRGDGVHVKQMVDGTALPVDFQTLTLNAGLKNGTAELNWLFKIMGNGRFNGGVQVADLAGSRKLSGNVDIQDISLALIKPILGKGDKAEGHLNANLRLGGNVRNPLLFGRLDLSALQASGHWIPFDIVQGQMGVNFDGIRSVLDGVIKTPKGQLNLNGDADWRNVDAWHARVTANGDKLRVVFPPMVKIDVSPALVFEASPQLLKLDGSVGIPWARITVKELPESTVETSSDEVILNENLQPLQQKKASIPIQSNLTIHIGDDVRLSAFGLKAQLKGDLMVVQDKQGMGLNGQVDILDGRFRTYGQDLIVRKGLIMFSGPPDQPLLNIEAIRNPDSTDGQVIAGVRVTGLADQPKVEIFSEPVRSQLEALSYLLRGEGLENSNSDNSQMTAILIGLGVAQSGQLVGKIGEIFGVSDLALDTQGVGDKSQVVVSGKITKDLQVKYGVGIFDSLATLTLRYRLMPRLYLEAVSGIDQTLDLLYQFEFZ

SEQ ID NO: 1520 - protein, 581 aa, Photorhabdus luminescens
VSRYPVLCFLCVSIVTPIAHSANLRLKIEGLTGKLEKNARIHLSTISTDEVAPDGRFRSRVDKAIREGLRPLGYYEPIIEFTYQENRPPARSVLTAKVTVGEPVRIADVNVVLEGGAKTDGDYAKLVKSKSPKKGTILNHDEYENLKGSLTGLAIRKGYFDAVMKKSQLGVAKERHEAFWDFVFNSGERYHFGQVRYRGSQIREDYLNHLVPFSEGDFYTSEQLAELNRRLAETGWFNSAVVSPDFNSARKNGDGMLPLEAVLTPRSKNYVELGGGYGSDVGPRVKAKWTKPWLNSRGHSLSASINLSAPEQVIDATYKMPLKVNPLEQYYALQTGYKRKDINDTVSDTATVNFSRNWDLSTGWQYGINMRWSLSHFTQANVTNTAMLLYPGANVSRIRQRGGTMPYWGDSQRYSIDISDTLWGSDVDFLVLQAQNVWIRTYWDNHRFVARGNLGWIETNAFEKVPPDLRFFAGGDHSVRGYRYQKISPKDNKGKLTGASALVVGSLEYQYNVTGNWWSAVFVDTGEAINDVRKSNFKTGVGIGVRWASPVGPIKFDLARPIGDSESRNIQFYIGLGSELZ

SEQ ID NO: 1521 - protein, 309 aa, Photorhabdus luminescens
RPRKTGICRTLENCAMSQMFIEYWERKLRFLDVHYHARPDSYIRRYNVLEAGREYVRHGGGVVLKNHLGSVTASSSLAQEAGLPVFGSVVLNATSGGLAINSVIQSLSQYQFCKVPRLLVHLPTIVPTSHKSVMKRTWANAFAQTLAQQPLSVVDSNGRLHNEIHELISFAQQHNVVLSSGHASRYEVTQLIDAITAAGGCKFMLNQPASPMTGLKAKDLKALGKHDWLYVEQTALTVYLGYQTTEDFFEVLSEVNNVVYSSDLGQPVQPDVKQWLNDSERWFKTAGLGEEHIRDICLLNPLRMLAPDZ

SEQ ID NO: 1522 - protein, 216 aa, Photorhabdus luminescens
VPTSANKSLSIDPHSALPGRTEPLKVSPNHAVTDHTIEPVPENMEVAYFGMGCFWGVERLFWQQPDIYTTSAGYSGGTTANPTYEEICSGLTGHAEVVRIVYDPAKNSYENLLKLFWENHDPAQGMRQGGDIGSQYRSAIYTVSPQQHELALASREHFQKAMQQQSDNRPITTEITEAGPFYFAEDYHQQYLFKNPEGYCGLGGIGVCLPKMNENZ

SEQ ID NO: 1523 - protein, 444 aa, Photorhabdus luminescens
MLNSLLIVFLLCAISAFFSLSEISLAASRRIKLKLMADEGNINAAHVLKLQETPGMFFTVVQIGLNAVAILAGVVGESAFSPSLKTFFMKFMRPEWADQLGFICSFIIVTSIFILLADLTPKRIGMIKPEAVAVKIVNPMRFCLTVFRPLVWLFNGLSDLIFKLFKIPTARNEDITSDDIFAVVEAGAVAGVLRKQEHELIENVFELESRTVPSAMTSRESIIYFDKDESEESIKQRVSSQPHSKYLICDRDIDHVIGYVDSKDLLNRVLSGQSLSFNKGVQIRNALIIPDTLTLSDALESFKAAGEDFAIILNEYALVMGVITLNDVMTTLMGDLVDQGQEEQIIIRDENSWLVEGGTPIDDVQRVLDIDDFPDSSNYETIAGFMMFRLRKIPKRTDSVKFAGYKFEVVDIDNYKIDQLLVTKITDTLTTAPTQNQPISDDKZ

SEQ ID NO: 1524 - protein, 185 aa, Photorhabdus luminescens
MIKNFMLYAALLCSPALAFAHNITLEQQVPAISVSDKGELLLNNNKFSYQNWDSGKLIGKVRVIQHIAGRSAAKEMNAPLIEEIKRADFSKEKYQTTTIININDAIFGTGPFVRSSIEDSKREFPWSQFIADSNGVAKKAWQLEAKSSAIIVLDKNGAAKFTKEGALNSSEIKQVIELVRKELQZ

SEQ ID NO: 1525 - protein, 248 aa, Photorhabdus luminescens
MLEQICQLAQEAGAAIMTIYQDEHPLKVDHKQDDSPVTMADIVAHKIIKAGLSRIAPEIPLLSEEELPTWEERRDWKRYWLVDPLDGTKEFINRNGEFTVNIALIDEGVPVMGVIYAPVQDTLYSGQGRQAWKKACGGQCLPIKIRDANPPMVVVSRSHMDTELEDYLNQLGEHQTVSVGSSLKFCLVAEGKAQLYPRFGPTHIWDTAAGHAIAIAAGAHVTNWKGQTLDYTPRESFLNPGFRVTIFZ

SEQ ID NO: 1526 - protein, 356 aa, Photorhabdus luminescens; identical to SEQ ID NO: 52

SEQ ID NO: 1527 - protein, 213 aa, Photorhabdus luminescens
LITGIFMAKLSFDSIEAQASYGVGLQVGQQLLESGLQGLEPEALLAGLCDALENHSPAVPVDILHRALREMHERADGVRRERQQVMAEEGQKFLAENAQRDGISTTESGLQFSVLKQGDGAIPAHTDHVRVHYTGRLIDGTVFDSSVQRGEPAEFPVNGVIAGWIEALTLMPVGSKWELYIPYNLAYGERGAGASIPPYSTLIFEVELLDILZ

SEQ ID NO: 1528 - protein, 258 aa, Photorhabdus luminescens
NIFYIKLILLQILYDEENLMNTSFNEILSEIKKSKTMPELEKRLLNAINYLGFEFYSIYQEEKYPFTTKKYVLITNLNIETASNYNQDNNHDSDQLMNGDYTFSIPSVCNDKISKNTDFTIEKSNSNKNEVKNSLSIKIKGYHGERSIFSVARKEGTISHNEILNKAGVLGILANECIKTFNNLKNKKDKIIIPTLSTREVEVIRWTCEGKTSAEIADILDISTRTVNFHINNVMEKLVVPNKVAAVAKAIAYNLIIZ

SEQ ID NO: 1529 - protein, 460 aa, Photorhabdus luminescens
CLLLLTLIVRLNLICIIVNNGGNMSSKKYLLVLDYLPARLNEIVNIRDYIRYNYSLELVIISDMLSGEEKNVTPFVYHIPVRTENYVDDNYVDRVMTVLAELNMTCAGILPFMDAVSGYAAVIAKKLNVYGDDPKLSFAGIEKYQFRQQETRILPLLAAQHIKTPRYTFINEIKELEEFYDSVPYGVIIKPNCGRANVGVVAVKDRSKIPTAFAQSVEQSGGNQILAEELIIFDTEYSYDGIGCMAFLTQKVSQKGEFPVEIGQIVPAQCDGRNTIALHKAGQAMNLISGQTFGAFHNEIKQDSKTGETFLVETNRRPAGMRIWDMANRVYGISLQEIWVDHLVKGFSDRMILPEAKGRAFLINLLAGKDGKINDKFDQTEINEVLLASVDNILSKLYYEIIAIKINLDKNSPVYETPKSNNDFCGYVCVHINDEHVKCESLMNEINDAWRDILSNYILZ

SEQ ID NO: 1530 - protein, 430 aa, Photorhabdus luminescens
IPGSIDNDVTGVSECSQQRGNLKDNGYNKVEVILMIHKIILARFFSVFSEAFVMFAVPVLVYTSTNSASLSSFAFGLERLFRVISLPISGWMGDRMHTLVMLFLSDILRSLVCLFLFILSFIYSDNSIVYIIISLSCVLSFFSGAGYVNLEGFVSKNMSAIELPSVNSRLQFVEQFTYIAAPAVVGVLVYKFSVYAVFAFAFFPFLISSLIWFQLQRKNRIEERANREGYNLPAIFKFLMENPPLLRVISLTFLMNVMQGAILSTAVYVITSVFSQPKGSYAQLLAYAGLVNCCVFFIAPKLCRIFDVRIVGVTAFLIALCGLTLFATGPLFVVYTLGFLLVIGSEGCFNLFSRSYRASLIPKQRFSQYLGVVLVLNQLATPLTSFICANLLNYFSYNSIYLIFSAFVLLMFIIINPYRSLKFNLHNSQZ

SEQ ID NO: 1531 - protein, 566 aa, Photorhabdus luminescens
MYILGINSVYHESAVCLLKDGETIFAIEEERLNRRKHGKPANVDNPDELPLASIEVALDFAGIRLEDVSHIGFSIDPIERRKSVFIDEVTSEGNWGSVSGESIFYRKTTSVPEILQSMGFRGQFHWVPHHTAHAASAYFVSPFDKALTLSLDGVGEDNTAGVYLGDGNSLKKIKTIEYPNSIGFMWEKLAEFLGFSVYDACKVMGMSAYGKPEGFMPAFQQLVKIYEKGEFTIDNTILNFRSQDFSKLESLFGIEKRVPGGEVAQEYYDIAASLQQITDEIVLNMAHHYLQETATNKLCLAGGVALNCITNKRLYEELDIEDIFVQPAAHDAGTATGAALFIWHHILENNQRYPLTHTYWGLEYSEDDYQRSLKAHGLDWTYEENIHEVVAGLLAENNVVGWFQGRMEFGPRALGNRSLLADPRNKDIRDLMNRKVKHREMFRPFAPSVLRQHVADWFHVRKELPEAAKYMLLAMDAKVDKASKIPAVVHEDGTARVQVVDSASNPDYAQLIEAFYRKTGVPLLLNTSYNDSEPIVCSPEDAIKTFMKTNIDYLVLGNYLIKSIHZ

SEQ ID NO: 1532 - protein, 226 aa, Photorhabdus luminescens
MQTTQIDQIKKRLMELDSAAISDAMDSLHIPAGLAGIMPRSNVGIKMAGPAFTVRYEPIIPEQGKFLNAGNYIDEVPAGYVIVVDNQGRTDCTSWGNILTFKAVQKGIAGSVIYGSARDLSEVRRLEYPLFTTGVYMVSGKNRAKVAATQCTLDIGGVVISPGDWIFADDNGALAIPQQYLLTVIERAENVDKTEQAIIEAITNGEDLVNAREKLGYAVPWKTVQZ

SEQ ID NO: 1533 - protein, 273 aa, Photorhabdus luminescens
DEAKVMIKELLMCKPDFYNIEYVINDWMDPNNSVNKELAQQQWDFLYERLTERGITIRTIEPVNGLPDMTFSGDCGMVHNNKFLASNFRHAERQGESQHYIDYLENLGYEIHRVDEDIYFEGLGDVIYWDNDIIFGYGPRSDKEAINTIQKVYPELEVKGELHIQDKTFFHVALAFSFIDKDTVIYYPEAFTKESQNYIAETFERRISISEHDAKELFVCNNIPIGKDILMHDCSIEVERQLNNYGYNVIKCDMSEFLKSGGSLRCLVLKVKZ

SEQ ID NO: 1534 - protein, 397 aa, Photorhabdus luminescens
MSSDRVLVIYYNRLYNPLIIRSLKSEYREVIALYIDEGQVRDIEDIELECMVAGADKFIYKDYRAQYAEHFLTKAIKANAIYQNGYFLSAALSRPAIAEAAVEVANELNIDYIAHQFRGNDQVRMDMNIEILNKIPIASLRDFKYDENIVNSYAMKYGIPQEFGCNNPYSTSENIWGLSVECGPLAEPEALIPEDAREKLFEHALSATEPIFLSLGFENGIPISIDGEKKSLYEIIEILNEIGKKLSIGIFDIVEDGIVGLKTRAIYQSPAAHILITAHRDLECYCSNRHENWFKEIVDKKWVELVYSGLWYDPLLTHLNHFIDSMNQHVNGEIKLELGYKYANVCSRISKTTIYDDNLAIYNCGHLYSQNDAEGFAKIFNIHTKQSAKSKMRQKLZ

SEQ ID NO: 1535 - protein, 343 aa, Photorhabdus luminescens
MNLSKNILQTIGNTPVVMLNGRYTKGINVFLKMENINPGGSIKDRIAVAMLERAEAQGELRPGMVVIEPSSGNTAIGLAMACAVKGYRFIAVLDRMVPAAKRDKIKAFGAEIIFLPEFEAGKDTVKYRIDLTKEIIKVYPNAFSPMQFENQVNPDEHYRSTGRELYEIFGNNLTACFATAGSCGTLTGISRYLKEKDPQVRIYGVEPVGSIIFGGEPGKYLVQGAGLAFIPSILDRTNIDITLKVADIDAFRVARKLARNEGILIGGTGGCAVSAALNRLDDFKPGDNIVVIIPDSGERYIDTIYNDAWLFENNFSELIEESKTEPQLEEIITNMGCVLNEFZ

SEQ ID NO: 1536 - protein, 295 aa, Photorhabdus luminescens; identical to SEQ ID NO: 1209

SEQ ID NO: 1537 - protein, 245 aa, Photorhabdus luminescens
MSEIIYGIHAVKALLERDPQRFIEVYVLKGREDRRLTPLIHALESIGMTIQLANRQWLDNQTEGAVHQGIIAKVKPGRQYQENDLPDLLAQVETPFLLVLDGVTDPHNLGACLRSADAAGVHAVIIPRDRSAQLNATAKKVACGAAESVPLIRVTNLARTLRLLQEYNIWVVGTAGEADHTLYQSKLTGPMALVMGAEGEGMRRLTREHCDELISIPMVGSVSSLNVSVATGVCLFEAVRQRSSZ

SEQ ID NO: 1538 - protein, 830 aa, Photorhabdus luminescens
MKKWRKQPADDNGGTAMSQDPFLGREAEKYESPIPSREYILDIIAKHTVPVSRQELAQELNLINDEDIEALRRRLRAMERDGQLVFTRRQCYALPERLDLLKGTVIGHRDGYGFLRVEGHKDDFYLSAEQLKMAIHGDVVLAQPLSLNRKGRNEARIVRVLVPKTSQIVGRYFLDSGMGFVVPDDSRLSFDILIPKDESGGARMGNVVVVELITRPARRTKAIGKIVEVLGEKMGTNMAVEIALRTHEIPHSWPPQVENQVASLNEQVPESAKKDRVDLRTLPLVTIDGEDARDFDDAVYCERKRSGGWRLWVAIADVSYYVRPQTALDTEARNRSNSVYFPSQVVPMLPEVLSNGLCSLNPQVDRLCMVCEMTISAQGRLSSYKFYEAIMNSHARLTYTKVWRMLQGDEELREHYKPLVQHIEHLHELYQALENAREQRGAISFESEEAKFIFNAERRIERIEPIVRNDAHKLIEECMILANIAAARFVEKNGEPVLYRIHDRPREESIVNLRSVFGELGLTLPGGMQPTPKDYAQLMHQVAERPDHELLQTLLLRSMKQAVYDPENRGHFGLSLNSYAHFTSPIRRYPDLVLHRAIKYLLAKQQGIVEQCGTPTGGWHSDMEQMLQLGQHCSMTERRADEATRDVADWLKCDFMQDQVGNTFTGIITSVTGFGFFVRLNELFIDGLVHVSTLSNDYYHFDNIGQRLVGEYSGKTFRLGDEVEIRVEAVHMDERNIDFKLLSTARKARNVGKTVRDRERKVELGRESSKKKGRGYRKEAHFEPDGAVRKERSADKPKGDKKKGKTLSTKTQKIVAKFKAKRAKKSADKZ

SEQ ID NO: 1539 - protein, 437 aa, Photorhabdus luminescens
VNFEMGKNVVVLGTQWGDEGKGKIVDLLTERAKYVVRYQGGHNAGHTLVINGEKTVLHLIPSGILRENVISIIANGVVLAPDALMKEMNALESRGIPVRERLLISEACPLILPYHVALDNAREKARGAKAIGTTGRGIGPAYEDKVARRGLRVGDLFDKEAFAVKLKEIIEYHNFQLVNYYKEPAVDYQKTLDEIMAVADILTDMVVDVSDLLYKATQKGELVMFEGAQGTLLDIDHGTYPYVTSSNTTAGGVATGSGLGPCYVDYVLGIIKAYSTRVGAGPFPTELFDETGGYLREKGQEFGATTGRSRRTGWLDIIAIRRAVQINSLSGFCMTKLDVLDGLKEVKICTGYRMPDGSVIETTPLAADDWEGIEPVYETMPGWNESTFGVKEHRKLPQAALNYIKRVEELTGVPVDIISTGPDRSETIILRDPFDAZ

SEQ ID NO: 1540 - protein, 337 aa, Photorhabdus luminescens
MRKSLVVVIVAVLVALYASLFIVQEGQRGIVLRFGKVLRDAGNKPIVYEPGLHFKIPFVETVKTLDARIQTMDIQADRFLTSENKDLIVDSYLKWRINDFSRYYLATGNGDISQAEVLLKRKFSDRLRSEIGRKDVRGIVTDSRGQLTTDVRDALNKGTTDKETASTTEADDAIASAAARVERETADKQLAINPNSMAALGIEVVDVRIKQINLPLEVSEAIYQRMRAEREAVARRHRSQGLEEAEKLRAAADKQVIEIRAKAEREALTLRGAGDADAAKLFADAFSQAPDFYTFIRSLRAYEKSFSEDGKDVLVLSPEADFFRYMKAPEKRAGQHZ

SEQ ID NO: 1541 - protein, 407 aa, Photorhabdus luminescens
MAWNQPGNNGQDRDPWGSSNKSGNSGGNKSGRNRGASDLDDLFRKLSSKLGGFGGNKGGNGSDQGAKFGGRIVSLVAAAVVVIWAASGFYTIKETERGVVTRLGKLSHIVQPGLNWKPTFIDEVVPVNVESVRELATSGVMLTSDESVVRVEMNVQYRVTDPAAYLYSVTSPDNSLRQATDSAVRGVVGKYSMDKILTANRMIVRDDTQRELEKTILPYRMGITLLDVNFQAARPPEEVKAAFDDVIAARENEQQSIREAEAYSNEVLPRAKGDAQRIIEEAKAYKARVVLEAQGEVAGFAKMLPRYKEAPEITRERLYIETMEKVLSRTRKVIVNDHNNNLLVLPLEQMLRGDVSGVKKEGTVQSDNTVASDLRVTRPTVPSNSGRGANYNRTDNLRNDIIRVGRZ

SEQ ID NO: 1542 - protein, 728 aa, Photorhabdus luminescens
RLAKNLMNKKILILPGDGIGQEVCDAALPVFQALNLPVTLEIGDIGWTCWEREGNPVPANTWEKIASVDAVLLGAITSKGKEEAQQALPPHLRVKTRNYVSPVIQLRQRLGLYANIRPVRYVEGDRKPFRCCVIRENSEGLYAGFDFKGIPATATTWLQHPNIDKYGPEEAAWTVRLQTRFGLERLFITAFEYAKENNYSRVTFADKPNVMRESGHFAKGIFDTVAAGYPEIKADIHNVDAIALWMVKKPHEFGVIVSENMFGDILSDLAAGVMGGLGLAPSANIGSDIAYFEPVHGSAPGMAGKNKANPAAMFYTIALLLEHLGFADAAQQINCAVDNVIREGRTVTYDLGGSATTQQMAQAIISTLSKKCTSYSASVITVGDELLSGKYPNTNLQDISEYLTEQGYKVKQHQVCADDINQIATAVVRRLGQDTLIVVCGGLGPTLDDKTREAIAKVAGSPLEIRDNVWVEIQKQLEKLGVYCDHSNRFQAMFPSGAKVIPNVTGTAPGFSLNVDSSKIVVLPGPPSQMRLMLSEEHSIPPVAGMRERNYHWTLIGVSESKVGTMVNAFFDGVECDIHYLWKAPYVVVQVITPADAPLSVRQLVNFGAMFENKLVSDCQMTAMEKLSEQYRINWFTDDDELNTYLHTTYAVNNPSKSLSVNITAFPSISSFLSGEEMLGQMTLTTIDDEGRQHSVDFPCNKLLLQQSIPEYAAWSVLCARASKEEMZ

SEQ ID NO: 1543 - protein, 427 aa, Photorhabdus luminescens
LFERYEGGEQAVVVHVFFSQDKDTDNLSEFESLVTSAGVVPVQIVTGSRKAPHPKYFVGEGKAEEIAEAVQASGADVVLFNHALSPAQERNLERLCQCRVIDRTGVILDIFAQRARTHEGKLQVELAQLRHLSTRLVRGWTHLERQKGGIGLRGPGETQLETDRRLLRDKIRQILNRLSRVEKQREQGRQARNKADIPTVSLVGYTNAGKSSLFNRMTAAEVYAADQLFATLDPTLRRIDVNDVGTVVLADTVGFIRHLPHDLVAAFKATLQETRQATLLLHIVDAADSRIDENIAAVDSVLEEIEAHEIPVLLVMNKIDMLDSFTPRIDRNEDNLPVRVWLSAQTGEGIPLLLQALTERLSGEIAHYELRLPPEAGRLRSRFYQLQAIEKEWIEEDGKVGIEVRMPIVDWHRLCKQEQDLFDYVVZ

SEQ ID NO: 1544 - protein, 314 aa, Photorhabdus luminescens
MSDQKTQHLPTAIFVMGPTASGKTALSVALRQHLPVELISVDSALIYRGMDIGTAKPTTEEQALAPHRLINILDPSQPYSAADFCHDALKEMAEITASGRIPLLVGGTMLYFKALLEGLSPLPSANPVIRAQIEQQAAEQGWDALHQQLQKIDPAAALRIHPNDPQRLSRALEVFLISGKTLTELTTLSGESLPYRVHQFAIAPAKRELLHQRIEARFHQMLESGFEEEVKALYARHDLHVDLPSIRCVGYRQMWSYLSGEIDYDEMIYRGICATRQLAKRQITWLRGWKSVHWLDSSQPEQALSTVMQVVSAZ

SEQ ID NO: 1545 - protein, 632 aa, Photorhabdus luminescens
MAIKILPPQLANQIAAGEVVERPASVVKELVENSLDAGANRIDIEIERGGVKLIRVRDNGCGINHQELALALARHATSKIATLDDLEAIISMGFRGEALASISSVSRLTLTSRTEEQHEAWQAYAEGRDMAVTVKPAAHPVGSTVEVLDLFYNTPARRKFLRTEKTEFGHIDEVVRRIALARLDVLINLHHNGKLVRQYRPAKDESQYERRLVSICGTAFMQRALSLSWQHDDLSIKGWVVDPMNTEASGDIQYCYVNGRMMRDRLINHAIRQAYQDLLRGEQQPAYVLYLGVDPHQVDVNVHPAKHEVRFHQARLVHDFIYQGVIAVLKQRGSGAELDIACCEPAPAWEPENRPSAGGNHFSRQSNATSVAASSPKEVLSSKGNMGGSRGGENRQYHGDHYQKRQGEVYQKLMQSEPEEKRELFPARTAPVMAEKATSAPVQVKNSNHSFGKVLSIYSPCYALIESPLGLGLLSLPVAERWLRQAQLAPTEQGLKSQPLLIPLKLSLSKEEAGALNRYSDLLGSFGIEASVSHGKATLCAVSLPLRQQNLPKLIPELLGYLAQQPSASAEQVVTWLARHIGSEYETWNVAQAVQLLADVERLCPQLVKSPPDGLLQLIDLQAVVASLTHEZ

SEQ ID NO: 1546 - protein, 420 aa, Photorhabdus luminescens
MIKKWQISFMIMCWLFIMMSSLVVTTAAAATLSNIHVSNSINESKVTMVFSGGRPNYSFFPLHSPERLVVDIHQSEKIVGLPMNLPEQDLVRKIRSSQAPDRQKKRIVFELNNKVKVNSIVQQLDSEYRVIFTLRASGVPTGKSVFRESSQADTGKLSLTNSKLRTTKQAVLQTTSKGGQRVVVAIDAGHGGQDPGAIGQRGLKEKNVTISVARKLEVLLRNDPMFKPVLTRNGDYFISVAGRSEVARKHSANMLISIHADAAPNRSARGASVWVLSNKRANSELGNWLEQHEKQSELLGGAGNALANGADPYLSQAVLDLQFGHSQRVGYNVAVQVLSELRKVGLLHKRSPEHASLGVLRSPDIPSILVETGFISNSAEEALLGSNDFQDKLASAIHRGLRNYFLANPLQAAPKAAKKZ

SEQ ID NO: 1547 - protein, 386 aa, Photorhabdus luminescens
MTTPLNLNLLAAKIKQWGHSLGFQQVGICDTDLSVEEPKLQEWLDKQYHGEMAWMKRHGMMRARPNELLPGTLRVISVRMNYLPAKASFASTLNDAELGYISRYALGRDYHKLLRQRLKKLGEQIQNYCHDFEYQGVLNFRPFVDSAPVMERPLAAKAGLGWVGKHSLILNREAGSWFFLGELLINLPLPIDPPQEEQCGRCVACMTTCPTGAIIAPYTIDARRCISYLTIELDGIIPEEFRPLMGNRIYGCDDCQIICPWNRFSQLTDEDDFSPRVTLHTPKLLDLFNWSEEKFLRITEGSAIRRIGYLRWLRNIIVALGNAPYQYDIILALQQRLGLNTMLDEHIHWAIEQQIIRRKTNTVSVQTAQQKRLIRAITKGLPRDAZ

SEQ ID NO: 1548 - protein, 404 aa, Photorhabdus luminescens
MSSKNDFKAFSIGNNANIVSQEGYEESRSLKIGFPPDDNITVHLLNKVLRQSSTISSVVANFIATYSGDDVLDNGDIAKLAAQLNGALEQKIATEVPNASLTQKGVTQLTDKTGNSNTLAVTQKLVSDVNDNANNRLAKGQNGADIPDKKAFVENLALEVISTKPVIVGNNTASTIDNFDNIPQNSTYFGYPVGLNGPGVHGPGMRFSGGYGTFKGYELMIHSSYLPKSELYYRTHNGDGNINKWNPWYKVWSTSNAKPDTNGNLKVSSPVVDIHPDGTYQLTCEAEGVTVKRIETGKYRISGCNGFAKDGEWGIHGGTIVPADSNGLNLIWVCELVDSASGDITIECYHRQNRDAPIFAQNKRVKSINDDGEVVYYNDGELCDIPDGRVINVRVQLLEKSQEZ

SEQ ID NO: 1549 - protein, 584 aa, Photorhabdus luminescens
AMSTLLSVKSICYEVSTAMLLNNVFFTIQAGDRIGLIGHNGSGKSTLLKLLTAQLLPSVGTIHYASHCVTAYIEQHLPEDVENQPLIDAVLQKLPVDERVTERWRAEILLTQLGFAETLWAQPASQLSGGQHTRLLLGRALIQEPDLLLLDEPSNHLDLPTLWWLGNFLQSWKGSFILVSHDQTLLDKVTNCTWILRDKTLYFYRLPCSEARQALAEKDMSDEHRHQFEQNEIDRVTSSAKRLANWGRIYDNEDLARKAKQMEKHIERLKDAQTVLTEGYQWQLTLTGQPIQADRVLELDYATITVQGGSIPLFTTGFHQVKSGDRIAIIGANGCGKSTLLRLLWQRYLSAMRHSPDIKFHPAITAGYYDQQLHQLHDNDSLIDALRPFALLTDEQRKMALIGAGFAYSCHQQKVATLSGGERSRLLFVGLSLAKYELIMLDEPTNHLDIEGKEALCEQIATFSGALLVVSHDRWLIENSCQRFWFINNNQLEEYHDVEAIYQQIEQMSQQQSKHKEYGRYASHIADDRLQPSLLLEEQLLERLFYLEEKLEIDRKRKIAHQKPHLQQQWIKEIEKIQAQLNLZ

SEQ ID NO: 1550 - protein, 364 aa, Photorhabdus luminescens
MGFKCGIVGLPNVGKSTLFNALTKAGIEAANFPFCTIEPNTGVVPMPDPRLEQLAEIVKPQRILPTTMEFVDIAGLVKGASKGEGLGNQFLTNIRETEAIGHVVRCFVNDNIIHVSGQVDPAADIEIINTELALSDLDTCERAIHRVQKKAKGGDKEAKAELAALEKCLPHLEQAGMLRALDLSTEEKAAIRYLSFLTLKPTMYIANVNEEGFENNPHLDAVRAIAEKEGSVVVPVCAAVEADIAELEDDEREEFMAELGLEEPGLNRVIRAGYQLLNLQTYFTAGVKEVRAWTIPVGATAPQAAGKIHTDFEKGFIRAQTIPFEDFITYKGEQGAKEAGKMRSEGKDYIVKDGDVMNFLFNVZ

SEQ ID NO: 1551 - protein, 657 aa, Photorhabdus luminescens
NDVFLILGVYMNQKNDFKAFSISNNANVVSQEGYEESQSLKTGFPPDHITIHLLNKALRQSSTITSVVASFIATYSGNDVLDDGDIAKLIVQLNRALEQKIGIAVPSASLTQKGVIQLTDTIGNSNTLAVTQKLVSDVNDNANNRLAKNQNGADIPDKSGFVKNLGLSETVELAKNAVSANGGNYPQYFRFKQVETLPTERNATMLVSLQGARPQNGLVGFTHYNWYDNYIKTGIVRGGNVNTYGYAIDINDKRVFSVSPEGLIEAASANINGNARFKQVETLPTERNATMLVSESGLRSTGTIVSYTLYNWYDNYAKAGIVRGGSANTYGYAIDINDKRVFSVSPAGLMEAASANIRGNAGVFNITHDTGKHAYFQFIEEAKRTAYVGFPSDGSPDFDICNEKKSSKLTIGRELAAYINNNRVFSVSPAGQIDAGSANLKGAGGIFNIIYDTGRHAYFQFVEGGKRTAYIGVPGDGSSDFDICNEKNYGRLTVGEKLKYNGNPIAVFNDNCIADTNGNLKISSPVVSIHPDGTYELTREAEGMTVERIETGKYRISGCNGFAKDGAWGIHGGTIVPADSNGLNLIWVCESVDPSNGNITIECYHRQNKDAPIFAQNKRVKSVNSDGEVIYYNDGELCDIPDGRVINVRVQLPEKSZ

SEQ ID NO: 1552 - protein, 1727 aa, Photorhabdus luminescens
FLMSINRNSRNVINCKINKGVLIVCFLFAALMLLKSYPALSEPVKSLIGIENCQEYPEAVIEHNIDSKKQITEQASNKLHENVTYKEKKRSEPRRCGNFLSKRSVVGKNDSGEKPKILWLDEDSHKDGNHPLPPLILSHGTKILGLLNSDPKKLAQDYIVNKLNSQITSNTQKWLSQFGTAKINLNVDHRGRLDESSVDLLVPFYDDKDHWLVYSQYGYRHKDSRDTVNLGIGTRLFINNWMYGANTFYDNDLTGNNSRFSLGGELWTNYLKMSANAYFRLSDWHNARDLVNYYERPANGYDLIADMYLPSMPSLGAKIKYEQYFGDNVALFGKNKRQKDPYAATIGVNYTPIPLITAGIDYKLGKEGKSDGIFSFNVNYRFGVPLSEQLSPENVSSLRSLAGSRYDLVERNNNIILNYLKKQQHFRLLVPVIEISSYGGEVKPIQIQSDTPFKNVTWDIPELFQKNGGMINIESTHGYTIQLPEYQPDGKNDYTITGTSKDDQLRVQIQAHVLQRNISLSVNTTDPLIADGNAKYVYTATLLGADKKTPIENAKLIWDTDKKDPGLKLKPDSEATDKNGQQTATLTSTTPLSDIQVSVRINGERVTTDKKVSFTESSSSYRVTGVTVGVDKDKKRYNNGADSYTFTATVVDGHGKPVADKLIDIDWQTDSKVDGLKLTKQNNSVSNAQGQVTATLTSTAAVENVQVSAKTASQQTAVNANGKVSFTEFSTSYYVASVTMEVDKDKVRYNNGSDSYTFTATVKDGHGNLVMGQPVNIDWQTDPKADGLKLTKQNNSVSNAQGQVTATLTSTAAVENVQVSAKTASQQTAVNANGKVSFTEFSTSYYVASVTVEVDKDKAHYNNGSDSYTFTATVKDGHGNLVVGQPVNIDWQTNPKADGLKLTKQSNSVSNAQGQVTATLTSTVAVENVQVSAKTASQQTAVNANGKVSFTEFSTSYYVASVTVEVDKDKAHYNNGSDSYTFTATVKDGHGNLVVGQPVNIDWQTDPKADGLKLTKQNNSVSNAQGQVTATLISTAAVKDVQVSAKAVANPSWVEADRKVSFEELSLSYQVTGVTVEVDKDEKRYNNGTDSYTFTATVVDAHGKPVADKPIDIDWQTNPKADGLTLTKQSNPVSNAQGQVTAILTSTAAVKDVQVSAKAAANPSWVDADRKVSFEELSLSYQVTGVTVEVDKDKAHYNNGTDSYTFTATVVDGHGKPVADKPIDIDWQTEPTVEGLKLTKQNNSVSNAQGQVTATLTSTAAVENVQVSAKTASQKTAENANGKVSFTEFSASYYVASVTVEVDKDEKHYNNGTDSYIFTATVKDGHGNLVVGQPVDIDWQTDPKADGLKLTKQNNSVSNAQGQVTATLTSTVVAIDVQVSAKTATQQTPVNVDKKVSFISPDELASLTVSPDHVTEGEGEGHTYTFTATVKDFSGQAKSGITVAWSAANSKGVTITDKNLVTQVVGDGKTDADGKAQYQVYSKSGGFVAVMVTAKVNDSSVGSKNKTVEIKANEQDVTDFFIMDYDTKDGKGPGRSVPKERMNFAWPKMRFEPEYLPGELTIAGYTGVYDSSNRNVVDVDGHYFQVKKAGTATLTTTFTHPESGRYLKYIIPDVKIDHFVIVDSSSTGPGIGSAYSKDRIDTSKPLPSCTRGNRIKESDLGGSIDYLVKDLNLNLIDKGLLGDPRASLNSNGITMGGLQINDESIQVHLLKEKDPNAIFYVVLCEEZ

SEQ ID NO: 1553 - protein, 255 aa, Photorhabdus luminescens
IFARSNDMIQHNNHAGCFSLEAVILAPVMPFWDHGDFCTPLRILLQKMGYQVSIIDTLSLINSSDPDYAINIIESELNQRFFQPYLLIGFAMSGTLAQLLASRLKNLTGVISVSGPGYADSLLTNKLEQLIALLNRNQLDEAISVLHDFVIPEGGTPLPKMPAIPGHLRNTARERMIVGFSLLLQLDARAILCNYKGKFLSIVGGRSQLATECNQVVNTNPTHCFVVVDGAGMRPWEDKPLFINNVINDWLKILZ

SEQ ID NO: 1554 - protein, 501 aa, Photorhabdus luminescens
MSTLTADIVSGITVLEACQVVITVTYSGDDAHKVTETTGIVHSTPKNTYFDKIPRISRDVEKNTCTAKFVVTANSGTGDFTIEFSVDRATDPDAKLEIAFHSIDKNGFSHAAFEPIIIGDSLIKDLSPAADNEEPSDFNGNLLVNLYALSKTNDPLPYFQIPLVTDKLVRIFRYDREKITEEIFPFIQELNNNKYYINTDDKGFVALKIFPSQEEDGNYAVNMFTELQGFSRKSSSNILFITEDIAPALVMPDIEELDGDRLTPSTGYSNTGFHVSIPFYEGVKPRDRIFLMIREDNDETPSASTVITDLSQLDIPSILVPYASIPNIGNNGLYYYVADVIGNITMSSALYFNLTRSTPNIPPEIKRILARPRIFNHKRQKEFSWPGKISFKYILGGGLDAHIAVGKNSGIEVNHVINVRIYVNGIINDNPSSKIYSIDPHTVTADEVAAGETIIPLGQAFFTNIDSYDDGTPGLVYITYSVGKNESKIWFGHIDTVPPRZ

SEQ ID NO: 1555 - protein, 510 aa, Photorhabdus luminescens
AFNFNMRFNMSILTTDIVSGITVLEACPVVITVTYSGDDTHKVTETTDIMYSHPKNTRFDKTPRILRDVENNTCTAKFVVTAGSDAGDFIITFSMDKATDPDAELGIAFHSIDKNDFSHAAFEPIIIGDSLIKDLSPVADDERPSEFNGSLLINIYALSKTNEPLPYFQIPLVIDNLVRIFGYDGENITEEILPFIKEINNNKYYINTDDKGFVALRVFPRKEKIGNYTVDMFIELPGFLKNASSNILFIIEDTAPALPAPDIEELDGNRLTPSVGNSSTGFHVSIPFYKGAKPRDRIFLVIREDNDETLGASTVITDLYQLNNPFILVPYASVPNIGDNELCYYVADVVGNVAMSSALYFNLTGSVPNEPPEVKRTLAVPRIFAHKQQLEFEQSGRINLENILGGGLNAHIAVGQNNGIDVDSVINVRIYVNGIVNDNPSSRLYSLDPHTVTADEVAAGETIIQLGQAPFTKVGSYCDGTPGSVYITYSVDTKESEIWSGHINTAPVGZ

SEQ ID NO: 1556 - protein, 529 aa, Photorhabdus luminescens
ASWCKRIILVRRLDVCYLLMFNFNMRFNMSILTADIVSGITVLEECPVVITVTYSGDESHKVTETTDIVYSDQKDVSFDETPRISRDVKNNICTAKFVVTAHSVANDFTIIFSMDKTTDPDAKLEIAFHPIDKNGFSHAAFEPMIIGDSLVKDLSPVADDEQPSEFNGSLIVNIYALNKTDDPLPYFQIPLVTDRMVRIFGYEEGQLTEEIFPFIQELNNSKYYINTNSEGFAALRAFPSKGEGGNYTVNMFTELQGFSRKSSSNILFITEDIAPTLVMPDIKELDGDRLIPSVGNSSTGFHVSIPFYEGAKPKDRIFLMIREDNDEIQSTSTVITDLNQLDSPFISAPYASIPNIGDNELYYYVADTMGNVAISSSLYFYLTKSVPNQPPEIRRTLAAARIFTHKDQSELKQRGKINLVKILGGGLDARIAVGKKNGIDVDSIINVRIYVNGIVNHSPSSKIYSLEPHTVTAEEVAAGEAIILLGQAPFTGVDSYDDGPGLVYVTYSVNIKNSKIWFGRIDTVPPGQZ

SEQ ID NO: 1557 - protein, 536 aa, Photorhabdus luminescens
SASLWKCINFDRKLDVFYLLMFNFNMRLNMSTLTADIVSGITILEGCPVVITVTYSGDEVHKVTEATDIVYSDQQDVSFDEIPRISRDVKNNIYTAKFVVSAYSDASDFTIMFSMDKATDPDAKLEIEFHSIGKNDFSYEGFTPIIIGDSWVKDFSPAEDNWRPSLFNDRLLINIYALNKKNDPLPYFQIPLVTDKPVRIFGYNRGQIREEILPFISEKDNCQYYINTDSKGFIALIVFPKKSEGNYSVNMLTKLPYLLKSASSNILMITEDIEPTLPAPDIAELNGNKLMPSVGNSNTDFHVIIPFYEGVRPRDRVFLIIREDDDETQGASAVITDLNQLDMSFISVPYANIPNTGNNELYYYVADATGNVAVSSARYFNLTKPVLNVPPEIRRILAVPRIFSHKDQVEFRQSSKINLASILGGGLDAHIAVGEKNGIEINNVINVRIYVNGIINENPFSKIYSLAPHTVTADVMDAGEAIIPLGRAIFTNVNSYRDGTPGWVYITYSVGMECSESTKHSKIWYGRIDTVPPGRZ

SEQ ID NO: 1558 - protein, 442 aa, Photorhabdus luminescens
MITNNDNTPISLSSPELPQAEHDGLIDVSVQQNQDLIIKVPYHEWLRIGDMIVVNVGGIFSRPYYIQNINLDFFTVTIPFSEIPDGCYNVTYTSADDFENENFSKPAVIKIINSPSIKLLPSIYPDSTSGVIHYSSLVQHSGLNVHISYQQMQKGDSVIFHWQGHNFDYDPIARAAWDAQPITVSDEDVKQGYVSLVVPAENVLCLGQEGVGTGYYEVGNNSSAPGSVILSLTDMSSAMISISEGAPMVSNEYPRINPKNLAVVYGPPGKRLSASVESGSIVEGGGAKYQFSPNSFGLAYFHLQSEVAGSFRCTVSAEDGSITPGVSQAVFSEWRDGGNIISAYAFTSEVPADGVSVCSGYVIVDRTVYSGKRLLVRTDGSAIISGYGDNERELQVAISKDGCTTFHITNTKAEKNNVIISLPDTDKSIQFSINFKHFPFVZ

SEQ ID NO: 1559 - protein, 326 aa, Photorhabdus luminescens
ENEMNDEQAPKEAKTLNWLSSEKTETADKPIDIGVSAIQDGYLLHGVNIIFTLDNQSMVFKENNDRKIIKGTGVLGKVSVEIISTDSTPCQGNVYACLEDDTEIEAPPLQVEFTVAPQSVAVLNLDLEKNNAWTKGADENKVVATVYDRLGNGIKNQEITFYADSGATVVPSSGMTDKDGKITASIQSSRAGEVILMAQAGAIEKAIAMCFTYNPYQLKIIEFPAVLYSFSSGIIAGYLYKNGVGEPNVTIGVSMGSYLSLSDQDKHMTTDKNGYFSFRVSSSYSRGYSPHNHVPPMSEFSSVYISCIDGRVYSQAWIELTPGLYZ

SEQ ID NO: 1560 - protein, 316 aa, Photorhabdus luminescens
VPDMKLFAGNAIPELAQRVANRLYTNLGDAAVGRFSDGEVSVQVNENVRGGDIFIIQSTCAPTNDNLMELVVMVDALRRASAGRITAVIPYFGYARQDRRVRSARVPITAKVVADFLSSVGVDRVLTVDLHAEQIQGFFDVPVDNVFGSPILLEDMLQKELENPIVVSPDIGGVVRARAIAKLLNDTDMAIIDKRRPRANVSQVMHIIGDVAGRDCVLVDDMIDTGGTLCKAAEALKERGAKRVFAYATHPIFSGNAVDNIKNSVIDEVVVCDTIPLSAEIKALNKVRTLTLSGMLAEAIRRISNEESISAMFEHZ

SEQ ID NO: 1561 - protein, 297 aa, Photorhabdus luminescens
LDHKIMTFTWPSPAKLNLFLYITGRRADGYHQLQTLFQFLNYGDEITITPRQDNEIRLLTPVEGVEHDNNLIVRAARLLQSYSDKHHAGIAHKGADIHINKRLPMGGGLGGGSSNAATVLIALNYHWQTGFTDETLAALGVSLGADVPIFVKGHAAFAEGIGEILHIAEPEEKWYLVAHPGIEISTLRVFTDPELKRDTPIRPLAALLKAPYLNDCESLVRKRFRKVEQLLSWLLEYAPSRLTGTGACVFGEFESEASARKVLNQAPEWLQGFVARGVNNSPLHNFRSGIPVLLSQZ

SEQ ID NO: 1562 - protein, 209 aa, Photorhabdus luminescens
MKPIQKLSLFRLLPLSCVLLLTACTLTQPGGTGSADSPQWRAHTQQLQQLNQYQTRGSFAYLSNEKKVYARFFWQQYHPERYRLLLTNPLGSTELELIVQPNMTQLTDSQGKKYFSDNPEEIIYQFTNMDIPLDNLRHWITGLPGDAKNFKLDANYLLKTVNYQQNGATWQVNYQSYDTSTTPALPNRLELIQGDRRIKLKMDNWTTKZ

SEQ ID NO: 1563 - protein, 270 aa, Photorhabdus luminescens
VRNEGFKPISNIGLTGMSPDSYIRDIHQSVPEARLVVIAHPHNINADDIYAMKMNGVSLLRLCIKADNPQPCLGLCEIARTTGMAVGINFTRVSQLSISKIIEVAKQCEQAGADIIYLADSNGSLLPEQVAQMFYRLKSATQLQLGFHPHDNLGLATANSIEAMRAGVNFIDSSLSGMGKGAGNLNLESWLSFLNLSQNSKQYDLERVFNQLNELQSHCFFAASRRDLIDIMMGMYNLSVENKTALEEGLRNGINYAFQVVKSLRGATTZ

SEQ ID NO: 1564 - protein, 421 aa, Photorhabdus luminescens
MTLLALGINHKTAPVSLRERVTFSPDTIGEALDNLLQHPLVKGGVVLSTCNRTELYLSVEQQDNLYEQLIGWLCEYHQLNPRELKSSIYWHCDNEAVSHLMRVASGLDSLVLGEPQILGQVKKAFAESQHSHSLSSELERLFQKSFSVAKRIRTETEIGSNAVSVAFAACTLARQIFESLSELNILLVGAGETIELAARHLREHRVHHMMIANRTKEKAQVLADEVQAEVITLPEIDIRLAEADIVISSTASPLPIIGKGMVERALKLRRNQPMLLVDIAVPRDIEPDVEKLNNVYLYSVDDLQAIIQQNLAQRKAAAVQAECIVQQESRYFMDWLRSQSAVNSIREYRNQAEQMRAEMAAKALTAINQGADVEQAINQLTHQLMNRLIHAPTKSLQQAASNGDLERLNLLRDSLGLEHNZ

SEQ ID NO: 1565 - protein, 361 aa, Photorhabdus luminescens
MKPSIVAKLEALQERHEEVLAHLGDADVIADQERFRALSREYAQLTDVTNCFKAWSAVQDDLKAAEIMLDDPEMREMAQEEIRDAKVRNEELEQQLQLLLLPKDPDDERNCFLEVRAGTGGDEAAIFAGDLFRMYSRYAESRRWKVEVISANDGEHGGYKEIIAKVSGEQVYGHLKFESGGHRVQRVPETESQGRIHTSACTVAVLPEIPDAELPEISPSDLRIDTFRSSGAGGQHVNTTDSAIRITHIPTGIVVECQDERSQHKNKAKAMSVLAARIRAAEVRKRQEAEASERRNLLGSGDRSDRNRTYNFPQGRVTDHRINLTLYRLDEVIEGKLDMLVQPIVNEYQADLLSALSEQDZ

SEQ ID NO: 1566 - protein, 283 aa, Photorhabdus luminescens
MDYLSWLKQATMQLSASDSPKRDAEILLGFVTHHSRTYLLAFGETQLAPEQFSQLEALLARRVKGEPIAYITGEREFWSLPLNVSPATLIPRPDTECLVEKALERLSLTPCRILDLGTGTGAIALAIASERPDCRVTGVDINPDAVMLAQGNAEKLKIQNVDFLLSNWFFSLNNQQFGMIVSNPPYIDETDPHLSQGDVRFEPDSALIAAKQGIADLNTIIDLSRHFLLPGGWLLLEHGWKQGNVIRSLFSESGYRQVATFQDYGGNERITQGQWKSDESHSZ

SEQ ID NO: 1567 - protein, 270 aa, Photorhabdus luminescens
MKAIADYEFNNASLSSGILLISRTLRSDFPQHSVEMQLQALIDEARREISPQLTIEERLEKLLRLFYQSWKFGGAGGVYCLSDTLWLDKVLQTRQGSSAVLGVILIHIAQALALPFMPVVFPTQLILRVDYPDNTARFINPLNGEALSEYVLDVWLKGNISQTAKLTADDLQGADNASIIRKVLDTIKAALMDEGQMELALRTSEAVLIFDPDNPYEIRDRGLIYAELDCNHIAVSDLNYFVEHCPEDPVAEMVRMQIYAIQQQCIVLHZ

SEQ ID NO: 1568 - protein, 285 aa, Photorhabdus luminescens
MQQKVVHIGDIKVANDLPFVLFGGMNVLESRDLAMSICEHYVTVTQKLGIPYVFKASFDKANRSSIHSYRGPGLEEGMKIFQELKQTFGVKIITDVHESAQAQPVAEVVDVIQLPAFLARQTDLVEAMARTGAVINVKKPQFISPGQMGNIVDKFKEGGNDQVILCDRGSNFGYDNLVVDMLGFNVMAQATGGHPVIFDVTHSLQCRDPFGAASGGRRAQVAELARAGMAVGIAGLFLEAHPDPANAMCDGPSALPLAKLEPFLSQMKAIDDVVKSFPQLDTSKZ

SEQ ID NO: 1569 - protein, 587 aa, Photorhabdus luminescens
RPYYFFPSIFLVYAQMKTRRMNGIRPFSAVIDACWKESYSFARLTKDIIAGITVGIIAIPLAMALAIGSGVAPQYGLYTAAIAGIVIAITGGSRYSVSGPTAAFVVILYPVSQQFGLSGLLIATLMSGIILLVMGLARFGKLIEYIPLPVTLGFTSGIAITIATMQVKDFFGLQLEHMPENYINKVVALFQALPTLYVSDTLIGLTTLAVLIYWPKLRLKLPGHLPALIAGTAVMGIMNLFDQHVATIGSEFSYILNDGTQGQGIPPILPQFVLPWHLPDMGAHQVDISWSTVSALLPAAFSMAMLGAIESLLCAVVLDGMTGKKHHSNSELIGQGLGNIAAPFFGGITATAAIARSAANIRAGATSPVSAIVHSLLVLLTLLALAPMLSYLPLAAMSALLLMVAWNMSEIHKVIDLIRRAPRDDIIVLVLCMSLTVLFDMVIAITIGIVLASLLFMRRIANMTRISQLPQTNVDKALLVVRINGPLFFAAAERIFTELKEESASYQTILMQWDAVPVLDAGGLHAFQRFIDEVGKDKYIAVCDIPFQPLKTLARARIQLIENHLSFHATLPRAMEELNFNSKTVNZ

SEQ ID NO: 1570 - protein, 231 aa, Photorhabdus luminescens
MHKYNSKILIIGSSSEIGNAICRHAVASGYEVLGTSRKPRNEEIYLDVMSDNSVREAIGIAVEKMKCIDAVIYTPAISLDGLLHAQDIEGWHDVFNVNLFGAARVAKYLLPHFMKNRNGVMQFISSTASLRGETGATAYSCSKAAMNALVKNISNDYGRFNIRAYTVMPGYVDGGMLRHISPEKKMEFARSTALRRMADINEIASFCVGTLSTSTYITGTSLCIDGGLSGZ

SEQ ID NO: 1571 - protein, 584 aa, Photorhabdus luminescens
MIILGISGLPNAQRFLRENNPEVSKLDERICQGVDSAACVIIDGKIVAAAAEERFTGEKGTGRFPANAINYCLAEAGLTQDDIQVIAHGFNYDNYRRFFMSNEALFEEVFSGKTMINALTAEGWQNIESRFQGVDHHLAHAASTFYPSGFPSALCIISDGMGEIESLSVYLAKDQQFQKLYSQPISSSLGIFYSICTRFLGFVFNSDEYKVMGLSAYGNPERYRDIFNELAQFDVESGTIQINWLPPAFDNAEYGFPAAMAQLSDMFGFTPRREDDTLRDVHQDFAAGLQEKFTLLLKQLVTYWLGKTGETSLCLAGGSFLNCKANQVLCQLDGVENVFVQPASGDDGSALGAALFVAGEYHNGADSCFNPYLGPRFSTDEVRNVLFRHGGNAGMKWRYLGLNDDYFATAAKDIAEDKIIAWFHDRMEFGPRALGNRSILALPAGERIKDRINSTVKFREAFRPFAPAILDEDCDTIFETRNLMPTRYMLCTAKVKPEMMKPVSGIVHADGTARIQLVERAFNATFWRLLKEVQKITGYGCLVNTSFNVRGQPLIMSPEIAIETFLKTSLDKLYIEGFVVWKEZ

SEQ ID NO: 1572 - protein, 481 aa, Photorhabdus luminescens
MTKKISFIINGQVEIFPESDDLVQSINFGDNSVYLPILNNSHVKNIIDYNENNKLRLHNIVNFLYTVGQRWKNEEYSRRRTYIRDLKKYMGYSEAMAKLEANWISMILCSKGGLYDVVENELGSRHIMDEWLPQDESYIKAFPKGKSIHLLAGNVPLSGIMSILRAILTKNQCIIKTSSTDPFTANALALSFIDVDPNHPITRSLSVVYWPHQGDTSLAKEIMQHMDVIVAWGGEDAINWAVEHAPPYADVIKFGSKKSFCIIDNPVDLTSAATGAAHDICFYDQRACFSAQNIYYMGNQYEEFKLALIEKLNLYAHILPNAKKDFDEKAAYSLVQKESLFAGLKVEVDVHQRWMIIESNAGVEFNQPLGRCVYLHHVDNIEQVLPYVQKNKTQTISIFPWESAFKYRDALALRGAERIVEAGMNNIFRVGGSHDGMRPLQRLVTYISHERPSHYTAKDVAVEIEQTRFLEEDKFLVFVPZ

SEQ ID NO: 1573 - protein, 308 aa, Photorhabdus luminescens
MENKSKYKTIDHVLCVEGNKKIHVWETLPEENSPKRKNTIIIASGFARRMDHFAGLAEYLSRNGFHVIRYDSLHHVGLSSGTIDEFTMSIGKQSLLAVVDWLNTRKINNRGILASSLSARIVYASLSEINVSFLITAVGVVNLRYTLERALGFDYLSLPINELPNNLDFEGHKLGAEVFARDCLDFGWEDLTSTINSMMYLDIPFIAFTANNDNWVKQDEVITLLSNIRSNRCKIYSLLGSSHDLGENLVVLRNFYQSVTKAAIAMDNDRLDIDVDIIEPSFEHLTIATVNERRMKIEIENQAISLSZ

SEQ ID NO: 1574 - protein, 497 aa, Photorhabdus luminescens
MLMKRLHDIEKEMLPVESYKMLIGGQWVDSVSKATTKSYNPATGELLAEYASGNAEDVDLAVSAAKKAFHAWSQTSAIERQSALLKIADLLEAEQKRFAILESLDTGKPLNESLYMDLPASIDQFRYFAGVIRSHTDEASVLDTNTLSLVIREPIGVVGQVIPWNFPLLMAAWKLAPALAAGNTIVINPATLTSITLLELGRILDKVLPAGVVNIVTGRGSVVGQAILDHEDVEKVAFTGSTKVGYTVAEAAAKKLIPATLELGGKSANIIFPDANMKKAVKYAAKAILLNQGQACESGSRLFLHKDIHDEFLKSLKTEFESIQVGDPLEKETQMGSQVSQEQMEKILEYVEIAKKEGATIFTGGKRITEKGYDEGFFIQPTIITDVTNDMRVAREEIFGPVLAVIPFSEEEDVIRMANDSDYGLAGAVWTQDIDRALRVAKAVRTGRMWINTYHELPAHAPFGGYKKSGIGRETHKMMLDAYTQVKNIYIKTSEEZ

SEQ ID NO: 1575 - protein, 549 aa, Photorhabdus luminescens; identical to SEQ ID NO: 1121

SEQ ID NO: 1576 - protein, 360 aa, Photorhabdus luminescens
MKFGNFLLTYQPPQFSQTEVMKRLVKLGRISEECGFDTVWLLEHHFTEFGLLGNPYVAAAYLLGATKKLNVGTAAIVLPTAHPVRQLEDVNLLDQMSKGRFRFGICRGLYNKDFRVFGTDMNNSRALTECWYGLIKNGMTEGYMEADNEHIKFHKVKVNPTAYSKGGAPVYVVAESASTTEWAAQFGLPMILSWIINTNEKKAQLELYNEVAQEYGHDIHNIDHCLSYITSVNYDSNKAQEICRDFLGHWYDSYVNATTIFDDSDKTRGYDFNKGQWRDFVLKGHRDTNRRIDYSYEINPVGTPQECIDIIQKDIDATGISNICCGFEANGTVDEIIASMKLFQSDVMPFLKEKQRSLLZ

SEQ ID NO: 1577 - protein, 325 aa, Photorhabdus luminescens
MKFGLFFLNFINSTTVQEQSIVRMQEITEYVDKLNFEQILVYENHFSGNGVVGAPLTVSGFLLGLTEKIKIGSLNHIITTHHPVRIAEEACLLDQLSEGRFILGFSDCEKKDEMRLFNRPVEYQQQLFEECYEIINDALTTGYCNPDNDFYSFPKISVNPHAYTQGGPRRYVTATSHHIVEWAAKKGIPLIFKWDDSNDVRYEYAERYKAVADKYGIDLSAIDHQLMVLVNYNEDSHKAKQETRAFIRDYVLEMYPNENLENKLEEIITENAVGDYTECIAAAKLAIEKCGAKSVLLSFEPMNDLMHQKNVINIVNDNIKKYHMZ

SEQ ID NO: 1578 - protein, 371 aa, Photorhabdus luminescens
MTSYVDKQEIIASSEIDDLIFSSDPLAWSYDEQEKIRNKFVLDAFRNHYKHCQEYRHYCQVHKVDDNITEIDDIPVFPTSVFKFTRLLTSQENEIESWFTSSGTSGLKSQVARNRLSIERLLGSVSYGMKYVGSWFDHQIELVNLGPDRFNAHNIWFKYVMSLVELLYPTTFTVMEERIDFVKTLNSLERIKNQGKDICLIGSPYFIYLLCQYMKDKNISFYGDKNLYIITGGGWKSYEKESLKRDDFNHLLFDTFNLNNISQIRDIFNQVELNTCFFEDEMQRKRVPPWVYARALDPETLKPVPDGMPGLMSYMDASSTSYPAFIVTDDVGIMSREYGQYPGVLVEILRRVNTRAQKGCALSLNQAFNSZ

SEQ ID NO: 1579 - protein, 235 aa, Photorhabdus luminescens
IPGSIAKKFSKTSAFGDLIEVCGGWLNTIFIVILLKAKGDNMKKLAVMLALGMISFGAMAVDGYKDAKFGMTEEEFLSKRLCDFEKFEGNSQIEEVSLYSCSDFSFANKKREAMAFFLNGKFKRLEINIGRLVKPVSKSLTKKYGDESSYPSQEEFENALKYNGTMSIGYDNNTVLVDIHIMCGKEGIETSRLIYTSPDVHTIPDLENKIQELRGLKEFQELLELDREKLDEDVZ

SEQ ID NO: 1580 - protein, 314 aa, Photorhabdus luminescens
MEIIFYHPFFDAAQWIQGMQQRLPNINIRQWKRGDNKHADYAMVWAPPYEMLANRSGLKGIFILGAGVEAILKQEQQKPGMLPAGVPLMRLEDAGMGLQMQEYAVAMVLHYLRRMDEYKLQQGQRRWKQLEPYDRKDFVVGVLGAGVLGRRVAQTLVEWGFIVRCWSRTPKQINNVVSFHGEDQLGDFLSGSKVLINLLPDTPKTRGILNLSLFSQLKPKSYLINIARGAHLVEHDLLVAIDKGYIVGASLDVFVEEPLPEMHPFWTHPRITVTPHVAAITIPDIAMDTISENIRRIEKGELSTGVVDIKLGYZ

SEQ ID NO: 1581 - protein, 184 aa, Photorhabdus luminescens
LETEMNEFSIVCRILGTLFNRQPQDPILKPLLTVIVEGKLKQSWPLEQDALLDRLQQNCDLSAMQADYMALFYGDNASVPSRRSDYTGESENDIRQFLIERGMPLSDGPVDQFGSLLLGASWLEDQAAEDEVQGQIMLFDEYLLPWCGQFLGKVEAHAITSFYRTLAMITREALQALREELDSZ

SEQ ID NO: 1582 - protein, 188 aa, Photorhabdus luminescens
MRKFFLGAVLLLVGLISGCDQFKDISISEELINGYLAKHVHYQKQLELHGIANADIELTELSSQIGRTEPNKIALTGRANVNVTSLLGPAKADMKLSLKAQPVFDQEKGAIFLKELEIVDYQITPEKMEKPINALVPYLNKSLSAFFDIHPIYVIKADHSKAEAAAKTLAKRLEVKPGKLVIMLTDKZ

SEQ ID NO: 1583 - protein, 402 aa, Photorhabdus luminescens
MSLVSQARSLGKYFLLFDNLLVVLGFFVVFPLISIHFVEQLGWAALVVGFALGLRQFVQQGLGIFGGAIADRFGAKPMIVTGMLLRALGFAFIALATEPWILWLACILSALGGTLFDPPRTALVIKLTRPHERGRFFSLLLMQDSAGAVIGALIGSWLLQYDFQFVCWTGAGVFVLAAIWNALFLPAYRISTTRTPIWEGMERVIKDRRFFTYVLTLTGYFMLSVQVMLMFPIIVNEIAGTPAAVKWMYAIEATLSLTLLYPIARWSEKRFRLEQRLMAGLFLMSLSMFPVGLIGEINTLFGLICLFYLGTVTAEPARETLSASLADPRARGSYMGFSRLGLALGGALGYTGGGWLYDTGHALNIPQLPWFLLGIIGLITLYALHRQFNQRKIESAMLSGNZ

SEQ ID NO: 1584 - protein, 512 aa, Photorhabdus luminescens
MNLLKSLAAVSSMTMFSRVLGFIRDAIIARIFGAGVAADAFFVAFKLPNLLRRIFAEGAFSQAFVPILAEYKNQQGDEATRTFIAYVSGMLTLILAIVTVLGVLAAPWVIYVTAPGFTDTADKFTLTTNLLRITFPYIFLISLASLAGAILNTWNRFSVPAFAPTLLNISMIVFALFVAPYCNPPVMALGWAVVAGGILQLLYQLPHLKKIGMLVLPRISFRDSGVWRVMRQMGPAILGVSVGQISLIINTIFASFLVSGSVSWMYYADRLMELPSGVLGVALGTILLPSLAKSFSSGNHEEYTKLMDWGLRLCFLLALPCAVALGMLAEPLTVSLFQYGNFTAFDAVMTQKALIAYCFGLMGLIIVKVLAPGFYSRRDIKTPVKIAIVTLILTQLMNLAFVGPLKHAGLALSIGLASCFNASLLYWQLRKKNIFKPLAGWGRFLFKLVVAITVMIAVLAVTLWLMPAWEQGNMATRLLRLMVVVIAGASSYFAALVLMGFRLKDFAHRSFZ

SEQ ID NO: 1585 - protein, 577 aa, Photorhabdus luminescens
VNIQAILSEKVSQALIAAGAPADSEAHIRQSAKAQFGDYQANGVMAAAKKVGMPPRQLAEKVVNLLNLQGIASKVEIAGPGFINIFLDKAWIAANIETALKDEKLGVTPAKPQTIVVDYSAPNVAKQMHVGHLRSTIIGDAAVRTLEFLGHKVIRANHVGDWGTQFGMLIAYLEKVQNENASDMALSDLEAFYREAKKHYDEDEEFAIRARGYVVKLQGGDEYCRTMWRKLVDITMAQNQQTYDRLNVTLTKDSVMGESLYNDLLPSIVADLKQQGLAVESDGATVVYLDEYKNKEGEPMGVIIQKQDGGYLYTTTDIACAKYRYETLHADRILYYIDSRQHQHLMQAWTIVRKAGYVPESVSLEHHMFGMMLGKDSKPFKTRAGGTVRLTDLLDEAIERANTLIREKNPDMPEDELKKVVSAVGIGAVKYADLSKSRTTDYIFDWDNMLAFEGNTAPYMQYAYTRVASIFKRAEIDESSLTLPVILNEDREQTLATRLLQFEETITTVAREGTPHVMCAYLYDLAGLFSCFYEHCQILNAESEELRQSRLKLALLTAKTLKQGLNTLGIETVERMZ

SEQ ID NO: 1586 - protein, 420 aa, Photorhabdus luminescens
LVHDFYFIRNLFRDNIYYIDWLWSMKNKSLLFIVLMAFLSMGGLVSSDIFLPALSKMGNYYHVSESSIQSTITIFLFGIAFSQLIYGPLSDCLGRKTVLISGMIIWLISTIGIFYSTHISELLLLRLFQGIGACAGITLSRAIISDLMEKEEAANLYLIIFPFVGMSPAIAPMIGGMLSEYYGWRSCFLFLTLFITVTLILCLLVLKESLPINKRQKLSIKNVLVSTYQVIINKEFLYYAAIPCFAYTAYFSYLIESPFILTAMGLPEKYVGYTYIMLSLSYVLGNLIAKKLSRRQGVRKTISHGYLIFVVGGIAFTIQMFFSSYPLITSVLTISVLTFGNGFLLPLGTASAIATHSQAAGTASGVMGTLQLGSAGLASLFIGYISHHEPIKVASIITVVSLVGSIIYITGNRGGKENKZ

SEQ ID NO: 1587 - protein, 264 aa, Photorhabdus luminescens
SYNSGKNNINKLSKMRFFMSNSILQALTVLKSKKWVDLTHSFDKDSPHFFMLDSAEFKTLFDYKDGFFTQQFSFPGQYGTHIDAPCHFVPDTRYVDELELKELVLPLIVLDQSERAKQDPNFSLSKEDILKFEEEYGIIEAGTFVALRTDWSKRWSSQKAMDNKDDSGNNQTPGWGIDALKFLFEERHIKAIGHETFDTDAAKDFRKNNALLGEDYVLKQDTYQIELLANLDQVPVRGAVIFNIVAKPKKASGFPVRAFAILPZ

SEQ ID NO: 1588 - protein, 185 aa, Photorhabdus luminescens
MLWKNTSNQFGHLSVLLHWLVALIVYGMFALGLWMVTLGYYDTWYHKAPEIHKSIGMLLFIMMAVRVIWRFVSPPPKPLASYSRLIRVSAVLMHILLYILLFGILISGYLISTADGQPISVFDWFIVPATLIGQGEQADTAGMIHLYLAWAVVILSLLHAVAALKHHFIDRDATLKRILGFRPEZ

SEQ ID NO: 1589 - protein, 188 aa, Photorhabdus luminescens
MTHFSSIVELQDLVAELAIFEQKLVRFKQRLNLNVEQYQADHISLRCHDISVAERWRKGFLQCGSLMSETIINGRPICLFDLEYPIAVLNWQIDCVELPYPGKKTYLHQGWEHVELVLPVAPEILSTAAKALLPQPLPAGFSVKESQPKGEQERLPNPTLAITDGEITVKFHPFTLREIVKSECSATZ

SEQ ID NO: 1590 - protein, 249 aa, Photorhabdus luminescens
MTKLEICCFSVGCALIAQQAGADRIELCASPAEGGLTPSFGTLKQAIEQLTIPVYPIVRPRGGDFCYSHSDFEVMKNDVAQIRDMGFMGVVFGVLDEEGHIDLPRMQQLMALSGDMAVTFHRAFDMCFNPYVALDQLTQLGVKRILTSGQQQNAELGLPLLKELHQASQGPIIMAGAGVRMSNIHKFIDIGLTEVHSSASRIMLSTMTYRKAGVTMSADNEVDEFSHYCVDGGVVEVMKGMLSLTLFEZ

SEQ ID NO: 1591 - protein, 324 aa, Photorhabdus luminescens
MIDFGNFYQLIAKNNLQHWLNCLPAQLQEWQKAALHGNFKSWVKTLENLPEISPTQLDLKNGVIAERDPPLSAGEKICLTNILRIFMPWRKGPFSLYGINIDTEWRSDWKWDRVLPHISPLTGRTILDVGCGSGYHLWRMVGEGAELAVGIDPTQLFLCQFEAVRKLLGNDQRAHLLPLGIEQLPALAAFDTVFSMGVLYHRRSPLDHLWQLKNQLISDGELILESLVVEGDEHTCLIPGERYAQMRNVYFIPSAKMVKIWLEKCGFVDVKIVDQAVTATEEQRRTDWMKTESLSDFLDPTDSNKTIEGYPAPLRAILIARKPZ

SEQ ID NO: 1592 - protein, 253 aa, Photorhabdus luminescens
MSNQDPHHQRDSLFATPIANLGDWRFDERVAEVFPDMIQRSVPGYSNIVSMIGMLAGRFVTSNSQIYDMGCSLGASTLAMRRNIVAENCKIIAVDNSPAMVERCRRHIDAFRSQTPVEVIEADILNIDIQNASMVVLNFTLQFLNPQDRQGLLNRIYQGLRPGGVLVLSEKFSFEDQQIGELLFNMHHDFKRANGYSELEISQKRSMLENVMLTDSVETHKSRLHQSGFNHVEVWFQCFNFGSLLAIKGADEZ

SEQ ID NO: 1593 - protein, 215 aa, Photorhabdus luminescens
LRRLRQGIKFAFMNTTWHQIITGTFGCCFRQHRRFNIQETLIIHETTHKTGDFSPCFQAICHFRSTQINIAIFQTLLFTVRLIAIQRQRFGTVDDIQTFRKNLYFTGSHIFIDLTVRTGAYSTGDLNTEFITQFSSLRKCGLLIRVKKYLNDPFTITHINKNQATQITAAVYPTTKSHLLAFMGQIQLPTIISTHTISFYSAVVLLLRKFWHRSZ

SEQ ID NO: 1594 - protein, 591 aa, Photorhabdus luminescens
MRTDYCGQLNLTHEGQKVTLCGWVNRRRDLGGLIFIDMRDREGIVQVFFDPDQQAAFSQAAELRNEFCIQITGTVRARPDSQINKDMATGEIEVFAESLNIINRSEPLPLDSNQTNSEEQRLKYRYIDLRRPEMANRLKTRAKITSFVRRFMDNQGFLDIETPMLTKATPEGARDYLVPSRVHKGKFYALPQSPQLFKQLLMMSGFDRYYQIVKCFRDEDLRADRQPEFTQIDVETSFMTAEQVREMMEKMIRELWFEIDGVDLGHFPVMTFAEVMRRFGSDKPDLRNPLELVDVADLVKDVEFSVFAEPANDSKGRVAVIRVPGGAELSRKQIDEYGKFVGIYGAKGLAWIKVNARAAGLEGVQSPIAKFLNAEVIEGLLSRTDAQDGDILFFGAGSVKVVTDALGALRLKLGRDLNLTKLDSWRPLWVIDFPMFEDDGEGGLTAMHHPFTSPCNMSAAELAQDPVSAIANAYDMVINGYEVGGGSVRIHRNEMQQAVFRILGINEQEQQEKFGFLLDALKFGTPPHAGLAFGLDRLVMLLTGTDNIRDVIAFPKTTAAACLMTEAPSYANPASLEELSISVVAKKESEZ

SEQ ID NO: 1595 - protein, 248 aa, Photorhabdus luminescens
MAGHSKWANTKHRKAAQDAKRGKIFTKIIRELVTAARLGGGDPASNPRLRAAIDKALSNNMTRDTLNRAIARGVGSDEADNMETIIYEGYGPGGTAVMVECLSDNRNRTVSDVRHAFTKTGGNLGTDGSVAYLFAKKGVISYAPGLDEDAVMEAALEAGADDVETYDDGAIDVYTTPETFGDVKDALDAAGFVAESAEVSMIPSTKAELDAETAPKLLRLIDMLEDSDDVQEVYHNGEISDEIAALLZ

SEQ ID NO: 1596 - protein, 206 aa, Photorhabdus luminescens
VIGRLRGIVLEKQPPLVLLETNGVGYEVHMPMTCFYELPDAGQEAVLFTHFVVREDAQLLYGFNDKQERALFRELIKVNGVGPKLALAILSGMSAQQFVSAIEREAIVSLVKLPGVGKKTAERLVVEMKDRFKGLNGDLFNQSSDINLPATAKQTTSDADSEAEAAAALVSLGYKPQEASRMVSKIAKPGADCETLIREALRAVLZ

SEQ ID NO: 1597 - protein, 484 aa, Photorhabdus luminescens
MRMQSEVILPLLGYLALVFLLSVYAYQRHQKGPFLTEYFLGNRSMGGFVLAMTITATYISASSFIGGPGAAYKYGLGWVLLSLIQLPAIWLSLGVLGKKFAILARRYNAVTLNDMLYARYGSRFLVWFASLSLLVAFVGAMTVQFIGGARLLETAAGIPYGTGLMIFGISIALYTAFGGFRASVLNDALQGLVMLLGTVLLLVAIIYKAGGLSEAVTTLRTINPELVSAQGADHILNGPFMASFWVLVCFGVIGLPHTAVRCISYRDSKAVHRGIIIGTIVMTILMFGMHLAGALGRAIIPDLTIPDQVIPTLMITVLPPFAAGIFLAAPMAAIMSTINAQLLQSSATIVKDLYLNLFPQQIVQEKKLARISSFSTLILGLLLLLAAWHPPEMIIWLNLLAFGGLQAVFLWPLVLGLYWEKANAYGAISSMITGATSYTLLASFNIHLLGFHPIVPSLLLSLLAFWMGNAIGQRLPPKAVRPHZ

SEQ ID NO: 1598 - protein, 336 aa, Photorhabdus luminescens
MIEADRLVSAEVLQDDEAIDRAIRPKLLSEYVGQPQVCEQMEIFIQAARQRGDALDHLLIFGPPGLGKTTLANIVANEMGVNLRTTSGPVLEKAGDLAAMLTNLEPHDVLFIDEIHRLSPVVEEILYPAMEDYQLDIMIGEGPAARSIKIDLPPFTLIGATTRAGSLTSPLRDRFGIVQRLEFYNVDDLQSIVSRSARFMGVEITDDGARQVAMRSRGTPRITNRLLRRVRDFAQVKGNGAIDGNIATRALDMLSVDAAGFDYLDRKLLIAIIDKFMGGPVGVDNLAAAIGEERETIEDVLEPFLIQQGFIQRTSRGRIATEHAYRHFGMVRNQEZ

SEQ ID NO: 1599 - protein, 262 aa, Photorhabdus luminescens
MIELLFPGWLAGVLLAIAAGPLGSFVVWRRMSYFGDTLAHASLLGVAFGLLLNISPFYTIIAVTLILAMMLVWLEKRPQLAIDTLLGIMAHSALSLGLVVVSLMSNVRVDLMAYLFGDLLSVTYEDIWLIAIGVTIVTTLLFWRWNALLSITVSQEMAFVDGIKIQRLRVLLMLVTALTIGLAMKFVGALIITSLLIIPAATARRFARTPEQMAGIAIAVGMLAVTGGLAFSAIYDTPAGPSVVLCAAVMFIASLISKAKNZ

SEQ ID NO: 1600 - protein, 266 aa, Photorhabdus luminescens
MFTQDIFNMSTLITLKNVAVNFGDRRVLNNISLHLQRGNILTLLGPNGAGKSTLVRVVLGLIEPSSGTIEQTDGLKIGYVPQKLHLDPTLPLTVKRFMMLKPGVKSGDILPALERVNAAHLLQQPMQKLSGGESQRVLLARALLNQPQLLVLDEPTQGVDVNGQLALYDLINQIRTELHCAVLMVSHDLHLVMAKTDEVLCLNQHICCSGTPEVVSTHPEFIAMFGHHGAEQLAIYRHQHDHHQHNHHHDLKGKIILENNRECHSZ

SEQ ID NO: 1601 - protein, 282 aa, Photorhabdus luminescens
VTSIRPLGFIAAAITEGVTDTQVLLPDGASPHDYALRPSDLKKVNRADLVVWVGPEMEIFLSKPLAKVPQNKQLVLAQLPTIRPLLLKNNEDLPEPDQHKHEDDHEHHSHGEYNMHIWLSPEIAKQVAQGIHDQLQARYPHKKAALDVNLRKFNAQLAQTDKNIANILKLVRGKGYFVFHDAYGYFEQHYGLTPLGHFTINPEIQPGAQKLHHIRTQLVEQKATCIFAEPQFRPTVINAVAKDTGVRMGTLDPLGGRIVLDKDSYMKFITQLSEQYAGCLNZ

SEQ ID NO: 1602 - protein, 436 aa, Photorhabdus luminescens
VQQIVKTIVLVYKELPRPHKIMLGSLTVATLVVTMWQPIAYHHEQEETTVGSIAINLPVDSDEIIADSSEQLPDEGIPDEETNSEVTAQTPHEYIVSDGDTLSNILTQFGIDSSDVALLASQHKALRGLNIGQPLSWTVNEAGDLQTLTWGVSRREMRIYTREGDLFKETKEFQKGEWKNSVVVGVVDSNFTSSALNAGLTSSEAREVTKALQWQIDLRKLHEGDRFSVLLSREMLDGHSEQSQLLGVRLNSGGKDYYAIRAEDGRFYDRQGSGLERGFLRFPTAKQFRVSSQFNPRRVNPVTGRVAPHKGVDFAMPVGTPVLAVGDGEVIVSKYNGAAGNFIAIRHGRQYTTRYMHLRKLLVKSGQKVKRGDRIALSGSTGRSTGPHLHYEFWINQQVVNPLTAKLPRSGGLSGKERTEFLAMVKEVTPQLLLDZ

SEQ ID NO: 1603 - protein, 323 aa, Photorhabdus luminescens
MHKETDTDSKAGYVPTFHKSYLHPRYWGLWLGIGVLAGLAYLPVKVRDPLLAKIGWLAGKLAKGARRRARINLCYCMPELTEQQREALIDEMFSTAPQPFVMLAELCLRGTKSTLSRTQWHGEEIILQLKAQGKNVIFMVPHGWAVDIPAILLSVGGQKISAMFHHQKNPVADYLWNKVRHHFGGRLHSRDAGIKPFVAAVRQGFWGYYLPDQDHGEEHSEFVDFFATYKATLPAIGRLMKVCRAAIVPLFPVYNYRTHQLDIYIRPPMDDIDGKDDAFIARRMNEELEQLVRPNPEQYTWILKLLKTRKAGDIGPYGREDLZ

SEQ ID NO: 1604 - protein, 481 aa, Photorhabdus luminescens
MSRRLRRTKIVTTLGPATDRDNNLEKIIAAGANVVRLNFSHGTAEDHLQRASKVREIAARLGCHVAILGDLQGPKIRVSTFKEGKIFLNIGDKFLLDANLGKGEGDKEKVGIDYKGLPTDVVPGDILLLDDGRVQLKVLDVQGMKVFTEVTVGGPLSNNKGINKLGGGLSAEALTEKDKEDIITAARIGVDYLAVSFPRTGEDLNYARRLARDAGCETQIVAKVERAEAVSSDKTIDEIILASDVVMVARGDLGVEIGDPELVGVQKKLIRRARQLNRVVITATQMMESMITNPMPTRAEVMDVANAVLDGTDAVMLSAETAAGQYPAETVAAMARVCLGAEKMPGLNVSKHRLDTIFDSIEEAIAMSTMYAANHLNGVKAIIAMTESGRTTRIMSRISSGLPIFSMSRHEKTLNQTALYRGVTPVYCSSHTDGITAANEAVNRLRDKGYLVSGDLVLVTQGDQMGTIGSTNTCRILEVEZ

SEQ ID NO: 1605 - protein, 354 aa, Photorhabdus luminescens
FNILIKKSNYLITGENMSKKNDFKAFSISSNANVISQERYEQDQGLMTGFPPKNITTHLLNKVLRQSSTISSVIADFIATQSGNDVLDDGDIAKLITQLNRALEQKITTKVPSASLTQQGVIQLTDQTGESNALAATQKLVSDVNQNANNRLEKNQNGADIPDKNTFLKNLGLIETIINTQYPVGIVIWFAQNKNPNVLFPGTTWEYIGENKTIRLASANGSDILSTGGNDLISLTAAQMPAHNHTFFGTTSTFDYGTKTTNIAGEHYHDSGWGETTGGRYGHFDGSKNNQGSKSTDWNNAKFNTSTNGAHSHTVSIGAHNHTISGNTGDSGGNAAISITNSYIKLMGWYRKAZ

SEQ ID NO: 1606 - protein, 304 aa, Photorhabdus luminescens
GKYMNLKNDFKAFSIGNNANIVSQEAYEESRSLKTGFPPSDITIHVLNKVLRQSSTISSVIANFITTQSGSDILDDGDIAKLITQLNSALEQKITTTVPNASLTQQGIIQLTDKTGNSNTLAATQKLVSDINDNANNRLAKDQNGADIPDKNAFVRNLSLFEKLIPVGVPLPWPTTTPPEGWAQCNGAPFDKTKYPKLAQAYPNGALPDLRGEFIRGLDNGRGIDNGRNILSFQYDAFKRHNHSIYTTDSPSSTRANTDPVRGSLHGSISDRGDSGENKTIGMNGDNETRPRNVAFNYIIRTAZ

SEQ ID NO: 1607 - protein, 290 aa, Photorhabdus luminescens
LRFMNTLERVQNSIEFLSKSEKKVAQTILASPQTAIHTSIATLAKMAEVSEPTVNRFCRRLDTKGFPDFKLHLAQSLANGTPYVNRNVEESDTVSAYTNKIFESVMATLDTVKNNLDITAINRAVDLLTQARKISFFGLGASAAVAHDAMNKFFRFNIPVIYFDDIVMQRMSCINSAEGDVVVLISHTGRTKSLVEAAQLARENDATVIAITSQDSPLAHEATLAILLDVPEDTDIYMPMVSRIAQLTVIDVLATGFTLRRGSKFRDNLKRVKEALRNSRFDKIDFPPTZ

SEQ ID NO: 1608 - protein, 297 aa, Photorhabdus luminescens
MPWIQLRLNTTGQLAESLGDALMENGAVSVTFQDSHDNPVFEPLPGETRLWGDTDVIGLYDAETDMKAVISQLEQVPELGERFIHKIEQLEDKDWEREWMDNFHPMRFGNRLWICPSWRDVPDPDAVNVMLDPGLAFGTGTHPTTSLCLQWLDSLNLEGKTVIDFGCGSGILAIAALKLGATHAIGIDIDPQAIQASRDNAERNGVLEHLTLYLAKNTPTDLESDVVIANILAGPLRELAPVIGALPKPGGLLGLSGILTNQAESVIQAYTDKFVIDPVAEREEWCRISGVKIATNZ

SEQ ID NO: 1609 - protein, 212 aa, Photorhabdus luminescens
LLIRLRKQVQCRLFEINYHLGTFRWQTFTGSQVERNPGPTPVINIDTDRDKSFRPAGLVCPLFFQIPRYLMPLNKTSSVLTSYRLLPHIRMINTAQRTQYFYFFITDTVCRQICRRRHSNHGQYLQQVILNHIAHLPSLVKITPTAFNTDFFSYCNLYMINCPVIPIIHKQGIGKPQRQQIQYGFFTQIMIDAINLTLIEIFSYFIIDGFGZ

SEQ ID NO: 1610 - protein, 492 aa, Photorhabdus luminescens
MAVTSTAQACDLVIFGAKGDLARRKLLPSLYQLEKAGYIHPETRIIGVGRADWDKKAYTKVVEEALNTFLPEKLDSELWKILSERLAFCNLDVNQKEDFAKLKAILKQDNRPAIHYFAMPPSTFGSVCHGLGLAGLNKEPNRVVMEKPLGTDLESSKAINDEVAKYFNERQVYRIDHYLGKETVLNLLALRFANSLFVNNWDNRTIDHVQITVAEEVGIEGRWGYFDQAGQMRDMIQNHLLQILTMIAMSPPADLTTDRIRDEKVKVLRSLRCIDHTNVREKTVRGQYTAGFVQGHKVPGYLEEEGANQSSRTETFVSIRVDIDDWRWAGVPFYLRTGKRLPTKCSEVVVYFKKPALNLFSESYQQLPQNKLTIRLQPDEGIDIEVLNKAPGLEHKHRLQTTKLDLSFSETFNHIPLADAYERLLLEAMRGIQALFVRRDEVEEAWKWVDSIMNAWAADNDAPKPYQAGTWGPVASVAMITRDGRSWNEFEZ

SEQ ID NO: 1611 - protein, 641 aa, Photorhabdus luminescens
VSDDFAKNGALAKAITGFKPRDAQREMAVAIECAIKNHQQLVVEAGTGTGKTFAYLAPALRSGQKVIISTGSKALQDQLYNRDLPTVAEAINFTGKLALLKGRANYLCLERLEQHSFGGGQLEAEILSDIVRLRGWSSQTEEGDISTCHQVAEDSQVWPLVTSTNDNCLGSDCPRYQECFVLKARRRAMEADVIVVNHHLFMADMVVKETGFGELIPQAEVKIFDEAHQIPDIASQYFGQQLSSRQLMDLSRDITMAYRTEVRDQVQLQKSADRLSQSTQDFRLALGENGYRGNLRELLQNPQVQRALVLLDDALELCYDVMKLSLGRSVMLDAAFERATIYRNRLKRLKEVTIPGYSYWFESYGRHFLLALTPLSVADKFSEIINEQSGCWVFTSATLSVNEQLSHFTERLGLKQAKMLLLPSPFDYQSQTLLCVPRHLPSPNQPGSAKWLAEMLKPLIEANKGRCFFLCTSHQMMRSLAEAFRANMTLPVLVQGETSKGQLLSQFIAAGNALLVATSSFWEGVDVRGEALSCVIIDKLPFTAPDDPLLKARIEDCQLRGGDAFNEVQLPDAVISLKQGVGRLIRDIDDYGVVVICDNRLVMRPYGEVFLNSLPPSPRTRDLTKAVAFLQARQSPNIKDZ

SEQ ID NO: 1612 - protein, 232 aa, Photorhabdus luminescens
MPVRILAIDTATEACSVALWNDGAVLAQFEISPREHTQRILPMVQSVLAEAGMSLQQLDALAFGRGPGSFTGVRIGVGIAQGLSLGAELPVIGVSTLNAMAQGVFRLLGATQVLTAIDARMGEVYWGQYIRNQQGEWQGRETEAVLKPEQVQAFMASLSGDWVVAGTGWQAYPQLMASHLTLTDSSITLPHAEDMLPLAIQMWQNGEVTAVEHAEPVYLRNEVTWKKLPGRZ

SEQ ID NO: 1613 - protein, 205 aa, Photorhabdus luminescens
SYFKHHFQEKVVMLRVINYRTSVKALILLGVVMLTGCITVPDSVKGTSPTPVQDLLSVKSTPELFIGQEGRFGGKVLGVVNENHRTRLEISSLPLASDASPELDEPSLGRIYVYVNDFLDPADFKGNYVTVVGPIVGLKKGKIGCADYDYVVINVMGYQRWKVVQRVLMPYGPGPWNYYGYPYYSGWGWNWYSDPTPVETILTRZ

SEQ ID NO: 1614 - protein, 561 aa, Photorhabdus luminescens
LEKVWLKHYPADVPAEIDPDRYASLVEMFENAVAHYADQPAFINMGEIMTFRKLEERSRAFAAYLQNGLGLSKGDRVALMMPNLLQYPVALFGVLRAGMIVVNVNPLYTPRELEHQLNDSGTSAIVIVSNFAHTLEKIVFNTKVKHVILTRMGDQLSRPKGTLVDFAVKYIKRLVPKYNLPDAISFRCAIQKGYRMQYVKPEINGNDLAFLQYTGGTTGVAKGAMLTHRNILANLEQAKAVYSPLLRVGQELIVTALPLYHIFALMVNCLLLIYLGGCNLLITNPRDITGTAKELGRYPFTSVTGVNTLFNAWLNNEEFKKLDFSTLRLVVGGGMPVQKAVAEKWAKVTGTNLLEGYGLTECSPLVSCNPYNSKHYTGSIGFPVSSTEIKLVDDDGNEVEMGQQGELWIRGPQVMAGYWNRPDATEEVLKDGWVATGDIANVNEQGSIHIVDRKKDMILVSGFNVYPNEVEDVVSAHPKVLESAAIGVSSESSGETVKVFVVRIDPGLTEDELKTHCRRYLTGYKVPKIIEFRDELPKSNVGKILRRELRDEEEKVRNVAZ

SEQ ID NO: 1615 - protein, 376 aa, Photorhabdus luminescens
LNYQLITTDAQLQQVCEGAKKYSKVALDTEFVRTRTYYPQLGLIQLYDGEQLSLIDPLNITNWQPFRELITHPQILKLLHAGSEDLEVFLNAFQCLPEPMIDTQVLAAFIGHPLSCGFAALVAEYIHVELDKSESRTDWLARPLSEKQCEYAAADVYYLLPLADILMTATAQAGYMEAATGECRLISRRRKEILEPESAYKQIGNICQLRPQQLACLKKLAAWRLSQARERDLAVNFVIREENLWQVARYMPTSLAELDALGLSGQEIRCHGRRLLAMVAESGNIPESECPPPMTNLIDQPGYRKAFKDIKALIHQVSEQHRFNSELLASRRQINQLLSVHWNLKQLNDKPELLSGWRGELLAEPVAEILANYPDZ

SEQ ID NO: 1616 - protein, 271 aa, Photorhabdus luminescens
MARIIVVTSGKGGVGKTTSSAAIATGLAQRGKKTVVIDFDIGLRNLDLIMGCERRVVYDFVNVIQGDVSLNQALIKDKRTENLYILPASQTRDKDALTSEGVEKVLVDLDKQGFDFIICDSPAGIESGALIALYFADEAIITTNPEVSSVRDSDRILGILASKSRRAERGEDPIKEHLLLTRYNPGRVSRGDMLSMEDVLEILCIPLIGVIPEDQSVLRSSNQGEPVILDTESDAGKAYTDTVERLLGEERPFRFIEEEKKGFLKRLFGGZ

SEQ ID NO: 1617 - protein, 228 aa, Photorhabdus luminescens
MSQSPIELKGSNFTLSVVHLHNDQPEIILQALQEKVEQAPDFLKNAPVVINISALPADADLKALHHAIDSAGFRIVGMSGCRDEQQRRAVIKASLPLLSEGKKQKTSAKEDKPAEPAIKKTRVINLPVRSGQRIYAQGSDLIVTSNVSAGAELIADGNIHIYGMMRGRALAGASGDQECLVFCTHLNAELISIAGQYWLGDKIPTELAGKAAKLSLVNNELTIEPLIZ

SEQ ID NO: 1618 - protein, 219 aa, Photorhabdus luminescens
MYQHRDWQGALLDLPVNKVVCVGSNYAKHIKEMGSKPAEEPVVFIKPETALCDIHQPIAIPKDFGVVHHEVELAVLIGTPLKQANEERVGAAIAGLAVALDLTLRDLQSKFKQAGQPWEKSKAFDGSCPISGFIRISHFGDPQNVQFSLTVNNELRQNGNSNDMLTPIVPLISHMSHFFTLRPGDVILTGTPEGVGALKPGDVLKVTLNDNSLTTRVIZ

SEQ ID NO: 1619 - protein, 329 aa, Photorhabdus luminescens
MATLSSSMRIGQYQLKNCLIAAPMAGITDRPFRSLCYKMGAGMTVSEMLSSNPQVWKTDKSRLRMVHSDEPGIRSVQIAGSDPDEMAAAAKINVANGAQIIDINMGCPAKKVNRKLAGSALLRYPELVEKILSAVVNAVDVPVTLKIRTGWSPEERNCVKIAQLAEHCGIQALAIHGRTRSCLFNGEAEYDNIRTVKQTVAIPVIANGDITDPLKARAVLEYTGADALMIGRAAQGRPWIFREIQHYLATGELLSPMPIGEVQHLMNEHIQELHDFYGPSKGARIARKHVSWYLREHAPDDQFRRTFNTIEDASEQLEVLGAYFENFAZ

SEQ ID NO: 1620 - protein, 215 aa, Photorhabdus luminescens
SMPIHVGNIEKITNDFIQLSELEFNRVLYDALDSSGTNIVHDVDELIFPPGYRLIRVDNRLDLDDIDEPYFELALLSDETKEVVYYNKVIILSDLVLNCRLASQILVWRTRKPQHKAALSDLAAKIFFHYLIKAYDVVASNMSQIIEGTSFWQARMYEALQFGLYVYGYDVMTCELRNILAEDDVSKEQSWLWGHAEYYMDRLAIISRIKLPNKZ

SEQ ID NO: 1621 - protein, 208 aa, Photorhabdus luminescens
FMSNIALTDIQFINLMNEMRQHARHMLSGSKTEPFMPSTPELQAYANMLGEQYESIDVTENKEVDGIINQLKDSVKSGANSTVNVSKTSVTNSTQKYQEAIATDPDNADQDWIDNMNKSRQRTKDENNRQIDTSYDKAIQFGLQFPNARAAIQSFMEKTNAFFSSLFGRLSNFILDAARQLSEWISRAWESIKSFYDKINVWISGALZ

SEQ ID NO: 1622 - protein, 335 aa, Photorhabdus luminescens
MKLVVYSTKQYDHKHLEQVNKKLGFGYDFEFFDFPLSSKTAKNAIGADAVCIFVNDNADRKVLEELAEMNIKILALRCAGFNNVDLDAAEELGIQVVRVPAYSPEAVAEHTVGLMLCLNRRIHRAYQRTRDANFSLEGLIGFNMHSRTAGIIGTGKIGIATLRILNGFGMRLLAHDPYPNQAVLNLGAQYVDLDTLYAQSDVISLHCPLTPENHHLLNEVAFSKMKNGVMIINTSRGALIDSVAAINALKQQKIGALGMDVYENERDLFFEDKSNDVIQDDIFRRLSSCHNVLFTGHQAFLTEEALTSISETTLRNIQQLINGKNCPNIVSKYPZ

SEQ ID NO: 1623 - protein, 265 aa, Photorhabdus luminescens
MAKNDFKAFAIGENANTLSQEEYESSDFIGEGFKSGIARSERLNKVWRQSSVIAAVIGKYIAEKTGEDVMDDGDLEKLVAQLDLALKHKITTEIPAASLTQKGISQLNSATNSDREDQAATPKAVHDVRKIAESKLSGVSDASLTQKGIVQLSSATNSTNETLAATPKAVKGAYDFANTANVAAKNAHDEANRATDNANSRLAKNQNGADIPNKSEFIKNLGLTETVELAKSAVPNSRKINGKALSGDVSLNAGDVGALPIRVHZ

SEQ ID NO: 1624 - protein, 400 aa, Photorhabdus luminescens
LLMYESIINTMLPAIDKNGINAPDYQTILNSWKTIFRDIYGDDIYIESDSKDGVFLSLIAYVIHGCNNATIASYNSFSPTTAVGEGLSRNVKINGITRKSSSNSTVDVLVTGRAGTVIRNASVRDDAGNAWSLPDEVIIDTHGQAIVTAICQKAGAIGALPHTVNQIATPTLGWQTVTNPVAATLGRGIETDVELRIRQEVSVALPSRTIIDGLMGAIANLHGVSRYRGYDNDSDKTDENGIPAHSISLVIDGGDSKEIARTILVKKTPGIPTFGTTSETITDDYGNKKTINFYRPTLVPIYVEIHIKPFIGYTSDIGNNIRNEISNYIKSLYIGDGVYVTRLFVPANLCNKNGGQTYEVLSVIVGKSASTTGTANIDIAFNEAPTCSPENIKIVTVLEZ

SEQ ID NO: 1625 - protein, 256 aa, Photorhabdus luminescens
GRERMINTDERLNRPEAVFFAMQEVISAGLYVSLPCIIQSFNADAVTITAQPAIRWKIRQRDGELESVSLPLLVDVPVIFPRGGGVTLTFPVRAGDECLVVFADRCIDYWWQSGGVQEPVDPRQHNLSDGFALIGPQSQQQKIANISTHTAQLRSDDGAAYIELDPSSHNVTIITPAKLIATANGGTEITSPDIILNGNVTINGNLSQGMGAGGGTATLQGPVTVSHDVTAAGISLKNHVHSGVQSGGGKTGKPQZ

SEQ ID NO: 1626 - protein, 320 aa, Photorhabdus luminescens
IMSKQWIRECHLIVVDKDGEKVNLSDLKITFNISRTESSNPASGIFTLYNLNNETSNKLRKNEFKKIKFVAGYKENSGQIFSGQIQYTYVKRDNATDTCVVIHAADGDEAHNYATVNTTIAAGYSQADLDHLLMRDIAKYGITAGLRPEFSKSASPRGKVLFGMHRNEVSNLAKQCDANWRYEDNKLHIVPKNKYLTEAIVLTSKTGLIGMPEQTIGSGINVTCLINPNIRPGTLIRLDNRSIKPVDPATKQAAQSGDHKDAKAQPATLDADGDYIVFNVEYSGDTRETEWYMAIMCIAKSDHTLLNQSTHNKDKAESEZ

SEQ ID NO: 1627 - protein, 594 aa, Photorhabdus luminescens
RGGEMSNDVETTKDFLISLRFDVDEVEQRKFMAVITEVTSGILKMRAEIENATSVVASFITQIADGLDKLYGKLQETDAVVEKVKSINEESVRRAVGGVERFLPSINAQSHDTNGRHFNTASLVASMNEQLLKATTDCANQNTSILDSDDIFNAIEELVKWLDKGEISAKGLLATLNELWKFTGRKIVLGVLFDFNSRLNALQEEAKKNHETVAETLSRRKREYDKNKKPLITYDQLDNWMSTHGIYLASDLTPFFSKDKYEKYQEQIDGKKTIIHKQYSQKVADISSKVSERSSKTKKKRKTKRLNKDHLKTGIVEHHDAPKELNTPVNQPTNIFNSELTAAKLKKLKSSRGVRNNNPLNMNFVHQTGAVLEDNPKPRFAQYPDAYSGLRATAHQLTRYFRGKTTGKKLQTIASIVPTWAPKKDHNKTKQYIANVSKMMGVSKDTFLDLTDPDVMQRLIDSMMIEESGGNPYSPEFIRKAIMAELQPANKAPKQAGHLNHVAHSLQNISIDHRMINGAVTNINGMMNHQGLTPFLLHRAPISAGNNIPGIGEVNYHIEVNGVESPREAARLTGETVERTHSMLLRNMQTQVKZ

SEQ ID NO: 1628 - protein, 490 aa, Photorhabdus luminescens
MQGLPVSNIINVTLNMAPHAAQSRNFGALLIIGASNVINPHERLRRYSDIDGVGADFGLSSPEYQAAALYYSQSPRPVDLYIGRWAKDNVVSSLQGAVLTKQQQMMSKFIAVTDGSFKLTINGKETVYSGVDLSKEANLNGVAQRIADKLKDCSVAYDSSSSRFAIMPNSVDAVGYVSPATTGTYIGDLLKLDEISGATAIESTKAETIAEAVAALGSVSSGWYGLVIADDSLTDKDILSVADYIESASVPRIYGHTAQKADVLDADVKTDIGSKLKERNYQRTLWQYSTGKSYTVASLLGRMFTVNFNGNNTTITLKFKQEPAVTAENLTATQANVLKRMNGNVFVKYSNDTAIIQEGVMVNGDFIDERHGLDWLQNYVQNNLYNLLYTSTSKIPQTDEGVTRLITNVEQSLAQAATNGLIAHGVWGGDPIGALDTGATLTKGYYVYAPPIATQAQADREARKAPVIQCAIKLAGAVHYADVIINVNRZ

SEQ ID NO: 1629 - protein, 388 aa, Photorhabdus luminescens
MQRKLGLTLATALMMFPQIVETIYSPALTNIAKEFKVSAEQAAQTLSLYFFAFAIGVVVWGRMCDLIGRRPTILSGLLLYSGASLMALFSVQFELLLAARMLSAFGAAVGSVGTQTIMRDSYQGSELARVFSIMGVALAVSPAVGMVSGSILVYFWGYKGVFSGLSLLAVLLSGWSAICLPETRPVSMVTISLIDTLIIMLKDVAIWCNALLIAFFNLCLFSYYQLAPFDFERLGLSSEMFGYTGLLLALGAGIGAFLNRFLLNKRWHSSNLMLLASIITLIGGGMIMVLEDTWLFILPMVLIVVSYGIAVPNILASALINYTDRLGTAGALLGLLYYLMLGIGLALAGWSQHLGVVLMCCGCFILLLVIINFFMLIRTENNISVTEZ

SEQ ID NO: 1630 - protein, 214 aa, Photorhabdus luminescens
INHNSVLGAKPSAKLGLPKHRVSYCCLMEVFLMSNGSDKAGWLTPVTLGPEYDDELEHILSRWLGGVSGLPDDKVHSQWTSAQLPQLPADDDGCDFVITDFISDASPAFENQTDEGTKLWRHEEIVCLISFYGPNSQRYGACFRDGVAVSQNNDELERFGLSVDKLSRLTSLPELINNQRGRRYDMTITLRRKVVREYGVKSLVEAPVKFLGDZ

SEQ ID NO: 1631 - protein, 468 aa, Photorhabdus luminescens
MYSIFRNELHELGMKYLTELKKYLSGEINISTLEKIQYEKLKEVINYTKNGSAFYQDRLDAINPNDDESLSSLIEKLPFTTKSDLSKAGNTISSDSLSNAWIYYETTGTTGPSTPCPRNEIDSLVNNSFLTLQYESIFNQEGKQHIIGVMGPTELHSTGDTFEDVFRSLGHTVIKMWPRSPVVGMHRVLRLIQDLKITALVCTPAVAAELLKYCRNNACDAKELGIEIILVLGELITPNRLRNLSRNWGAKIYNCMYASQETSILAACNNTNKLITIPYNNYYELICPFTQQKLNVGDNHVAGELVITHLYKGNKPLIRYKTGDMVRCKAIGLNQWEIEPIGRVKDVLVLNNANVYAFDIENAIFEELEYCFEYFIEINNTAGTDKLKITLEPSDELNDASLMSKIKQKMESKFNMNVDIHVGDVGGLIGTAAMVSWKAARIHDLRDDTNNIERNSALEIMNKRANKZ

SEQ ID NO: 1632 - protein, 316 aa, Photorhabdus luminescens
MTNNIVSPVNKDWIVFLDGEYLNFSNATFLANTQALNYGTGTFEGIRAYWDQDNNQLNLFRVHEHYERLIQSAKTLKIELPYTSQELTDITKNIIIKNGFKQDIYIRPLVLKKSLMPGEKFGVKLSGVNSTLCINALPMGAYAKKAEFTCLISKWRRVSNAAIPSSAKITGTYVNSALAHEDAKENGFDDAIMLNEQGMCAEASTSNVFIVKDNCVITPSLSAGILNGITRQSVFDICQFRNIPCIESEIQQKDLYEADGCFLTGTGLEISIVSQIDDVSYRQKEDSIANVIAQDYQEIIRGRVDKFSHWLNPVYZ

SEQ ID NO: 1633 - protein, 323 aa, Photorhabdus luminescens
LILKGINMLYVDKETVARYLTMELSLKLSEIAFKLQSERKVEQPLRNIVKGEDGLMGTMPIYIKEGPYKGFGLKSVVVRFQSNSDKPSHIGSVLVYDEPGVSGIAAVDAGAITEIRTAAASAYATHLLAAKDASRLAILGTGLQAKAHLQAMLSVRPIKEITLWGRNAERCREFAARCDKTLNLPISIKASPAEAVLNSDIICTTTASRDPILNRKALPVKCHVNAIGASALGFQELSEDMYSNTTLFTDSNESVLAASQSVIKAREKGIINGSDIGVEIGTVSQSHSNLCDQGVTIFQSVGLAVQDMVFSREVIRQLIKMSZ

SEQ ID NO: 1634 - protein, 236 aa, Photorhabdus luminescens
RAVICHLHSQVTFLCSVTSRCYFERKDMLEVSQIVTYTAALTVAAAIPGPGMAALVARSVSNGALAGFSVLFGLIIGDLTYLSFAVFGLSIIASSFDTLFVVVRWGAALYLGYLAWQFWFADHQSIGEDQPIKKKELAAAWLSGLTLTLSNPKTIAFYLALLPLVINMESISLQNWGLMLVPLTVFVLFSVGAVFILGALSIRHLLSSQRAQRILFKGAAIIMFVTAVTMLFKSNZ

SEQ ID NO: 1635 - protein, 377 aa, Photorhabdus luminescens
IIRFTNLTSSLNSQAIIKAFTQRMYNKQFSINSSTINRYYGLFIILLFVSLFLYSYNYFNAWLMGKKYALNSVATKVVLQIEDYRYHANSIFKQANSASFKPPELITPMKLRPDVYWLENRYQTIDTIIFGHHSTASVELAQRLSNYMEILWGTRNEYNSMYYLNGKDNNLFLITTHSILKPELRFKESYLTLTAESKRSEMLMQSTALDERENISSIHKLNGENIYFYTYRATFNSPGQLATVIAFDLPICHLLPMDMAAANFSLLSDDEQPPNEINKVNISQNGFWLEFSQSLKGTQYKLLYRISLKDLLIDLLYRNIWLLLADSVFIILSLGGLIYIRRKYIAPNALMSHELQVKDALSHDIISQYPHWLIDLZ

SEQ ID NO: 1636 - protein, 559 aa, Photorhabdus luminescens
VTILSPNIPIGLLIYDFSVNQIIMCNNIADHLLPNVDLNKIKMMAKQHHGVIQTSIEDSVYEINMYNLRLLPETYLFLLQDKDQEALISRRLQLAHLEHDKSVQARRFMLTNIRSELKQPIKELDHLAYQLKQILIEENSVRIVDNLLTKSEYISDWIENISLLNELESGEWQAKNESFSLSVILEDIIKKVFPKMNNKGLNYYYHCNINPESLFIGDSTAISKIVLMLVNYAITLTSYGKISLIVNYSQEYKEHIQIDIIDTGAGLNSTDLTNLNYPFLSKATGDKYQSNSGLTFYLCNQLCRKLNGHFTINSKPNLGTHYAISLPLIIGQDQCPPLLEDITALLDISNTKIRKIVQNHLHHYGAVYFDKKPENMNREYDIMLTDKPYDSAKSAILLVDNLAGFEQIKPDYIRCNYNLGEAVINAISLLIERSFSFNEFTANLEMSAFNDESSDYDFDNVINSYQKQLTDSDYRQLFVETVPIDINKLYTDIEQYDLISLSQTAHRLKGVFAMLDLELLKLSCETLEQHITDSNEIEIKNSISRLESFTKRLLQQGNZ

SEQ ID NO: 1637 - protein, 218 aa, Photorhabdus luminescens
MNNLNVIIADDHPIVLFGIRKSLERLEWINVVAESEDSTTLINNLSCIKANVLITDLSMPGDIYGDGINLIKYIKRHYPKLSIIVLTMNNNPAILSAVLELDIEGIVLKQGAPTDLPDVLTALNQGEKFMPDSVSELLKKVTKTPYGDKPLSQKESEVIRLFAQGFLVTDIAKKLKRSVKTISSQKKSAMVKLGVNNDIALLNYLASVTINTSNHVQZ

SEQ ID NO: 1638 - protein, 920 aa, Photorhabdus luminescens
VLGLMLWALGALLTAFYLVNIFNEVKSDIRQEYNANYDSTLSYVRHTASVLRDIQYMTEKHLLNSNGKNAIFDFPHNNPAFSYHPLNQNADCHTFRNNTHSYLNSLNNLIFYWKDNLAAPQGLNQVFLVGTQSMCMVSFSIRNTTTEPDTLKKIVYENSRRLISLKEQGKERNVYWVIPGARSDSGHLYVLAPVYVNGQMVAMIGIEQFIRLDSFIQRQDRPISITLLNSSNHPVLHYPANDDYKLHYADYQLEAPYFGYDDNFTDLLLKRRLMPSSFSIIYALSLKTIFEGFKLQIISSIVLNALSAFVIIILVYLFERKMFVPAEENAIRLEEHEQFNHKIVASAPVGISILRVSDGSNILSNELAHNYLRMLTHEDRERIIHIICDRTSSYVDVVTSNHHHLQISFVHSRYRNEEVAICVLVDISVRVRMEKSLQEMALASEQANYSKSMFLATVSHELRTPLYGIIGNLELLQAHSLPAESVRLLSTMNNSSALLLKIISDILDFSKIESKQLKIESREFSCQEVISHVISNYLPLVVKKPLTLYCYIEPGVPDYICNDPVRLQQVISNLLNNAIKFTDTGCVIIHVTVDKDYLYVRIKDTGVGISDKALIQLFDPFFQIMPNTESSSQGTGLGLAICEKLINLMDGDIEVISQPQIGSMFSIRLPLYGAKYRPKTQLINESQRKIILAIRNLYLEEFLQRFLVHHGLHTVLYSEQNTEGSEIIISDFPDAVISPVYAYIELSTDYIGSPEQIRENYWLHNTYHLHDLSVMIERLISPNHHVVLNTAPPVFQANTRFNTIVVLVVDDHPINRRLLADQLKSIGFQTAMANDGLDALEYLKSGGIDIILTDVNMPNMDGYALTMYLRNDGCKLPIIGITANALAEEKQRCIDAGMDDCLSKPVSLVTLRQTLTQMIZ

SEQ ID NO: 1639 - protein, 882 aa, Photorhabdus luminescens
VGSMSDIAREITPVNIEEELKSSYLDYAMSVIVGRALPDVRDGLKPVHRRVLYAMSVLGNDWNKPYKKSARVVGDVIGKYHPHGDSAVYDTIVRMAQPFSLRYMLVDGQGNFGSVDGDSAAAMRYTEVRMAKVAHELLADLEKETVDFVPNYDGTEQIPEVMPTKVPNLLINGSSGIAVGMATNIPPHNLSEVIDGCLAYIEDENISIEGLMQYIPGPDFPTAAIINGRRGIQEAYRTGRGKIYIRARAEIEVDEKNGRETILVHEIPYQVNKARLIEKIAELVKEKRIEGVSALRDESDKDGMRIVIEVKRDAVGEVVLNNLYSLTQLQVSFGINMVALHQGQPKLLNLKDIISAFVCHRREVVTRRTIFELRKARERAHILEALAVALANIDPIIELIRFASTPAEAKAALVAQPWELGSVATMLERAGDDAARPEWLESQYGVHEGKYYLTEQQAQAILDLRLQKLTGLEHEKLLDEYRELLTLIGELLFILENPERLMEVIREELLAIKAQYSDARRTEITENTADINIEDLINQEDVVVTLSHQGYVKYQPLSDYEAQRRGGKGKSAARIKEEDFIDKLLVANTHDTILCFSSRGRLYWMKVYQLPEASRGARGRPIVNLLPLEQNERITAILPVREYEEGLYVFMATASGTVKKTALQDFSRPRSAGILAVNLNDGDELIGVDLTDGSNEVMLFSAEGKVVRFAEEAVRSMGRTATGVRGIKLNGEDKVVSLIIPRGEGEILTVTENGYGKRTAENEYPIKSRATQGVISIKVSERNGNVIGAIQVEPTDQIMMITDAGTLVRTRVSEVSVVGRNTQGVTLIRTAEDEKVVGLQRVAEPEDDEDDEDGLAAEGEEVKSDSTDLPDANSSESVDPVZ

SEQ ID NO: 1640 - protein, 260 aa, Photorhabdus luminescens
MTWLSRDDSFDPDSFGVPVVGIAAELGQHDSGFHQHEMGQLLFTQQGCINITLADHLCILPPTRVAWIPPRIIHRAEIKGSVGYRSIYLDVNRIGYLAEHVEVLEVTPLLREVLERIALAPFNTDWLQGSAANLLAVCFDEIHLAKREPTLLPLPFDRRLARIPMTTLPPTLKILAMNIGASEKTISRIFRRETGLSYQQWRQQWRLIKSIELLAKQGNLSSVASELEFASDSAFAIFFKKMTGRSPREYMSAYKERSYZ

SEQ ID NO: 1641 - protein, 242 aa, Photorhabdus luminescens
LMNIKTPSTPNNVDQQEIEKFEAIASRWWDLEGEFQPLHRINPLRLNYILQRSGGIFGKKVLDVGCGGGILSESMAREGADVTGLDMGTEPLQVARLHALETGIPVTYVQETVESHAEKYPQAYDIVTCMEMLEHVPDPQSVVHACAQLVKPGGHVFFSTINRNKKAWLMAVIGAEYILKMVPKGTHDAKKFIRPSELIGWIDRTSLREKHIIGLHYNPLTDKFSLGHNVDVNYMLHSQYVZ

SEQ ID NO: 1642 - protein, 766 aa, Photorhabdus luminescens
LSMNHSLLVTKRDGHKERIDLDKIHRVVNWAADGLKNVSVSQVELRSQIQFYDGIKTSDIHETMIKASADLISGDAPDYQYLAARLAIFNLRKKAYGQFEPPSLYDHVSRMVKMGKYDKHLLADYSKEEFEQMNEFIDHWRDMNFSYAAVKQLEGKYLVQNRVTGEIYESAQFLYILVAACLFSGYPKETRLDYIRRFYDAASTFKISLPTPIMAGVRTPTRQFSSCVLIECDDSLDSINATSSAIVKYVSQRAGIGINAGRIRALGSPIRNGEAFHTGCIPFYKHFQTAVKSCSQGGVRGGAATLFYPLWHLEVESLLVLKNNRGVEGNRVRHMDYGVQLNKLMYERLIKGEEITLFSPSDVPGLYEAFFADQDEFERLYTKYEQDSNIRQQRLKAVDLFSLMMQERASTGRIYIQNVDHCNTHSPFDPLVAPVRQSNLCLEIALPTKPLNDINDKNGEIALCTLSAFNLGAIENLDELEELATLAVRALDALLDYQDYPILAAKQGAMGRRTLGIGVINYAYYLAKHGVRYSDGSANNLTHKTFEAIQYYLLKASNELAKEQGACPWFKETTYSKGILPIDTYKKALDTLTNEPLHYDWEALRNEIKQYGLRNSTLSSLMPSETSSQISNATNGIEPPRGYVSIKASKDGILRQVVPEYERLKGAYELLWQMPGNDGYLQLVGIMQKFIDQSISANTNYDPTHFPSGKVPMNQLLKDLLLAYKYGVKTLYYHNTRDGAEDIQDDLEEVVESADSDCEGGACKIZ

SEQ ID NO: 1643 - protein, 377 aa, Photorhabdus luminescens
MAYTTFSQVKNDQLQEPMFFGQPVNVARYDQQKYPIFEKLIEKQLSFFWRPEEVDVSRDRIDYNALPDHEKHIFISNLKYQTLLDSIQGRSPNVAFLPLISIPELETWVETWSFSETIHSRSYTHIIRNIVNDPAVVFDDIVTNEEILKRAKDISAYYDDLIEMTNHYQLFGEGTHQIAGKTITASLRGLKKQLYLCLMSVNALEAIRFYVSFACSFAFAERELMEGNAKIIKLIARDEALHLTGTQHMLNLLRSGQDDPEMAEIAKECEQQCYDLFVQAAEQEKEWADYLFSEGSMIGLNKDILCQYVEYITNIRMQAVGLKLPFETRSNPIPWINAWLVSDNVQVAPQEVEVSSYLVGQIDAEVNPDDLSDFELZ

SEQ ID NO: 1644 - protein, 237 aa, Photorhabdus luminescens
LSMLPGIHSLAAAMHLEINRVYINIEGGKDMKRQVKTMALPAMTAALLASLAPVPAKSTVLPMTVVEIQKSAGLISTLTFNLKDEQVFLPLSEATAYLQSLNEYTRKSLSEAIAHRIAKGSGGLFSNSVRIRKLANDNIEYCMRIKEAVRIVLSPDNLSKNFPDPSEREIFRVNIVKFGRAIANSEYTACDILSAIEQSLPPTKTYHPDNLPTSREVKLMILAEHKNLGLSEPEFLZ

SEQ ID NO: 1645 - protein, 344 aa, Photorhabdus luminescens
TYWENKMKKTIKWGIIGCGDVTEVKSGPAFYKLDNSELVAVMRRNANLAEDFAKRHNVPKWYSDANSLINDKDIDAVYIATPPSTHKEYTILAAKAGKAIYVEKPMALTFEECNEMIAICKSQNVPLFVAYYRRALPRFLKIKELIESGAIGTPRIVSCILYREIEKCYQDPHHLPWVVNPKISGGGLFVDLACHTLDILDFLLGKIISVKGHANSQGNAYPAEDCVSMSFMFENNIQGVGIWNFVSNSRGDNVEIIGTKGKISFSTFGNSAISYYDENNKLHQFNIDNPKHIEMPLINTIINELQGKGFCPSTGESGSRTSWVIDQVLKDYRINNYLQYKNEZ

SEQ ID NO: 1646 - protein, 1716 aa, Photorhabdus luminescens
RCNTGIYINNFVLKLRKDRIMERRNGPMARGACYLLIYLTAVYPLHPAIAAGITPDNNRTQVQNQGNVPIVNIATPNGAGISHNTYKEFNVATQGAVLNNATQVVKSQLAGQLNANPNLNGKSAELIINEVTGSGRSDLQGKLEIVGHKANMMIANPNGITCDGCGFINTGSATLTTGKPQFDKQGALEALEVKKGQITIGGKGLDGKTTDYIDIISRATELNGKIQANNLSLTQGANRIDFNDGTVKKITGEGVKPQLAVDTKALGGMYANKIRLVATEDGVGVNLKDLISNQRDITLNVNGKIELGNAKAKTDFNLSAKETHIAQNIKVQAERDITLASTKLDNKGSVTAGRDMRIFGDTLRNTGDKALLQANNNMWLQKDAQGNKSDLIENKSATIKTVKGDLVVRTDKLDNIRDQTITEWKTIPADSVGINKWAGSFYGIRQGVDSVITLAVKLKDFNRDKWFGIIDLLKNNFVNIKQDRFSIKAISPAGSIVSGGNAYINATNLRNDVSSIYAKKDLILTGENIDIISRQLGKKNTFWHYTTSNPMAGSEFKDDDAPPGDWDLFYVYEDAEYTKQGELYTWGEESYISSSISAEKNLVADFKNNLNISTLIPDNAKNLSEVTVTARPDTLSAKNILLHAGKINITDKLKAIDGLNIISENDINLNNAALISSNSLSMTATNNINALQGELKAKDVTIISRNGNVQFQSSSKPGYFNPDNTRKISSLEATGDLLLHAGKNILLRNILLTKSHNISLTANHDITIDNNSELLTHKRMGDVSAESKEQTLFNQMLSTIGKLDAKSSVVINAGGNLFIKGVNVSAVKDINLTAAKNIDLTPRELSPSLNKLFSTSRSGELSSRLTAGNNINIISGADINGKAAQINAKGNTLLSAGRNINLLALGYSAIDNKNDNNKDDRHIVAVVNGGKQLTLAANGTLITQGATLSSGGNTTISSGGNMRFESVQNHSYREKGREFTESVTQQGTALTSGGILTVISNGSILFQATKLTAKGAMDVAAKGGYLYAQAMEESSHYEKTETKRKWYGKKKTIKRTRHDVTNKVTEFTAGGDINLLSRDDSTYEASKIATNKNAKLTSTHGKVNFKAVKNTAFEQTITYSKGFYIKQRDKGYTETQWVLPQIFTGGKLTVEAANGVSADIKAKNGQSLQNVLAVLGNTPETAWLKGLRENKDIQWNVVKDAYDSWDHKSQHLNPVVSAVIAIAAAAATAGSSLAASVASYAGNSVAGGALTAGMSSLAAQAAVAIVDNQGDISKALKVLGSSDAVKSTITSMAIGGALAGFDSYMGWDKAADGTKLDPTKAKLPQISNGDWNKVVQRVAGQSIISSSLNTAINGGSFKDNLTTALLANIGSQINAEGARLIGDNGEVLGVPGKTLSHAVVAGISAEIGRGNVKGAMAGALAAELAGSIMDNSLFEPKFRDESERQLNKLIKAMSDNESNAQLAKVFGSVAGAIVTGTPDGAYSGANASEIVFRYNYIDHQLTQLALENQKDMLAAMEGDKEALIRVEARQQAALAVMDYIPVIGATKGFYDAEKLEDYLLATLSVIPSGKLSVKIIEKLKVAVKAKNAPETRILLNEIKRDISKSGTVWDSIKATQPAIPGTSIPKSFEMTVNGKVVWVNPNATKHMEEYLTRNGLSHSTTEGSQAMLSSLQHAIKNASSQGLKFNEKMQVGRWELIFSQRSTDPYPVLKHALYKZ

SEQ ID NO: 1647 - protein, 560 aa, Photorhabdus luminescens
MERISVCFRTLVVSVLFAISGQAYASAFIGPADQEVITQQQKALLQQAQQQREALRNNITLSPALEHETDGAKSVCHTIRYIQFEGVESLSQSVREKLIQSYLSRCLTLPDINELVRKVSNAYIERGYVTSRAGLRAQDLSTGTLIITVSEGKVESITLDGETSLSLKMAFPGMVGKTLNLRDIEQGMEQLNRLPSQQITIDIQPGKQPGYSAVILKRISTRLPVGASLGIDNSGQKSTGTGQINASVNVDNLLHLADQWSLSVSRNNDFRNNHRSRSLSSNVTIPYGDWLFNYQYAWNDSFQDIPIGLQSYRYEGDNQTHRLAINRTLYRDGEQKLALNAGITHRQTANLFAGKKLSISSPILSVANLGLNYSSVLAGGYITFNPALSYGLPVLGATKDDPYFPDAPRSQFRKFSLSVSYFIPISDSIYYLSSVYGQTTPYNLYASERLSLGGQYSVRGFKEQYLTGNRGGYWRNELNWQISELPVLGELALTGALDTGWLQGKTRQIDGGNVTGTALGISLTHSKFNQTMTLGTPLIYPDHLKPDNWVVYWSVSLIFZ

SEQ ID NO: 1648 - protein, 402 aa, Photorhabdus luminescens
VKNRTLGSIFIVAGTTIGAGMLAMPLAAAGVGFGTTFVMLITLWVLMSYTALLLVEVYQYSPADTGLGTLAKRYLGRGGQWLTGFSMLFLMYALTTAYISGAGELLSGSLSSWLDKPIPVSYGVLIFTLVAGCVVTISTQSVDMINRLLFTAKIIFLVIMLTVMMPHIKSTNLMSMPLEQGLVLSAIPVVFTSFGFHGSVPSIVNYMGGDTRKLRKIFVIGSAIPLTAYILWQLATLGAISSHTFVGILAEQSGLNGLLKAVREVVATPRVELAVRLFADLALATSFLGVSLGLFDYMADLFKRRNNATGRLQTGIMTFVPPLLCSLYYPNFVMALTFAAVALSILALLLPSMLAWRSRQIEQKAYRVKGGKPVLILVFLCGITVITIQIGIVSGLLPEVGZ

SEQ ID NO: 1649 - protein, 482 aa, Photorhabdus luminescens
VMKKRGLTTNAGTPVVDNNNVMTAGQRGPMLLQDVWFLEKLAHFDREVIPERRMHAKGSGAHGVFVVTHDITKYTRAKIFSEIGKKTEMFARFSTVAGERGAADAERDIRGFALKFYTEEGNWDLVGNNTPIFYLRDPLKFPDLNHVVKRDPHTNLRNPAYKWDFFSHQPESLHQLTIDFSDRGVPKSFRHMHGFGSHTFSFINADNERFWVKFHFRCQQGIKNLMDEEAEALVGKDRESSQRDLFAAIEQGDYPRWKLKVQIMPEKEANLLPYNPFDLTKVWPHGDYPMIDVGYFELNRNPDNYFSDVEQAAFNPANVVPGISFSPDKMLQGRLFSYGDAQRYRLGVNHHQIPVNTPRCPFHNYHRDGAMRVDGNSGNTVTYEPNNAGLFQEQPEFKHPSLSLEGDADHWNHRQDEDYFSQPRKLFMLINSKEHQRMFDRIASELSQAHEDTQRRQVELFRKVHPEYGAGVENALKKIKGZ

SEQ ID NO: 1650 - protein, 480 aa, Photorhabdus luminescens
HDASNKIGRVSNRMAQLNPFSQWPWRYWAAFSPENIAVKLRDRSLTWHQLVISLDTIAANFRQQGVVEGSGVMLRGKNSEEMLFCYLAALQCGARVLPLNPQLPEMLLAELLPHLNIDFVADFCSDNVSVIDAKSLNWQSEPLNSADNSVEWDAMRPASMILTSGSSGLPKAAVHSIHAHLASAQDLLSVIEFQQRDSWLLSLPLFHVSGQGIIWRWLIKGASLVLRNTHLLDHALADCTHASLVPTQLWRLLEQSQNQSLNLKQVLLGGAMIPIELTQRAEQQGICCWCSYGLTELASTVCIKRADDLPGVGNPLPGKEIRLINEEIQIRSGSLANGYWLDGKLQPLADRDGWFHTRDRGVIQNDELRILGRMDNQFFSGGEGIQPEEIERVINTYPQVAQNFIVPVPDPEFGYRPVAVIDSHSTEVIDLLPEWLIDKLAAFQRPVAYYLLPQKFKNSGIKISRQQIKKWVLDLPSLYZ

SEQ ID NO: 1651 - protein, 425 aa, Photorhabdus luminescens
LKGSIMHTENVLDIRTIVANEYAVKTSAVEWDVTDIVKNAIIGGISFIPSVGPAISFLVGLFWPQSKENIWEGIVKQIERMIEESALKTIKGILAGDIAYIQERMATVADLLDKHPGSEEARSAFNNLAENIDGYHKKFNNFSDDVNYQILPMFSTTVMMQITYWVAGLERRNEIGLSDIDIEKVRGLIKKTVEQANSYINNIYDRELNDALNNSTADTVANNVMSVHGHCRLHGVEYISIWDKLSEAESVNNRIYVDVLSYSTFFDRQTAKARIQALTPEKDMAPPLKPALNGGKRRKIDSLTGHIVRIGGAPRVGGLTVVFDDGNSHRLGTISGETASISLNGSRITSLEVWGNGAVDQAVFTLSDGRSLSFGAPGTSRYRKFYVGESHYIAGIYLSSDYSPLAGQAANIAVSYQLINDDEKZ

SEQ ID NO: 1652 - protein, 324 aa, Photorhabdus luminescens
MRTATLYRFRLPMEAGVILRYQRLKTRDGFLVHLQENGQQGWGEIAPLPEFSKETVEQAGEAAVAWLRLWHLGAEPDESELPSVAFGISCALAELQGNLPEEADYRKAPLCNGDPDELIVRLNNMSGQKVAKVKIGLYEAVRDGMVVNVLLEAVPDLSLRLDANRSWSRAKADSFAKYVNPDYRNRIAFLEEPCQTSQQSLAFARDTGIAIAWDESVRDEGFNVEAQAGVTAIVIKPTLTGSLARCCQLISAAHNVGLEAVISSSIETSFGLTQLARIAHWLTPATIPGLDTLELIQSQLVRRWPGSTMPVTRLDELAIAWRSZ

SEQ ID NO: 1653 - protein, 237 aa, Photorhabdus luminescens
ATQGHWAIFQHLTTPANGLFFQIHIWHNCINQPHFQRLFSIILTTQKPDFTGLFLTNNPRHVRCPPTTVKRAHFRPSLTENSIISRNGQITYQMQYMTTTNRISSNHSNNGFWTSANLALEIQDIQMMHAVVILITTMITTDFLITTSTKSFFTHTRQDNHTDIVIITGIIQRLHHLFNRQWTECVTYLRAIDGDFSHTIGGFVIKNIFKPFRAVLPYNWGIKFFFARVNHIRIPYZ

SEQ ID NO: 1654 - protein, 286 aa, Photorhabdus luminescens
MIYPSEEELYSPIVWQDCSEGFEDIFYHKSTDGMAKITINRPQVRNAFRPLTVKEMMQALDNARYDDNIGVIILTGMGEKAFCAGGDQKVRGDHGGYKDDNGMHHLNVLDFQRQIRTCPKPVVAMVAGYAIGGGHVLHLVCDLTIAADNAIFGQTGPKVGSFDGGWGASYMARIVGQKKAREIWFLCRQYDAKQALEMGLVNTVVPYVDLEKETVRWCREMLKNSPMALRCLKAALNADCDGQSGLQELAGNATMLFYMTEEGQEGRNAFVEKRHPDFSKFKRNPZ

SEQ ID NO: 1655 - protein, 263 aa, Photorhabdus luminescens
LVWLHGLLGCGDEWLPLVNLCAQHPSLVIDLPGHGDSTDVRVKDLLEMSCLLSETLAEQRISQYWLIGYSLGGRIAMHHACYGDIRGLCGLLIEGGNPGLFSQQERNNRLEHDRNWAGRFRSQPIEQVLSDWYQQPVFSDLLPEQRQQLIKVRRHNNGDGVANMLENTSLGHQPWLVPVLQQLTLPFVYLCGENDKKFQHLAKRCALPLQTIPRVGHNAHRANAVAFAAVVNHFLSLFNKEYEYDLPERRRTLFPNCMAGLLZ

SEQ ID NO: 1656 - protein, 565 aa, Photorhabdus luminescens
MSNSAFNRRWAELLLEALTRHGLRHVCIAPGSRSTPLTIAAAANNKLICHTHFDERGLGHLALGLSKASREPVAVIVTSGTAVANLYPSLIEASLTGERMVFLTADRPPELMDCGANQAIRQNGIFASHPCQTISLPRPTVDIPASWLASVIDHSMANLQHGAVHINCPFAEPLYGNEEPAYDEWQQQLGDWWKSKTPWLSQPVAKVVAEVPDWDCWQQKKGVVLAGRMSAEEGVNVAKWAKALSWPLIGNALSQTGQPLPCADLWLDNPHVQEILAQAQLVVQFGSSLIGKCLLQWQAKCQPQEFWIIDPIPGRLDPANHRGKKLTCHIADWLLAHPAQPCIPWAQSCTLWAEELIVWSEKAVNCVRTELAGKFGEATVAYRLRELLPERGQLFVGNSLIIRLIDTLGQLPAGYPVYSNRGASGIDGLISTAAGVQRATAKPTLAVIGDLSALYDLNSLALLRHPSAPMVLIVVNNNGGQIFSLLPTQEEARQRFYCMPQYVNFDHAAAMFGLKYASPQNWMELQQSIKQAWQQNETTLIELKVPDREGAECLQQLLKQVAMLZ

SEQ ID NO: 1657 - protein, 440 aa, Photorhabdus luminescens
VNQIANVVADVCKTLNNKQVSEVGIQQISFPLPAGCSTYWLEWLAAQSHYPQFYWHHREGHEEVAACGQIHLFSDIALAENFLQRNRQFPRIRIWGLNAWDRIQPARITQSDAGEAGYLFLPRIELRRYRDESWLYLNIAGRQDMKNAQEFLQQLVPHQEFSALQAVVVNAENVPERARWCDLIEQALDTITHRKMEKVVMARKTQLELSESLAAAQFMAASRQINHCCYHFMLAFNQHEAFLASSPERLYLRKQTQLYTEALAGTVDNSDDAQQAQKLGQWLLGDKKNQHENLLVVDDICQRLQGAVVSVDVAPPEVIRLRKVQHLRRRIQGKLKSASDSDCLHRLQPTAAVAGLPREAARDFIRDSELFSRDWYAGSAGYLSCEQSEFAVSLRCAQINNNLLSLYAGAGIVMGSDPQQEWIEIENKAAGLRTLLKGEZ

SEQ ID NO: 1658 - protein, 433 aa, Photorhabdus luminescens
QHEYYDVRLCLDVFNNFSIKQEPLMEKYMLLAQLSAEKTLNETDIPSATLQLLTGKQEGVARPGGIFTKEDLINIKLYVKKGLSLPFNLEEVKSYLDYQKIDIAGLEPEDIHTLFEEIRTHSFSWSDVENDILQQSIDLEIIGKQITETGENIISIINEMPIITRIKRRLGEISEKQLARITYTHEDREVSSALGEILDTMKNDIEKQREKTEKVKTEVSDFKLKLIGGRLSNGSIALGLQPQVENKRKLMKDNKMSVSIGDLDDKIMEKKEEIVQLKKDYDKFVGLAFSGIVGGLIGLAITGGIFGSKAEEVRKRKNMLIEEVRSLEESIKGKRALQKSITSLSLDFSDIDTRLLDAEVALNHLDYMWQSMLTQINASKDKFTQINDALNLTSFITKFQQVINPWKEVEGSAKQLVRVFDEALKEYKHRYNZ

SEQ ID NO: 1659 - protein, 360 aa, Photorhabdus luminescens
KKRSLKMTEVITFPQKTITYPEISVKTLNQAVKNIWSLTHQQKSGIEIIQEKTLRISLYSRDIDEAARASVPQLQTILRQLPPQDYFQTIIEIDTALENSELDDETRNTLLEARLEQVRNLNKDVKNVISSLHEESNIMTSKIADVRNVVILERLEERLKEEQERKEELQADITKKGQDKAKLIPDRDKLIESQNIIRQYNLADMFKDYIPNASELDKLNLASPKKELIKQAIKQGIEITKKILSNISTGLKYVELADARIKLDQQIAQLTKDSDDLKTQLKGAEQRIASIEDVHKIDKERTTLLLQATKLEQVWSIFANQLQETIDDQARQQNLTKLIHDQLNYLDNLESQYSGILLKZ

SEQ ID NO: 1660 - protein, 486 aa, Photorhabdus luminescens
MTITPQQLIALLPLLIVGLTVVVVMLSIAWRRDHFINTTLTVIGLNLALLSLYFVGQQEAMDVTPLVHVDRYAMLYIGLVLVASLATATFAYSWLENYPDNKEEFYLLVLIATVGGILLACANHLASLFIGIELLTLPLFGLIGYAYRQKRSLEAAIKYMLLSAAASSFMLFGIALLYAESGDLSFAALGHRLSDSYIYQPLILSGLGMLVVGLGFKLSLVPFHLWTPDVYQGAPAPVSTFLATASKIAIFAVVIRLFVEAPMADSEALRTVLTVIAIASMLFGNLMALTQTNIKRLLGYSSIAHLGYLLVALVAVQNHQLSEETVGIYLAGYLFSSIGAFGVVSLMSSPYKGPDADSLYSYRGLFWHKPILSAVMTVMMLSLAGIPMTFGFIGKFYVIVLGVKAELWWLTGAVVVGSAIGLYYYLRVMVSLYLPAPKALNRDTPRNWASTAGGMVVLISALLVLALGIWPQPLIDVIQQAKIILZ

SEQ ID NO: 1661 - protein, 507 aa, Photorhabdus luminescens
MLLPWLILMPFIGGLLSWQAERFGTRVPRWIALISMGLTLVLSLQLWLQGGYTLANPQGIPQWQEEFVMPWIPRFGISIHLALDGLSLLMVVLTALLGLMAILCSWTENQPYQGFFHLNLLWILGGVMGVFLAIDMFLFFFFWEMMLVPMYFLIALWGHRGSGGKTRITAATKFFIYTQASGLVMLIAIMALVLVHYNGTGEWTFSYQKLLNTPMSHTVQYLLMLGFFIAFAVKMPVVPLHGWLPDAHSQAPTAGSVDLAGILLKTAGYGLLRFGLPLFPEASHEFTPIAMWFGVLGIFYGAWMAFSQTDIKRLIAYTSISHMGFVLIAIYSGSQLAYQGAIIQMIAHGLSAAGMFILCGQLYERLHTRDMNLMGGLWKRVQFLPALSLSFAVATLGMPGTGNFVGEFMILFGSFSEFPLIITISVFGLVFASVYALYMMQRAYYGESKSDEPLRRMDMREVSIVMVLLILLVVMGFYPQPILDTSAAAMDNIQTWYSASISTTRPZ

SEQ ID NO: 1662 - protein, 234 aa, Photorhabdus luminescens
MLEFKRVSAHYGEVQVLHQVSLNIQQGEIVTLIGANGAGKTTLLSTLCSEPRATEGSIIFRGKDITQWPTSRIMREDIAIVPEGRRVFARMTVEENLAMGGFFADKTQYQQRIERVYDLFPRLQERRHQRAGTMSGGEQQMLAIGRALMSQPQLLLLDEPSLGLAPIVIIQIFDTIQQLREEGMTIFLVEQNANQALKLADRGYVLENGQIVLEDSGSALLVNEAVRNAYLGGZ

SEQ ID NO: 1663 - protein, 616 aa, Photorhabdus luminescens
MNLLYLTILLPLLGFLLLAFSRGRWSENTSATIGISSVGLAALVTLWVAIDFNSQNGAGDLVYSQNLWNWMEVGNFSIPFTLVLDGLSLTMLSVVTGVGFLIHMYASWYMRGEEGYSRFFAYTNLFIASMVILVLADNMMLMYLGWEGVGLCSYLLIGFYYTNPANGAAAMKAFVVTRVGDVFLAIGMFILYDNLGTLNFRELAILAPQHLEAGSSVITWATLMLLGGAVGKSAQLPLQTWLADAMAGPTPVSALIHAATMVTAGVYLVARSHGLFLMAPEILQLVGTIGAITLVLAGFAALVQTDIKRVLAYSTMSQIGYMFLALGVQAWDAAIFHLMTHAFFKALLFLASGSVILACHHEQNIFKMGGLRKSIPLVYACFLVGGAALSALPIVTAGFYSKDEILWGAMSHGHINLMLAGLAGAFMTSLYTFRMIFIVFHGEAKTKAHPVKGITHHLPLLVLLVLSTFVGALIVPPLAGVLPGSHITDHTGKMTLEVVSGVIAVAGILLAMALYLGKRQLVNGVAQSAPGRFFSVWWFNAWGFDVLYDWVFVKPFKNITHVLRNDPLNSLMNIPAVLSRWSNKGLSLSENGQVRWYVASMGLGAVLVLALLLLVZ

SEQ ID NO: 1664 - protein, 326 aa, Photorhabdus luminescens
MSWLTPEIIDVLIAVLKAVVILVVVVVCGALMSFGERRLLGLFQNRYGPNRVGWGGSLQIVADMIKMFFKEDWVPRFADRMIFTLAPVIGFVSLLLAFAIVPITPTWMAADLNIGILFFMMMAGLAVYAVLFAGWSSNNKYSLLGAMRASAQTLSYEVFIGLSFMGVVAQADSFNMVDIVNAQEHMWNVIPQFFGFLTFAIAGVAVCHRHPFDQPEAEQELADGYHIEYSGMKFGLFFVGEYIGIVTVSALIVTMFFGGWHGPFLPPFVWFALKTAFFMVMFILIRASLPRPRYDQVMAFGWKICLPLTLLNLLATAAVILYNAQZ

SEQ ID NO: 1665 - protein, 911 aa, Photorhabdus luminescens
LTMATIHVDGKKYDVDGADNLLQACLSLGLDIPYFCWHPALGSVGACRQCAVKQYQNADDTRGRLIMSCMTPATDGTFISIDDEEAKQFRESVVEWLMTNHPHDCPVCEEGGNCHLQDMTVMTGHTFRKYRFTKRTHNNQELGPFISHEMNRCIACYRCVRYYKDYADGADFGVYGAHDNIYFGRPESGTLESEFSGNLVEICPTGVFTDKTHSERYNRKWDMQFAPSICQQCSIGCNTSPGERYGELRRIENRYNGTVNHYFMCDRGRFGYGYVNRKDRPRQPRQLRGDHWISLNAEQAMQGGADILRQAKNVIGIGSPRASLESNFALRELVGAENFYSGIAAAEQQRLDIMLEILQQGGVYTPSLREIESYDAVLILGEDLTQTGARMALAVRQAVKGKAREMAAAQKVADWQIAAVMNIGQRAKYPLFVTNVDDTHLDDIAAWNYRAPVDDQARFGFAVAHALDNTAPAVENLPDELRAKVDMVAQALIGAKKPLIISGSNVGSDAIIQAAANIAWALKDRGSDVGLSFVAIYANSIGLAMMEAQPLDVALQRISSGKSDTAIVMENDLYRHAAADKVDDALNNLKNLVVVDHQRTAIMDKAHLILPASSFAESDGTLVNQEGRAQRYFQVFEPSFYDKSVVMLESWRWLHSLHTTYAERHLDWTQLDHVIDACAEAMPQLKGIVDAAPDSTFRIRGQRLARSPHRYSGRTAMLANISVHEQRQPQDVDSPFAFSMEGNNSPNAHRQQVPFAWAPGWNSPQAWNKFQAEVGGHLRFGDPGVRLIETTDGGLNYFDQIPTAFTAQNNQWTVAPYHHLFGSEELTQRSDVIQERMPEPYVMLNSKDADQLGVKTGSVLEFDCFGQQLRLAVRLSENLAQGQIGLPMGMPGIPPVLAGVSVNNLREVAQZ

SEQ ID NO: 1666 - protein, 455 aa, Photorhabdus luminescens
MTAYSGIKEIILTEENHPLTWRLRDDKQPVWLDEYRSKSGYRGAEKALKSMSPDEVVSLVKDAGLKGRGGAGFSTGLKWSLMPKDESMNIRYLLCNADEMEPGTYKDRLLMEQLPHLLVEGMLISAFALKAYRGYIFLRGEYVEAAVHLRKAIEEAKAAGLLGKNIMGSGFDFELFVHTGAGRYICGEETALINSLEGRRANPRSKPPFPATSGAWGKPTCVNNVETLCNVPSILEYGKEWYIGLSAGKSKDAGTKLMGFSGRVKNPGLWELPFGTTAREILEDYAGGMRDGLKFKAWQPGGAGTDFLTAEHLDLPMDFENIAKAGSRLGTALAMAVDHEINMVSLTRNLEEFFARESCGWCTPCRDGLPWSVKILRAIERGEGQPGDIETLEQLCRFLGPGNTFCAHAPGAVEPLQSAIKYFRDEFEAGIVTKDYGNTHFIAGIQSNLLKQRWZ

SEQ ID NO: 1667 - protein, 600 aa, Photorhabdus luminescens
MMIDQIAQESARPAWQTHDHLDDPVMGELRNHFGPDAFTVQPTRTGIPVVWVKREQLLEVMTFLKKLPKPYVMLFDLHGMDERQRTHRQGLPAADFSVFYHLLSIERNRDIMLKVALSEKELNLPTATPLFPNANWYERETWEMFGVVFNGHPNLRRIMLPPTWEGHPLRKDYPARATEFDPFELTRQKEDLEMEALTFKPEEWGMKRGTENEDFMFLNLGPNHPSSHGAFRIILQLDGEEIVDCVPDIGYHHRGAEKMGERQSWHSYIPYTDRIEYLGGCVNEMPYVLAVEKLAGIEVPDRVKTIRVMLSELFRINSHLLYISTFIQDVGGMTPVFFAFTDRQKVYDLVEAITGFRMHPAWFRIGGVAHDLPRGWDRLLRDFLNWMPKRLDSYVKAALKNSILKGRAIGVAAYNSKQALEWGTTGAGLRATGIAFDVRKWRPYSGYENFDFDVPIGNNGDCYDRVMLKVEEVRQSLRILKQCLDNMPEGPFKADHPLTTPPPKERTLQHIETMINHFLQVSWGPVMPANESFQMIEATKGINSYYLTSDGSTVSYRTRVRTPSYPHLQQIPSVIRGSLVSDLIVYLGSIDFVMSDVDRZ

SEQ ID NO: 1668 - protein, 225 aa, Photorhabdus luminescens
MDYTLTRIDPNGENDRYPLQKQEIVADPLEQHVHRSVYMGKLEHALHDMVNWGRKNSLWPYNFGLSCCYVEMATSFTAVHDVARFGAEVLRASPRQADFMVVAGTCFTKMAPVIQRLYDQMLEPKWVISMGACANSGGMYDIYSVVQGVDKFIPVDVYIPGCPPRPEAYMQALLLLQESIGKERRPLSWVVGDQGVYRANMQSERERKHGERIAVKNLRTPDEVZ

SEQ ID NO: 1669 - protein, 310 aa, Photorhabdus luminescens
MINANRPIMNLDLDLLRTFVAVADLNTFAAAAAAVCRTQSAVSQQMQRLEQLVGRELFARHGRNKLLTEHGLQLLGYARQILRANDDASASLTYSDAEGELRIGASDDTVDTLLPFLLNRIASVYPRMAIDVRIKRTQFIESMLDNHEIDLALTTAKISHHPRTVLRSTPVLWHCAPDFQLQVNEPVPLVVMDETNPFRQLALDTLDEVGVSWRIAYEAASLSAVRTAVNAEVGITARPLEMQNADLRILGESEGLPRLPETQFSLYRHSNEQNESVLTVFSAIENKKTPYTITSVSEELPDDDDIIDEZ

SEQ ID NO: 1670 - protein, 405 aa, Photorhabdus luminescens
MLAVKKSSKLDNVCYDIRGPVLKEAKRLEEEGNKVLKLNIGNPAPFGFEAPDEILVDVIRNLPTAQGYSDSKGLYSARKAIMQHYQARNMMDVTVEDIYIGNGVSELIVQAMQALLNTGDEMLVPAPDYPLWTAAVSLSSGKAVHYMCDEGSDWFPDLNDIRNKITPRTRGIVIINPNNPTGAVYSKELLLEVVEIARQHNLIIFADEIYDKILYDDAEHHSIAALAPDLLTVTFNGLSKTYRVAGFRQGWMVLNGPKKHAKSYIEGLEMLASMRLCANVPMQHAIQTALGGYQSISEFILPGGRLYEQRNRAWELINQIPGVSCVKPKGALYMFPKIDAKRFNVHDDQKMVLDLLLQEKVLLVQGTAFNWPEPDHLRIVTLPRLDELEMAIQKFARFIGKYHQZ

SEQ ID NO: 1671 - protein, 200 aa, Photorhabdus luminescens
MIMSHFFAHLSRLKLINRWPLMRNVRTENVSEHSLQVAFVAHALAIIKNRKFGGNVNAERIALLAMYHDASEVITGDLPTPVKYHNPHIAREYKKIEKIAQKKLLEMLPTELQEDFRPILDDSQHTTEETFIIKQADSLCAYLKCLEELSAGNHEFNLAIARLEKTLADRHSQEMDYFMKVFVPGFSLSLDEISLDIPHZ

SEQ ID NO: 1672 - protein, 611 aa, Photorhabdus luminescens
LNSELLWVLTLLLIAIVLFTSNKLRMDIVALLVIIAFVISGTLTLGEATSGFSDPNVLLIAALFVIGEGLVRTGVAYQMGDWLVRVAGNSETKMLALLMMTVAGLGAFMSSTGVVAIFIPVVLSVAVRMKISPGRLMMPLSFAGLISGMMTLVATPPNMVVNSELIREGLPGFKFFSITPIGILILFAGMGYMLIARHWLANHQSDKGHDKWHRRTFRDLIRDYKLSGRARRLAIRSGSPLIGLSLDESNLRARYGANVVGIERWRRFRRVMVSAMGNTELRERDVLLVDMSDSEVDLRQFCSEQLLEPMVLRGEYFSEQSRNVGMAEVSLIPESDLLGKSLREIGFRTCYGLNVVGIRRDGESLSGKLVDAPLQLGDILLVIGDWKLIRVLQTKMRDFIVLNLPVEIEEVAPATSQAPHALFSLALMVAMMLTDEIPNVIAALIACLLMGKFRCIDMESAYRSIHWPSIILIVGMMPFALALQKTGGIELIVRGLMDIAGDMGPRVMLVCLFILCAVIGLFISNTATAVLMAPIAIAAAREMAVSPMPFAMIIGVAASAAFMTPVSSPVNTLVLGPGGYKFSDFVRLGVPFTLLVMVISVLVIPWLFPFZ

SEQ ID NO: 1673 - protein, 258 aa, Photorhabdus luminescens
MSTTPLLQVSDLTMRFGGLLAVNNVALRLNQREIVSLIGPNGAGKTTIFNCLTGFYCPTSGTIKLREKHLEGLSGQAIARMGVIRTFQHVRLFREMTVIENLLVAQHQHLKRGLFAGLFKTPAFRQAESKAVDWAITWLERIGLLPLANRQAGNLAYGQQRRLEIARCMVARPEILMLDEPAAGLNPKETEELNALIAELREHHQVSVLLIEHDMKLVMGISDRIYVVNQGMSLAQGRPEEIRNNPDVIRAYLGEVYZ

SEQ ID NO: 1674 - protein, 401 aa, Photorhabdus luminescens
MSSKLVLVLNCGSSSLKFAIIDPANGEEYLSGLAECFNLPEARIKWKMDGAKHEAALGAGAAHSEALNFIVNTILAEKPELSDQIAAIGHRIVHGGEKFTASVTINDEVIQGIKDAVPFAPLHNPAHLIGIEEAKKGFPHLADKNVAVFDTAFHQTMPEEAYLYALPYNLYKEHGIRRYGAHGTSHFFVSREAAKTLNKPVEELNVIVCHLGNGGSISAIVNGQCVDTSMGLTPLEGLVMGTRSGDIDPAIIFHLHDSLGMSVEQINKLLTKESGLLGLTEVTSDCRYIEDNYATKADAKRAMDVYCHRLAKYVGAYSALMEGRLDAIIFTGGIGENSALVREQVMKKLALLGFEYDHDRNLAARFGKSGAITTDNSRPALVIPTNEELVIAQDAARLTAZ

SEQ ID NO: 1675 - protein, 714 aa, Photorhabdus luminescens
VSRTIMLIPTSTSVGLTSVSLGVIRSMEQKGVSLSVFKPIAQPRCRAAQDQTTTIIRANSSIKTAEPLDMAHVESLLTTNQKDVLMEKIVALYHENTKDAEVILIEGLVPTRKHSFAQSLNYEIAKTLNAEIVFVLALGNDSPEQLKERVELARAEFGGNKNQNITGVIINKLNAPVDDQGRTRPDLSEIFDESSKAIVSNIDPNTLFKNSPLPILGCIPWSFDLIATRAIDMAKHLNARIINEGAIKTRRVKSVTFCARSIPHMLEHFRPGSLLVTSADRPDVLVSACLAAMNGVEIGAILLTGGYAIDEPIKQLCERAFNTGLPVFMVDTNTWQTSLNLQSFSLEVPADDHERIEKLQNYVAHHINKEWIDSLTANSERPHRLSPPAFRYQLTELARKAGKRVVLPEGDEPRTVKAASICADRGIARCVLLGDPEEIRRVAAAQGVELGAGIEIVDPIAVRERYVPRLVELRKNKGMTEVVAREQLEDNVVLGTLMLEQGEVDGLVSGAVHTTANTIRPPLQLIKTAPGSSLVSSVFFMLLPEQVLVYGDCAINPDPTAEQLSEIAIQSADSAKAFGIEPRVAMISYSTGNSGAGSDVEKVREATRLAQEKRPDLIIDGPLQYDAAIMADVAKSKAPNSPVAGQATVFIFPDLNTGNTTYKAVQRSADLVSIGPMLQGMRKPVNDLSRGALVDDIVYTVALTAIQSAQGEAZ

SEQ ID NO: 1676 - protein, 228 aa, Photorhabdus luminescens
NHKSSKERNMNLNKKVFFISPFLLAMSSFSMACMQDTEEIRNQVKNAITANGLAKTKVMSMYENCKLRANVKDFDKRNDVELNNTSTHNQDDKIDKAKYWYRGMGKSQYISLDQNRYTAIPCVTEGENDYCGIAPAYTYAKTYPKTEKPKITIEFSTEGLGWLYNEFTTKHDCEYKVEAGTLSYGLGKKGSKCKVPPQYNTGVEFNKWLSTNEIQAQVAYVLLPKNPZ

SEQ ID NO: 1677 - protein, 356 aa, Photorhabdus luminescens
  misc_feature (19)..(20): Xaa can be any naturally occurring amino acid
  misc_feature (22)..(22): Xaa can be any naturally occurring amino acid
RCLILSEMEIIILAMKIFXXSXQKIKLERLHDTTRDGQVRDRIKAILLASEGWSSMMIAQALRLHQTTVDRHISDYLNHGKLKSGNGGSDSLLSREQTDFLINHLSQHLFHHTHEIVAYVAQLWKITFSIPGMNKWLHRQGFSYKKPCGVPHKFDVEKQQQFIEYYENLKVAAKDEPILFLDAVHPTQGTKLGYGWMRKGEKKTVKTTGSRTRLNILGALNLNAIGRTVFQEYQTINDYNICCFFNEIRKSYPDYHQKIHLIVDGAGYNKAHLVKEWAYVSNIELHYLPPYSPNLNPIERLWKVMNEQVRNNRYFADKHEFRDKVFKFFTTTLPDIADSLMSRINDHFQVLKTASZ

SEQ ID NO: 1678 - protein, 422 aa, Photorhabdus luminescens
WFQAMKRLLKVSVMTGLQTLLRMAMGFVIAKVVAIYTGPTGMAMLGQVQSMVGSLNGVINAPVNSGIVRFTAEYHTKGFKACSPWWKASLYWVIVITAFTIPIGLIFSSYIASWLLHDSSLAWVVIVTVFVLPFSALGTLCNSVINGQQHYRRFVGLGMLSTLISSAVMIGLIIAANIQGALLAATIQSALIGIVMLLANLRQPWMKLRYWWGKQDTQARKDIASYMLMALTSALTIPISLILVRNILISHVGWNVTGYWQAVWKISEVYLSVITLSLSTYYLPKLSSLNTYVEIRKEINHTAKFIMPIVMILAFGVYFFRDTAIRILFTPEFIEARNLFAVQLCGDVIKILSWLYAYPMLSRGSTKWFISTEIIFSVSLVLLSYLFIQQFGVKGANIAYLVSYLAYFIFIYVNLKRIARFZ

SEQ ID NO: 1679 - protein, 376 aa, Photorhabdus luminescens
LIKMINFLDLKAINKKYENELKEASSRVIDSGWYIMGKELESFEKEFAEYCGTKHSIGVANGLDALILVLRAWKELGKIKDGDEVIVPANTYIASVLAITANNLKPVLIEPDQNTYNLSPNNIISAITEKTKVILPIHLYGQISPMPEIMKIANEYNLLVLEDSAQAHGAEIVGKKAGSWGNASGFSFYPGKNLGALGDAGAITTNDEELTTTIKALRNYGSHEKYKNIYQGINSRLDELQAAFLSVKLKYLNIETEYRRSIAKHYLENINNPYIKLPITIEQNALHPENHVWHLFVINCSHREKLQQYLFEKGIQTLIHYPIPPHKQTAYSEWNTLNFPITEKIHQQVLSLPLDPTMNIEAIEYVIDIVNGFKPZ

SEQ ID NO: 1680 - protein, 291 aa, Photorhabdus luminescens
MKGIILAGGSGTRLYPITIGVSKQLLPVYDKPMIYYPLSVLMLAGIKDILIITTPEDQINFKRLLNDGNSLGIKISYATQDKPEGLAQAFIIGEDFIGDDSVCLVLGDNIFWGQAFSPKLQKASSQKTGATIFGYQVKDPERFGIVEFDDQMKAISIEEKPKKPKSDYAVTGLYFYDNRVINFAKKVTPSDRGELEITSINQMYLNDNSLNVELLGRGFAWLDTGTHDSLLEAATFVETIEKRQGFKIACLEEIAWRNGWLNENDIAKAANSMSKNGYGKYLQSLIQRKIZ

SEQ ID NO: 1681 - protein, 324 aa, Photorhabdus luminescens
NSTQMAIFINRKVTANAYGLSSGVFWGLSGVLFALLLKNTALSCCFFIPIILAFLNDTISCGYMFIYLVVKGKYRAIRLIPKNKKNGIIVLAAIFGGPMGMSCYILAIQYIGISYTATISATYPAIGALISFFLLKDRIHLIGILGLILAVVCTMILGYSASTQTTSGWIGFFFAFICALGWSSEVVISSYGMNKDIPADIAYFIRQLSSSVGYLIMIILFIHSFPGVTHIFSNIELYSLLFFTSLVATLSYLFYYKAICMLQPIRAMSLNITYAIWAVIFAYLLVDEPISIKLILLCVGVSAGSLLTAVNPLNIKKLILTLKZ

SEQ ID NO: 1682 - protein, 625 aa, Photorhabdus luminescens
MNKRIFFNQDRLIKTIVLLIVDIFIIIISYWLSMWLRLDREVPIYSLQHWLTIIFTIPFTLFIFLRIGFYRSILKYVNMSILKWAIIGSFLSTLLLTAISLYQQAFLPRTVPIIYFSFLVISLCGTRFIYRTLRNLLKYKGAPVIIYGAGESGRQLLPILREHREFNPIAFVDDNAKLHNLSIHGVYVFSSEKITILVEKYNIKKILLAIPSASISNRKKILERLQKEHCEILTIPSFNDLVEGKAQINSLKRVSINDLLGREQVDPLQSLLSKNIKNKNVLITGAGGSIGSELCRQIITQSPSQIVLFELTEYCLYSIEKELQKINSDRDLNITITAILGDIKDSEKIARIINKFNINTIYHAAAYKHVPLVEMNTIEGINNNIFGTLSLAQAAINQKVEKFVLISTDKAVRPTNTMGATKRFAELILQAFAKEHSYTKFSMVRFGNVLGSSGSVVPLFEKQIKSGGPITLTHKDITRYFMTIPEAAQLVIQAGALGNNGDVFVLDMGESVKIYDLARKMIHLSGLTVKDETNPHGDIEIKITGLRPGEKLYEELLIGDNVSGTNHPRIMTANEVFLTWDKLNPLLNDLKTSCENYDFENIRQILINAPIDFHPKDYIYDLLKZ

SEQ ID NO: 1683 - protein, 204 aa, Photorhabdus luminescens
MMTYYLAIKRLFDFTSSLIGIILLFPILITIAIWIKIDSKGPIFFRQKRVGQYNQDFYIHKFRSMTTGSEQKGQLTIGHDLRITHSGKFIRKYKIDELAQLIDVVRGKMSLVGPRPEVPQFMDKYPDDVRNKILSVKPGITDLASIEMIDENQILSQYQDPHQAYIDIIMPIKAKYYLEYIDKKSFFYDLKIIFKTIYKVVFRZ

SEQ ID NO: 1684 - protein, 456 aa, Photorhabdus luminescens
MELITEWLSAINGVVLGVPMMVGLLGVGLFMQLRLSFLPIRKLGTGFKLLFERNHQRGEGQISPFNALMTALSATIGTGNIAGVATAVVLGGPGALFWMWITALVGMATKYSEAVLAVRFREVDKNGHYVGGPMYYIKNGLGKKWAWLGTLFAVFGSIACFGIGNTVQANSVADVLQSNFGVSTMVTAIVLAILVGAVLIGGIKRIADVAGKLVPFMTVAYLAAGIIVLGMNFSEIPAAFVLIVKSAFTPVAAQGGFAGAAVWAAIRFGVARGIFSNEAGLGSAPIAHATAKTQNPIRQGLIAMLGTFIDTIIVCSITGLTIVITGGWLNGQTGATLTATSFAMAIPGGNYIVAGALVIFAFTTILGWSFYGEKCTQYLFGQKAITPFRVVWIIALMVGATQSLDFVWLLADTLNAMMAIPNLIALALLSPVVYRLTKEHIKDVNADSIDIKAKIZ

SEQ ID NO: 1685 - protein, 426 aa, Photorhabdus luminescens
MKHANWVNAIIASAALFVLSVFMMGMQLSLDGTQLVVHHADEVRWLWIGIGCAVVFLFQLLRPAVQQIMKKVPIKSWSLPDFDGSTKGQKLLAILVIIAAIIWPFIVSRGSVDIATLTLIYVMLGLGLNVVVGLSGLLVLGYAGFYAIGAYTYALLSHYYGLGFWQSLPLAGLTAALSGLLLGFPVLRLRGDYLAIVTLGFGEIVRILLLNNTEITGGPNGISQIPKPTFFGLEFNRSVKEGGWDTFHNFFGLKYDPSDRVIFLYLVVLLLVILTVLIINRLLRMPLGRAWEALREDEIACRSLGLSPTRIKLAAFTISAAFAGFAGTLFAARQGFVSPESFTFAESAFVLAIVVLGGMGSQTAVILAAILLVVSREMMRDLNAYSMLLLGAMMVLMMIWRPQGLLPTKRRHVKLERQVQGGKQAZ

SEQ ID NO: 1686 - protein, 386 aa, Photorhabdus luminescens
MNSSFLPFALPEISQEEIDEVIDSLKTGWITTGPKTRRFEQDFAQYLGSDVEAIAVNSATAGLHLALEAIGIQPGDEVIVPTYTFTATAEVVRYLGAHPIFVDSLPDSLNIDPIAIEKAITAKTKAIMPVHFAGLSCDMDAIIAIAKKFNLRIIEDAAHSFPTLYKGKKIGTLDTDVTVFSFYANKTMTTAEGGMLVSRHPDIIKRAKIMRLHGISKDAFDRYQSKIPAWYYEVIEPGYKYNMPDICASIGIHQLQKIDTFHKKREAMAKLYDDELKDLPIILPTKPQESNSQHAWHLYTIRLNDQVKISRDDFIIKMAEKNIGCSVHFIPLHKQPIWKNTYSLNENNFPVAEENFKRIVSIPLYTKMTKEDQIYVIKTIKEILAZ

SEQ ID NO: 1687 - protein, 342 aa, Photorhabdus luminescens
SDYSTMINISVICPILNEEKYIKGCIESLLKQDYPTGQLEIIFIDGCSSDSTLKVIQSYTEKYEFIKLLYNPAKHVPTALNIGIKNSLGEYIARIDAHSSYPSSYLSKLYNLSKKLDADNIGGIVNTKPCNSTTISHNIAYALSSRFGMGNSYFRIGINNIKKVDTVPFGFFKRTLFDKIGLFDEDLIRNQDDEFNNRIIKHGGNIYLSPDIIIDYYPRDSIKKICSMFYQYGLFKPLVNAKLKKITSFWQLIPPIFVLGLILGLILSFTSSIFLYLYIGCIFIYFFLTLLVSIRAHLKNKKNYIFLPLIFLYIHLSYGSGYLIGIMKIIFNKKFHVKNKRZ

SEQ ID NO: 1688 - protein, 413 aa, Photorhabdus luminescens
MNIVYINHYAGSPDLGMEFRPYHLGQEWIKSGHNITLLAASYSHVRTKQPKLIENKKTTENINGLEYIWYPTPSYNGNGLSRVKNIFSFLRQIWLDSHNLVKKYRPDVVIASSTYPMDIWIAKRLAKKANAKLVFELHDLWPLSPIELGGMSPKHPFIQLCQLAENTAYKHADVVISMLPKVQEHTKAHGLDLNKLHIIPNGVVIKDWINQLTPLNRSLEKLIITEKNKGHKIVCYSGAHGRPNALEKLLKTASLLHDKPITFLLVGTGLEKDNLIKESQSLRTNNVIFFDPIPKTQIPTLLNKIDIAYIGLQKQSLFRFGISPNKLIDYMMAGKPILCAIDAGNDPVSDVNCGITVKSGKPEEIARALLKLSELSTDELNQMGKKGKIYALENHAYSVLADNFIKAIINHEZ

SEQ ID NO: 1689 - protein, 357 aa, Photorhabdus luminescens
MKKIITVLGARPQFIKASPVSRALKNNNKFKEIIIHTGQHFDTNMSDVFFNDLAIPKPDYTLNIHGGSHGDMTGRMLIEIEKVLITEKPDAVMVYGDTNSTLAGALAASKLHIPIIHVEAGLRSFNMQMPEEINRILTDNVSSILFCPTDTAINNLQKEGFGSKPVNIKQVGDVMEDAALYFSQMAKKPDGLDAIPNFILTTLHRAENTDNQERLTEIVNALNNIHKRTAIVVMPIHPRTKKMLAQYDLHLDVHLIEPVGYLEMIWLLKNTALIITDSGGLQKEAFFFKKPCVTVRDQTEWVELIAAGVNKLSEADSNKITQAVHDMIGIDMDSIQSMYGGGIAATRIADELEKSLZ

SEQ ID NO: 1690 - protein, 368 aa, Photorhabdus luminescens
MKITHMTSVHPRFDTRIFLKECSALQKEHEVSLIVADGKGNEVKNNIAIIDVGILPGRLNRIFKTTDKVYKKALELDADLYHFHDPELIPIGLKLKRKGKIVIFDSHEDVPKQIFSKPYLNKFTRVIISKLFALYEKYSTPKFDGIITATPSIRDKFLKLNNNTIDINNYPILGELHNKHANWHEKEKQVCYVGGISDIRGIAEMVESLSHLTTNTTMKLAGNFSDTELENKIKNMKNWHKIDALGFLNRIETKELLSKSIAGIVLYHPLPNHIDAQPNKIFEYMSAGIPVIASNFTLWKDIVVKNHCGICVDPLNPKQIADAIDYLSNNPDIAEEMGNNGLLAVNEKYNWDIEQNKLTKFYQHIGRZ

SEQ ID NO: 1691 - protein, 421 aa, Photorhabdus luminescens
YYHSFTSLSAKMQNNIKIILKIFIYQVIIYLNSILILDTFHEVRGYNITPQGYLSIIFCWISFLPLILLNNQKNPVMVFLWLIYITYIIPVSIIFPLINSASVYSIIFVCTINILFFSSILFFRIIDRITIPKLKIPWDLYKILIIGCGIIVLLFVISNPGLSLIPPNIFKVYSVRQHFKDNTPLLTMYIITNGGYVISPLLLLASLYIRGPIKYLLITISILISYLIYSSSGLKSIAFMNLAVIILYFYIKGTKSISNSVINIILYLFLTAGILYLIFDFYDPLIHWLRRVFFTPTLNTYYFYDYIYNNNSEFTTEAPQIVSQIYYGTSGSANTGFIGDGIARYGTLGLIINFFIFNILIFAMNLSSKKVPFELSTTLYLPFVYTISNSAITALLLTYGLLALSILLFLFPTKTNKIPLZ

SEQ ID NO: 1692 - protein, 379 aa, Photorhabdus luminescens
NYLSCVNKVNMKKIIIKIIPYIIIVMIVSYTFNKYAYELDEFNGNVRNLVMKGKFTQREFNSNGFPLSHSPHIPEPFLSPFYVVHYGLIYSSLGLNQDNANILWRTDSSLPGWNVPPPQFNQNELIANFKFSADWLLNNIKSFHGESHYLYDFDWSYKGYKNNKLSAPWWSGLTDAYAIILLLRAYDHFDDDKYLLTSKRLYQSSLAPIHKGGSLTTLDNMPWIEEYVDPQANSDQLAFVLNGMIYSTYGIESFETYLNTDENTRISDKLYQSISHNIFKFDIKNEWSSYDLIGNPSNIKYHKIHTLLLKDLIARNQNFKNKEIIDLYNNWNKSAANSGYYYIKHGPTSWAYYQFITMYFLSILVLSFIYFFIRKNAKZ

SEQ ID NO: 1693 - protein, 414 aa, Photorhabdus luminescens
NCQFNLKSMNHKLLRNISGLLLSSLFSQILLLLSTPVLTRLFSPEELGIYASFSSLLSVFAVGACLRYEFSISSSGKSREINSLVTLSCIIPITISLIVITVFAISNTPEKIIIGNYIYYIPLGIITYGFYRAVSFNSIREKQYHALSITKITQTVAMISTQIIGGIAHLGASSLILGQILGQSLGVLFLSKRSKYRLIISKHELRKIRLLAKKYYRFPVYDFPAASINTLSNELPQLFIMSTYGLKSAGFYLIASRISGAPITLLSQTVSSILQGYLKDTLISPFLKIKKTFYCLTLIAILFAIVTYFTGIPIITFIFGEEWRESGKYLLCLIPHLCGQIIYSSLSVYLSIYEHQKSNLFIQTTSIILRLIALLTGYLLGDIYLTLLLFSLTSFVLYMTSTAYILKLSFMRQZ

SEQ ID NO: 1694 - protein, 357 aa, Photorhabdus luminescens
MQFTDLAAQQLKIKDKIDANIQKVLAHGKYILGPEVDELEAKLIAYTGAPYCITCANGTDALQIALMAIGIKPGDEVITAGFTYIATAETVALLGGVPVYVDVKPTTYNLDPTQLEAAITPKTKAIIPVSLFGQCADFDEINAIAAKHNLIVIEDAAQSFGATYKGKRSCNLTTISCTSFFPSKPLGCYGDGGAIFTRDEELAKIIRQIARHGQDRRYHHIRIGINSRLDTLQAAILLPKLEIFDEEMALRQQVAENYNNALNGIGITTTPYIEPHNLSAYAQYTLRIKNRDELQRRLKEQGIPTAIHYPIPLNKQPAVASNIALPIGDEIAQEVISLPMHPYLSIDIINKIASSIZ

SEQ ID NO: 1695 - protein, 350 aa, Photorhabdus luminescens
MLSTINDRKIKFALVGCGRIAKNHFNSLEVHQEAAELVAVCDNDQEALNAAVEKTGVPGFSDFNTMLDNITADIIILTTPSGLHPAQAMTCFDKGFHVVTEKPMATRLAEGENMVKAADKAGKHLFVVKQNRLNATLQLLKRAVSEKRFGKIHLVHLNVFWTRPQAYYDQAAWRGTWEFDGGAFMNQASHYVDLIEWLIGPVKDVQAMTSTHLDIETEDTGVLNIRWRDGTLGSMAVTMCTYPQNLEGSITILGEKGTVRVGGLAVNEIQEWHFADEKEYDQQVKTANYETTSVYGFGHPLYYKNVIEVMKGEAQPITDGREGLKSLELLIAAYLSARDNKTISLPLTYZ

SEQ ID NO: 1696 - protein, 309 aa, Photorhabdus luminescens
MSEQFLYFLQQMLNGVTLGSTYALIAIGYTMVYGIIGMINFAHGEIYMIGSYVSFMVIAALIMMGIDLGWLLITAAFLTSIVIAAAYGWSIERVAYRPVRHSKRLIALISAIGMSIFLQNYVSLSQSSRDLALPGLITGQWVLGESDGFSASISAMQLTIWIVTFLAMLILTMFIRYSRMGRACRACAEDVKMASLLGINTNRVISLTFVIGAVMAAIAGVLLGQFYGVINPYIGFMAGMKAFTAAVLGGIGSIPGAMIGGLILGISEALTSAYLSTEYKDAVSFALLIVVLLFMPTGILGRPEVEKVZ

SEQ ID NO: 1697 - protein, 437 aa, Photorhabdus luminescens
MSSLNILTEKFDNKTATIAIVGLGYVGLPLMLRYNDIGFKVMGFDIDKEKTDKLNQGQSYIEHIPSAKISHAIKTGFEATTDFTNIAQCDAIILCVPTPLNKYREPDISFVINTTDRVKPYLRAGQVLSLESTTYPGTTEEELLPRVEESGLTVGEDIFLVYSPEREDPGNPDFETRTIPKVIGGHTENCLKAGIAVYQHAIDQVVPVSSTKAAEMTKLLENIHRAVNIGLVNEMKLVADKMGIDIHEVIRAAATKPFGFVPYYPGPGLGGHCIPIDPFYLTWKAREYGINTRFIELSGEVNSSMPDYVVTKTVLALNKANKSINGSHILILGIAYKKNVDDMRESPSVHIMEKLSELGANIEYADPHVPVFPKMREHHFNLISQPITENSLKTFDCVILATDHDKFDYELIINHAKLVVDTRGKYSPNHKNIIKAZ

SEQ ID NO: 1698 - protein, 457 aa, Photorhabdus luminescens
MINSLTARIFAIFWFTLALVLMLVLMVPKLDSRQLTSLLENEYRQGVMLEQHIEAELAQDPANDLLWWRRLFRAVEKWAPPGQRLILVTSEGRVIGAQRSEMQVVRNFIGQSDNADHPKKKKYGRSEMLGPFSIRDGEDHYQLYLVRPANSPQSDFINLMFDRPLLLLTATMLISAPLLLWLAWSLAKPARKLKNAADDVAKGNLRQHPELEAGPQEFLAAGNSFNQMISVLERMVIAQQRLISDISHELRTPLTRLQLATALLRRRHGENKELERIETEAQRLDSMINDLLVLSRSQHKNELLRENIKMTDLWNDILDNARFEAEQMDKTLEATLPPSSWAIYCNPLALGSAFENIVRNALRYSHHHIAVAFHADNQGITITVDDDGPGVNPEDREHIFRPFYRTDEARDRESGGTGLGLAIVETAINQHRGWVRAEDSPLGGLRLVIWLPLHGRZ

SEQ ID NO: 1699 - protein, 232 aa, Photorhabdus luminescens
MHKILLVDDDRELTSLLKELLEMEGFNVVIAHDGEQALKFLDDSIDLLLLDIMMPRKNGITTLKELRLHHQTPVIMLTARGSDLDRVLGLELGADDYLAKPFNDRELVARIRAILRRSNWSEQQQTDNGPPTLQVDNLQLNPGRQEANFANQILDLTGTEFTLLYLLAQHLGQVVSREHLSQEVLGKRLTPFDRAIDMHISNLRRKLPEREDGLPWFKTLRGRGYLMVSATZ

SEQ ID NO: 1700 - protein, 269 aa, Photorhabdus luminescens
CHLRFSLLLSAGFFIVVILTNPVYLISFNLSRFDCSFVLKKGKGMSGNEVKDRRPIKTRNAVWASKMAKWLQYKGATPNGISVASVVFAVFAGVCFAVCFLVESFWLTSILLIIGALLIQGRLMCNLLDGMVAVEGGLKTAAGTVFNDLPDRIADSFILIGVGYGLTLFPFAISLGCIAALFAVLTAYIRLLGGTCGLPQRFLGPMAKQHRMALITVSSIVAAFLPQLWSQYLLLAVLVVITLGCLWTCIRRTRVILNELQEKDACNEZ

SEQ ID NO: 1701 - protein, 223 aa, Photorhabdus luminescens
MNYRRRMLVMNKPQEVTLVSKGMGSFLSGLCRLLTGVRIRWIGCKPSVVSRIYYANHSSHLDGLVIWAGFPRVLRSRVHPVAARDYWSKTYLRRYFINKVFRAVLIDRKGEDCLKGNTLTPMEDVLKRGESLILFPEGTRGSGEQINKFKGGLYYLAKKYPDIELIPVYLENLNKVLPKGSALVVPVICSATFGQPLEKLGAKEEKADFLQRARQALEALILZ

SEQ ID NO: 1702 - protein, 315 aa, Photorhabdus luminescens
MTMLNNKLILLLGGMFVPLIIASIVGAILSSKYSMDNSNATIDNLNARIRGWWGMCIICVLSVIIGPIGSVLLFASMSFFALREFFTLTPTRRSDHEAMFWCFFIFMPLQYIAVGIEWYGVFSIFIPVYVFLFLPARIALAGDTTNFLERTAKIQWGMLVAVFCISHAPALLMLDIPGYEGENVELLLFLMIVVQMSDVLQYVFGKLFGKHPIVPKLSPNKTVEGFVGGILVSVLLGMSLYWVTPFSPWEAGLMSLAITLMGFIGGLCMSAIKRDSGIKDFGEMIEGHGGMLDRIDSLCFAAPVFFHLTRYFYTZ

SEQ ID NO: 1703 - protein, 324 aa, Photorhabdus luminescens
MSNEIKRIGVLTSGGDAPGMNAAIRGVVRAGLTEGLEVFGIYDGYLGLYENRMKKLDRFSVSDMINRGGTFLGSARFPEFRDEKVRTVAIENMRKNGLDALVVIGGDGSYLGAKKLTEAGFPCIGLPGTIDNDVAGTDYTIGYFTALETVVEAIDRLRDTSTSHKRISIVEVMGRYCGDLTLSAAIAGGCEFIVLPEVSFSCDELVAEIKAGIDKGKRHAIVAITEHVCDVYELAKHIEKETHHETRATVLGHVQRGGSPVAYDRILASRMGAYSIQLLLEGYGGRCVGIQNEKLVHHDIIDAVQNMKRVFKQDWLETAKKLYZ

SEQ ID NO: 1704 - protein, 332 aa, Photorhabdus luminescens
MKVRWRVALALLLITNSSVWAKDLQLLNVSYDPTRELYQQYNRAFSDYWQQKTGDKVIIRQSHGGSGKQATSVINGLEADVVTLALAYDVDAIAERGRIAKAWIKRLPENSAPYTSTIVFLVRKGNPKQIKDWSDLVRPGVSVVTPNPKTSGGARWNYLAAWGYGLIHNNQEQDKAKAFVKALYQNVEVLDSGARGATSTFVERGIGDVLIAWENEALLAINALDKDKFEIVTPSLSILAEPTVSVVDKVVDKRHSRELATEYLQYLYSPVGQEIAAKNYYRPRDKVVADKYRSSFPALELFTVDKIFGGWGEAQKVHFATGGVFDEIIQRZ

SEQ ID NO: 1705 - protein, 256 aa, Photorhabdus luminescens
MRHPLVMGNWKLNGSTHMVNELITGLRQELSSVTGCDVAIAPPALYLSQAKQALAGSRIALGAQDVDVNLSGAFTGETSATMLKDIGAEYIIIGHSERRTYHQESDEFIAKKFAILKQQGLIPVLCIGETEQENEAGQTESVCARQIDAVLNTLGVAAFQGAVIAYEPVWAIGTGKSATPAQAQAVHKFIRDHIAQKDAAIAQQIIIQYGGSVNADNAAELFSQPDIDGALVGGASLKANAFAVIVKAAAAAKKAZ

SEQ ID NO: 1706 - protein, 207 aa, Photorhabdus luminescens
ASGNMKMDVNKFLAIILAASSVGLPLVANADKSTTTEPTVQATYLLPNAPSFDETIPRFREKYNRCNPTLPLREYRVIISKNIYPPLTRAASKINEKLYSSAVLERGSEKIKSLQLTLLPSENTAETQQNQMLAEQYMTALMRHFNPTLSQEQSKENIDNLLINSKKSPFYSHNIGAIRYIVVNSSEKTLTFAIEPIKLWLFEPDNZ

SEQ ID NO: 1707 - protein, 371 aa, Photorhabdus luminescens
MKIIAGKTLLAGCIAMMMSHSLWAQEIKVAIVGAMSGPVAQYGDMEFTGARQAIADINAHGGINGNKLVGVEYDDACDPKQAVAVANKVINDNIRYVIGHLCSSSTQPASDIYEDEGVIMITPAATNANLTTRGYQMILRTTGLDSDQGPTAAKYIAEKIKPQHIAIVHDKQQYGEGLARSVLDKLKKAGANIVLFEGVTAGDKDFSALVARLKKENVDFVYFGGYYPEMGQILRQAKQAGLNIRFMGPEGVGNSSLSNIAGVASEGMLVTLPKRYDQVPVNKAIVEAIKGKKGDPTGPFVWTTYAALQSLAAAMNRTGSMEPTDLVQDLKANPVDTVMGRLSWNAVGDLKGFEFGIFEWHADGSSTSVKZ

SEQ ID NO: 1708 - protein, 249 aa, Photorhabdus luminescens
MANWVTGKVTQVIHWTNTLFSIRIHAPVEKFTAGQFAKLAMEIDDERVQRAYSYVNAPIDNNLEFYLVTVPEGKLSPQLAALQPGDDLLVTEQAAGFFILDEIPDCETLWMLSTGTAIGPYLSILQQGDHLDRFKNIVLVHAVRLTQDLSYLPLMQQLVERLNGKLRIQTIVSREQNLGSLTGRIPTLIENGELESAVGLTMSSDNSHIMLCGNPQMVKDTQQLLKEQRGMAKHLRRKPGHITSEQYWZ

SEQ ID NO: 1709 - protein, 508 aa, Photorhabdus luminescens
MTTENMIEKKYIVALDQGTTSSRAIILDHDANIISISQREFTQIYPKPGWVEHDPMEIWATQSSTLVEVLAKADISSDQIAGIGITNQRETTIIWEKETGKPIYNAIVWQCRRTADACTKLKQKEGLEEYIRQNTGLVVDPYFSGTKVKWILDNVAGARERAEKGELLFGTVDTWLVWKMTQGRVHVTDFTNASRTMLFNIHNLEWDQHILDELQIPRSLLPSVHSSSEIYGQTNIGGKGGTRIPISGIAGDQQAALYGQLCVQPGMAKNTYGTGCFLLMNTGTDAVRSNHGLLTTIACGPRGEVNYALEGAVFVGGASIQWLRDELKLIADAADSEYFATKVKNSNGVYVVPAFTGLGAPYWDPYARGSIFGLTRGTNSNHIIRATLESIAYQTRDVLDAMQADAGTRLQALRVDGGAVANNFLMQFQSDILGTRVERPVVRESTALGAAFLAGLAVGYWKDLDEVKSKATIEKEFRPGIETTERNYKYNGWKKAVARAQDWEDKGZ

SEQ ID NO: 1710 - protein, 277 aa, Photorhabdus luminescens
MSQTTSTTLTGQCISEFLGTALLVFLGVGCVAAARIAGAQLGLWEISIIWGMSVALAVYLTAGVSGAHLNPAVTIALWLFARFDGKKVIPFIIAQMIGGFIAAALIYMMYYSVFLDYEQVHNIVRGTPESLFTAGVFSTYPMASLSISQAFMIEVIIAAILLCLILSLTDDGNGIPRGPLAPLLIGIVIAVIGGAFGPLTGFALNPARDFGPKLIAYLAGWGDIALTGGREIPYCLVTLTAPIIGGIVGAFGYRKLIGRNLPSDVHKTEDQKKKKAZ

SEQ ID NO: 1711 - protein, 306 aa, Photorhabdus luminescens
MNSSTSISQTQAWLESLRPKTLPLALAAIITGSALAAWTGHFKLPVALLALLTAAILQILSNLANDYGDVIKGSDTEKRIGPLRGMQKGIITPSQMKKALKIIVLLTCLSGSALIAVACEEPSDIFGFLALGLLAIIAAITYTVGAKPYGYMGLGDISVLIFFGWLSVAGTYYLQAGFFDSVVILPATACGLLSAAVLNINNLRDIEDDRRHGKNTLAVRLGPKKARYYHGCLIITAILCLVLFTIQNPSGWSSWLFLLALPWLFKHMWYVLNEPTPEGMRPMLGQMVKAALLTNILFSVGLIFNZ

SEQ ID NO: 1712 - protein, 444 aa, Photorhabdus luminescens
MSEMTPREIVSELDKHIIGQDKAKRAVAIALRNRWRRMQLDETLRYEVTPKNILMIGPTGVGKTEIARRLAKLANAPFIKVEATKFTEVGYVGKEVDSIIRDLTDAAVKMVRLQSIEQNRYRAEELAEERILDVLIPPAKNNWGQTETQVEPSAARQAFRKKLREGQLDDKEIEIDVATTPVGVEIMAPPGMEEMTNQLQSMFQNLAGQKHKSRKLKIKDAFKLLIEEEASKLVNPEELKQQAIDSVEQHGIVFIDEIDKICKRGQTSGPDVSREGVQRDLLPLVEGCTVSTKHGMVKTDHILFIASGAFQVASPSDLIPELQGRLPIRVELQALTTKDFERILTEPSASLTEQYKALMETEGMIISFTDDGISKIAESAWQVNESTENIGARRLHTVLERLIEDISFEASERRGQSVDIDADYVKKHLDELVADEDLSRFILZ

SEQ ID NO: 1713 - protein, 276 aa, Photorhabdus luminescens
VAQRDYVSRGRSNTRRKNTDKKKYQAQGLPKATLAVAVALVAIFIGGLYFITHNKQKSEPEILPKHSQQNNGLPPKPEERWRYIKELENRPVGVETPRDPSSGGQINSQTQLTAEQRQLLEQMQADMRQPTTSLPEVPYNGVQVPRSQVIIKPSAETQKPLEARPQPQPQQTLPQQPMQTQPVQPQTLPPAETSKPKPVEKAQRMILQCGSFRNMDQAESVRANLAFAGIESQITTGDGWHRVVLGPYSKNTAEKMRERLKGAGVSGCILRVTGGZ

SEQ ID NO: 1714 - protein, 343 aa, Photorhabdus luminescens
LEQKKNGTSATMKDVAEVAGVSTATVSRTLMNPEKVSSQTRQKVEQAVLAVGYYPNNLSRNLKRGESKTILVIVPNISDPFFTDVICGIEETAEQHGYLVLIGDCQHQQKQEHAFLNLIATKQIDGLLLLGSNIPFDASKEEQKNLPPMVMANEFSPELELPTIHIDNLTAAFNATHYLQTLGHKRIACLSGPENIPICRYRRQGYIQALRRSGGTIREDYIVQGNFTHESGAKLTEQLLSLLDPPTAIFCHSDVMAIGVMWQAKRMGLKIPEDLSIIGFDNLSLAMYSDPPLTTVGQPSYQIGHKAMLLLLDQIQGHTTSGGSQLLESELIIRQSTCSPKSZ

SEQ ID NO: 1715 - protein, 740 aa, Photorhabdus luminescens
LIVRNNFMAVVQVALPVPLTRSFDYLLPAESQLPVVGVRVIVPFGKRKAIGIVTGITDHSDIPIEQLKTIESILDTHSLFPENLWQLLLWASDYYHYPIGEVLFHALPVLLRQGKPAESTPLWQWQVTPTGAELPLAQLKRSPKQQQVLATLRRKAIYRHQITELELSESAFQSLKKKSLIGLYPVQPESENWQNHFQITGERLKLNTEQATAVGAIRAEDQQFSPWLLAGITGSGKTEVYLSVLENILEQGKQALILVPEIGLTPQTIRRFRERFNAPVDVLHSALNDSERLAVWLRARQGENAIVIGTRSALFTPFACLGIIIIDEEHDSSYKQQEGWRYHARDLAVFRAKKENIPVIMGSATPALETLYNVQQGKYRPLTLSKRAGYAQPATQHLLDLKGLPLKIGLSQPLIKRIEEHLQANNQVILFLNRRGYSPALLCHECGWIAECQRCDHYYTLHQYHRQLRCHHCDSLRPVPRQCPQCGSTHLQPVGLGTEQLEDGISALFPNVPVTRIDRDTTSRKGTLEQQLADIHAGNARILIGTQMLAKGHHFPDVTLVALLDVDGALFSADFRAAERFAQLYTQVSGRAGRAGKRGEVVLQTHHPDHPLLQILLNKGYDAFAIQAMDERKSVFLPPFTSHIILRSEDHDNQQAPAFLQQLRLLFEHHPLRDDNLWIMGPVPALQSKRSGRYRWQLLIQHPSRTVLQKIMALVYPQITALPQTRKVKWNIDVDPTDSZ

SEQ ID NO: 1716 - protein, 391 aa, Photorhabdus luminescens
VVADMTRKPATIAVRNGLNNDEQYGCVVPPIYLSSTYNFTDFNQPRTHDYSRRSNPGRDMVQQALAELEGGAGAIMTSSGMSAIHLLCMVFLQPGDLLVAPHDCYGGSYRLFDSQTKRGAYEVAFVDQSDEQALKQVLSKKPKLVLIETPSNPLLRIVDIAHICQLSHEVGATVIVDNTFLSPVLQKPLALGADLVVHSCTKYLNGHSDVIAGAIIAKDEEVATELAWWANNIGVTGAAFDSYLLLRGMRTLSPRVLLQQKNALELVNYLQQQPLVKKLFYPALKDHPGHEIACKQQFGFGAMISFEFDGGEQAIRRFLSELKLFTLAESLGGVETLISHTATMTHAGMSAQARAEAGITDSLLRVSVGIEDSQDLIADLENAFQAVVKEZ

SEQ ID NO: 1717 - protein, 814 aa, Photorhabdus luminescens
VTMGALVVATAENDRQLHKFGGSSLADVKCYQRVAKIMANYSQPGDLMVVSAAGSTTNQLINWLKLSQSDRISAHQVQQVLRRYQQDLIRGLLPETVAEELVKRFIADLEKLSALLDKPVSDVTYAEVVGHGEIWSARLMSAVLEAQGIPSAWVDARQFLRAERAAQPQIDVTLSQPLLNQLLTQNLNKRLVVTGFISSNHDGETVLLGRNGSDYSATQVGALAGARRVTIWSDVAGVYSADPRKVKDACLLPLLRLDEASELARLAAPVLHARTLQPVSFSDIDLLLRCSYQPEQGSTRIERVLASGTGAKIVTSHDDVCLIELHVAAHHNFKQTYKDIDLLLKREQIRPLATGIHLDCNLIQLCYTSEVVNSALSVLEDATLPGKLSLREGLALVALVGAGVCKNPLHCHRFYQQLKDQPVEFIWHAEDGISLVAVLRTNQTEHVIQGLHQSLFRAEKRIGLILFGKGNIGSRWLELFAREQKNISARSDFEFVLAGVADSRRSLLDYQGIDASRALAFFDDEATEYDVDELFLWMRAHPYDDLVILDVTASEELARCYSDFASYGFHVISANKIAGASSSRDYRFIRDAFAKTGRHWFYNATVGAGLPINHTVRDLRESGDTILSISGIFSGTLSWLFLQFDGSVPFSDLVEQAWQQGLTEPDPRIDLSGQDVMRKLIILAREAGYEIEPEQVRVESLVPKEAESGSIEQFFDNSGAINEQMVQRLAAAQEMGMVLRYVARFNANGKAKVGVEAVRPDHPLASLLPCDNVFAIESRWYRDNPLVIRGPGAGRDVTAGAIQSDLNRLSQLLZ

SEQ ID NO: 1718 - protein, 391 aa, Photorhabdus luminescens
LFHFSLLSSNPMKIVIAPDSFKESLSALQAAEAIEQGFREIYPQAEYIKLPMADGGEGTVESMVAATGGKIVRLLVTGPLNQPVDSFFGVLGDGETAVIEMAAASGLHLVPMEKRNPLITTTYGTGELMLAALDQGVRKIILGIGGSATNDGGAGMMQALGACLLDSDGKALGLGGAALSRLAKIDLSGLDARLNRTEIIVACDVINPLCGEFGASAIFGPQKGATPEMVKELDAALRHYGEKIELLTGIKVIDVPGAGAAGGMGVPLLGWLDAKLQPGIDIVISTLELAKVVQGADLVITGEGRIDSQTIYGKTPIGVARIAKKYAISTIALVGSISQDYSIVHEHGLDAVFSIMSGVCSLSDALVCGHENLRVTARNVAAVWKMGQLEZ

SEQ ID NO: 1719 - protein, 295 aa, Photorhabdus luminescens
MSFFHANQREALNQNLAELEGQIRVSFEFFPPRTAEMEKTLWKSINRLSTLKPKFVSVTYGANSGERDRTHSIIKGIKEQTGLEAAPHLTCIDASRDELCEIARDYWKNGIRHIVALRGDLPENSEKPKMYGSDLVELLKKEADFDISVAAYPEVHPEAKSSQADLISLKRKIDAGANRAITQFFFDVESYLRFRDRCVTAGIDVEIVPGILPVSNFRQLKRFAVMTNVRIPSWMTRMFDGLDDDPESANLVGASIAMDMVKILSREGVKDFHFYTLNRAELSYAICHTLGVRPZ

SEQ ID NO: 1720 - protein, 320 aa, Photorhabdus luminescens
MRECDRIKAVLLASEGWSSVMIAQALRLHEMTVNRHISDYLNQGKLKSDNGGSDSLLSQEQTDFLINHLSQHLFHHTHEIVAYVAQLWNITFSIPGMNKWLHRQGFSYKKPCGVPHKFDAEKQRQFIEYYENLKVTAKDEPILFLDAVHPTQGTKLGYGWMRKGEKKTVKTTGSRTRLNILGALNLNAIGRTVFQEYQTINDYNICCFFNEIRKSYPDYHQKIHLIVDGAGYNKAHLVKEWAYVSNIELHYLPPYSPNLNPIERLWKVMNEQVRNNRYFADKHEFRDNVFKFFTTTLPDIADSLMSRINDHFQVLKTASZ

SEQ ID NO: 1721 - protein, 214 aa, Photorhabdus luminescens
KLHLEVSWVYLLIYLFTYLLIYLFTYLLIYLFTYLLIYLFTYLLIYLFTYLLIYLFTYLLIYLFTYLLIYLFTYLLIYLFTYLLIYLFTYLLIYLFTYLLIYLFTYLLIYLFTYLLIYLFTYLLIYLFTYLLIYLFAYLLICLFAYLLICLFAYLLICLFAYLLICLFAYLLICLFAYLLICLFAYLLNKYGVPNYRWLDNVIPFLLCWTAKRZ

SEQ ID NO: 1722 - protein, 321 aa, Photorhabdus luminescens
LIQFMLEKVMPISSISGHTLLSQTQVPQHAAASPLLEQGNRLFEQSVRRGPLHFQSSDLKHLITELRQLQSAPNSAQAQRVQDAIQHWESHHPKEVAARSTRLAELKQALAEQGAVVRTLQPKVTTTSPQAMLKQAMPALQKMETYACTDGLTFVGKHSSHRRQVEERLDSFGGSQSRKAANKQANDMSNMAAIAAKRGNVSLNQLKSIAACVAQAQAGCCTTFAYSAAAELMKHNQDNQQRIEVVAHRGAKGHSQTHCFVVVGRDPNSELSKPETWGKQAHVIDPWAATIGGRLQGTPSNPPIANLWPPTESVFDNHKEZ

SEQ ID NO: 1723 - protein, 879 aa, Photorhabdus luminescens
MNQQYSAMRSNVSMLGKLLGDTIKEALGEDILDKVETIRKLSKSSRAGNEAHRQQLLSTLQNLSNNELLPVARAFNQFLNLTNVAEQYHSISPHGEAASNPVALAKLFTRLKEKNFNNGDLKKAVNELSIELVLTAHPTEIARRTLIHKLVAVNTCLSQLDHDDLADYERNNIMRRLRQLVAQSWHTDEIRKIRPTPIDEAKWGFAMVENSLWEGVPAFLREFNEQLEESIDYSLPVEAVPVRFTSWMGGDRDGNPNVTAEVTRHVLLLSRWKAADLFLKDIQVLVSELSMSECTPEVRKLAGGDEILEPYREIAKKLRTQLSNTLTYLEKQLKGEQVLPPTDLLVDNEQLWQPLYACYQSLKTCGMEIIANGQLLDILRRIRCFGLSLVRIDVRQESTRHTTAISELTQYLELGDYASWSEEEKQAFLLYELHSKRPLIPHNWQPSAETQEVFATCKVIAESPQDAIAAYVISMAKAPSDVLAVHLLLKEAGCPFTLPVAPLFETLDDLNNAENIIQQLMNIQWYRELIHDKQMVMIGYSDSAKDAGVMAAAWAQYRAQDALINVCEKEGITLTLFHGRGGTIGRGGAPAHAALLSQPPGSLKGGLRVTEQGEMIRFKFGLPQVTISSLALYASAILEANLLPPPEPKPEWHQVMDTLSDVSCKMYRDYVREQPDFVPYFRAATPEQELAKLPLGSRPAKRHPAGGVESLRAIPWIFAWTQNRLMLPAWLGAGAALQQVVNDGKQDVLAEMCRDWPFFTTRIGMLEMVFAKADLWLAEYYDHRLVDKNLWPLGQKLRKQLSADIKTVLAISKDEHLMADLPWIAESIALRNVYTDPLNVLQVELLLRSRQQQYSDPQVEQALMVTIAGIAAGMRNTGZ

SEQ ID NO: 1724 - protein, 386 aa, Photorhabdus luminescens
VNIKLPPFIELFRQLIATPSISATDISIDQSNESLINLLASWLKEIGFEIEIQPVPETLGKYNLLATLGRGPGGLLLCGHTDTVPFDEGLWTKDPFTLTERDNKLYGLGTADMKGFFAFIIDALRDIDVSKITRPLYILATADEETTMAGARYFAASTTIRPDFAIIGEPTSLHPICAHKGHLSNAIRIVGQSGHSSDPDRGINAIDLMHESIGHLIELRNTLKEHYNNPAFTIPYPTMNFGYIHGGDAVNRICAHCELHMDIRPLPGLTLQDLNGLLNEALEPMKQRWPGRLTIDELHSPIPGYECPTDHKMVDVIEKLLGRKAETVNYCTEAPFIQKVCPTLVLGPGSIEQAHQPDEFIDMSFIGPTRKIISQLIDHFCLSNNZ

SEQ ID NO: 1725 - protein, 335 aa, Photorhabdus luminescens
MLNTLVVGASGYTGAELAAYLHRHPHMNLIRLMVSAQSVDADKCFSDLHPQYKGIVDLPLQPLTDIINAAKGIDVVFLATAHEVSHDIAPLFLAAGCTVFDLSGAYRVQNAQIYQQYYGFKHKHTEWLAQAVYGLAEWQAENIKQAQLVAVPGCYPTVSQLCLKPLLENSLLDISYWPVINATSGVSGAGRKASMTNSFCEISLQPYGIFTHRHQPEIEEHLGTRVVFTPHLGNFARGILATITCKLKPGVTAEQIDEVYRQAYKDKPLVRLYSKGVPALKSVVGLPFCDIGFVVQGDHLIVVGTEDNLLKGAAAQAVQCMNIRFGFEETQALLZ

SEQ ID NO: 1726 - protein, 258 aa, Photorhabdus luminescens
MEPLVIKLGGVLLDNEEALERVFTALQEYRQTHERQLVVVHGGGYLVDELMEKLQLPIVKEQGLRVTPADQIGIITGALAGIANKTLLSWATKYQLASVGLYLGDGNVVTVSQLSEELGHVGKAMPGDAKLLKTLLDAGYMPIISSIGVTDKGELMNVNADQAATAIAQTLGADLVLLSDVSGILDGKGQKIPDINVEKAEQLIAHGIITDGMIVKVNAALDAARTLDRPVDIASWRHADQLTDLFNGVPVGTRILAZ

SEQ ID NO: 1727 - protein, 405 aa, Photorhabdus luminescens
MHTKDIKKIVLAYSGGLDTSAIIPWLKEHYGNCEVVAFVADVGQSREDLEGVEQKALRSGASECHVVDLREEFIKDYVYPVLKTGALYEGSYLLGTSMARPIIAKAQVELALKVGADALAHGATGKGNDQVRFESTYTALAPQLKVVAPWREWDLRSREALLDYLKARDIPTTATLEKIYSRDENAWHISTEGGVLESTWNASNKDCWVWTVDPEEAPDEAELVSVMIEKGEVVGVNGKVMSPYQCLEALNILGVKHGIGRIDIVENRLVGMKSRGCYETPGGTIMMAALRGVEQLVLDRDSFKWRQQLGLEMSYVVYDGRWFAPLRRSIQAAAETLAADVSGEVVLKLYKGQVTAIQKRSTNSLYSEAFATFGEDEVYDHSHAAGFIRLYSLPSRIRALNSKEZ

SEQ ID NO: 1728 - protein, 460 aa, Photorhabdus luminescens
MALWGGRFSQKADQRFKQFNDSLRFDYRLAEQDITGSVAWSKALITVGVLTVEEQQRLELALNELLNEVQANPQAILQSDAEDIHSWVEGQLISKVGGLGKKLHTGRSRNDQVATDLKLWCKEYISHLHQAIVELQQVLVITAEKNQDTVMPGYTHLQRAQPITFAHWCLAYVEMLVRDENRLQDTLKRLNTSPLGCGALAGTAYDIDREQLASWLGFASATRNSLDSVSDRDHVLELLSNASISMIHLSRFAEDLIFFNSGEAGFIELSDRVTSGSSLMPQKKNPDALELIRGKCGRVQGALTGMMMTLKGLPLAYNKDMQEDKEGLFDALDIWLDCLHMAALVLDGIQVRRSRCAEAAKQGYANATELADYLVAKGVPFREAHHIVGEIVMMALTQGKALEALPLTELQKFSSAIIEDVYDILSLQSCLDKRLAKGGVSPKQVMKAIVEAKQRLKLSZ

SEQ ID NO: 1729 - protein, 286 aa, Photorhabdus luminescens
MAKEMQTLALVPQGSLEGYVRASNTYPMLTAEEEKELAERLHYQGDLDAAKKLILSHLRFVVHVARSYAGYGLPQADLIQEGNIGLMKAVRRFNPEVGVRLVSFAVHWIKAEIHEYVLRNWRIVKVATTKAQRKLFFNLRKTKQRLGWFNQDEVEMVAKELGVTSKDVREMESRMSAQDMAFDMSADDDSQEGQPVAPVLYLQDKASDFADGIEEDNWENHAADKLSVAIESLDERSQDIIRCRWLDDDNKSTLQELADKYGVSAERVRQLEKNAMKKLRVAIEAZ

SEQ ID NO: 1730 - protein, 302 aa, Photorhabdus luminescens
MNIRDLEYLVALAEHRHFRHAADSCHVSQPTLSGQIRKLEDNLGVMLLERTSRKVLFTQQGMLLVEQARTVLREVRILQEMASLQGENMSGPLHIGLIPTVGPYLLPHIIPRLHSLFPKLEMYLYEAQTQSLLAQLDSGKLDCAILAMVKETRDFIEVPLFEEPMKLAIYDDHPWAERKKIAMDELAGEKLLMLEDGHCLRDQAMGFCFQAGAKEDTHFRATSLETLRNMVAAGSGITLLPDLAVPQEKKRDGVCYLECNSPEPKRSVVLIYRPGSPLRGRYEQLAEAIRAKMGTYYGQSKZ

SEQ ID NO: 1731 - protein, 466 aa, Photorhabdus luminescens
MQHIHFDAIVIGSGPGGEGAAMGLVKQGKSVAVIERYNNVGGGCTHWGTIPSKALRHAVSRIIEFNQNPLYSDNSRVLRSSFAEILRRAEMVINQQTRMRQGFYERNGCRMFSGEATFIDDHRVSVRYADDNHDILSADKIIIATGSRPYCPPDVDFTHSRIYNSDSILKLDHEPRHVIIYGAGVIGCEYASIFRGLGVKVDLINTRNHLLAFLDQEMSDALSYHFWNSGIVIRHNEEYSKIEGVDDGVIVHLKSGKKVKADCLLYANGRTGNTDTLGLKNVGLEADSRGLLKVNKIYQTSNENIYAVGDVIGYPSLASAAYDQGRIAAQAMTKGNAEVHLIEDIPTGIYTIPEISSVGKTEQQLTAMKVPYEVGRAQFKHLARAQIAGMNVGSLKILFHRETKEILGIHCFGERAAEIIHIGQAIMEQKGESNTIEYFVNTTFNYPTMAEAYRVAALNGLNRLFZ

SEQ ID NO: 1732 - protein, 367 aa, Photorhabdus luminescens
MQNLLPTESYEQQLTEKVSRLKNMMAPFQPPRPEVFRSPLSHYRMRAEFRIWHEQDDLYHIMFDQQTKQRIRLVQFPVASKLINKMMVVLIDSIRSEQILCHKLFQIDYLSTCSNKILVSLLYHKKLGEEWTQQALRLREALRHKGFDVELIGRAAKTKITLDHDYIDEVLPVAGRKMIYRQVENSFTQPNASVNIHMLEWAINITKDSKGDLLELYCGNGNFSLALAQNFERVLATEIAKPSVAAAQYNITANGIDNVQIIRMSAEEFTQAMNGEREFNRLQGINLKSYQCETIFVDPPRSGLDEKTLEMVRAYPRILYISCNPETLCHNLETLTQTHKISHLALFDQFPYTHHMECGVLLEKLNZ

SEQ ID NO: 1733 - protein, 620 aa, Photorhabdus luminescens
MINKKRLLLSTVSIMVISGWNQASAAVESQDSLVVTASRFKQPISSILAPYTVVTRDEIDRWQSNSVADILRRLPGVDIARHGGIGQLSSLFIRGTHASHVLVLMDGIRLNQAGISGSSDLSQIPVSLVQKIEYIRGPRSAVYGSDAIGGVINIITTREKLGTSLNVGIGSHGYQTYDGATQQTLAENTVLTAAANYTYTKGYDVVADGNTGGFRQPDRDGFMSKMLWLGVDQKFNEQVSGFVRAYGYNNRTSYDADINWSYPYARPDTRELYSRHYDMGVRFNQGIYSSQLITSYSHTKDYNFDPQYGRYDKSASLNDSEQYNLQWGNTFQLYQGIVSTGVDFQKQSIEAGTSYIPKSKTVRNTGMYLTAQQQLKDFILEGAIRSDKHSEAGWNTTWQASLGWEFIKDYRLIASYGTAFKAPTLSQMYGFGGNHDLKPEESKQWEGGIEGVTGQLTWRMTVYRNEIEQLIDYANSRYYNIGKAKIKGVEWTGLIDTGMFQHQLTIQYIDPRNSETNEILVRRAKQQVKYQLDWQLYDFDWGLTYQYLGRRYDKDFSTSPAKRVKLGGVSFWDLTVSYPVTSYLTIRARIANLLDKDYETVYGYRIPGREYYLTGSYNFZ

SEQ ID NO: 1734 - protein, 288 aa, Photorhabdus luminescens
MAIAFQDVNTTSLGAITSDLNKAARPTVLVFDSGVGGLSIYQEIRQLLPDLHYIYVFDNEAFPYGEKSEEFIVERVVQIVGAIQQKHPLTIVVIACNTASTVSLPALRERFSFPVVGVVPAIKPAAKLTRNGVVGLLATRATVNRSYTKELIEKFATGCRIESIGSAELVELAEIKLHGGKVSPDILKKILKPWLGMKKPPDTVVLGCTHFPLLAEELVQILPDGTRLIDSGVAIARRTAWLVKHQNNLVCTSADSLAYCMKVNTDTDALIPVLQEYGFSKLEKLITZ

SEQ ID NO: 1735 - protein, 655 aa, Photorhabdus luminescens
MTSEPNLLNRITITIEANNQQVAKKVLHGSLLNQTNINKLLNSYFDEYHIHQNIALEKLTLDLGEISFHDFNSLFPARLKVALNKALSQYQTNNHREETLLNKPTSNKFTDRTSLSSENHLINAENFIHFLSQKGPQFNPMEVITNNKNSDIKIKPLINQLMQIENQSALLLAKGCLSEQGLQRLLAIRQPVLLVAINRRLSARINKPQHQEERVSSGQLILNALEYIQRHNTQEIPKPDAKIISRITIELDNGVLNAAPVITLLRQAITRNIPLNNIPLNNIPLNRWLKQLWQTVSVSQLCKKHLPADEYQYLLEYFTLNHTDKNISDKKPTITPVDISNIQAYQHLPKYFTANNAGKNKSDTESTMNNVNFSNVQQHLTNQKIVSAPDKTPIIGNHYNPHQTSNKSHSGWALLTDKNTSDKKSTITPIDIANIQTYQHQANQQVITDDQKIVSAPDKTPITGNHYNPHQTINRPYSGQTLLSEQSLPYQINNAGILILWPMLPTLFNQLGLLEKQKFIHRQAQLNAVDLLDHLIWGTEEKPAERKLLNYVLCGLIADKDIESIPIEPEKQLIADQWLDAVTGQLTGWKKLSRNDVRQLFLQRPGELLTDEQEIKITIQQQPFDALLIDWPWPLNIARLPWLDRPLRIDWQNIZ

SEQ ID NO: 1736 - protein, 205 aa, Photorhabdus luminescens
GRLSMCLCLGICDSVNVVFSTLTLTETAVDVVFLETFFPLPLPLALLLLFPVSETVSPHMIKRLLKSGVPLLPSQKAQPLGALLPENITIIPLESNLLASILTPSELTVIPKPALTETPLPSTLIPLLALISNPSPPIFTPQPIPTDIPEDSTLIVEFFDFTETPLVSTLMPLLGLIATPLPLTVIPLAALTATLSLLTTIPLPZ

SEQ ID NO: 1737 - protein, 411 aa, Photorhabdus luminescens
YKVIKMVKKYNLYSSDANLESTNIQSTGPSVGDLKNRFKEGSIPLQTDYADLINIADIGRKACGQAPQQNGPGAGLKLADDGTLNLKMGTLSSPDFSPLILEKDILSVDLGSGLINKPNGICVGQGNGIVVNNDNVAVKAANGITVNGSGVAIKPNNGINVDTNGVSVKSKNSTIKVESSGISVGIGWGVKIGGEGLDIKASNGIKVDGNGVSVKAGFGITVNSDGVNIDANKLLSKGMIVMFSGSSAPSGWAFCDGNNGTPDLRSRFIMCGETVSETGKSSNKASGSGSGKNVSRNTTSTAVSVNVSVLNTTLTESQIPKHKHIESLPYYTTLGFAYDHTTIGATNNKIDNSVNGLIWKRTSGPDYHPYTSDIGGGQGHNHNASASSPSHTHSVDVVPPYYILAFIMKLZ

SEQ ID NO: 1738 - protein, 1119 aa, Photorhabdus luminescens
LMSHQDALFPIVKDDITFDALLTQAKTVIEQQSGQCWSNTSENDPGVTLLEACCYGASDLAYRHSLPLKDLLTPKPAEQIPGDGIFPQEFGPQQTLTCGPITAEDYRRALLDLHSSDTVNETNNGYFFFNDVQLIREPEEQRYKYWYNKQERKYTFNDLGADGKLTLRGNYWLYLLPGQETQADNKLAQQKLNDFLKNNRNLGESVSKIIWLQPINFLLQIDIELNDNVIDIPDIFAQVYMAAEQMVLEKPGRYTTQAMKDLGYSNEKIFSGPYLHHGWIPTLPQTKNYTGATVLNLSHLVNRLLAINGIQSVTRLALAHHDTTITPLSNDNWSWEIAQGYYPRLWGNDPLALITSPDSPLTITAKGGVKIVVSKQDIEEKLIAEPLIDTQPELLDWGKYRKVLDYYPVSNKLPACYGLQAKKPTPQQVQLHQFMLPFEQMLANGCAELALLPKLLAFKQRGETVYGVQWPFKAGTVNYNVHQQITSDLTAKLNYDSQIYINDDIQRSNYIKELEILDHLLGYFGAQLAARPLTLDFQDFLDTQRGYLAQQPELTYQRNNIRIDKISALQKRIAARLGLGGECFSDTPDLANLPFYLIEHRQLLPAKPDIQFNTKQKPDSLVVEDDQLRITQKGTAGRLLQGQVINLIITDNDREFTLRGQMITEVSGETFSLNTRNSTGLKHNLERILEAFEQNKLFWQNSPVWLEDMDYQLVYADATYQNATEDQRWITSSAQSPFPAMIEENDEITLKYIITPSGPSQKTLARTVQAEPKPEYELKARVIKFDRIQGKILIKRNQESRDNFPSETEAWRYRWYFSSEKYALADRFSFVVSVVVNRLLIESNKVDPYKLEAWVKTEILSEFPAHISMIIHWLSPKHFEDFANTYKRWQNNNAPLGDEAYHILETLTLGRLPSATAGIGSMRIATEQQRIEVIGESGDQWHEDVIKDNQLLYVPYTKTVVLVNIDFNKENNKETTVSELLYQPVENKGKLVFLTDNSQIGPEYAVLKSDNVWTDYHIKVKKNKNGVITDEILHIKGRKKVGLNLSWTAMNLYDLDADSRWSFYYGFVLGDNPDLSGALFHTEEPLILSLNYISDPNDLKGEIRTKFSFNFTYDGNNPZ

SEQ ID NO: 1739 - protein, 909 aa, Photorhabdus luminescens
ITGDINMGQAELENKLSAIVPDTAFKLDERSTLDILNWLQEYAKKIPFDQEKKQFWDSFYFIQANNPQQLADIYQNVNKADGRLPAHQAFVLAFLTLLETTNRLLNTFPARHRDLYYRELLGLKPKKAQADKVALGITLNPDSTESLIAQGTLFDAGQDSAGNPLHYASDTDLLANQGELTDLYWYRRDKDGWQSATPLNHSDNLALPENGIRLFSPTSHDTPVLSGYLITCSLFAMPAGERRIKVTLASEWAGNTDHITATISAGDHWLSLSIKSIDKTTIELGLSSSDAAVTAPDALDNMAFNVPALKLGTTQGPILPEIKGIEVSVNGNRSVRYASDNGIEQTDTASFPFGQSPSLGSGFNLVAPEWYGSENATLTITPQWVGLPTSSFSTWYDKYNPKPASNGVFKVQGYLVTSQKRDALNNAKSQSLFGGTGTPQGQSLTLTLPVMNYPLADSPSPNEWPASVRIELAEQDFMHAQYWQNPTDKNVPYTPQISALQVQFNAKAKPEQFTVYPLTPFGRAEATAKMPTLTHEAFYLGFTGVSPGQTLSLYWQLAGIQALALSWFYLDKSNSWNKLDELVDDQTHNLFDRGIWRTLLPQDAANQAALMPPGRYWLKAEITAQTDPQDYPSIKSPLYNATTATLVNAQAIEQAHFINGLAAGSIKQPTSTLVAISNVTQPWASWNGRPPETEHAFLTRLPARLSHRNRVLSWGNIVTLLKEQFVSLFDVKYPSANELTKIPAPEIQRLIVIPNSRYKDNDDVLRPKLNPARLAEMVEWIKQLSSPWATIEINNPTYVDVNVDYQVTFISGINPDYGHHQLQQQLRRKYMPWGENPTIGVTTGNHIDYYQLLANIQQSPLVERVTNLSITIANRTTGAIGESIEAADDEVLILVWPERHPLNQGVNSZ

SEQ ID NO: 1740 - protein, 334 aa, Photorhabdus luminescens
ARAVWRESIMVKNVRKAAGKVTRSRSKVLQGGWREQWRYAWMNTLTDMSRQPLATLLTVMVIAISLTLPSVCYIVWKNVSQAAEKWYPTPQLTVYLDKSLDDSSAQKLISELKALDGVDNVNYLSRQEAMTEFRAWSGFGGALDMLEENPLPAVAIITPKIDFQSSQTLTTLRDRVSQVKGIEEVRMDDSWFARLAALTGLIGQIVTVIGILMIVALFLVIGNSVRLSIFSHRDTINVMKLIGATDGFILRPFLNGGVLLGALGAILSLILSALLVWKLSDVVTEVASVFGTTFNLHGLSWDESLLLVLLSAMIGWVAAWLATTQHLRHFTPEZ

SEQ ID NO: 1741 - protein, 547 aa, Photorhabdus luminescens
LHPRANTASAGGSMKIPAIIIKIGGKALSQFTVISLTINHQINGIPSANITLGIAGDASHIFDAKAQAELVSCRPNHELSVQIEKNVVFKGIIVRQTLGLKGQDNLITLTAKHSLQKLTHNFHSQLFNKQSDEAILKKLFSQAGIPVTIKPAPQLKTVHEQMVQFRCNDWTFLKNRLLATHTWLLPGNDSVTLVTPESLNRSTVHTLHQRASHQDAVLFEANLQWDNQRSPKTVSVQSWDIAQQKLSPAHQAKSSGLGRNQLATDSLTSLTNQAWQWAFSYPLDNEQAKQLAQGILNNRRSHNVSGNFEVEGDNRYQTGDVLALSGFGQGMDGQAIITGVSHTLNQRQGWRTRLTLGLLPETEQVVPPVKELHVGIVEKYQKDNQSLGRIPVKIPALNLTNGTLFARLGKPYASHESGFCFYPEPGDEVIIGFFEGDPRFPVILGSMHNPKNKAPLEPSEKNPVKTLVIKQGENQQALLFNHKDKTLALNSGKHTLSLQQDKDITLNSAKNLITHAQEIKIEAQKSLSAAGKSGVDIKGAKINLTQZ

SEQ ID NO: 1742 - protein, 237 aa, Photorhabdus luminescens
MPCVKQEAIMSLIERSLSKLTLTAFKDREGKISVGSLQAMYNPDAIQLDYQTRYQQDESINSASQSSRYVLSQPAGLSLVLLFDATMPGNNTAVETQLAILKALCAVDASTNVPHFLKIKWGKMRWENKGYFACRASGLSISYTLFDRDATPLRASATLSLVADESFVIQATEQQLKSPPVTAVNVTDMLSLPLIALGAGASLAGGIDYLSLAWQNGLDNLDDFTPGQTLQAQGEAZ

SEQ ID NO: 1743 - protein, 441 aa, Photorhabdus luminescens
IYYSAIFAKCNTVTVWGAVHRACSSEEPRMEIKQPGVTITENLISQQQDEAFIGVPVFIGYTQPAKNNHAKKNHAKNNRISDKTPVKIHSLTDFTLSFGESGLMYYSVRHFFENGGQQAYVLSLGSDKPRGDFQSLTTTLQQDWVKQAISAQSAITLIVVPDIVYLNQMDAPDSEIDQHDKILFWQQFWQSVLNLCNSRRGIMGLLDAPDDPALAAECLARFSSNDRQWGAVYWPRLNSAYQEQNQPVVLSPTAAVAAVIQRNDNQMVVWHAPANVALAKVINPIRSYIEADDLFNQNGTSLNLVRSFPGKGTKIWGCRTLDNTPGSPWRYIQTRRLVSYIEAHMTQLGRAFVFEPNNAITWMKFKGQAYNWLRQLWLNGGLRGTQEDQAFEVLLGIDESMSEADLRAGKMIMKIRLALLIPAEFIELNLTFDTRTGITHZ

SEQ ID NO: 1744 - protein, 512 aa, Photorhabdus luminescens
AGQNDCQSGSGGGSSSRVYYLAAYTEYRSITGGNMPTIPTFPGVYIEEDASLALSVSQGNTAIPVFIGRFLPKKTSATPEITRVSSWLDFTNLFNVGCVRSIAITSTEPTPPKPEPTPPEKPQTVEDDVSVKNNEGVENDTEVAATTQATTPNADETPPGYTYQVAVDIYTVSSDALKLYFQNGGGPCYILPIADTSKANTLALIPALIEQALEITLIVCPEQDADYQSQIYNNLTPSLLNNGYFLIADNQDKATAISANVSSQTATYYPAVKVSQLMQTEEALVAVSGYKDANTTPDKVTNLVQLKEKNPDVYQQAVIAIQNISKTIPASAVIAGVYCATDASRGVWKAPANVALSGISDVADRLTEDEQGTMNQNGINAIRYFSNKGFVVWGTRTLQNDDNWRYIPVRRLFNAAERDIKQAMQFAVFEPNSQPTWERVRSAIDNYLHQLWQQGALAGNSPQEAYFVQIGQGVTMSDDDIKQGKMVVKVGMAAVRPAEFIILQFSQNVTPZ

SEQ ID NO: 1745 - protein, 361 aa, Photorhabdus luminescens
MPTVPTYPGVYIEEDASPALSVQSGATAVPVFAVAKDNSLITDDSYIRVNSWLEYLSLKGGQFTATDKLDIALRAYFINGGGYGYLVKTAELEKHVPKLDDVTLLVAAGEEIITAADALCKSGKGLFAIFDGPIAQITPDQKPDDVLKPYTATAYGAVYYPWLIAEWGENKAAIDIPPSAVMAGIYARVDNNRGVWQAPANVAVQGGLQPKYPMTDDLQGKYNQGKALNMIRTFPKSGTLVWGARTLEDNDHWRYIPVRRLFNSAERDIKNAMSFAVFEPNSQPTWKAVHRAIDNYLHTLWQQGGLMGSKAEQAYFVQIGKDVTMTDDDIKQGKMIVKVGLAAVRPAEFIILQLTQNIAQZ

SEQ ID NO: 1746 - protein, 309 aa, Photorhabdus luminescens
MKKKNTPTPHDAIFKQFLSHIDTARDFLEIHLPATLRAVCDLDTLQLASGSFIEDNLRAHYSDILYSLKTVQGDGYVYCVIEHQSSPDKMMAFRLMRYSISAMQRHLEQGHEKLPLVIPVLFYHGKIQPYPWSTNWLDCFDDPALAKELYSGPFPLVDVTVIPDDEILTHKRVALLEMVQKHIWQRDMMGSLQKLSILLAYGYHTEEQLKSVLNYLLQAGDTADPEGFIRRLAEQSPRYEEVLMTIAQRLEHKARQEGHQEGRQEGRQEGRLEATLKIAHALLNSGIDHETVMKTTGLSQNELEQIRHZ

SEQ ID NO: 1747 - protein, 358 aa, Photorhabdus luminescens
RNGKKSRNKNLIIDILLSSLFTHFFTKILIGDNMLSTEKHNKDTKHPRNREKKFSIQPENSTQDDEDIKNNSLGVGLDLDQMIRNTSSTLTNAPQKPEDGYYYHISRGNNLQSFLQNGFKPQGSPGPTLSEEDFSRRKIGIIKLIYSIIATTINKNRKAKKISKDNFLMPQEFWHEFKNFYQNIPTQTNIDDQLLKKSITESIDKLDQNKFMEKHSDRKQTIINNEREAILQQDERINEIISSRAKMIQQREAENTEGYIYLAPHKNTLLEYMKHLQEEKNLFLILAVKEDIFTEKGLEQDPQEPHGAVRYKGALSTEELNFVNQEGQICAIPASIGEMDYGDFILNQQQVIDFCKKZ

SEQ ID NO: 1748 - protein, 337 aa, Photorhabdus luminescens
MPINDLKKKFEISPQAAQAIGAPARSNSSKQAEHQTEHLELDTSKNRRDRKDLNAQATPNQQHTKKLETEVNNGGNKSKAQAHTPDLVMKKESSVTPNTRKSPNEKIKAEDIFHRYKDRFSPSDRELPFEIMNEITNNGIAFSSEKAPESHLDKVKDKKFTLRHYTSGNGQEKPTFNEIGSNFNLVNEGIKTLKRTQGSNTNEDDWNRLGNTAFTFFLLAIDGEVSDRKFLSNTTHFAEIDIENPAELKELGLDETEFFASPDLLHEKNLSQAPAVKGKLSDLKSLLLKQSGIKPVQLQSLGAKGILERIDSKFNGSLEIKIPGNVKVKEWKKVEKZ

SEQ ID NO: 1749 - protein, 239 aa, Photorhabdus luminescens
KLSRIGVNMTTIIASDNAIIEINQALNDILIKYLDIPGQNIDIRFDLPEINSIQSEPTVSVFLYEIHEDLQLRSAESRRYNPATNTLLPGWVNINCNYLMTYWEPNKPSNDSASPDSQPDNQAAQVMTRVLRALINNRQLTGIPGAYTRVIPQQENLNSLGNFWQALGNRPRLSLLYSITVPMKLKNIEDNVIPVSKISASVDQKPSLDNSQINQALIYPMDFKMHRDGKGVNPREHRZ

SEQ ID NO: 1750 - protein, 698 aa, Photorhabdus luminescens
KVYMDYLLTNTPCIVAESHWIYPHLERIDLLLQQYYYKKSDQYDSLPESFLLTEDEVEQCLISPQGVPHWLTKVNNPICYPEIKENPSLDALSLLVERFELTEFERDVLLLGLLPHFDSRYHALFAALNGNSKKQWPNFALAIELFSQHQNDWQLLQNSFLPQTPLINNQLLRLNNHEEVIWLQTQFLTHNAIWHFLSGQRTLLPPLISYANWHTPASHNWYPQTLYHSLEKILLNETDKIRPLVILRGKEGSARELAVSNIMAYHGIHTLILDLACLPDEENSVKISSLLADVIRETRLHDACLLIRKFSLLAAEKKILHHELSILLNQPKLRVVCLVESGNGLAWLKHLPMVQIDMPVMTLAERKTILKANLPENVAQEINITQLCQRFSFTAETLPLILAEAHQYQIIRQPEDQIKEIDLRKALSFRAQQNFGKLAQRITPKLSFNDLVVSETLAQQLKEIIAAIHYRDQILSAGFQEKISYGTGISALFYGESGTGKTMAAEVIAGYLGVDLIKVDLSTVVNKYIGETEKNISRIFDLAEADSGVLFFDEADALFGKRSETKDAQDRHANIEVSYLLQRLENYPGLVILATNNRSHLDSAFNRRFTFITRFTYPDEALRKKMWQKIWPEQLTLSDEIDFEHLAKRSDLTGANIRNIALLSSILAANDNIGQIENKYIERAVILELNKTGRLVFZ

SEQ ID NO: 1751 - protein, 222 aa, Photorhabdus luminescens
MIRFEQVSKAYLGGRQALQGVDFHLRPAEMAFLMGHSGAGKSTLLKLICGIERPSAGHIWFAGHDISRLKSREVPFLRRQIGMIFQDHHLLLDRTVYDNVAMPLIISGASSEDIRRRTSAALDKVGLLDKAKNFPIQLSGGEQQRVGIARAVVNKPTVLLADEPTGNLDGELSEGILRLFEEFNRVGVTVLMATHDMALIERRKYRILTLSQGRMAGEYNGZ

SEQ ID NO: 1752 - protein, 570 aa, Photorhabdus luminescens
LSINHKGYTNMTSEPNLLTRITITIEANNSQVAKKVLHGSLFNQTNIKNLFNTFFTQYPINQDIYLETLTLDLGEINLHNFNSLFPVRLNIALNKALNQYQINNQERKISLIKSQSQSQSQSQSQEITNKPYLLYVNNSINIEVFIHYLNQKNSAFNLVEIKNNHKNIDINIQQLINQLAGIEDKWTLFLAKSCLSEPSLQRLLALKQPALLSAINNRLSEGVNRSQYLGEPVSPGQLILNALQYIQLNNTQEIPKLDAKVLSHITSELDNGTLNATSIITLFRQIITDNIPLNNWLKQIWQTITVAKFSKKYLSAKEYQYLSEHFISDHADKDKSSKKLAVTHVDIKNVHRYKYSINQETISENQKIFSASNNLHITGNNSNPLQTTNKARDKSVLLSEQTLPYQVNNAGILVLWPMLPALFNQLGLLEEQRFIHHQAQFNAVNLLNYLILGDKEVQIKQNILNNVLCGLMADEVIELAPTEPEKQLIIDQWLDAVISQLPGWKKLTHNDARQLFLQRPGQLLIDEKEIKITVQHQPFDILLADWPWPLNIAKLPWLDCPLNIDWQNIZ

SEQ ID NO: 1753 - protein, 356 aa, Photorhabdus luminescens
KKSINIIYKVIKMEKEYNLSNIENTNPESIGPSVDALKNRFKEGSIPLQTDYSDLINIADIGRQAVGKAPNQIDNPNSGLVLNNDSGLAVKVNISGGLQADKDGVSVKIKDKSLLADNNGLSVNYGKGLQLDKDNDNKLTINSHDGIEIVAGGVKVKAGNGITVNSSGVSIDPNTVLPRGMIVMFSGKSVPTGWTLCDGNNGTPNLIDRFILGGNFSGIDGKSSTTVSGPKDSKSFNFNSNEATLNINGKTSERSLSIGQIPNHSHLSGINIDTNIMAQYGATQIGKTDRAVASSKNTSERYLYYSSGILSSNGTIGQNSPETHDHDINLTNTGNHFHKNQITTPYYILAFIMKTZ

SEQ ID NO: 1754 - protein, 973 aa, Photorhabdus luminescens
FGQKRIHQIEELTMSNQDALFSIVKDNIAFDTLLTQAKTVIEQQSGQLWSNTGESDPGITLLEACCYGASDLAYRLSLPLIDLLTPEQQEQTPGDGIFPQEFGPQQMLTCGPITAEDYRRALLDLHSSDNINNKSEGYFFFNDVQLVREPENQRYEYWYNKEKREYSFTQTPDSQQLTLRGNYWLYLLPNRETQTDNTLAQQNLAAFLKNNRNLGESVSKIIWLQPTDFLLQLDIELNDDVKDTADIFAKVYMTTEQTVLAKPLRYTTQAMKESGYSNEEIFAGPYLHHGWIPELPTAKDYTTATELKLSHLVNRLLAIPGIQNITRLALDNHDKNISPLSNDNWSWTIAQGYYPRLWGNDPLSLITSPTSPLIITAKGGIKVSISKQDIENKIIKAPLIETQPELLNWGKHRKILNYYPVSNKLPACYGLQTYAETQQQIHLHQFMLPFEQMLANGCAELAILPKLLAFKQRGNAVYGAQWPFKDNTVGYKVHQQIMPNLIKQLNNDAQINNDDGMHWQNYAKELLILNYLLEYFGTHRAARPLTIDFLDFLSTQRGYLAQQPELTYQRNNIRIDQVSALQKRIAARIGLGGECFKEKPNLANLPFYLIEHRQLLPVKPDNKFDSEQKPDKLEIKSVPNSKNQQLIITQNGTTGQLLHGQVINLIIIEGDREFTLRGQMITDITGDTFSLDTLNSTDLERNLNRVEQAFEQGNLRWRNSPVWMEDMDYQLVYASDTYQTGARDERWITSSTQSPFPAMIDVNDEITLKYIISPDESSTKILANSNSPTDYQLKARVVQFDRIKGWILIKKISGQQYDFPKSEDAWRYRWYFSNEKYALADRFSFIVSVVINRQLIENDKIDPYKLEAWVKVEILAEFPAHLSMIFHWLSPEQFNNFADTYKRWQNNGAPLGDEAYNILETLTLGRLPSAATGTGNMRIATEQQRIEVIGESGTEWNEKVIKDNQLLYVPKIZ

SEQ ID NO: 1755 - protein, 912 aa, Photorhabdus luminescens
KTIFKPQVVINMGQAELYNKLSAIVPDNAFKLDERSALDILNWLKEYAAIIPFDQEKKQFWDSFYFTQENSTKQLADLYQNVNQANGLLPAHQAFVLAFLKLLETPKVLFNTLPARHRNLYYRELLGLNPKNAQADSVAIGITLNTNNTEFLVAQGTLFDAGQDSAGNPLHYASNTDLLANQGALTDLRWYRKNNDGWQSAIPLSLSDNIKLPKNGIQLFSPTANDTPVLSGYLITSSLFAMPAGERHITLTLENDWQGKAKNITAKISAKDHWLSLSVNLIDKKNIKLGLLSTDDPISPPDNLDGMTFDVPVLKLGTIQQPTLSKIIGIKINVNGNRSVRYASDDGTEQTDKTSFPFGQLPSLGSGFNLVAPEWYGSENATLTLTPQWVGLPTKSFKAWYKGYTPEPDNSVFKVQGYLVTPQEKKTIDGLQSLFGGTDAPQGQSLTFTLPAMNYPVADSPSPNDWPASVRIELAGQDFMHAQYRQDPTGKNLPYTPQISALQVTFNATMKAEQYAVYPLTPFGWGNTNAETPSFANDALYLGFTNVSPGQTLSLYWQLVGIQELALFWSYLNQQNTWQPLNQLVHDQTHNLFDRGTWSTLLPQDASNQAALMPIGRYWLKAEIIQQTAPENYPKMQGILYNATTATLINAETVENDHFINGLAADSIKQTVSASDAISHVTQPWASWNGRPKETEPAFLARIPPRLSHRNRALSWDNIVTLLKEHFISIFDVKYPDANKLTRIPAPKEQQLIVIPNSRYKDNDDALRPMLNAARLTEMAKWLSQLSSPWTTLKIDNPSYTNVLISYELVFAAGINPDFGHHQLQQELSRKYMPWAEDAAISVTTSNRLDYYPLLATIQQSSLVERVTSLTLKKSTQTTEAVGDSVEAGDNEVLILVWSKKNPSNRGADHEZ

SEQ ID NO: 1756 - protein, 547 aa, Photorhabdus luminescens
FHSRANATGTGGRMKIPAVDIKIAGKTLSQFSVISLTVNHQINGIPSAKITLGIAGDANAIFAPQAQAELTSCRPNQELIVQLQETVLFKGIIVRQALKFKGQDSLVTLTAKHSLQKLTDGFHSQLFSQQNDEDIIRKLFDQAKITVTIKQVPQLKIKHEQMVQFRCNDWKFLKSRLAAANIWLLPGNEAVTLATPESLNQSTVHTIKQRAGDQDIVLFEADLQFDNRHSPKTVSVQAWDITQQELSQANQAENSGVGSGQLASDSLATLTDQAWQWVFSSPQDNEQAKYLAQGILNNLRSDNVSGNFEVAGDSRYQPGDLLALNGFGQGMDGQGIITGVSQTINQRQGWRTRLTLGLLLETEPVVPQVKELHVGIVEKYQQDKQSLDRIPVRIPALDLTNSVLFARLGKPYASHESGFCFYPEPGDEVIIGFFECDPRFPVILGAMHNPKNKTPIEPSEKNPIKTLVIKQGDNKQALVLNHQDKIAAINSGEHSLSLQQDKDITLKSAKNIITTGQKINIQAKESLSATGESSVDIKGKEINLTQZ

SEQ ID NO: 1757 - protein, 413 aa, Photorhabdus luminescens
HSNRAETRLNAASIKSYKETIMEIKQPGVTVTESLISPEPDDVFIGIPVFIGYTPSPVDKIAIKLNSLADFARSFPESGLMYYSVRHFFENGGQQAYVLSLGTEQQLSDFSSLITALQQTWITQAISAENDITLIITPDAIRFNQTEVSYIQRDLWLQFWQSVLNLCKSRRGIMGLLDAPDNPTLAAECLKQFASADQQWGAVYWPRLKSAYQDQAQNPIVLSPTAAVAAVIQNNDNQQGVWTAPANVALAKVISPVHSYIEANALFNPSGTSLNLVRSFPGKGIKIWGCRTLENTPGSPWRYIQIRRLVSYIEAHMTQLGRAFIFEPNNAITWMKLKGQAYNWLRQLWLNGGLRGTQEDQAFELLLGVGESMSETDIQAGKMIMKISLAVLIPAEFIELSLTFDTRTGTTRZ

SEQ ID NO: 1758 - protein, 462 aa, Photorhabdus luminescens
MPTTPTYPGVYIEEDASLSLSISHGNTAIPVFIGRFQPKKASATLKAIRVSSWLDFTNLFNVGCITSIAITSTKPTPTPPPPPSPSGKVAGDTATADIALDADDTNTDYTYAINTVTSTTSSDALKLYFQNGGGPCYILSIADSGNSETTALLPELIEQALEITLIVCPEQDSSYQLAIYNSLPPALLNAGYFLIADSQGKTTKPTVNVPSQTATYYPAVKISQLMQTEDSLIAVSGYEDAASNEVKNLAQLKQKNSTVYQQAVQAIQGKMKSSSNTIPASAVMAGVYCATDASRGVWKAPANVVLSGISDVTERLNDDEQGAMNLLGINAIRYFNGRGFVVWGARTLQDDDNWRYIPVRRLFNSAERDIKQAMRTAVFEPNSQPTWERVKSAIDNYLYSLWQQGALAGNKPQEAYFVQIGKGITMSDDDIKQGKMIVKVGMAAVRPAEFIILQFSQNVAQZ

SEQ ID NO: 1759 - protein, 432 aa, Photorhabdus luminescens
HWSRIESPFKHLNRSTITSYLDVYIAEDNYLTVLITNMPTHDDQHYHGSSIQLNSSFHSLRRISHHNSETIMPITPTYPGVYIEEDASPSLSIRSGATAVPVFAVANNNSLIPDNSYIRISNWLEYLTLKGKQFDPTNTLDIALRAYFINGGGYAYLVKTTNLESQIPKLDDVTLLIAAGEDITTAVGTLCQLGKGLFAIFDGPTTQIASTQAPDDVLKPYPATQYGAVYYPWLTAEWGENKASIDIPPSAVMAGIYANVDNSRGVWQAPANVPVQGGLQPKYPMTDDLQGRYNQGKALNMIRTFPKSGTLVWGARTLEDSDNWRYIPVRRLFNSAERDIKNAMSFAVFEPNSQPTWEAVRRAIDNYLHALWQQGGLMGNKAEQAYFVQIGKDVTMTDDDIKQGKMIVKIGMAAVRPAEFIILQFTQNTAQZ

SEQ ID NO: 1760 - protein, 326 aa, Photorhabdus luminescens
IYYKKLTGNNMPNSKYSEKVNHSANGAEKCSIHSNQYNINNCTLGLGLDLNKKLRTGNERNIEGAQPFIPFPSKQKQYSTSPIAMADILNESALTSQPIITDLINPQKIKMSDGVKNILNNKEGGGDLVFKALQIKPSDETLPFNALKIVDTYQEEMPNKDMSISAYWAPQGGYVDIPAQPDISRHPQYVFTPNFSGCSFVVDKMNEDTLRVRHVQGGQEDVEYNNQNIDHGMGMITAMEFRDYGYHEADDKVIENTYGFAFLKFNQEKKQWQLHYQKIAAAPNIINIKTKSSWLPFSKPSIEADTFTFKNMKVPGYSRKNINNNZ

SEQ ID NO: 1761 - protein, 425 aa, Photorhabdus luminescens
MAKEKKRGFFSWFGRGRQEEQQKEEQLAVEQAEQQRVAEEAARLAAEQAEQQRVAEEAARLAAEQAEQQRVAEEAARLAAEQAEQQRVAEEAARLAAEQAEQVQTEQPVISKEQERPTKEGFFSRLKRSLVKTRQNLGSGFLSLFSGKKIDDDLFDELEEQLLIADVGVDTTRKIISSLTEHASRKELKDAEALYAKLKEEMSGILTKVNKPLDIEGKTPYVILMVGVNGVGKTTTIGKLARQFQAQGKSVMLAAGDTFRAAAVEQLQVWGERNHIPVVAQHTGADPASVIFDAIQSAKAKSVDVLIADTAGRLQNKSHLMEELKKIVRVMKKLDENAPHEIMLILDASTGQNAISQAKLFHEAVGLTGISLTKLDGTAKGGVIFAIADQFEIPIRYIGVGEGIEDLRPFKADDFIEALFAREDZ

SEQ ID NO: 1762 - protein, 316 aa, Photorhabdus luminescens
LIGDNIMPKLTELLSRFENPIQNQPNHISKKNPISNSKVLNNSEEKTAPLELKHDDSKIKSQVSIPNLVKKNEKPAASNTPNNSHEKVKAEDIFNRFKSKFDPYDRELPFDIMNKITNNEIKFSSEKSKDDYLAKVKDKKFTLRHYTAGTGQEKPTFDEISSNFNLVNKGIKTLNRTQGSNTNEDDWNRLGNTAFTFYLLAIDGEVSNRKFLSNTTHFAEINIEDSEELKELGLDQAEFFASPDLLHEKNLSQAPAVKGKLSDLKSLLLKRSGISSVQLGRLDAKAILKSIDNEFGNSLEIKIPGNVKVNKWNKIZ

SEQ ID NO: 1763 - protein, 309 aa, Photorhabdus luminescens
TFNKIGINMTILIASDNAIIEVNNALNTILSQHLNINGNKIDIRFDLPEINSIQSEPTVSVFLYDINEDLQLRSAEPRRYNPMTSTLLPGWVNINCHYLITYWDANKPSSDSSSPDSQPNNQAAQVMTRVLNALINNRQLTDIPGAYTRIIPQQENLNSLGNFWQALGNRPRLSLMYSITVPMKLQNIKDNITPINQISASVEQKPNLNNSQINQALVDKLCADLGGTEDARLALAKVNLVTKFVTDNNDSNENKSIILEISGITYSTYLPKIRNIISIWVNSQKSVVKVNGIDITISKEDSKELIEIZ

SEQ ID NO: 1764 - protein, 692 aa, Photorhabdus luminescens
QVYMNALLKNNHDMATEFHWIYPHLERIDLRLQHYYYQHGEKYDYLPESFLLTEDELNPRLAKPQGIPHWVTKQDDIINSPEIDENPNALSQLIERFELTEFERDVLLLGLLPHFDSRYHALFAALHGNSRKQWPSFDLAIELFSQRQGDRPLRQNSFLPQTPLISHQLLRLNNHEESIWLQTQFLTHSAVWHFLSGQRVILPPLTTCAYWHSSASHRWYPQSLYPSLEKILLNKTDEIRPLVILRGKQDSARELAVSNMMALHDISTLTLDLAQLPEENNSNLLIDAVREARLHDACLLIRNFSLLKDEKKILHSEFSTLLNQAKLRVVCLAEPQDSLVWIKHLPIVQINMPALTLADKKAMLEANLSDNIAQKINITQLCQRFSFTAETLPQILQEANQYQILRQPEGQLEETDLRKALSFRAQQNFGKLAQRITPKRSLNDLVISDVLTQQLKEIIAAIHYRDQILATGFQEKIGYGTGISALFYGESGTGKTMAAEVIAGHLGVDLIKVDLSTVVNKYIGETEKNISRIFDLAEADSGVLFFDEADALFGKRSETKDAQDRHANIEVSYLLQRLENYPGLVILATNNRSHLDSAFNRRFTFITRFAYPDEMLRKKMWQVIWPEQIKLSDTIDFTHLAKRADLTGANIRNIALLASMLAKNDHCDQIENKHINRAITLELNKTGRLVFZ

SEQ ID NO: 1765 - protein, 524 aa, Photorhabdus luminescens
DINMSWAPNLLNRITITISTNNQQLAKKVLHGSLLNQDNIHKLLSSYFDEYNIHQHISLETLTLNLGEISSYEFNSLFPVRLKAELNKVLNQYQINNHQEEILLNEPISNKFTDNSSAFCDNYLIDAESFIHFLYQQDSQLNTLETITNHKEININKLIHQLAQIENKWILLLAKSCLSEHGLQRLLAIKQPALFIAINRRLSEKVNKPQHQEELVSSTQLILNALEYLQRHNIQEIPKPNTKIISRIITELNNGVLNTDPIIKLFRQAMNQNTPLNSWLKQLWQTVSVSRLCQKHLSVKEYQYLLACFMPNHIDKNTPGKKSATNNINFSDVRQHQPLVNQKVITEDQKILSTSNSPCQVNNAGILMLWPMLPALFNQLGLLEGKKFIHRQAQYHAVNFLDYLIWGTDETPAERKRLNNILCGLMINENTESISVEPEKQLTTTQWLDTIITQLPGWKKLSCNDVRQLFLQRPGELLVNEQEIKITIQQQPFDALLADWPWPLNIAKLPWLDRSLLIDWKNIZ

SEQ ID NO: 1766 - protein, 356 aa, Photorhabdus luminescens; identical to SEQ ID NO: 52

SEQ ID NO: 1767 - protein, 322 aa, Photorhabdus luminescens
YRMIKMEKKSNLSNAKSNMENIKSNGPSADDLKKRFKEGSIPLQTDYADLINIADMGRWAVGKAPGQTDNPNSALKLDNGGALAVKINDNGGLKADENGLSVKIKNKSLSVDNNGLAVNAGRGLRINNDKLEVYNYHGIEIVNEGVKVKAGEGIKVDSNGVSLKMGKPISNAFSPLILEPKNDVLSVKIGNGLFDRDNGISVNPGNGIDAGYDYVAVKASNGITVDNSGVSVKAGNGITVNSNGVSVNIQQIASALADLIIPSGTIVPFYSNGSLPNGWLWCDGNNGTPNLNKGIPNEITLVAGWIKKINSAYFILNNIYPZ

SEQ ID NO: 1768 - protein, 970 aa, Photorhabdus luminescens
PMSHQDALFPIVKDDITFDALLAQAKTVIEQQSGQCWSNTSENDPGITLLEACCYGASDLAYRHTLPLRDLLTPKPEDQTSGDGIFPQEFGPQQTLTCGPITAEDYRRALLDLHSSDTINNTREGYFFFNDVQLIREPENQRYQYWYNKQKREYSFKNSGSDSQLALRGNYWLYLLPSRETETNTTLAEESLKTFLKDNRNLGESVSKIIWLQPADLPLQIDIELEDNVIDLPDIFAQVYMTAEQMVLPKPERYTTQAMKDQGYHHEEIFAGPYLHHGWIPTLPQTKDYTGDTVLNLSHLVNRLLAIKGIQSVTRLALAHHDTTITPLSNDNWSWEIAQKYYPRLWGSDPLALITSANSPLTITAKGGVKIGVSKQDIEEKLIAEPLIDIQPELLHWGKYRKVLDYYPVSNKLPTCYGLQTYASNQQQIQLHQFMLPFEQMLANGCAELALLPKLLAFKQRGETVHGVQWPFKTGTVSHRVHQQVIPDLTAKLSRDSQIYIDNHIQKPNYIKEATILNYLLGYFGAQLAARPLTSNSLLGFKDFLSTQQGYLAQQPELTYQRNNIRIDKVSALQKRIAARLGLGGECFSKTPNLDDLPFYLIEHRQLLPIKPDTKFDDKQKPDDLKVIEENSGSKNHQLIITQQGIAGRLLQGQVINLIIIEDDREFILRSQMITEVTGDTFSLSTRNSSDLERNLDRIRQKFNDGNLRWQNSPVWLEDMDYQLVYADETYKNATDDQRWITSSAQSPFPAMIEENDEITLKYVITPSGPDLKISPRTVIPEPRTEYELKARVVKFDRIQGKILIKCNQDSPNKNFPKEAEAWLYRWYFSSEKYALADRFSFVVSVVVNRRLIQNGKVDPYKLESWVKTEILAEFPAHISMIIHWLSPEHFKDFASTYKRWQNNDAPLGDEAYHILETLTLGRLPSNATGIGNMRIATKQQRTEVIGGSGNQWNATVITSNQLLYVPKPZ

SEQ ID NO: 1769 - protein, 914 aa, Photorhabdus luminescens
KPIGNNYITGGKNMGQAELENKLSAIVPDTVFKLDERSTLDILNWLKAYAKEIPFDQEKKQFWDSFYFIQENNPQQLADIYQNVNKADGRLPAHQAFVLAFLTLLETTNRLLNTFPARHRDLYYRELLGLKPKKAQADKVAIGITLNPDSTESLIAQSTLFDAGQDSAGNPLHYASDTDLLANQGELTDLRWYRKKNNGWLSAIALNLADNMALPENGIRLFSPTANDVPVLSGYLITSPLFAMSAGERTIKATLAREWTGNAENITAKMSSGDHWLSLSAKKGQSNNTHYLTLCLSANNDPISSPDGLDNMAFDIPVLKLGTTQGPTLPKITDIEVSINGNRSVHYASDGGIEQTDTTSFPFGQSPSLGSGFNLIAPEWYGSENATLTITPQWVGLPQQNFSKWYGGYETKPDNSAFKVQGYLITPQKREKLNEVQALFNGKEAPQGQNLTFTLPAMHYPLADSPSPNEWPASVRIELAGQDFMHAQYWQNPTGKNVPYTPQISALQIQFSAKAKQFSIYPLTPFGQGEATAETPALTHEAFYLGFTGVSPGQTLSLYWQLAGIKSLALSWFYLNNSNSWSKLDKLVDDQTHNLFDRGIWRTLLPQDAANQAALMPTGRYWLKAEITQQTDPQDYPRINGLLYNATTATLINAEAVEQTHFINGLAADSIKQPVNTVVAVSNITQPWASWDGHPQETEQAFLTRLPPRLSHRNRALSWGNIVTLLKEQFVSLFDVKYPSASELTKIPAPEKQQLIVIPDSRYKDNDDALRPKLNPARLAEMVEWIKQLSSPWATLEISNPTYIDVNVNYQVTFIAGVNPDYGYHQLQQQLSRKYMPWGENTAIGVTTGNHIDYYPLLATIQQSSLVERVTDLSLTIANRTTGAVGKSIETADNEVLILVWPEQRPLNQGVNPZ

SEQ ID NO: 1770 - protein, 547 aa, Photorhabdus luminescens
LYPRTNVASTGESMKIPTITIKIDGKVLNQFTVITLTVNHHINGIPSANITLGIAGDARHIFDAKAQAELASCRPNHQLSVQIEKAVVFKGIIVRQTLGLKGQDSIITLTAKHALQKLTHNFHSQLFNKQSDEAIIKKLFSQAGIPVTIKPAPQLKTVHEQMVQFRCNDWTFLKNRLLATHTWLLPGNDSVTLVTPESLNRSTVHTLHQRANPQDAVLFEANLQWDNQRNPKTVNVQSWDIAQQKLSPAHQVKNSGLGRNQLATDNLTSLTSQPWQWVFSYPLDNEQAKQLAQGILNNRRSHNVSGNFEVEGDNRYQTGDVLALNGFGQGMDGQAIITGVSQTLNQRQGWRTRLTLGLLPETEQVVPQAKELHIGIVEKYQRDSQSLGRIPVKIPALNLTNGTLFARLSKPYASHESGFCFYPEAGDEVIIGFFEGDPRFPVILGSMHNPKNKAPLEPSEKNPVKTLVIKQGENQQALLFNHKDKTLALNSGKHTLSLQQDKDITLNSAKNLITHAQEIKIEAQKSLSAAGKSGVDIKGAKINLTQZ

SEQ ID NO: 1771 - protein, 195 aa, Photorhabdus luminescens
MAKKPQRQSMGQIRIIGGKWRGRKLPVPDSPGLRPTTDRVRETLFNWLAPIIQEAHCLDCYAGSGALGLEALSRYAAQVTLIEYEHNIAKQLSANLDLLNAQNAEVINDSALTYLSQPGTSYEVVFLDPPFRKGMLSETIKLLEEQNWLADESWIYVEAESESTAIDVPVNWQLHREKVAGQVAYRLYIRYLPAZ

SEQ ID NO: 1772 - protein, 415 aa, Photorhabdus luminescens
GAVRRAYSGKEMRMEIKQPGVTITENLISQQQDEAFIGVPVFIGYTQPSKNNRASDKTAVKLHSLTDFTLSFGESGLTYYSVRHFFDNGGQQAYVLSLGSDKPRGDFHSLTTTLQQDWVKQAISAQSAITLIVVPDIVYLNQMDDPDSEIDQYDKIQFWLQFWQSVLSLCQCRRGIMGLLDAPDDPALAEKCLTQLSSSDRQWGAVYWPRLNSAYQEQNQPVVLSPTAAVAAIIQRNDNQMAVWHAPANVALAKVISPIRSHIEADTLFNQNGPSLNLVRSFPGKGIKIWGCRTLDNTPDSPWRYIQTRRLVSYIEAHMTQLGRAFVFEPNNAITWMKFKGQAYNWLRQLWLNGGLRGTQEDQAFEVLLGIDESMSEADPRAGKMIMKIRLALLIPAEFIELNLTFDTRTGISHZ

SEQ ID NO: 1773 - protein, 532 aa, Photorhabdus luminescens
RYQAGQNDCQSGSGGGSSSRVYYLAVYAKHRSIIGGNMPTTPTYPGVYIEEDASLALSVSQGNTAIPVFIGRFSPKKISATPEITRVSSWLDFTNLFNVGCIRSVAIKSTESTPPPSLSVPEKSEGNADNKHNNVEDKSNAKIKHIAETKNNAETKANAEVQDYAAVVPVTKPTHIDGKSTHYIHQVITVTYTTSSDALKLYFQNGGGPCYILPISNSEDTNTLALIPELIEQALEITLIVCPEQDPAYQSAIYGNLTPLLKAGYFLIADNPNKETALSVSLQSQTATYYPAVKVSQLIQVEENTVTVSGYQDAKVTHLAELKQQNSGLYKQVIEAIKQKIADNKKLIPASAIMAGVYCATDARRGVWKAPANVVLSGISDVADRLTEDEQGTMNQKGINAIRYFTNKGFVVWGTRTLQDDDNWRYIPVRRLFNAAERDIKQAMRFAVFEPNSQPTWERVRSAIDNYLHQLWQQGALAGNSPQEAYFVQIGQGVTMSDIDIKQGKMVVKVGMAAVRPAEFIILQFSQNVAQZ

SEQ ID NO: 1774 - protein, 359 aa, Photorhabdus luminescens
MPTYSYPGVYIEEDASPALSVRSSATAVPVFAITNNSSLISDKPYIRVSSWMNYLTLKGEPFDPKNILDVSLRAYFINGGGYCYLVKTKELETQVPKLDDVTLLIAAGEEINEVAGKLCQPGKGLFAIFDGPQSDTDIKEPEKALKPYSPTPYGAVYYPWLTAEWGENKAAIDIPPSAVMAGIYASVDNSRGVWKAPANVAIQGGLQPKYPVTDDLQTQYNQGKALNMIRTFPKSGTLVWGARTLENSDNWRYIPVRRLFNSAEQNIKNAMNAMVFEPNSQPTWKAVHSAIDNYLHTLWQQGGLMGNKAEQAYFVQIGKGLTMTDDDIKQGKMIVKVGLAAVRPAEFIILQFTQNIAQZ

SEQ ID NO: 1775 - protein, 341 aa, Photorhabdus luminescens
VAKKEKRPHHDALFKHFLTQPETAREFLSLYLPEEIQLLCDLATLKLEPGSFVDEHLRQLHSDVLYSVETARGQGYIYCLIEHQSTPDPLMAWRLMYYAMLAMAAHLKKGHTELPLVAPLLFYHGEIRPYPYSNRWLDCFTLPEQAARLYRQAFPLVDVSVLSDEEILTHKGVALMELVQKHIRCRDMQEWLLQLVELLNAGYNTTEQRNVVLRYILLNGHTPDLSQFVHQLIEQSPEHETMLMTIAEQLEQKGLERGIKQGIEQGIEQGIEQGIEQGIEQGIEQGIEQGIEQGIVQGREEGRAEGKLETARALLRHGVSLDIIVTSTGLSRDKIETLKHZ

SEQ ID NO: 1776 - protein, 341 aa, Photorhabdus luminescens
MPRYSNSQRTPTQSTKNTRRTSPSSNSSTEHLSLSNAPTNDSSVRQEVKEKFIWEGHWEGHMEAIEKASILGNFAVSFRAAGKPTLEALGKGAAAKGHDILEKTIKPGSIEKAYPENEASDVIKKVREAGIEGYVGHWNKETGRLEGIYMSSGHGLPNGQVNGKIYPIDLNNLEASLAPLKEKKNWAALPFTGDYDMHDMISFTTQPHSVPSNSSEEKKIIDRINEYIAKSDSNRPFEDIEHNVIRHGPQVSYPAFAMDKEKKEIKERGGIVKAVAEPGEFPVAIVSKGKWTIANNINELEQFYNSIGAKMKASWKPGAGNPGFVSNPQKPGMARFSRKKZ

SEQ ID NO: 1777 - protein, 284 aa, Photorhabdus luminescens
GDNMFSTYSSKNDNQTINKINTEEKHENTETDNHLEINLEHTGKSKPDIEPKDVTTGTINAGTLLYKTTAIPEFLDNAKSLGLAEYEKRHKDIQDYLNLGKAEDAEKLKNKSQWAGQYFALEKSYDEYANEAPDSYNNLLKNAGKDLLENTEEVKVFLYTFKVTKDIKVLKPHNNSNSYYVGDTEGWEKAKEIMNDVQSQSEKNDNPFPELKNLEDKNFLLEELGEKGYAWMGPLHAKEGAEKGTEFSYELAISPNLLRQHLTLESEELLGTYKNRYGYWDKKZ

SEQ ID NO: 1778 - protein, 301 aa, Photorhabdus luminescens
MTIIIASDNAIIEINQALNTILSQYLNITGQNIDIRFDLPEINSIQSEPTVSVFLYEIHEDLQLRSAESRRYNPSTNTLLPGWVNINCNYLITYWDASKPSSDSSSPDSQPNNQAAQVMTRILNALINNRQLTGLPGAYTRIIPQQENLNSLGNFWQALGNRPRLSLLYSITVPMKLKNIEDNVIPVSKISASVDQKPNLDNSQINQALIDKLCVELGGTEDVRLALAKVNLTTKPDTENNQNQENESVIVEVSGITSVTYLPQIKDTLTKWKSSQEAIVKINGVSIVVSKENADKLIGIZ

SEQ ID NO: 1779 - protein, 260 aa, Photorhabdus luminescens
GDDYVVTSGNYNRVETGEGQDYAVTIGNNNRVELGEGHDFGRVFGNDNQIDGNAGDDVIKLMGYHAVINGGEGDDHLIAATMSKFSQFDGGEGQDLLVLGGYQNDFRGGAGVDSFVVSGQVIDSQVDDINAEDMIVFNDIDWQNLWFQRSGYDLVLSVNRHIEDKTAQGVFESTGSVTFSDYFNGNRAKLVVQMGDKNASGEREFTALSDNAVDTLIQAMSSFAPTVGDNGFIDNLASQEKIVMATAWADTTVGKVQFAZ

SEQ ID NO: 1780 - protein, 1957 aa, Photorhabdus luminescens
IKGLFMGKSSNRSAVYLFTGRYYDDNDGNSITAIGIGGEVYAYGGNDDVTVGSFKVDVYHTDGDLTVKGVSGYTGIHKTGNGGLSFTGAAGVAAIDHTGETGNLNYSGAAGYNKLVRKGLSGDTRFRGAGGYNQLWHETNRGDLDFAGAGAGNDIDRTWFNRYQDSQGNVTFNGTGAANNISSRVEHGNVTFNGAGADNHIVRKGKEGNIILRGAGASNRIERVYQNKDEYEQTRGDITFEGVGGYSQLYSDVAYGNINFSGAGAYNVITRIDANSDFDDETLEFAKAKEVVLTTATMEGSWIRESQQVTGMKSTVEPDTYLFAFADKMYTKISKVRLRNNPTTGRLGYYATSWYKAGNHLENLAAKEISSGNGFITVNANGAYHLSGLIFERLQPVTIHAIEENLLSDQWVTYTGGMMVKAEDISLGDAKMGGYAVFSDGSTVDVSAVKSNRKPNTYVYAKVLGPYTKVVEVQLANDPETKQLKYIATAWYKTGDYTGDLANEEFSYDNGYASAGSGYTLSQLQYDINTVRRTAHQLVHSKEYHQQDLVKLSASSGDVNFNGAGGGNIIKSDVTRGDINFTGLGAANVILHDSKFGDTHFDGAGAANVIVKKGEKGDLTFRGTGLANVLVHRGQSGKMDVYAGGAVNVLVRIGDGQYLAHLLAYGNISIHKGNGSSRVRMLGGYNTHTQIGNGSADWSGSGGFNVITQAGKGSISSVLLGGANVLTKLGAGSLVAGMLGGANIISHLSEGTETSNTTAIALGGANIFTKKGKGHARAVMGSGANVLTHIGDGNTTGVMLGGANILTKVGKGDTAGILFGIGNMLTHVGDGLTLGVMAAAGNIFTKVGEGTSIAAMIGAGNLFTHVGKGDAWALMGGVGNIFTKVGDGDALALMVAAGNVFTHIGDGTSVALMLAKGNIATKVGNGMTLAAMIGKANIFTHVGEGNTFAAMIGGANVLTKVGNGLTAALMVGKANIYSHVGNGPSIGLFAGELNVMTKVGNGTTLAAMFGKANVMTHVGDGLTGVLALGEANIVTKVGDDFMGVVAAAKANVITHVGDATTASILLGKGNILTKVGDGTTVGLLISDVGNVMTHVGEGTTVGFAKGKANLITKIGDGAGVNAAWGEANILTQVGDGDRYNFAKGQANLVTKVGKGQEVTVVQGDANIITHVGNGDDYTGAWGEANVVTKVGDGRNVVLAKGKANIITQVGQGDSFNALWSEGNIVTKVGDGVQVTAAKGTANVTTTIGNGLNVTAAHGDANINTHVGKGISVNVAWGKYNVNTKVGNGLNVAVMKGQSNANIQVGHGLAVNASYARNNVAIKIGEGDFYSLAVAASNTESNKLAAFFNNIKQTVLGVMGSQAINYLVQGEEVNTSGTHRGRGAIHLAKVSAIDGFELDEIAPVNSDLTHHLNGVVTAVETPDVSSIEGALSQKTQSVSDQSKNLIVNGDFEQGELGWQSTHGIEAYGSASVYGFDIASHGERVSELDAERNTTIYQDLQNLSEGEVISLSFDFAHRSNAYIINNGMDVFWNGKRVFSTSGNAIEWQSKTLELIARAGSNRIEFKGTGLNDGVGYVLDNVVAKSENPRQTDVVTEHVRQGKAVQNALSDKEKAERDRQLLEQEQEKQLAGIAKSQSQLELTDQAAVSQNGLIQRNAIEAEAQAVTEELTLLADKFKALKDETDESRELESHYLDYAGGISEDIQKRLDDIKPTLEKRLADIHRDAIDIQQKVKDTVVLSAAGTEKGKQNRDKAILDGVEAQLKAEQREKEALLQQQQAEKAKDNANIAYQNAENRGQRDIAAAENKAAQTQADAKGAKLSNDKPVRSGASGSGLSGEKAYESTGAGETGSHIDPESMPEAGNRYYQGLTEEELRALASAKQAVSRLQINAGIRAKNTGVSLIPRSVETQSDSIMGSPLHETRELIRKVPIISGVNLEELGESEKKELNVVVLNKISKZ

SEQ ID NO: 1781 - protein, 295 aa, Photorhabdus luminescens
HQIISTALEPQVLPVNIVKNNHIFRIDIINLTVNDLTTDHKAVYSCAPPEVVLVSPQHQQILTFTAVKLAEFRHCGRYQVVITFSAINYRMIAHQFNNIVTRVTVNLVVITKHPTKVMAFTQLNPVVIPDGHGIILTFPGLHPVVVAGGNNVVVPVTGINQPAFTKNKCLVIPFTHERIVNPPGYYRGIIAMTAKHPVFTPHQDAQIIAFTPGKEVGSTDGVINILSATTPEVVVITQISAEIFTVTAPVEVIVPQRDMDIAIPLQMTAVTQEIKCFLLHIEQIRGEILFQMRDZ

SEQ ID NO: 1782 - protein, 209 aa, Photorhabdus luminescens
MSWPFIAVFLSGWLYVDAAYRGPNWQRWLFRPVTLLLLLLWAWQAPELHISGYLICFGLFTALISDALRMLPSKYSLFSLSTLFLCYLLYTISFIMQMNFSFFFPLPLILLVLGSIILLVIWNKLEERRWLVVASVVMLLIMVWMAGEQYFSLNTAYGFSLLAGTVLLLLSHSVWLINHYRFQFKSSKAIVATCYFIGHFLIIRSIYLZ

SEQ ID NO: 1783 - protein, 1733 aa, Photorhabdus luminescens
IRFQNSATSYTTHNSMYNNGLDGAMCSIITKRYLEKIVDVDQWFDNGNDNTRLPDELYFIEDRIVFNHQRNTKILTENVDSAWKPLPKLMSVSEFQEAASVVGKIRGDNYKKVIDALESYHNIQQGRKDYILNVVRKLSDLRQQVEGYLLGHPDSGRVPAMRALLSQIDTCFNESMVFAGSTVKIPGQGDFSRLYDQLGSANLKDSKHLYIDENGDFVTRGKENIHINQKAESADKAVEQVKAAVIQEYGQDISDAVFSNLKASDLSNDGKGIDVSGLRKIHQAIEQYLSPISATLFVWKPSAHSLLGHGAMQIGQGRAHVNADIAGFINKRNYASWWPLLNHRTLEIDVAYEERDKFGLRYGDYKLQRFTSRLEWAQGVDVAFKDVTEDFTMMALADPRLLQSSGIPKQIYQPFVDMWNGYEHERADVGRFFAEELRYQANKNVQDPQLIEKRTANVIRQFKERELADIQNFRDREADQGRVFRINLEGLDVAAMQAKWRKISNDPNEHYQLLRNNCSSIVARILKAGGADKLVGHKWLPKFGVWTPTELFNYAQALQEAQLEIIAKKKSHTPVEDLTALSGKNKVLETAVVKNGGTSLLNQLITKGGLRRYNDVANVPRVQLLNSLQVAPAVKLAHKPVELWQTAEVTPQTDGRETHFDSQIIIQVEDDLAVAEAAANLAGKHPDSSVVVQLDSEGKYRVVYGDLSQLKPSDKLRWQLVGHGRSKSEQNYTRLGSYSADELAVKLKQFTRNFSQAGKPDHISIVGCSLISDDKRNGFARHFITALKEQGIQTTVSARRSAVAVDVDGRKFTWNERRQWIHKLADNKVVLSWNEKGELETRSERVRHHIAESDIHLSRVGMADAEMPARGAVVDNTDIFIAPEKRKNNIETDSSDISNNWLSYSGNIQVGVGNGEFTALNWGTSNVGVKVGMGGFKSLVFGDNNVMVHIGNGDSKHRVDIAGYQALEGVQMFIGNRNISFNQGRSNDLIVMMDKSLPTPPLVNPFDGTARISGVLQGIAHFGEKQEWLAAQDQQWTLAGAKKFVLDLSGLDQTSSVDYKTLVDLDSQHARSSRGLKQDIEVTLNKKFNQWLTRNVSDMGTMSRANKFRQVNEKLAFNFAVGGRGADIQVTTGNWNLMFGDNIQSILDTNLGSLFGLMTQQYSATGMAKTTFTYHPQDLPRQLKNKLLGRLAGVNAETTLADIFGVNYTPEGQMVSRTGDLVNGEAILREMLAVIAEFSGDQLKAFTNPEKLLDGLKAGMAMGGDGIRSFAESHGLQERAPDENRGSELPVSINGISAQADDKAKPVFGFNSLNLPNLFATMFSQDKQTEMHSLVTHLKENLTADLLNMEQKTFDFLRNSGHLQGDGDIHISLGNYNFNWGGDGKDLGAYLGDNNNFWGGRGEDVYYAIGTSNLFTGGEGNDLGVLMGRENGMFGGHGDDTAVIAGRINYAFMGEGNDQTFVFGEGGLIDAGNGDDYVVTSGNYNRVETGEGQDYAVTIGNNNRVELGEGHDFGRVFGNDNQIDGNAGDDVIKLMGYHAVINGGEGDDHLIAATMSKFSQFDGGEGQDLLVLGGYQNDFRGGAGVDSFVVSGQVIDSQVDDINAEDMIVFNDIDWQNLWFQRSGYDLVLSVNRHIEDKTAQGVFESTGSVTFSDYFNGNRAKLVVQMGDKNASGEREFTALSDNAVDTLIQAMSSFAPTVGDNGFIDNLASQEKIVMATAWADTTVGKVQFAZ

SEQ ID NO: 1784 - protein, 268 aa, Photorhabdus luminescens
ILAFPIIKAAVWSLPTLVSTLAPPIRAAKVLPSPTWVKILALPIIAANVIPLPTFVAILPSACISATLVPSPICVNTLPAATINASASPSPTLVKTFTAPPISAQTSPLPIWVNRLPVPVKAAIDVPSPTLVKILPAAAITPSVKPSPTWVNTLPMPNIMPVESPLPTLVKIFAPPSITPVVLPSPICVRTFAPPPMTACAWPVPFLVRILAPPNAIAVVFDVSVSSLRWLIILAPPSIPATRLPAPSLVSALAPPNSTEEMLPFPAZ

SEQ ID NO: 1785 - protein, 3673 aa, Photorhabdus luminescens
MGKSSNRSTEYIFTGKYYDDDDNIDNSITAIGIGGNVYAYGGDDDVTVGSFKVDVYHTDGDLAVKGASGYTGIHKTGNGGLSFAGAAGAVFINHTGETGNLNYSGVAGYNKLVRKGLSGDSSFKGGGGYNQLWHETNRGDLDFAGAGAGNNIDRTWFNRYQDSQGNVIFNGAGVTNNINSRVESGDIILHGIGTDNHIVRRGRNGDILLRGVGAANRIERIRHSEDKYGQTQGDITLEGAGGYNTLYSDVAHGNIHFTGTGVYNKIARVGVRNEIEFAQAKDIIMTSATMEGDGTQQSRQVKAVKSAVEPDTYLFAIANNINTKVVAVRLRNNPDTGKLRYYATSWYKQGDHLEDIAKENINTNNGFIPVKGDDTITLANINVVYRQKNTIQGVVKALLTDKWGNYARGINIKAEDVILASAKIGGDTLSSNGLKIDVSPVKSNTQPNTYVYAIFLDPYTKVVEVKLANDSETGRLKYIARSWYKKGDHTGRIANETFSYPYGYRLIRAGYTVSELHYKLNVTDDITDCLTDLKSYFEQDVIKSSKSGGDSSGNIYFSGAGGGNIIKSDVTRGDINFTGLGAANVILHDSKFGDTHFDGAGAANVIVKKGEKGDLTFRGTGLANVLVHRGQSGKMDVYAGGAVNVLVRIGDGQYLAHLLAYGNISIHKGNGSSRVRMLGGYNTHTQIGNGDGNWSGKGGFNVITQAGKGSISSVLLGGANALTKLGAGSLVAGMLGGANIISHLSEETETSNTTAIALGGASILTKKGTGHAQAVMGGGANVLTHIGDGNTTGVMLGGANILTKVGSGDSTGIMFGIGNVLTHVGDGLTLGVMAAAGNIFTKVGEGTSIAALTGTGNLFTHIGKGDVWALMGGAVNVFTKVGDGDALALMVAAGNVFTHIGDGTSVALMQAEGNIATKVGNGMTLAAMIGKANIFTHVGEGNTFAALIGGANVLTKVGNDQTAALMIGKANIYSHVGNGPSIGLFAGELNVMTKVGEGTTLAAMFGRANIMTHVGDGLTGVLALGEANIVTKVGNDFMGVVATVKANVITHVGNAVTASILFGKGNILTKVGDGTTVGLLVSDVGNVMTHIGEGSTVGFAKGKANLITKIGDGAGVNAAWGEANILTQVGNGDRYNFAKGQANLMTKVGKGQEVTVVQGDANIITHVGNGDDYTGAWGKANVVTKVGDGRNVVLAKGKANIITQVGQGDSFNALWSEGNIVTKVGDGMQVTVAKGKANVTTTVGNGLNVTAAHGDSNINTHVGNGVSVNLAWGKHNINTKVGNGLNVAVMKGQSNANIQVGHGLAVNASYARNNVAIKIGEGDFYSLAVAASNTESNKLAAFFNNIKQTVLGVMGSQAINYLVQGEEVNTFGIHKGRGAIHLAEVSTIDGFQMEAIAPVSSDLNYRLNGTVTAVETPDVDVIESVLNQKTRSISDQNNNLIINGDFEQGKLGWQSTHGIEAYGSASAYGLVIAGHGERVSELDAERNTTIYQDLQNLSEGEVISLSFDFAHRSNTYVINNGMEVFWNGQWVFSASGNAIEWKSKTLELIARAGSNRIEFKGTGLNDGVGYVLDNVVAKSENPLQTDVVTEHAKQDKAAQNALNDKEKAEKDRQLLEQEQEKQLAGIAKSQSQLELTDQAAVSQNGLTQRNAIEAEAQAETGKLISMTQGLAVLDNHASYSGQSGDPWRNPFAAEFLNHVQNELYYVKFIAQKKLANARQAIADNQQQVKKAVAKAEAGVAQSEQHCVSAKQDIAAAQEKAELRKIEAVLQQQQAKEAENDANIAYQGAEYRGKHDIAVAESKITQVQVDAKVAKQSDSRPDRTGAGGSGLSGKAYESTGAGETGSHIDPELVPEAEKKFYEGLSEEELQALDSVEQLVDHLKINASIHAENTGVLTASKFAKGQSGSMVMPASNSPGEFVRRVPRISGINLKSLGDDIKLGQKGNSAIFESAKFNLLKEGSKLFINPDERTLGQKRPLSQAMTAVRDIFYKTMSHFDEEHVLQFEQVIADWQQHSPKEFALRANQVNLIRFRMGRVMEYLQAQRAESAKVLGIAVSPQRAEQLSQRVIFDGTGRVVGLKGSVTQDEINHLIEWKITPLTRANSTAEREAPKTESESLIAFMSRLEAANIPEAMPLIEQARGLWLIGQVTSKETIKLFNDAASQLQAYPELQALVLSLQADAHKKKSTTQYIDNLFGRRFDSEVAHTLVKTASPDAIAVSKRIGQFLVQEFELYMQNTASSTIRDGQITNGQMAIRMHAFAEKIKKDIRPWFSRVPELTTFLQKPTLDNFKIMMTKVDNGFEMIKIPFLAVKMSNTDGMGLHLSQWKAEADIFYRGEIYKARSTSNTLTHRADVTHTVELIDQQTNDYGIALPYQPSGDQYDDFLSGRKVAAGSVLTPGQETVLERNALAQGHSVVTGASGSTNIMVHLNNYIARQDPTFSQEQAYLNTLAFLVFDGGHSVNESLVVYKALQATSDERRQVLQHYTASYMDLMDIAGDKGERWINQALNSAFEKTLHFYRENTPERKRNDVPVEALQALSGKNGTSESLFIKDGGTSPQDKAALNPVTRFFNNELYGFKEDKNQDRVKNSQQKNDNRGTRFDGQIIIQMEDDPIVAKAAINLAGKHPDSSVVVKLDADGKYHVIDGDPAGLSGKLRWQIVGHGRDESTQNNTRLSGYRADELAIKLKQFSQDFEQAGKPERISIVGCSLISDDKQNGFAYRFMFALDKQGIRSEVSVRRSDVAVDATGRKFTRDKNYQWVNRLDDNKQVLCWNEEGELTATTERERCGVAESDINLARVGYTEADSVTRGAIADNHDVFIAPRKRKNRIEPGSNPQSDKPLSYAGNIQVNVGDGEFTAINWGTSNVGIKVGTGGFKSLAFGDNNVMAHIGEGDSKHSVNLGGYQAFEGAQVFIGTRNISFNQGRSNDLIVMMDKSLSTPPLVNPFDGTARISGVLKSIARSGEEQNWLAVQDQQWTLSGAEKFVRDMSGLDQTSSVDYKTLVDLDAQHERSSRGLKSDTETALNKKYHRWLSDNSNDIDTSKMSRVDKFRQANEKLIFNFAVGGRGADIQVTTGSWNFMFGDHIQSILDTNLGSLFGLMTQQYSATGIAKTTFTYKPQDLPRQLKNKLLGRLASVNAETTLADIFGVDCTPEGQIVARTGEPVDGTAILREMLEMIKQFGGDQFRVFADPDKWIEGLKQHIDMGADGIKSFLISHGLKEKAPDENREESVPGVINSGNSQVDNKPERALGFHSLNLPNLFATIFNRNKQEEMRSLVTNLKENLTADLLNMEQKTFDFLRNSGHLHDDGDIHISLGNYNFNWGGDGKDLGAYLGDNNNFWGGRGEDVYYAIGISNLFTGGEGNDLGVLMGRENWMFGGHGDDTAVIAGRINYAFMGEGNDQTFVFGEGGLIDAGSGYDYVVTAGNYNRVETGEDQDYAVTIGNNNWVELGAGHDFGWVFGNDNRIDGNTGDDVIKLMGYHAVINGGEGDDHLIAATISKFSQFDGGEGQDLLVLGGYQNHFQGGAGVDSFVVSGQVIDSQVDDINAEDMIAFNDIDWQDLWFQRSGYDLVLSVNRPTQDKTAQGIFESIGSVTFSDYFNGNRAKLVMRMGDKNALGEREFTALSDNAVDTLIQAMSSFAPTVGDNGFIDNLASQAKIVMATAWADTTEGKVQFAZ

SEQ ID NO: 1786 - protein, 218 aa, Photorhabdus luminescens
MGKSLNNISAEFLFTGKHYDNNNGNRIAAIGVGGDVYAFGGDDDVTIGSFKVDVYHTDGDLSVKGASGYTGISKTGNGRLSFEGVAGATFIDHIGETGDLSYMGAAGYNKLVRKGVSGDIGFKGAGGYNQLWHETNQGNLGFAGAGAYNDIDRTWFNRYSGSQGNVVFDGAGAANSINSRVESGDIIFQGVGADNHIVRKGRSGNIVLRGGGGIESHZ

SEQ ID NO: 1787 - protein, 254 aa, Photorhabdus luminescens
PTLVSTLAPPIMTVKVLPSPTWLKRLAKPIIAANVVPSPTFVAILPFASISATLEPSPICVNTLPAAAINASASPSPTLVKIFPNPPINPQASPLPIWVNRLPAPIRAAITVPSPTLVKILPAEAITPSAKPSPTWVSTLPMPNMTPVMSPFPTLVKVLAPPSITPVVLPSPICVKTFLPPPMIANAWPFPFLVKTLAPPSAMMEVLAVSLSSLRWVIILVPPSIPATRLPVPSLVIALAPPKSTETIFPAPFZ

SEQ ID NO: 1788 - protein, 3497 aa, Photorhabdus luminescens
KAVTSFFRVLALIIISCVKVEAVILSYGGAGASNRIERIRGKGKYVQTQGDITFEGAGGYNTLYSDVAHGNIHFAGAGAYNKITRSGVKNEIEFAQAQDIVMTSATMEGSWIQQSQRVEAVKSAVEPDTYLFAIANNVNTKVVAVRLQNNPNTGKLSYYATSWYKKGDHLKNIARENINVNNGFVTIKRNDAIMLANIDVIYQQKTTIQGVVDRLFVDRWIHYAREVNIKAEDITLASAKMEIEEDALSSHGLKIDVSAVKSNIHPNHYVYAVFQEPYTKVVEIELMNDSQTGRLIYIARSWYKKGDYTDRIANETFSYSQGYQSIKAGYTLSQLHYKLNVTEDITDCLTDLNNDVGEDLMTSSESSGDSSGDIYFNGAGGGNVIMSNVMHGNIYFTGAGAANVILHSSTFGDIRFEGAGTANVIVKNGEKGDLTFRGAGLANVVVHQGQNGKMDVYAGGAVNVLVRIGDGQYLAHLLAYGNISIHKGNGDSRVRMLGGYNTHTQIGNGSANWFGMGGFNFITQKGAGNIVSVLLGGASAITKLGTGNLVAGMLGGTNIITHLSEESETANTSIIALGGANVFTRKGKGHALAIMGGGKNVFTHIGEGKTTGVMLGGANTLTKVGKGDMTGVMFGIGNVLTHVGDGFALGVMASAGNIFTKVGDGTVIAALIGAGSLFTHIGKGDAWGLMGGLGNIFTKVGDGDALALMAAAGNVFTHIGEGSSVALMLAKGNIATKVGDGTTLAAMIGLANLFSHVGDGNTFTVMIGGANVLTKVGHDQTAAVMMGKANIFTHEGNGASIGLFAGELNVMTKVGKGTTLAAMFGRANIMTHVGNGLTGVLALGEANIVTKVGDDFMGVVTAAKANVITHIGDATTAGILLGKGNMLTKVGDGTTIGLLISDVGNVMTHIGDGLTVGFVSGNANLITKIGDGTGVNAAWGEANILTQVGNGDRYTFAKGQANIVTKVGKGQEVTVVQGDANIITHVGNGDDYTGAWGEANVVTKVGDGRNVVLAKGKANIITQVGEGNSFNALWSEGNVVTKVGDGMQVTVAKGKANVTTTIGNGLNVTAAQGDANINTHVGDGISVNVAWGKYNVNTKVGHGLNVAVMKGQGNANIQVGNGLYVNAAYARNNAAIKIGGGDFYSLAVAASNTESNKLAALYNNIKQMVLGVGGSQAIDYLVQGEDVNTLSTHRGRGAIHLAEVSAIDGFQMDVTSPVNSDLNYRLNSAVTGVEMPDVDVIESALNQKTRSILEQNNNLIINGDFEQGKLGWQFTNNIEVYGPASNYGLDNTGHGKRVSELDVEGNTTIYQDLRNLSEGEVISLSFDFAHRSDIDVIQNGMEVVWNGERVFSVIGNSIEWKTKTLELIAQAGSNRIEFKGTGENDGMGYILDNVIAKSEKPLQTDVIIEHVREDEAAQNALSDKEKAGKDSQLLEQEKKRQLAAIAKSQSQLESTDQAALNRSGLAQRNAIEAEAQAEADKLVSMTQGLVELDDHAGYSGQSGDPWRNPFAAKFLSYIQDESNYAKFIAQKRLAYSRQVIADNQQQIEKAVAKSEVGVAQSEQHHAGAKQDIAAAQQKAALRKEEVLLQQQRAQEAENDANIAYQEEQDRGKRDIAAAENKIAQVQIDAKVAKQSDARPDRAGAKGSGLAGKAYESTGAGETGSHIDPEFVPEAEKKFYKELTEEELQALESAEQAVEHLQIMAGIHAENTGVLMASALAEGQSDDSVMPASNRSDEFVIIEPQISGINLKSLGNDTKVEQQGNSAIFESAKFNLLKEGNQLFINPKVQILGWKRPRSAVLTVVRDTFYKTMSHFDEEHVLRFEQAIADWQQNSPKEFALYVSEVNLIRLRMDRIMAYLQAQRAGAVGVFGIAVAPRFAEQFTQRVIFDGTGRVVGLKSGVTQDEINQLIEWKITPLTRTNSTAEREAPKTESESLIAFMSQLETANIPAVLPLIGRARQLWLTGQVTSEETIKLFNDAVSQLQGYPELHALVLSLQADAYKEKSTTQYIDNLFGRRFDSEVAHTLVKTAPPDALATSRRIGQFLVQEFELHMQNTAGSTIRDAQIAFRMQVFAEKIKQDIRPWFSQTPELITFLQEPTLDNFKIMMTKVDNGFEMIKIPFLAVKMSITDGMGLHLSQWKAEADTFYQEEIYKARSTSNTLTHYANVTHTVELTQQQTNDYGIALPHQPSGDPYENFLFGRNVTAGRVLMPGRETALERNALAQGHSVVAGASGSTNIMVHLNNDIARQDPTFSREQAYLNTLAFLVFDGGHSVNESLTVYKALQAMGDERRQVLQHYTASYMDLMDIAEDKGEQWINQALNSAFEKTLDLYRKYSPKRERNNSPTVASQALPDKHGASESVFIEDESTLPRDKTALNPAPQLSNSERYSFKEDRSYISDETQTILNNVVKSSRQKSDNHGTRFDGQLIIQMENDPIVATAAINLAGKHPDSSVVVKLDADGKYHVIYGDPAELSGKLRWQIVGHGRDESAQNNTRLSGYRADELAIKLKQFSQDFAPAGEPERISIVGCSLISEDKQHGFAHRFIIALDKQGIRSEVSAHRSDVAVDATGRKFARDKHHQWVNKLKDNKRVLYWNEEGELATTTELERCGVAESDINLARVGYTAADLVTRGAIADNHDAFTAPRKPRNRIEPGSNPQLGKPLSYAGNMQINVGDGEFTAINWGTSNVGIKVGTGGFKSLVFGDSNVMAHIGEGDSEHSVEIAGYQALEGAQMFIGTRNISFNQGRSNDLIVMMDKSIATPLLVNPFDGPARITGVLKSIARSGTEWNWLAAQDQQWTISGVRKFLWNMSGLDQTSSVDYKTLVDLDAQHERSSRGLNSDMETALNKKYYQWLSNNGNDTETNKMSRVDKFRRANEKLIFNFAVGGQGADIQVTTGSWNFMFGDHIQSILDTNLGSLFGLMTQQYSTTGMAKTTFTYKPQDLPRQLKNRLLGRLAGVNAETTLADIFGVDYTPKGRIVARTGEPVDGQAILREMLEVIRQFGGDQFHVFADPDKWIEGLKQNIDMSADGIESFLVSHRLKEKAPDEHREESVPGDINTGNSQADNKPERIWGFNSLNLPNLFATMFSKDKQQEMKSLVTNLKENLTADLLNMEGKTFDFLLNSGHLRGDGDIHISLGNYNFNWGGEGKDLGAYLGDNNNFWGGYGDDVYYSIGTANLFTGGEGNDLGVLMGRENWMFGGHGDDTAVIAGRINYAFMGEGNDQTFVFGEGGLIDAGSGYDYVVTAGNYNRVETGEDQDYAVTIGNNNWVELGAGHDFGWVFGNDNRIDGNTGDDVIKLMGYHAVINGGEGGDHLIAATISKFSQFDGGEGQDLLVLGGYQNHFQGGAGVDSFVVSGQVIDSQVDDINAEDMIAFNDIDWKDLWFQRSGYDLVLSVNRPTQDKTAQGIFESIGSVTFSDYFNGNRAKLVMRMGDKNALGEREFTALSDNAVDTLIQAMSSFAPTVGDNGFIDNLASQTKIVMATAWADTTRGKVQFAZ

SEQ ID NO: 1789 - protein, 4076 aa, Photorhabdus luminescens
IKGLLMGKSSNRSTEYFFTGKYYDDNDGNSIIAIGIGGEVYAYGGDDDVTIGSFKVDVYHTNGELSVKGASGYTGISKTGNGGLSFSGAAGTAFIDHTGETGDLSYSGAAGYNKLVRKGSSGDTRFKGAGGYNQLWHETDQGNVYFAGAGAANKIDRTWSNYYEGTQGDVTFNGAGAANSIDSRIESGDITLNGVGADNHIVRKGREGNIILHGAGAANRIERTRHSEDQYGQTQGDITLEGAGGYNKLYSDVAHGNIHFTGAGAYNEITRAGARNEIEFAQAKDIVMTSATMEERGIQQSQQVKAVKSEVEPDTYLFAIADNVNTKVVAVRLQNNPDTGKLRYYATSWYKEGNHLKDIAKENIDVNNGFISVKGDDAITLANINVVYRQETIVQGVEEVLLTDKWVNYSDGTNIKAKNVTLGSAKMGGYAISSNGLKIDVSPVKSNQQPDTYVYAIFLEPYTKVVEVKLANDDETGKLKYIARSWYKKGDHTGRLANERFSYPRGYQSIGAGYTLSQLHYDLNVTDEITDCLTDIEGYSEQDVIKSSKNGGDSSGNIYFIGAGGGNIITSNVTHGNINFTGAGAANIILHSSTFGNTYFEGGGGANVIVKNGEEGDLSFRGAGLANVLVHQSQRGKMDVYAGGAVNVLVRVGDGRYLAHLLSYGNISIHKGNGDSRVLMLGGYNTHTQIGDGSANWFGAGGFNVITQAGTGDIFSVFLGGANVLTKLGAGDMVAGMLGGANIITHLSDETETTNTTAIALGGANIFTKKGKGHTQAVMGGGANVLTHIGDGNTTGVMLGGANILTKVGKGDMTGIMFGVGNVLTHVGDGLTLGVMAAAGNIFTKVGEGTSIAAMIGAGNLFTHVGKGDAWALMGGVGNIFTKVGDGDALALMVAAGNVFTHIGDGTSVALMLAKGNIATKVGNGMTLAAMIGKANIFTHVGEGNTFAAMIGGANVLTKVGNDLTAALMVGKANIYSHVGNGTSIGLFAGELNVMTKVGNGTTLAAMFGKANMMTHVGDGLTGVLALGEANIVTKVGDDFMGVVAAAKANVITHVGDATTAAILFGKGNILTKVGDGTTVGLLISDVGNVMTHVGEGTTVGFAKGKANLITKIGDGAGVNAAWGEANILTQVGNGDRYNFAKGKANLMTKVGKGQEVTVVQGDANIITHVGNGDDYTGAWGKANVITKIGDGRNVVLAKGKANIVTQVGQGDSFNALWSEGNIVTKVGDGMQVTVAKGKANVTTTVGNGLNVTAAHGDANINTHVGNGVSVNLAWGKHNINTKVGNGLNVAVMKGQANANIHVGDGLGINASYARNNVAVKIGNGDFYSFSVTNSNKLSSLFEHIKQTTLGVGGSQAINYLVHGEEANTSGTHKGRGAINLAEVSGIDGFQMDEIAPISSDLNHSFNGAITAVETPDVSSIEGALSQKTLSVSDQDENLIVNGDFEQGELGWQSTHGIEAYNPASDYGLDNTGDGERVSKFDVDKNTVIWQELQNLSEGEVVSLTFDFMSHFERVDRDLSGSGIMVLWNGKSVFSTSGPRAIWRTQKLDLMAKAGTNRIEFKGTGQDDGFSYILDNIIVKSETSLIVNNDLEQGKLDWQSTNDIAAYSSVSTDGPNNTRYGERVSELDVDKNTTIYQDLQNRSEGEVISLSFDFANRPDAYSVDNGMDVFWNDKLVFSTFGDAAKWQNKTLELTAKAGSNRIEFKGTGLSDGVGYILDNVIAKSKSSQQANIITEHVKQDKAAQNALSDKEKAEKDRRLLEQEKEKQLAEIAKSQSQLELTDQAAVSQNGLTQRNAIEAEAQAETDKLVSMTQGLDALGDYANYSGQSGDQWRNQFASQFLDHAQDKLNDIKFIAQRKLMHARQAITDNQQHVKEAVKKSEVGVAQSEQHHASAKQDIAAAQKKAELRKEEALLQQQRAEKAENDANIAYQGAEYRGKRDIAAAENKIAQVQEDVRGAKQSDSKPDRTGAGGSGLSGNGYESTGAGETGSYIDPELIPEAEKKFYKGLTEEELQALDDAKQAVDRLQINASIRVENTGVLTTSKFAKGQSDDRVIPTSNSSGERVRRVPRISGINLKSLGNDVKVEQKNSAIFENAKFNLLKEGNKLFINPNVRTLGRKRKLSTALATVRDTFYKTMSHFDEEHILLLERAIADWQQHSPKEFALRTNQVNLVRFKMGRMIEHLQAQRAESAGVLGIAVAPQHAEHLTQRVIFDGTGRVVGLKGGITQNEINRLIEWQITPLTRTNSTAEREAPKTESESLIAFMSRLETANIPEARFLIGRARGLWLTGQVTSKETIKLFDDAASQLQAYPELHGLVLSLQADAHREKSTTQYIDNLFGRRFDSEVAHTLVKMASPDALATSRRIGQFLVQEFELYMQSTADSPVLDGQIDIRMQAFAEKIKKDIRPWFSRVPELTAFLQKPTLDNFKIMMTKVDNGFEMIKIPFLAVKMSNTDGMGLHLSQWKAEADIFYREEIYKARSTSSKLTNMADVTYKVKLTEQQTNDYGIALPYQPSGDQYGDFLYGRKVAAGRVLTPGQETTLERNALAQGHSVVTGASGSTNIMVHLNNYIASQDPTFSQEQAYLNTLAFLVFDGGHSVNESLVVYKALQMTGDERRQVLQNYTASYMDLMDIAGDKGKLSINQALNNAFEKTQHLYRENTPEREQNDSPVEALQALSGKNGASESVLIENDDTPPRDKDSLNPVTRFFNNELYGFKEDRRHISDKTQTILNDAVANGKSSKITLKGEEGRLTGYYHQGDIKPDDISTAAEKKVVLFLHGSGLSAEEQAHDIQSHYQKQGIDILAVNMRGYGGSDGSPGEQGFYQDARTMFRYLVQDRGIKPGNIILHGYSVGGPVAADLARYASQNNQAVSGLLLDRPISSMTKTITAHDVPNPGGMIGALAKAMNGQFSVEKNLKGLPINTPIMLLTDNQGLGHEGEKLRARLAASGYRVSGEQTFYGHVESGALMSQYTDRIVSTLSDFQNKNRDGVKNSWQKSDNRGTRFDGQIIIQMENDPIVAKAALNLASKHRKSSVVVKLDSNGKYHVIYGDPAGLSGKLRWQIVGHGRNESAQNNTRLSGYSADELAIKLKQFSQNFEQAGKPDRISIVGCSLISDDKRNGFAYRFITALDKQGIRSEVSARRSEVAVDATGRKFTRDKNHQWVNKLDDNKLVLRWNEQDELTTTTEKLRRGVAESDINLAKVGHTEADSATRGAIADNHDVFTAPGKRKNRVELGSNPQSEPLGYAGNIQVNVGDGEFTAINWGTSNVGIKVGTGGFKSLAFGDNNVMVHIGEGDSKHSVNLAGYQALEGAQMFIGNRNVSFNQGRSNDLIVMMDKSIPTPPLVNPFDGAARITGVLKSIAHSGEERNWLAAQNQQWTLSGAKKFVRDMSGLDQTSSVDYKTLVDLDSQLKRSSRGLKSDTEAALNKKYHQWLNGHGNNIDTKKMSRVDKFRQANEKLAFNFAVGGQGADIQVTTGSWNFMFGDHIQSILDTNLGSLFGLMTQQYSTTGLAKTTFTYNLQDLPRQLKNKLLGRLAGVNAETTLADIFGVDYTPEGQIVARTGEPVDGKAILREMLEVIKQFGGDQLSVFTDPDKLIEGLKQNANMSADGIESFFVSHGLKEKAPDENREKSVPDAVNSGKSQADDKSERALGFNSLNLPNLFATIFSKDKQQEMKSLVTNLKENLTADLLNMEQKTFDFLRNSGHLQGDSDIHISLGNYNFNWGGDGKDLGAYLGDNNNFWGGRGDDVYYSIGTSNIFTGGEGDDLGVLMGRENWMFGGSGDDTAVVAGRINHVFMGEGNDQTFVFGEGGVIDAGNGRDYVVTSGNYNQVDTGEDQDYAVTIGNNNRVELGEGNDFGRVFGNDNRIDGNMGNDVIKLMGYHAVINGGEGDDHLIAATISKFSQFDGGEGQDLLVLGGYQNHFQGGAGVDSFVVSGKVIDSQVDDINAEDMIAFNDIDWQDLWFQRSGYDLVLSVNRPTQDKTAQGLFESVGSVTFRDYFNGNRAKLVTQMGRKDASGEREFTALSDNAVDTLIQAMSSFAPTAGDNGFIEALDNREKMAITTAWADTTIGKGKFAZ

SEQ ID NO: 1790 - protein, 295 aa, Photorhabdus luminescens; identical to SEQ ID NO: 404

SEQ ID NO: 1791 - protein, 531 aa, Photorhabdus luminescens
MVEQQYFIGVDVGSASVRTAVFDQCGKRHAFSARPIQQFHPKADFVEQSSADIWAQVCATVKEAVALANINPIDVKSIGFDATCSLVAVAAEGCSLSVAENGNPEHDIIMWMDHRAIKEAITINQTNDPALCYVGGEISPEMELPKILWLKNYFPQRYQDIWRFFDLADFLVWKATGADVASTCTLTCKWNYLAHQKQFSEKLLYDVGLEDLTNKVPSTIIELGEKAGYLTAEVAKDFGLHTGIIVAGGIIDAHAGGLALTGAYPEGSLVIISGTSNCHMIVSPHPVMVPGVWGPYFGAMLPGYWLNEGGQSAAGALVEWSIRQHNSWPELAAEAEESGHHYYQLLNEAVTQLEKQEIYPTAQLHILSDHHGNRSPRANPNAKGMVSGLTLANGRDDLARHYLATLQSIAYGTRHIIDALVEAGHQINRLVMCGGATKNPLWLREYANATGREIHLTQEEDAVNLGSALLGAVACGSFANFAQAAKSMVRDGNIIKPEKETFLFHQAKYQVYLQMYRDQQQYNEIMQTGNZ

SEQ ID NO: 1792 - protein, 762 aa, Photorhabdus luminescens
MYSNSNKNSAHQHNHQHGSCCATTTCSDQAKQVSEHLHHHEHEHGKACSHKHHPSHDTQETQAPELLANQRFSWVVNGMDCPSCARKIETAVSKIAEVKQAKVLFATEKLVVDADTDIRSAVIQAVNQAGFTLRNSDSSQKAEKSSRWKEFAPIITLSLMMLISWGISHINPSFGRIAFIITTVIGLVPIVTKAWQLIRSGTPFAIETLMSVAAIGALFIDATAEAAMVLLLFMLGEMLESYAAGRARRGVSALMALVPEEALLVKNGEKKIVPVSDLRPGDIIEIAPGGRLPTDAELLNSFASFDESALTGESIPVERMQGEKVPAGCLSVDRAIQMKVLSEQGNNAIDRILQLIEEAEERRAPIERFIDRFSRIYTPLIMLFSALVIIIPPTVFSQPWETWIYRGLTLLLIGCPCALVISTPAAITSALATATRRGALIKGGAALEQLGLITTIAFDKTGTLTAGKPQVTDIQPAENISESQLLALASAVESGSHHPLAKAILQCAESKNVNITEAEHRKALAGVGVEGQLNDKRILVSAPGKLPANTLSDRWKQKIVQLEDCGKTVVAVMHDEQFAGLIAMQDTLRQDAIDAIRLLKDQGIKSVMLTGDNPRAATAIAGQLGIDFRAGLMPEDKVKAVIALNKDHSTMMVGDGINDAPAMKASSIGVAMGSGTDVALETADAALTHNRLTGLSEIITLSRATHNNIRQNIAIALGLKGIFLVTSLLGITGLWMAVLADSGATALVTANAVRLLRIKLKZ

SEQ ID NO: 1793 - protein, 191 aa, Photorhabdus luminescens
LFLNPVFIGGIIAVCEKQRTSGEFELSLLFNGFQKNFASLLGIGALTLGIILLGVIAMFIAGGSAVIHILLAAQHGEISVEMLQNSLFSLLLGLFILMVFSIVNAALTWFAPALIVIHNLKFGAAISMSLAAVKKNLLPGLLFFITSALIFIISVMTFGLSFLISIPVLLVSYYSSYRSIFISKEKSSTFZ

SEQ ID NO: 1794 - protein, 549 aa, Photorhabdus luminescens; identical to SEQ ID NO: 1121

SEQ ID NO: 1795 - protein, 257 aa, Photorhabdus luminescens
IRNTVRNDGFIPSGQSLSSTESMEWISQAWGIVKRKLGMWILLSIIYFIIIFVLQLIPFLGVFTVLFGPVFLGGIIAMCEKQRTTGEFEPGLLFSGFQKNFVSLLGIGALSFGIMLLGIVAMFIISSSTMAHILLDNQYDEIPVEVFPNDLSPLYLGAFVLIIFNIFGTALTWFAPALIVIHNLKFGAAVSMSLEAVKKNLLPGFLFFMVMAVMFIISIMTLGLGLLITIPLFLVSYYSSYRSIFIGKEKLSSLIIZ

SEQ ID NO: 1796 - protein, 430 aa, Photorhabdus luminescens
MLDPNILRNELGAVAEKLARRGYTLDVDTLRKQEERRKVLQVETETLQAERNSRSKAIGAAKARGEDIDPLRQEVNQLGEKLDTAKAELEKLQAEIRDLALSIPNIPDDSVPVGKDENDNLEVSRWGEPGKYDFEIQDHVSLGELTNGLDFAAAVKLTGSRFVVMKGQIARLHRALAQFMLNLHTEQHGYLETYVPYLVNHETLYGTGQLPKFGEDLFHTKPLEEEAESHYALIPTAEVPITNLVRGDILDENELPLKMTAHTPCFRSEAGSYGRDTRGLIRMHQFDKVELVQIVHPDESMDALEALTGHAEKVLQLLNLPYRKVLLCTGDMGFSACKTYDLEVWLPAQNTYREISSCSNMWDFQARRMQARFRGKEDKKTQLLHTLNGSGLAVGRTLVAVMENYQQADGRIEIPEVLRPYMGGLEYIGZ

SEQ ID NO: 1797 - protein, 448 aa, Photorhabdus luminescens
VNNLSLDFSQNEFRPLAARMRPMTLEQYIGQRHLLAEGKPLPRAIRAGQLHSMILWGPPGTGKTTLAEIIGHYAQADVERISAVTSGIKEIRESIEKARQNRNAGRRTILFVDEVHRFNKSQQDAFLPHIEDGTITFIGATTENPSFELNSALLSRARVYLLKSLTTEEIEQVLEQAMSDKERGYHGQNIVLPENTRHMIAELVAGDARRSLNLLEMMADMAETNAQGQRVLTPALLKEVSGERSARFDNKGDRYYDLISALHKSVRGSAPDAALYWYARIITAGGDPLYVARRLLAIASEDVGNADPRGMQVAIAAWDCFTRVGPAEGERAIAQAIVYLACAPKSNAVYTAFKAAMADAKEKPDYDVPVHLRNAPTKLMKEMGLGEEYRYAHDEPNAYAAGEVYFPPEIRETRYYHPTNRGLEGKIGDKLAWLAEQDQNSPIKRYRZ

SEQ ID NO: 1798 - protein, 204 aa, Photorhabdus luminescens
MKKLILIGCLMAGMNINVAWANASQNLQERLGKVNSFHASFTQTVTSDDGATIQEGEGQLWVKRPNLFNWHMTSPDESVLVSDGKTLWFYNPFVEQVTANWLKDATGNTPFMLITRNDAKEWSQYKISQQGNDFELTPNNVTGNLKRFSITVTTDGTIQKFSAIEQDGQKSAYQLKGQQNTHVDAAKFSFTLPKGVTLDDQRQZ

SEQ ID NO: 1799 - protein, 1154 aa, Photorhabdus luminescens
INRKPGEPFLSQEYTEDKNIKLKRLSSGRRLLEAVLLVIVILAAYLLVALVSFNPSDPSWSQTAWHEPVHNLGGGVGAWLADTLFSAFGILAYVIPPVMILGCWTAFKQHDDREYVDFFALALRVIGALAIVLTSCGLAALNVDDLHYFASGGIIGSLFSSAMLPWFNELGATLVLLCIWAIGLTLFTGWSWLTIAEKTGAIILGAIGLITNRSRNEQEYTPYDETAIAREDLADDKTEPEFTAAGIDHDDVLFTAPSAVELAKAELDEPESVKAEIEIEQEQPIDIPTTNMANIDAEPEIRVNTSDDGIVQSQPLVEESEKNNNDEPVRYTFEIPAEYHFEPISEFNRQGTPTFEPVENSRNSSDTFTFMPETEPKNVVAATSATVITGNSQVKQGIGPELPRPNPVRIPTRRELYGIKVPSQRLAEQQREEEVKQQVGGADDDIESDKQQEVLLSQQFLEQQRERYRITTDTEEQAPIQPQIRQNPFEPENQPSVEERAQTATETVKQTVEQPQYKRYQEQGHQEKKELSALESLSILNNFSPVEDLVEKEPAEPLFMPSVHSAPENQLERPTEIAFAPAPVHNVVQQPQQPQQPQQPQQPQQPQQPQQPQQPQQPQQPQQPQQPQQPQQPQQPQQPQQDSLFHPFLVRNDQPLPKPTTPMPSLDLLTSPLAEEEPVDMFALEQTSRLIEARLSDYRVKADVVGFSPGPVITRFELDLAPGVKASRISNLSRDLARSLSAVAVRIVEVIPGKPYVGLELPNKKRQTVYLREVLDCEKFRDNPSPLTIVLGKDIGGQPVVADLGKMPHLLVAGTTGSGKSVGVNAMILSILYKAKPEDVRFIMIDPKMLELSVYEGIPHLLTEVVTDMKDAANALRWSVGEMERRYKLMSALGVRNLAGYNEKVKQAEEMGRPIPHPFWKPGDSMDVIHPVLKKEPYIVVMVDEFADLMMTVGKKVEELIARLAQKARAAGIHLVLATQRPSVDIITGLIKANIPTRIAFTVSSKIDSRTILDQGGAESLLGMGDMLYLAPNSSIPVRVHGAFVRDQEVHEVVNDWKARGRPEYVDSILSGGDDAEGGSGFDSDEELDALFDQAVQFVTEKRRVSISGVQRQFRIGYNRAARIVEQMEAQQIVSAPGHNGNREVLAPPPHESZ

SEQ ID NO: 1800 - protein, 320 aa, Photorhabdus luminescens
MSAAKHHKLIILGSGPAGYTAAVYAARANLNPVLITGVERGGQLTTTTEVENWPGDPEGLTGPGLMERMHQHAEKFQTEIISDHIQKVDLQSRPLRLYGDEQEYTCDALIIATGASARYLGLPSEEAFKGRGISACATCDGFFYRNQKVAVVGGGNTAVEEALYLANIAAEVHLIHRRDTFRSEKILISRLMDKVKNGNIILHTDRILDEVLGDDMGVTGVRLRDTKSGATEELAVTGTFIAIGHTPNTAIFESQLELDNGYIKVQSGLQGNATQTSIPGVFAAGDVMDHTYRQAITSAGTGCMAALDAERFLDGLAAKZ

SEQ ID NO: 1801 - protein, 590 aa, Photorhabdus luminescens
MDKTRQYELVRWLKQQSAPAQRWLRLSMLFGLISGLLIIAQAWLLASILQALIMDNLPREHITNEFWLLAATFALRAIISAIRERIGFICGKIVRQKIRAMVLDKLEQLGPMWVKGKPAGSWATIILEQIEDMQDYYSRYLPQMSLAVIIPILILITLFPVNWAAGLILFATAPLIPLFMALVGLGAADANRRNFVALGRLSGNFLDRLRGLETLRLFYRGKAETQQISESTENFRYRTMEVLRLAFLSSAVLEFFAAISIAVVAVYFGFSYLGELNFGSYGMGVTLFAGFLVLTLAPEFFQPLRDLGTYYHAKAQAVGAAEALVTLLSSDGEYAPASGDKTLPPQDPLTIIANNLEILAHDGNRLAGPLNFTIEKNQRVALVGQSGAGKSSLLNLLLGFLPYRGSIQINGTELRELDQQRWRNQLSWVGQNPHLPEQTLLDNIRLNQPNANQQQIHQVMEQACVTEFIHDLPDGLNTIIGDNAARLSVGQAQRIAVARALLKPCRLLLLDEPGASLDAHSEQQVMATLNQASHHQTTLLVTHQVEETLEYDQIWVMQKGLIIEQGDYQTLSQSQGVFTRLLSHRSEELZ

SEQ ID NO: 1802 - protein, 583 aa, Photorhabdus luminescens
MRVLLPFLALYRRHWFLISLGMVLATVTLLASISLLTLSGWFLAGAALAGLAGYTFNYMLPAAGVRGSAILRTAGRYAERLVSHDATFRVLAHLRVFAFQKILPLSPGGIARFRQGELLNRLVADVETLDHLYLRVISPILSAFIVIMVLTFGLGFLDLTLAYTLGGIMLALLILLPSVFYNAGKSVGRNLTILRGQYRTQLTAALQGQAELMVFSAVGRFRKSMADIESRWLRCQQQQANLTGLSQAIMIFATGMTVTLILWLAANGVGGNSQPGALIALFVFCSLAAFETLGPVTVAFQHLGQVITSATRVSQLMQQEPEVMFPTSGPESSAQASIDIKNISFTYPDQPMAVLKNVSLCLKAGEHIALLGKTGCGKSTLLQLLTRAWDIDSGSICLNQHAITAYDESTLRSMISVVSQRVHVFSHTLRQNLLLAKPNATDNELETVLKQVGLSNLLETNEGLNCWMGEGGRQLSGGEQRRLGIARALLHSAPLMLLDEPTEGLDADTEQQILSLLRQHCQHKSLIIVTHRLYGLDHMDCIYIMDGGTIIEQGQHNELLAQQGRYYQFYQRQHQIRLEPGQZ

SEQ ID NO: 1803 - protein, 225 aa, Photorhabdus luminescens
MFLSTTITQQRATALIWLSLFHILIIISSNYLVQLPVSIFGFHTTWGAFTFPFIFLATDLTVRIYGAPLARRIITTVMIPALLTSYIISALFFQGEWQEFTALLEFNLFVARIACASFMAYFLGQILDVYVFNRLRRRRNWWVAPAAAMFFGNLLDSLAFFSIAFYRSTDAFMAANWIEIGLVDYCFKLLICLLFFLPAYGILLNLILKYFFAYQTNNSHIQVRZ

SEQ ID NO: 1804 - protein, 232 aa, Photorhabdus luminescens
MMPIIQLNADSYDFPHPKEALTEPNGLLAVGGDLSAKRLNAAYHQGIFPWFLPSEMPLWWSPDPRAVIIPGELHIGRTLRRFLRNTPYHITVNHAFEQVVHFCAQRQEGTWIGKDIQQGYKKLYQTGQAHSVEVWHNERIVGGLYGVSVGTLFCGESMFSRMENASKCAFIAFYHHFLRHGGELLDCQVLNHHTASLGAKEIPREEFIQYLYQFRNRSLKAGCWLQQVLELZ

SEQ ID NO: 1805 - protein, 759 aa, Photorhabdus luminescens
MLNQELELSLNIAFAKARDNRHEFMTVEHLLLALLSNSSAREALEACKVNLAQLRKELENFISQTTPLLPENDERETQPTLSFQRVLQRAVFHVQSSGRSEVSGANVLVAIFSEQESQAAYLLRKHDVSRLDVVNFISHGTQKEDSESDHQETGTQSAEEQLTGEDRLENFTTNLNQLAQRGQIDPLIGRQDELERTIQVLCRRRKNNPLLVGESGVGKTAIAEGLAWRIVQKDVPEVMADCTIYSLDIGSLLAGTKYRGDFEKRFKALLKTLEQDRKSILFIDEIHTIIGAGAASGGQVDAANLIKPLLSSGRIRVIGSTTYHEFSNIFEKDRALARRFQKIDIVEPSPEETVQIIRGLRPKYEAHHDVRYTTKAIRAAVDLSVKYITDRHLPDKAIDVIDEAGARTRLVPISRRKKTINVSDIEFVVARIARIPEKTVSASDKDVLRTLDERLKMLVFGQDSAIAALTEAIKMSRAGLGQDNKPVGSFLLAGPTGVGKTEVTVQLAKVLNIKLLRFDMSEYMERHTVSRLIGAPPGYVGFDQGGLLTDAVIKHPHSVLLLDEIEKAHPDVFNLLLQVMDNGTLTDNNGRKADFRNVILVMTTNAGVRETQRKSIGFKQQDNSSDAMEEIKKVFTPEFRNRLDGIIWFNTLSIEVIQQVVDKFIVALQAQLDEKGVSLEVSADARQWLCDKGYDKAMGARPMARVIQDSLKKPLANELLFGSLVHGGSVSIGLDKAKRILTYDFSNAYKQKPEDVVHZ

SEQ ID NO: 1806 - protein, 648 aa, Photorhabdus luminescens
MNALLELKGIERSYPAGEQQIKVLDDVTLSIYAGEMVAIIGASGSGKSTLMNILGCLDQPSNGEYRVAGQNVAELNNDELAALRREHFGFIFQRYHLLTHLTAEQNVEIPAIYAGAAKAARRQRAIELLGRLGLEDRIYYQPGQLSGGQQQRVSIARALMNGGQVILADEPTGALDSHSGEEVMAILKQLCEQGHTVIIVTHDPKIAAQAQRIIEIKDGHIMSDSGTQVSRKITQTPSLTSKISSIRQIFGRFNEALFMAWRAMVVNKMRTLLTMLGIIIGIASVVTILVIGDAARASVLSDIKEIATNTIDIYPGEDFGIDDPVSKQALKIADADAIKVQPYILAVSPEIEGQMRLRKGNIDVSSKVTGVGDEYFQVYALRFAQGIGFSLDMIRRQGQVVVIDKNTQRKLFPHQKNVIGEVILVGNMPATIVGVIANRESAFGNSKLLHIWLPYSTMTSRLMNRSYLDSITVRVKDDYNSKDAEKMIVQLLTLRHGKKDIFTDNVDMLVKAAEKTAHTLQLFLTMVAVISLIVGGIGVMNIMLVSVTERTREIGIRMAVGARTSDVRQQFLIEAILVCLVGGVLGIGLSYTIAFIAQLALPGWHFVFQPIALLSAFACSTAIGVIFGFLPARNAARLDPIEALAREZ

SEQ ID NO: 1807 - protein, 371 aa, Photorhabdus luminescens
MNFIRSKRRWIVLLTIVTVITLVLGHFLRGPETIKYQTVPVIKGDLEKNVLATGKLDAVRKVDVGAQVSGQLQNLHVEVGDKVVEGQLLALIDPKPAQNQVKEVEATIKELNADLIEAKAQLKLAQLTLKRQNNLAKVQAVSLQELDQVKTDVEVKRAKIENLLAQISKNQASLDTAQTNLQYTRITAPMDGIVVNIKTLQGQTVIAAQEAPTILTLADLGTMLVKAEVSEADVIYLKPGQKASFTVLGAPDKNFPGVLKDILPTPEKINDAIFFYARFEVANPQQLLRLQMTAQVKIQLDSYRDTLMIPLSALGKQITPTRYEVDILNGGKEEKREVTVGVRNDVNIQILSGLKEHEQVITGHSEAGDEZ

SEQ ID NO: 1808 - protein, 300 aa, Photorhabdus luminescens
MYSGLLIILLPLTLGYLTHLNNKTLLSAVHHLLNAMVYIILFLMGISLALLDDLGRNLFSIFQYAITFFLCIFTANMLALFLLEKHDPWVVSPHKQDKPPSRLHMIFESLKLCGVLILGFLFGLTGWSWLHFSNHASEIALIVLLLLVGIQLRNNGMSLKQILLNRRGTIIAIVIAVSALTGGAIAALILGLPVKTGLALASGYGWYSLSGILLSDAYGPVIGSAAFFNDLARELAAIMLIPVLINRYRSSALGLSGATSMDFTLPILQRCGGVSIVPAAIVHGFILSLLAPLLIAFFTZ

SEQ ID NO: 1809 - protein, 243 aa, Photorhabdus luminescens
MSIQLKSIDCYYGVHQALFDINLECSSGETMVLLGPSGAGKSTLLRVLNLLEIPRSGQLHIANHQFDFEQTPGTKEIRSLRQNVGMVFQQYHLWPHLTVMDNLIEAPCRVLGLSKQQAQKKADKLLSRLRLDDFAGRFPQHLSGGQQQRVAIARALMMEPQVLLFDEPTAALDPEITAQVVNIIHELSATGITQIIVTHEVEIARKAASRVVYMENGHIIEQGDISHFTQPQTKAFANYLSHZ

SEQ ID NO: 1810 - protein, 245 aa, Photorhabdus luminescens
MKKLLFAALLGTVALSATATEKEIIRFATEATYPPFEFIDANNKIQGFDVDLANAICEKINATCTFTNQSFDSLIPSLKFRRFDALAAGIDITPERQKQVDFTNTYYDNSAVFISVKGKVSSTAELKGKLVGIQNGTTHQKYLMEQRKEIKTVPYDSYQNAILDLKNGRLDAVFGDTAVVNEWLKKNENLSTVGNKVTDKNYFGIGLGIAVRKGNKDLQDKLNKALADIKRDGTYDIIYEKWFKZ

SEQ ID NO: 1811 - protein, 239 aa, Photorhabdus luminescens
MNEFQSLTSAAGITVGLAVSALVLGLILAMLFAAWESARWKPFAILGTCWVTLFRGLPEILVVLFVYFGASQLLMTLADGFDINLIFWHSRIQIDIQDFYVSPFLCGVIALSLLYSAYASQTLRGAIKAIPIGQWEAGQALGLGRAEIFFRLIMPQMWRHALPGLGNQWLVLLKDTALVSLISVNDLMQQTKSIATRTQEPFTWYMIVALIYLAITLISQFILKKIEMHTTRFDRSAPZ

SEQ ID NO: 1812 - protein, 224 aa, Photorhabdus luminescens
LMLEYIQQILPGLQTSLSLTVTALLAAFMMSVLFTMVLTMKLPVLTQLVKAYITLFTGTPLLVQFFLIYYGPGQFPAIKAYPWLWQLLSEPWLCAMVTLALNSAAYSTLLFYGAVKAIPAGQWQSCQALGMSKAQSMQILLPYAFKRALSSYSNEVVLIFKSTSLASTITLLEVMGYSQLLFGRNYDVMAFIAAGVIYLCVNGILTLLMRIIERRALAFERHNZ

SEQ ID NO: 1813 - protein, 378 aa, Photorhabdus luminescens
MQCAHYSAGHCHSCQWLEKPYSQQLEDKQQNLKQLLPQAIVKQWLPPIASQQDAFRNKAKMVVSGSVERPLLGMLHRDGTAVDLCHCPLYPAHFQPVFDVVKSFIACAGLTPYNVARKRGELKYLLLTESRHSGEMMLRFVLRSETKIAQLERALPRLHEQLPQLTVISANIQPIHMAILEGEKEILFTEQKAFKEQFNGIPLYIRPHSFFQTNPKMASELYATAGRWVRELKISSMWDLFCGVGGFGLHCADKNTCLTGIEISSEAIDCARDSAKTLGLENIEFQALDSTHFAVAKDQIPQLVLVNPPRRGIGKVLCDYLSKMVPDYILYSSCNAQTMAKDIAALANYRVEKTQLFDMFPHTEHYEVLTLLVLNHNZ

SEQ ID NO: 1814 - protein, 295 aa, Photorhabdus luminescens; identical to SEQ ID NO: 404

SEQ ID NO: 1815 - protein, 203 aa, Photorhabdus luminescens
LLEQINHDLFTFFNATPESSPAMIAMATFIAKYLVLIFPLILASFWFWGSERTRPYHRVIVSKTTIAFCFAMLTSYCIGLLCPHDRPFAEGFGYNFLPHAPTTSFPSHHGTTVFTFALSFLFWHRIWPGLCMMAIALAIAWARVYLGVHWPMDMVGAFIVSLMGCTFAQIIWSLFGERLQKRLNSLYQHCCAFPIRKGWIKSZ

SEQ ID NO: 1816 - protein, 433 aa, Photorhabdus luminescens
MDMTQTGTIASQATSPSDYKTWRKSDTVWMLGLYGTAIGAGVLFLPINAGIGGLLPLLVMALLAFPMTFFAHRGMCRFVLSGKNPGEDITEVVEEHFGNLAGKLITLLYFFAIYPILLVYSVAITNTVDSFIVHQLHLPSPPRALLALILITGVMTIIRFGEQAIVKAMSVLVFPFVAVLMLLAFYLIPNWNTAIFENISVSASSASHGLLITLWLAIPVMVFSFNHSPIISAFAVAKRGEYGEHAEKKCSRILAYAHIMMVVTVMFFVFSCVLSLSPENLAEAKAQNISILSYLANHFNTPVVAYIAPFIAFIAITKSFLGHYLGAREGFNGIVVKTLRDQGKTIEPKKLNRITTIFMLVTTWIVATLNPSILEMIERLGGPIIAMLLFIMPMYAISKVPAMRKYSGKLSNLFVVFMGLVAISAVLYSLFAZ

SEQ ID NO: 1817 - protein, 278 aa, Photorhabdus luminescens
KGGYMSYLDPLALSIRFGNRNNLGDDKRWADKPNPLHKLNQEQFTYIYEDSLHFLYGRYRFNPSNGRDNILTDMQVSKIKTGRYIDQYGHDEQYEVLGLLGGMGTFPLHSIFGTFRTEEVDLISYYFYIAYVLTGNYSIHNRYFYQGYPMGPNNDEGLDYLLMWNAVDIIPSPYKPGLPRYFPLINGYILFPSATEAVVISNISTDARFIRLEEAGNRFPFTGEIVTKTPYILTDKLRQQWDEEEQQGVPIDERGYFNEDDLWQYDEQQGNWVKWVVZ

SEQ ID NO: 1818 - protein, 302 aa, Photorhabdus luminescens
YLNIYFSHSLLFIIGDKMSEESQRIKKPSSGYATDHFYDGAWHRAVKFVEGSVEFFDVYDVIFEGITYQSPPILVSENLIIVPIAKDEVAWNSKIEIYGAIGTGESEKIFSDGDAVRPFAGELDVSNPQEPLVIFGGGNVSRFPNYTANVNGVEYGGLIIDPEKNSISLLRSIEDGKLMVFGKTETGKNVIVFEIETEGENKPLNGWVEFHDVATCILFRNGDLTGFATSYELRYEGTSTRNYRGLSPTHIRYENIGHHVKTEVELWAYWQDKPDGVLLFKGRYNGSVVKNSKCCSLDEKKZ

SEQ ID NO: 1819 - protein, 402 aa, Photorhabdus luminescens
MMKKNLAMAIKCVVAVLTVASMVSARVYASDEPVVPPVDARAYVLMDYDSGKILAAGNPDERLDPASLTKIMTSYVVGQAIKAGKITPEDIVTVGKDAWATGNPILKGSSLMFLKPGDRVKVIDLNHGVVGQSGNDASIALADYVAGSQDVFVSLMNNYAKALGLTNTHFRTVHGLDAEGQFSTARDMAVLSQAMIRDVPDEYALHKEKTFTFNKIQQPNRNRLLWNKNMNVDGVKTGYTSGAGYNLVASATEGPMRLISVVLGAPSDRIRFVESEKLLAWGLRFYETVTPIKASEPFVSQKVWYGGRSDVALGVEKDAAITIPRGQLKNLKASYTLNQTPLTAPLTKNQVVGVINFQLGDKVIEQRPLVVKEAVEEGSFFSRIWDLIVMKVSGWFKAIFGZ

SEQ ID NO: 1820 - protein, 207 aa, Photorhabdus luminescens
MLTIWGRKNSSNVKKVLWCLKELDIPYNQVDIGGKFGKLDAPQYLKMNPNGKIPCLQEGDFILWESNAIVRYLAAKFGKEVLYPQDLQERANADKWMDWVASHLFPHIRQLMIGFIRTPETERDQKQIEQTLAEIEKLMKVLDDTLAEQKYLSGDKFGMADIALGPMIYPWLNIPIKRPFLPNIERWYQLMAERPAFKKIVMIELSZ

SEQ ID NO: 1821 - protein, 276 aa, Photorhabdus luminescens
MKKVSIIGLGWLGMPLAKALSRSGMQVVGSKTTPDGVEAARMSGIECYLLQLEPQINCALDDLEQLMVADVLIITLPASHTAGGSYNYVRAVQLIVDTALSYSVPRIIFTSSTSVYGFVAGNLNEDAPFCPETRSAQALVELENWLHKLPNISVDILRLAGLVGSGRHAGRFLAGKKGVKGGNQPVNLVHQDDVISAINLLIQRTEGGHIYNLCAPVHPTKAEFYPKASNQLDLVPPEFFREETQMGSRIVDGSRICQELGFKYQYPDPGWMPMSZ

SEQ ID NO: 1822 - protein, 304 aa, Photorhabdus luminescens
VGIKMLDKSRLRIAMQKSGRLSEDSQELLARCGIKINLQQQRLIAFAENMPIDILRVRDDDIPGLVMDGVVDLGIIGENVLEEELLSRRAQGENPRYFTLRRLDFGTCHLSLAAPLDYNYTGVECLQNARIATSYPHLLKRYLDQKKILFKSCLLNGSVEVAPRAGLADAICDLVSTGATLEANGLREVEIIYRSKACLIQRDGEMPADKQQLIEKLLTRIQGVIQARESKYIMLHAPSAKLEEVIALLPGAERPTILPLVGDQNRVAMHMVSSETLFWETMEKLKALGASSILVLPIEKMMEZ

SEQ ID NO: 1823 - protein, 808 aa, Photorhabdus luminescens
MTDHFDTLIRWQECHDEQQNALLTRPAISASVEISRTVEQILHAVKEYGDHTLREFSRRFDKTVIENIRISPEEIAAAENSLNNDIKQAMQQAMNNIRVFHEAQKPIKIEVETQPGVYCQQVTRPIDSVGLYIPGGSAPLLSTVLMLGTPAQIAGCHKVVLCSPPPIANEILYAATLCGITEIFQIGGAQAIAAMAFGTESVPKVDKIFGPGNAYVTEAKRQVSQRVDGATIDMPAGPSELLIIADAGANPVFVAADLLSQAEHGPDSQVILVTPDEALAKKVITEIEKQLTRLPRNQIAAKALAHSRIIVTTSLQQCVEISNRYGPEHLIIQTRQPEQLVEKITSAGSVFLGDWSPESAGDYASGTNHVLPTYGYTSTYSSLGLADFLKRMTIQQLTPQGLLNLSQTIETLAQAEQLTAHKNALTLRVAALNIAGQGVNMNNIFDANLLARENIRKLTPYMSARRLGGKGDVWLNANEYPLAPDFQCTEQTLNRYPDCQPASVIRRYAAYAGLQPEQVLACRGADESIELLIRVFCEPGQDVVLFCPPTYGMYSVSAETFGVEQKKITALENWQLDIEAIENNLDRVKLIYICSPNNPTGNAINPDSLRKILELTANRAIVTIDEAYIEFCPENSIASWLKNYPNLVILRTLSKAFALAGLRCGFTLASVDIITLLLKVIAPYPLSTPVADIAAQALTAENIAIMQKRVVEIRENRNDLQQALNKLAIVEKVFPSETNYILVKFYDAETVFKTLWHQGIILRDQRKQPGLEGCLRITIGSRKECERVVEAISALSTVNEQPKEIANZ

SEQ ID NO: 1824 - protein, 357 aa, Photorhabdus luminescens
LMNQKLLFIDRDGTLITEPPTDFQVDRLDKLALETEVIPALLALQKSGFRLIMITNQDGLGTDSFPLEQFEPPHNLMMQIFSSQGIHFDEVLICPHKPEENCHCRKPKIKLVEKYLTEGLMDTANSYVIGDRETDLQLAKNMGIQGLHYHPKNLGWFAICEQLTRQDRHAHVQRITKETSINIDVWLDHEGSSDINTGVGFFDHMLDQIATHGGFRMHVQVKGDLCIDDHHTVEDTGLALGEALKLALGDKRGICRFGFVLPMDECLARCALDISGRPHLEYKAEFKHQRVGDLSTEMIEHFFRSLSYAMACTLHLKTKGSNDHHRAESLFKAFGRTLRQAIRVEGDTLPSSKGVLZ

SEQ ID NO: 1825 - protein, 367 aa, Photorhabdus luminescens
MLKIIQSPSKYIQGPDALLHIGQYTKTIADHVLVIIGNSAMKLVGDTVHSSLEQYEITRHFEVFGGECSRNEIKRLSDILKKHECQAVIGIGGGKVQDTAKAVAYESRLPVLIAPTIASTNAPTSALSVIYSDDGKYEDYLFLPTNPDIVLIDTSIIAKAPTRFLIAGIGDALATYFEARICGAGYKPRMTEGGISRTAVALAHLCYETLLEEGYKAKLAVETDVSTPAVENVIEAITYLSGLGFENTGVAAAHSVHNGFTVLEECHHMYHGEKVAFGILVQLILENSPNEELDTLLDFCVQMGLPVTLDQLGVKDGEKLKEKVMAVATASCAEDETIHNMPFEVTPEKVYAAIMAADRMGRDWLYZ

SEQ ID NO: 1826 - protein, 203 aa, Photorhabdus luminescens
VMKVVILDTGCANLSSVTYAIRKLGYQPEISQETATILAADKLLLPGVGTASAAMDQLKQRELIPLIKVLSQPVLGICLGMQLFAATSEESDNVAGNNVTLLEVMASPVQKMATHGLPLPHMGWNQVLPKAGHPLFRGIEDHAYFYFVHSYAIPLNTYTIAQTEYGNIFSSAIAKDNFFGVQFHPERSGAAGARLLKNFLEMZ

SEQ ID NO: 1827 - protein, 246 aa, Photorhabdus luminescens
MIIPALDLIDGKVVRLHQGDYAQQRDYQHDPLSHFQQYEQQGAKLLHLVDLTGAKDPSARQIPLLRKLLAAVSIPVQVGGGIRTEEDVKTLLDAGANRIVIGSIAIKQPALVTQWFKRYGAENIVLALDVRINDTGMKQVAINGWQENSSVTLEQVIEQYLPCGLKYVLCTDISRDGTLTGSNVELYRAICQYYPQIVFQASGGIGTLNDIASLPTSGVAGVIIGRALLDEKFTLKEAIQCWQNAZ

SEQ ID NO: 1828 - protein, 259 aa, Photorhabdus luminescens
MLAKRIIPCLDVRDGQVVKGIQFRHHEIIGDIVPLAQRYATEGADELVFYDITASSDGRVVDKSWITKVAEVIDIPFCVAGGIKTVEDAGQILSFGADKISINSPALTDPTLITRLADRYGVQCIVVGIDTWFDESTGRYQVYQFTGDEKRTKATQWQTLNWVKEAQHRGAGEIVLNMMNQDGVRNGYDLTQLKQVRDVCHVPLIASGGAGAPEHFLDAFKQANVDGALAASVFHKHIINICELKQYLSQQGVEIRTCZ

SEQ ID NO: 1829 - protein, 202 aa, Photorhabdus luminescens
LLTAQQIEKLDWEKVAYMMPVIVQHAISGDVLMMGYMNKEALNITISSGKITFFSRSKQRLWTKGESSGHFLNLVNIYPDCDNDTLLALADPIGPTCHFGTHSCFAPAQTEWGFLYQLEKLLASRKTADPDHSYTAKLYASGTKRIAQKVGEEGLETALAAAVNNREELTNEAADLMYHLMVLLQDQELDLSCVIRRLRERZ

SEQ ID NO: 1830 - protein, 384 aa, Photorhabdus luminescens
MMTTTFFMTSVNMFGAGCLVEAVNTMKGDGYKRALIVTDRVLNEIGVAAKVQALLSDVDIESTVYDGTNPNPTTINVEEGLDILRQHNSDCVISLGGGSPHDCAKAIVLVAANGGDIRDYVGIGRSSKPHLPLISVNTTAGTASEMSRFCVITDTESHIKMAIADKKITPVLSVNDPELMVGMPKGLTAATGMDAMTHAVEAYVSPAASPITDACALKAISMISHSLRQAVADGSNIEARENMAYAQFLAGMAFNSALLGYVHAMSHQLGGTYDLPHGICNAVLLPHVQEFNAKAVAGRLKDIAAAMGVDVSAMNDQQGAAACIAEIRKLSKDIGIPSGLAELNVKLEDLPELATNALKDICCLTNPTQATHEEIVSIFKAAMZ

SEQ ID NO: 1831 - protein, 209 aa, Photorhabdus luminescens
KSMTNKLVTGATFFDRKYFLGEAHHYPENDIIIPLPYDLNDRFRSVRIGTLSKVYAWRHQSDWEPGQRYREWEYDHPDIDREIRGLSKFKVAPKDTCLVALRLIDDTYSGIKFSMFTNTHCVGPVETTTDDDYALVGILPFETELVTAIAIRNTSTGVYINNGSFYFYRDANGVVTIDEKANFPKNLRIVNVGGNRFDIHIISTDFSNZ

SEQ ID NO: 1832 - protein, 469 aa, Photorhabdus luminescens
MSKQQIGVVGMAVMGRNLALNIESRGYSVSIFNRSSDKTDEVIAENPGKKLVPSYTVEEFVDSLEKPRRILLMVKAGEATDKTIASLTPHLDKGDILIDGGNTYFQDTIRRNRELSAQGFNFIGTGVSGGEEGALKGPSIMPGGQKEAYKLVAPILQEIAAKAEGEPCVAYIGPDGAGHYVKMVHNGIEYGDMQLIAEAYSLLKNALNLSNEELSEIFTDWNNGELSSYLIEITADIFHKKDEAGQYLVDVILDEAANKGTGKWTSQSSLDLGIPVTLITESVFARYISSLKDQRVAAAQVLSGPDVQPFKGDKAEFIEKVRRALYLGKIVSYAQGFQQLKAASDEYQWDLNYGEIAGIFRAGCIIRAQFLQKITDAYNENVDIANLLLAPYFKKIADEYQQALRDVVSYGVQNGIPTPTFSAAISYYDSYRSAVLPANLIQAQRDYFGAHTYKRTDKEGVFHTEWMEZ

SEQ ID NO: 1833 - protein, 524 aa, Photorhabdus luminescens
MEWIADPTIWAGLVTLIVLEIVLGIDNLVFIAILADKLPEKQRDKARITGLGCALLMRIVLLFSLSWLITLTHPLITLWEHPFSARDLIMLIGGLFLLFKATMELNERLEGKDAHSGQQRKTSKFWTVVVQIIVLDAVFSLDSVVTAVGMVDNIGIMIAAVTIAMFLMILASKPLTTFVNAHPTIVILCLSFLLMIGFSLVAEGFGYHIPKGYLYAAIGFSIMIEALNQFAQFNRRRFLTASRSLRERTAEAVLRILSGKHENAELDNHTSNLISDNQEVFDPQERQMIARVLGMAQRNVNSIMTSRHDVEYLDIHAPTENLTQILNKNPHTRIVVTDENISDEPLGVVHVIDLLNQQLNQQPFDLHSLIKQPLIFPEQLSLLQALEQFRQAQTHFAFVVDEFGSVEGVVTLTDVMETIAGNLPVDGEETDARHDIQATEHGGWIANGYMPLDDLILYVPLQLDEKREYQTLAGLLMEHSQHIPRQGEQLQIDNYLFEPLEVTSHRINKVKITPLVSNEENKKZ

SEQ ID NO: 1834 - protein, 611 aa, Photorhabdus luminescens
MKRLLTTLIILLVVIITGLAALVMLVNPNDFRAYMVKQVQKKSGYQLVLQDGMRWHVWPKLSIITGRMSLTAPGAAQPTVMAENMRLDVALWPLLSHQLAVKEVMLKGAILRVTPESQSQKKGNTPIAPTGSTANPVAKGEGWELDIARVKIADSLLIWQRDDHEQLNVRDINLLMERDNQNHISVELSSKVSKNQQDLAFNLNADVDITDYPYRVAGNIDFFDYQLQGAGIPTGGISGSGKVHAVYQKETTDELQTISLQALSFTANESELHGSIKAMLGAHADYRIDLSSQKLNLDNLMGWDLLPKEGSEVKRYYRIENSSAKPVIAVSSSAEPDYSAAFLNDFNANVTINADKFVYRGMEIDNLILKATNNSGIAEISTLNGKLFGGDFSIPVILDATGNQLKLHAKPLLRNIELEPVLKAFSLPPAFSGKFDLNGDLSGKGYDGYAISHIWQGDLNFSLVNAKMYGLNIPQLIQQSVARATDKVNIPDNMDNFTRAKKLDVKAVLNRGDIKISRLHAVSDLLNIDGQGKTNLLKQDVDVALKVQITQGWGKDNELVSRLRKMKVPLRVYGNWSNLQYNLDIEQLLHNELENKVKQAINDWVERSSNZ

SEQ ID NO: 1835 - protein, 194 aa, Photorhabdus luminescens
MRLCDRDIIKWLDEGKLVIAPRPPIERINGATADVRLGNQFRVFCGHTAAYIDLSGPKDEVSAALDRVMSDEIILPDDEVFFLHPGELALAVTLESVTLPDDLVGWLDGRSSLARLGLMVHVTAHRIDPGWHGQIVLEFYNSGKLPLALRPGMVIGALSFEPLSGSADRPYNRRQDAKYKNQQGAVSSRIDEDZ

SEQ ID NO: 1836 - protein, 395 aa, Photorhabdus luminescens
ILFYLSKIIMEVFNKEITMPSKDYGLVDKVFNENFKGMHVETITVKIASSGTKYTNAAGDVSKSTFGHVWVEFQGESIGWGLGDNKQVGGVENITFRDSIAYDKSKISSVTYPIYSESVVNNMRNYISDLKNGNFYDFKPNYNLLTNNCIDFVNSILRVSHYDNDKNGIDFIQELRGMSPNAVLDNFEEIVEDQKSTETPLIIDLTGDGIITIAENGSIYFDHDNDGIVESSGWIEANNAFLVWDKNGDGKINNGNELFGNNSILKNGVKSVNGFAALADLDDNFDGIFDQNDSLWNSLELWIDANKDGITDDGELYKLSESGISAINLTYKENGFKDINGNIHGFESSVLWNNGDTTKIVDVFFAVDKNIQMESLNSNIDIIGINNTFSEIILZ

SEQ ID NO: 1837 - protein, 214 aa, Photorhabdus luminescens
MADEAYQCTIVGISGASASGKSLIANTLYRELRAQVGDHNIGIIPEDCYYKDQSDLSMEERYKTNYDHPSSMDHNLLFSHLQALKMGESIELPQYDYVAHTRKPEAIHFAPKRVIILEGILLLTDKRLRQEMDFSIFVDTPLDICLMRRIKRDVHERGRSLDSVIEQYHKTVRPMFLQFIEPSKQYADIIVPRGGKNRVAIDILKAKIGQFCEZ

SEQ ID NO: 1838 - protein, 379 aa, Photorhabdus luminescens
MIIIKGAGMNSQSPEQTNPDLLKSQVTKILATFTHLTLERDLTTLKALHHCTMLDGVLHIELLMPFVWQSGFKALKAATTEELQAVTGAKSVAWKLIHDISTLRRANDLPGINGVRNILAVSSGKGGVGKSSTAVNLALALAQEGAKVGILDADIYGPSVPSMLGTTKERPTSPDGQHMAPIMTHGLATNSIGYLVTDDNAMVWRGPMASKALMQMLQDTLWPDLDYLVIDMPPGTGDIQLTLSQNIPVTGALVVTTPQDIALIDAMKGIVMFQKVKVPVLGIIENMSTHICGNCGHLEPIFGTGGAEKLAAKYHCKLLGQIPLHISLREDLDRGEPTVISNPDSEFTDIYREIAANISAQMYWQGEKIPTEISFRAVZ

SEQ ID NO: 1839 - protein, 676 aa, Photorhabdus luminescens
MSQVAKKLLVTCALPYANGPIHLGHMLEHIQADIWVRFQRMRGKEVHFICADDAHGTPIMLKAQQMGIAPEEMIATVNQEHHQDFTGFSVSYDNYHSTHSEENQTLSTKIYLELKKNGHIKNRTISQLYDPEKNMFLPDRFVKGSCPKCKAEDQYGDNCEVCGSTYSPTELINPRSAVSGATPEMRETEHFFFDLPAFSDMLQAWTRSGALQEQVANKMQEWFESGLQQWDITRDAPYFGFEIPDAPGKYFYVWLDAPIGYMGSFQNLCDKRGNLNFDEFWAKDSTADLYHFIGKDIVYFHSLFWPAMLEGSGYRKPTNVFVHGYVTVNGAKMSKSRGTFIKASTYLDHLDADCLRYYYAAKLSARIDDIDLNLEDFVQRVNSDIVNKVVNLASRNAGFINKRFNGKLADKLADPALYQQFIDGAKVIAEEFNNREFSKAIREIMALADLANRYVDEQAPWVVAKEEGRDADLQAICSMGINLFRVLMTFLKPVLPSLAERAEAFLNTELTWHGIEQPLLDHQVSAFKALFNRIDMDKVDAMVVASKESINTPQKVSGPLAEDPIQDTITFDDFAKVDMRVALIKQADFVEGSDKLLKLMLDLGGETRQVFSGIRSSYPDPKALEGRLTIMVANLAPRKMRFGISEGMVMAAGPGGKDIFLLSPDSGAQPGMQVKZ

SEQ ID NO: 1840 - protein, 220 aa, Photorhabdus luminescens
GFLEKSELYDSVEVQPYENIRYGKNSNLINCGLEYNSQIYYMGITMQICRMNYNDLSDNGRKAKFHCYGVGIFDVFSGQDPYVNKSECSYIEKSAIPPGQYWIVDRPVGSIANQVRGTALDMIHGTNHSQWFGLYSFQTMNDYIFVNGVRRGAFRLHPLRPNGSGESWGCITFYRVSDFNIVRNALLRTHKFKVPGSSLMAYGRVDVTGNTNFGACKVSZ

SEQ ID NO: 1841 - protein, 232 aa, Photorhabdus luminescens
MLSHIWWSLPLTLIVFYTARKLSLRCKIPILNPLLVSIAVLVPILLITHTPYEHYFAGSRILNDLLQPAVVALAFPLYEQIHQIRAQWKSIISICFIGSIVAMVTGTAIALWMGATPEMAASILPKSVTTPIAMAVADAIGGIPAISAACVIFVGILGAIFGHNLFDLLQVKTKASRGLAMGTASHALGTARCAEVNFVEGAYSSLALMTCGIITSLTAPFVFPVLLYLFSZ

SEQ ID NO: 1842 - protein, 295 aa, Photorhabdus luminescens
MQARFHPIWVQLPSKLQDALLPYAGNDDFPAMLTAEQAKSIKKACGFDDNTLAVALLPLAAASSLTPISHFNVGAIARGESGNLYFGANMEFAGVPLQQTIHAEQCAITHAWLLGEKRLASVTVNYSPCGHCRQFMNELNSGTQLEIHLPKQASSTLDHYLPDSFGPNDLGITTLLMDPVNHGYKLETTDKLVLTALDAANQSYAPYSNSYSGTALLGKDGIIYPGRYAENAAFNPSLPPLQAALILMNISGGDCLAIERAVLVEGKHSDLSQRSATQSILAALGCSKFDYYTFZ

SEQ ID NO: 1843 - protein, 566 aa, Photorhabdus luminescens
MELEHESKRPLYIPYSGPILLEFPLLNKGSAFTEEERRNFNLHGLLPEAVETIEEQAERAYRQYLDFKNDADKHIYLRNIQDTNETLFYRLLDAHLNEMMPIIYTPTVGEACEHFSDIYRRARGLFISHPNKAHIDDMLQNATKQNVKVIVVTDGERILGLGDQGIGGMGIPIGKLSLYTSCGGISPAYTLPVVLDVGTNNPQRLNDPLYMGWRHPRITGKEYDEFVDEFIQAVKRRWPNVLLQFEDFAQKNAMPLLNRYRHEICCFNDDIQGTAAVTLGSLIAASRAAGRQLKDQTVTFLGAGSAGCGIAEQIVAQMKSEGLSDEQARARIFMVDRFGLLTDKLPNLLDFQNKLVQKSSSLAKWDVNNDSISLLDVVRNAKPTVLIGVSGQAGLFTEEIIREMHKHCERPIVMPLSNPTSRVEARPEDIINWTDGAALVATGSPFNPVKYKDQEYPIAQCNNAYIFPGIGLGVIASGAKLVTDGMLMAASRTLANCSPLAQEGQGPLLPLIDDIQEVSRKIAKQVAKEAQIQGVATVTSDGALDEAIERNFWKPEYRVYKRTSFZ

SEQ ID NO: 1844 - protein, 247 aa, Photorhabdus luminescens
MWNRLITSLLFITGMLILTAIALDRWMSWKTAPYVFDDLKQLPEREVGIVLGTAKYYLSGAPNQYYMYRIQGAINAYNSDKIKYLLLSGDNAQQSYNEPVTMRRDLVKAGIPAANIVLDFAGFRTLDSIVRTRKVFNTNDFTIITQRFHCERALFIAMHMGIDAQCYAVSTPKNMITVRLREIIARLGALTDLYILKREPRFLGPLIPIPAPYKVPKGMTNYPAVTPEELRTMDKTQLKPTGPTPPZ

SEQ ID NO: 1845 - protein, 383 aa, Photorhabdus luminescens
MACQRIDSLDSIRGLAILGILLLNISGFALPSAAYLNPVYNGSASLTDLIVWSVLSVLVQGKFLCILAFLFGAALELLLPRGKIWNYPRLTILALIGMGHGILFWDGDILLSYSLAGFFSFQLISQNSASNRLFMKGAIFYLIGLVLLFILGFFSSGESNDVSWQLTEFQMLYETYWKTSGGWLAVKERFNQVMLMMVMLFVQYGWQLIGIMSCGAGLMRNGWLKGEFSVSHYRNVALVLIPLSIAVQIFSVVFQYIHNWDYFWSGIVGYILAELVTPFQALGYMALIYGFWPVISCWRINYWFNQVGRMAMSNYLLQTLICTLLFYNFGLFGQFSRLELLAFILPIWAVNILFSCWWLRRHPQGPVEQRWRDITAVLARSAZ

SEQ ID NO: 1846 - protein, 451 aa, Photorhabdus luminescens
MLSIFKPAPHRSRLSTEQVDPVYRRLRWQIFMGIFFGYAAYYLVRKNFALAMPYLVEQGFSKGELGFALSGISIAYGFSKFIMGSVSDRSNPRVFLPAGLILAALVMLFMGFVPWATSSITIMFVLLFLCGWFQGMGWPPCGRTMVHWWSQKERGGIVSIWNCSHNVGGGLPPLLFLLGMAWFNDWKAALYMPAFAAILVALIVFALIRDTPQSCGLPPIEEYKNDYPSDYTEKDENELTAKQIFMQYVLPNKLLWMVAMANVFIYLLRYGILDWSPTYLREAKHFALDKSSWAYFLYEYAGIPGTLLCGWMSDKIFKGNRGATGVFFMTLVTIATIVFWLNPPGNPTVDMACMLIIGFLIYGPVMLTGLHALELAPKKAAGTAAGFTGLFGYLGGSVAASAIIGYTVDFFGWDSGFMVMIGGSILSVILLLIVMITEKKHKQEIAHQYGZ

SEQ ID NO: 1847 - protein, 220 aa, Photorhabdus luminescens
MSSLSKEAELVHSALETRGLETPLRGQALVPEVRKARIEEHMTEVMKLLNLDLRDDSLAETPGRIAKMYVDEIFSGLDYSNFPKITLIENKMKVDEMVTVRDITLTSTCEHHFVTIDGKATVAYIPKDKVIGLSKINRIVQFFSQRPQVQERLTQQILIALQTLLGTNNVAVSIDAVHYCVKARGIRDATSTTTTTSLGGLFKSSQNTRQEFLRTTRHVZ

SEQ ID NO: 1848 - protein, 393 aa, Photorhabdus luminescens
HFMAMNNSTSPQQSHRYLAFHIAMSGFLALVVAMGIGRTAFTPQVPLMIAEFQFSLTGAGIVAAFNYLGYLAGSYDAMRAHRLIEYRLWAGLWGAVIITLLSALLYGAILHSIARFLIGWASGWTLVLVTSWANEQLAKLNRPALSAAIFAGPGVGIFVTGILAIGIQAWQVSAAEAWMLYGILALICSIYISRHLPRGGELHRSQAEVKKLTLTPAIKQLVWSYSLAGFGYILPATFLSQMASDRFPGSLFAQFVWPIFGGAAVIGIGFAILTRHMLTTQIRLAITLWIQAVGILIAEIIPGIGGLALSSLLVGGGFMCVVQMAFQYGRELAPEHSRYMAGLLTTGYAVGQLIGPMLSAVSTTITGRLEPALYVALITLVIAGLLVCDRGGZ

SEQ ID NO: 1849 - protein, 249 aa, Photorhabdus luminescens
MYKAFQGKTAIVTGGGTGIGRAISIMLAKQGAAVAVIYSQSELEAQETTEAIIKDGGQAIAIKADVADESAVQAMINTVVEKFSGIDYLVNNAATTRQLQFEDLDAISSDIWDAIIDVNVKGTFHCCRYAAPYLKARTGSAIVNVGSIAGETGLGSCIPYAASKSAVHGLTKSLARALAPSVRVNCVAPGAVETRWWKGREEKMHTLCTYLPLERISTPEDVAEITLMLLKAESMTGQIITVDSGQTLZ

SEQ ID NO: 1850 - protein, 414 aa, Photorhabdus luminescens
MDHCHTSELISLQQALEKLLTQVTPLTDTETVSLPRTSGRITATNIISPINVPPFANSAMDGYAVRHADLNSNKPLPLAGKALAGVPFQGEWPVATCIRIMTGAPIPIGADTVIMQEHAETTDDGIVFTQPAKQGQNIRLAGEDIAKGAVVLSAGSKLSTAQLPLIASLGITDVEVVRKLKVAIFSTGDELQAIGHPLKEGQIYDTNRLTVRLMLEKLDCDVIDFGVIADNPQALRHVFAQADQKADLVISSGGVSVGEADYTKQILDELGEISFWKLAMKPGKPFAFGKLKNAWFCGLPGNPVSAVLTFYQLVQPLIARLSGFTAWQPPMRMRAKVTTPLKKRPGRMDFQRGITSVNEQGELEVRTTGHQGSHIFSSFSQGNCFIVLERERGQVEVGENVEIELFNHLLKNEZ

SEQ ID NO: 1851 - protein, 251 aa, Photorhabdus luminescens
MTIELTDAETLRYNRQIVLRGFDFDGQEKLKSSAILIVGAGGLGCAASQYLTAAGVGTITLLDFDTVSLSNLQRQILHRDERIGMAKVHSAQLTLRAINPHVTIKTVNGLLEDQALDELISQNDVVLDCTDNVTIREQLNRLCLARKTPLVSGAAIRMEGQLTTFTYQPNAPCYRCLSRLFGENNLTCVETGVMAPLVGTIGTLQAMETIKLLTGYGKVSSGKVLLFDAMTMQFRDIKLLKDPNCEVCNSZ

SEQ ID NO: 1852 - protein, 452 aa, Photorhabdus luminescens
VLDTVIMGHTELWQVKQERDRIYAMAEMSEEDGYRVADLEVAYGEMDGYSAEARAGELLLGVGIPVEQHYGLMSEVAPGWKLRVLLAQALFSNPDVLLLDEPTNNLDIDTIRWLEQILNERNSTMIIISHDRHFLNTVCTHMADLDYGELRLFPGNYDEYMVAATQARERLLADNAKKKAQIAELQSFVSRFSANASKSKQATSRARQIDKIQLEEVKASSRQNPYIRFEQDKKLFRNALELEGFTKGYDNGPLFKNLNLLLEVGEKLAVIGANGIGKTTFLKTLVGETEPTSGVVKWSENSSIGYYAQDHASDFDCDLTVFDWMSQWKREGDDEQAVRSVLGRLLFSQDDIKKKVKVLSGGEKGRMLFGKLMMQQPNILIMDEPTNHLDMESIESLNLALELYKGTLIFVSHDREFVSSLASRVMEIKSDKVIDFKGTYDEYLRSQGIIEZ

SEQ ID NO: 1853 - protein, 332 aa, Photorhabdus luminescens
GFGTTESGLQSFLFCIPVGLTAGISGDTFALSGNIVQFANFTTERAASNNLAVVISDLRTVERDITPGQNFTGVTLFNLSFPDGAGVLIFVKVITAAAVRHDGIVHAVFIVAGGVYLRPVVTGGLAAQYGIVMWRFFRFDDLSHQPGVGVVNPVSLNLQVAPGFNRRGVVIEHTGLTGGRQGVIQPAADVQVAHAVNLGMVTVVQCAGANIQPVTRGNHRGFAVLCGVIQRARLEGKLVTVNTPGTHVVQGISREVGQAAVNQSGVVQRIVDLDLCLSGANFTGGAIGEVVCIKMQRLTGFYLAVIDKIAGRFQGQIAIGRRVAGMVKILGZ

SEQ ID NO: 1854 - protein, 299 aa, Photorhabdus luminescens
QPRRIIQLTTVDRQGVFGYHLSGGIGEGMACGLAVNVLCQQHPLGVIQRLASRSQSGLGFKMAVSVLNSFANGEGGAVPGGNNAPPAIIQLSGAKLERVARFQFARLIIQRVFDGQFQRTLVGGHDIAVTIIDGRCLKVQVAIARNSAAVVIQYPGSEGQVILTPLLHHAALMAQSIGVDGYLPGLSFGVVELQFTGLYRQGAIGEQFALITQPPLRVERQFPVACQLHRSLVVIGLMRGEMQVLALTGNSALTVVKPVSGEGQFPLIEHCPFTVIQGAGMERQFTGTGLVNFSLLIGZ

SEQ ID NO: 1855 - protein, 359 aa, Photorhabdus luminescens
MQTPIKTMIIGIILTSSMSGIAQAADKIVIAHRGASGYLPEHTLPAKAMAYAEGADYLEQDLVMTKDDELIVLHDHYLDRVTDVANKFPNRARQDGRYYAIDFTLSEIKSLKFTEGFDIKNDRQIQNFSNRFPIWKSDFRIHTFQEEIEFVQGLNKSTGKNIGIYPEIKAPWFHQKEGKDISTKVLAVLKAYGYTKKSDKIYLQCFDTNELKRIKNELEPKLGMDLKLVQLIAYTDWNETYEKQSDGKWTNYSYDWMFKPGAMKEVAQYADGIGPDYHMLVEKYSTPTNIKLTNLVKEAHTNNLEVHPYTIRVDQLPKYATSGDQLFDIIYNQAGVDGVFTDFPDLGVKFLQKQHQQKZ

SEQ ID NO: 1856 - protein, 2975 aa, Photorhabdus luminescens
QNCRWVVLCGVKIMNKQLYRIIFNQSRQMWMVVAEIARAGRGRTGRRARRSASPPRCCRLTALRFGVLFALGGISLTAQAAIVADGQAPGRQQPTIIRSANGTPQVNIQTPGADGVSHNTYRQFDVDKQGVILNNSHQATQTQLGGMVAGNPWLAKGDARVILNEVNNHNRSHLNGWIEVAGHKAEVIIANPAGITCNGCGFINSHRTTLTTGQALMERGRLKGFDVNQGEVRIDGHGMDSTQQSYTDIIARSVAINAKLHAQDLKVTTGRNIVDAAHQQVEKKSVDDEKHPAFALDVAALGGMYAHKIRLIGTETGVGVHNAGNIGASAGEFHITAEGRIENRGTLSSRDTLQLTSSADVTNTGKLLSQSAVNLQAKGALNNQGRVEARGDTTVTAGTIHSSHDSVWAAGLDDNGNTTRPGSLTLTAQHVQAKGKNLATNTLAIHSRQIDLSDSQTAAGQIQLTAGQSGISTARASVNADRLTAKTPGQFNNDGGQLVARAIHLTTPDLSNQQGKINQTGTGELTLHTRTLNNREGTVFNQGKLTLTTDRLNNRQGTIASQGEDLHLTAHQADNNQGTVQLAGNGKLSLNTQRWLGDKGKLLTNGTLTIQAGELQLNHAETQAGQITINADTLSHQSGVMQQWGKDDLSLTTRILDNHSGTIAGNGNLNLKATTVDNRHGNIVAADQGSLKLTVKDTLDNQSGKLEAGHALQLSATQLDNRRGSIVAAGDSATLTVGKTIQNAHGHLEAQTRLTTTSQTLDNTQGVLLAQNIDSQTTGHPFTNTAGQVIAEDTLTVNSGQLDNTAGLLQAGREMAVDTHGHGLTNTHHADQKAGRLLSGGQLTLRTGDIDNTGGMIAADGKTVLTSTALNNTQGQIAGNGGLDIHSQQLINREGTLQSADALTLDTDGQLLDNQQGQIMGEGKTTITSGPLDNRHGHLQGGQLAIDTRHAALDNRDGKLLSTDTLTLNTHQLDNRHGQVQAVGNTVLNVKTQTDNTGGLIRGGTQLTLNTAHLINRETAHTDNGLEAQNLTVNAQQVDNTQGALRAANHLQVQVSHTLENAQGLISAGKQLTVGDATRPASLVINNRQGTLIAGEQATINAHGLSGDGQLLSQGDMAVTLTEDFHHTGNTAANGNLTLKTTGNLINDRQIKAGQTLHLDAHNLTNSASGEISAGQTQIQVHDTLNNTGLIDGGLTHLTANTLNNMGTGRIYGDQLALQTGTLNNTAQNGKAAVIAARDRLDIGTGTLNNSDHAQIYSVGDLHIGGRLDNTLTATGQARVLNNHAATIEAGRNLKIQADRINNTNAGLVTQVVETEKSPHHDAVLSGQTTRYDWSQVDTSRHNKYGVHDAIMPDGSGSNDFYEYQYTRTVRETQVKQSDPGKILAGGNITLNSAQVTNHDSQIVAGGTLGGEIGELHNIATQGERITTDTGSQTHWYAKKKRLKPRFRGTKTSQGKSRSRYAPAPVIETIDLKTLAWQAHTRPQGTDITITDRQTGQIHAAPTAVTPVNGINNQPLVLPPGQPFELSLPPETVKGQTVDPVIRVVTPDTRLPNNSLYTVQPGSDSHYLVETDPKFTQYKQWLGSDYMREQLTHDPALVHKRLGDGFYEQRLVRDQITQLTGQRYLSGYNNDEAQFKALMDAGVAFGKQQQLTPGVALSPAQMALLTSDIIWLTNQTVTLPDGTTEVVTVPQVYARVRQGDLRSDGALLAGNTVALNNQGDITNSGTISGRDVTQLTANNLTNSGFIRGGKVDLAAQQTLTNRGGQIQGDDRVTLKGRDITSASTVRGDEANRWLDRPAGIYVQNDKGTLSLSAINNVQLTASDVKNAGKDGHTEITAGHNLTLDALSTRRTEQGDWGKDNTRHLTQQQDIGSQITGTGEVTLQAGQDLNATAAHVNAGQHLTAQAGNSLTLTTGTASSDLVEHSKQTSKGWLSKSSVETHDEVHDRQALSTTFSGDKVNLQAGKDLNIRGSNVAGTQDVSLNAGHQLTVTTAAESHDETHLRQEKKSGLMGTGGIGFTLGKASQKVTTDSDRQLSKGSTVGSSQGNVTLNAGEQLRVHGSEVIAGKDLTLTGQQVDITSAENRHHTTTKTEQKQSGLTVALSGAAGGAVNSAVQTARAARTESDPRVKALQNTQAALSGVQAAQAGRLAAAQGSDDKGNNNLAGVSLSYGRQSSRSEQQHRQTTQQGSHLTAGDNLTITAKGDDKGASGQNGDIRIQGSQLQAGKDLQLNAHRDIQLSSSQNTEQTTGKNSSHGSALGVGLTVGPGGTGLNISANVSRGNGRENGNGVSHTNTTLQAGQTVGLNSGRDTTLKGAQVSGEQITAEVKRHLTLSSEQDSQRYDSQQQNASAGVSATVGPLTNGTASLNASRNKLHSNYDSVQEQTGLFAGQGGYQVNVGDHTQLDGAVIASQADKANNTLNTGTLGFKDIKNQADFTVEQQSAGISLGQPTAGQVLNNLAVNGLTGTHNSGHDSTTTHAAVSDGNLIIRDKAHQTQDIANLSRDTDNAANVLSPIFDKEKAQQRLKQAQLIGEISAQMTEIARTEGKIIATKAAKAKLDHISEPDKEAARKKLVDSGNPHPTSADINKQVYDTAYTQALNDSGLGTGGTYQKALQAATAAIQGLAGNNLGQALAGGASPYLAGVIKELTTDPQTHQVDIATNTLAHAILGAVAAEVSGNNALAGAAGAASGELAAQVLIKQLYGDGANVSELTEEQKQTISTLSTLAAGLAGGIAGDSTGSAVTGAQAGKNATDNNFLGKLVTEGCAIAAPCRAKVAEKVLEIGVKAGITGIVAKEIADKISSEDLDHLIMLQMMGNDEITQSYLNTLQDKYTQVANPTDLPTHTGNTEGKPDVGGNTTVTPIPDGPKKDDFIYQAKGEKPENYSPVGAGRSGAFNEAKRRSGIPIGKHPDRVLPNVDKRGRLQPGKIYEFDVPKAGGGTQTIQIRDDAKGHDFGINDPQNRGPHFNDEKGNHYDYZ

SEQ ID NO: 1857 - protein, 555 aa, Photorhabdus luminescens
MKSSIVVLIVFCSAVSGSQAADIADQQLIHQQARQQALETQLAPPPAEVHLSVPETGESSAFAVETPCFPITHVRLAGTENFPHWLPFRLVAQQGENHCLGDKGISRLITQLQDQLINHGYVTSRVLVPRQDLRTQTLKLVMIPGKIRHIRYTPDSGNYIQRITPFPAREGKLLDLRDIEQGLENLQRFPTVQADMNIVPAEQPGESDIVLDWRQSRHWRVATYLDDTGSKSTGRYQGGLTFFLDNPLALSDLFYLSGGRDIHSSAGKGSQNDTLYYSLPFGYWMASVTASHYDYTQTIAGLNQAIQYRGKSQNLAVQLSRVLHRNADQKTLLNGEIYRRASRNFIDNTEIDVQRRETAGWKLGLSHHHFIGSATLDTRVTYQQGMRWFGAQPAPEEYRNEGTALPKITQFSATLAGPLTLFSQPFSYQTQYLRQISASPLTPQDRFSIGGRWTVRGFDGELTLSADRGWYSRNELDWQTPLKGQSLYLAMDYGEVGGRGSDTLLGKHLAGSALGWRGSLKGVSYDLFVGVPLSKPAGFPTSPVTAGFNLYWQYZ

SEQ ID NO: 1858 - protein, 267 aa, Photorhabdus luminescens
MSLKITVLLENKTSDSYLIAKPGLSLLLEDGEEKIIFDTGPDGSYIENANRMGISIDDISKIVISHGHSDHIGGVNYFPHNAKLICHPDALNEKYYGVMFRKIALKFKKMSGKINKRVKKRVFFRLTKSHMKISERFIFSGEIANDHRKSFGLIRKSSWANDYILDDSALIWKSDNGLVIIVGCGHSGICEIINHAKMITGVDKVCAVIGGLHLRRALPTELLKIREFFIKENIKEVYGCHCTGSWGRLWLPNVKQLKTGQVLLVEZ

SEQ ID NO: 1859 - protein, 1687 aa, Photorhabdus luminescens
LVGVKTGVMVMNQGQFWQQPGINKCYLAVILAFLLMLSGCDQSDSTDNKQAAQSQSTEIQSEKAPQQSNTPPKSVKPKDAASLAELVKRYAGKPVKILDASEVQLDGASAMVVTFSVPLDPNQDFAQNVRLVDVKEGKLDGAWELSDNMMELRLRHLPPSRKLQLTVDKDVKGINNRQLETAYEKTLTTATISPSVGFASKGSLLPSKVAEGLPVLALNVNRVDVNFFRIKETALPAFIAQWQYRNNMSSWESEEMLKDAELVYTGRFDLNPTLNTREKLLLPLSNIKELQQDGVYLAVMQQAGKYTDSNPATMFTLSDIGVSVHSYLDKMDLFTQSLAQGGSLKGVEIRLLDDKGQLLTKATTDDDGHASLEKNAKAKLLLATRDHQTSMIDLVSPALDLSEFDISGPQGYSKQFFVFGPRDLYRPGETLIVNGLLRDGDGRAMKSQPVKVDVLKTDGQVVRSFVWQPENGLYQYRYAIPQSATTGLWSLRFDLGDNKLRYYKFNVEDFMPERMALEISSESQPVMKDHDVDFAINGRYLYGAPAAYNRLQGQLFLRPARDAVAKLPGYEFGAVAEDNLSRTLDEFDLVLGNEGKAVINVSADNWRSVFSPVNVIVQASLLESGGRPVTRRVEQAVWPTEKLVGIRPLFNQKEIYDYRIGRYQSRYNVDENSLAQFAVVYADANGKKYAAKDLTARLVYERRDYYWRWSDGEGWQSGYDQKDLVMADEHIQIAQDGTAKVSFPVDWGSYRIEVVNPENQLVTSVNFWAGYSWQDNTGGTGAVRPDQVKLSLDKPAYQVGEKIKLHMVAPQAGKGYLLVESSEGPLWWQKIDVPEQGLDVEVPVNKEWRRHDLYLTAVVVRPEDKSRQVTPKRAIGVLHLPLADENRKLDLTLSAPEKMRPNQNLTVKVKATPQQGRKLPKQVNVLLSAVDMGVLNVTNFKTPDPYEAFFGRKRYSVDQYDVYGQLIEGEGRLANLRFGGDGDDSALDRGGRKPLTEVKIIAEQAQPVTLDENGEGQIVLPIPDFNGELRLMAQAWSEDEFGHGENKVVVAAPVVAQMALPRFMAGGDSALLSLDLTNLTEQTQNLTLNFAANDLIKLEGDVSKEITLEKGKRTTVEIPVTADLGFGQGEVSLTVDGLNLPGENLKPYKNSWQIGVRPAQPAETVLFANVIHPGEEWQLPLNALSGLSPEGAEGQLLLSSRPPLQISRYIRELYAYPYGCLEQTISGLYPSLYSNKSELNSLGIRAEDDNKRRASIDEGIIHLLSMQRHDGSFALWDKTGDEEYWLTAYATDFLFRASQRGYSVPKEVLTSANNRLLRYLQDKSVINYPYSQNQDAMRFSVQSYAGLVLANQQKAPLGALRQVYERRQQAGNGLSLVQLGVALKLMGDNTRADEAVRLGISKNRHDDLELGDYGSAIRDNAMIVALLTENNMQIKERDEKLLALSDELTSRNYFSTQESNSLYLAGRFFIDASVQPWKAVINQRTLPISRDKSYSEMLYPQDIQQGVSFSNLGDSTLYSRVNVVAYPLRSPKPYANVLKIQRSYLDMKGNPIASDLLNSGDMVVVKLVVSSDKPVQDALVVDLLPAGLELENQNLANSSAKLSESAANLQELIGDMQQATIHHIEYRDDRYVAAVAVDPSQPVTLLYLARAVTPGVYTIPAPQVESMYVPYWRAVGSTPEKLEVVRZ

SEQ ID NO: 1860 - protein, 800 aa, Photorhabdus luminescens
KTGSCPLNLSALMLRCKGWFLSRCSLMKKPYRLMWLIVLLLFLFPAGLWLADKIWPLPLREVKMARIVVSEDGTPLWRFADDEGVWRYPVTLGQVSPEYIQALLTYEDRWFYQHPGINPISLVRAAWQDILAGKILSGGSTLSMQVARLIDPHSRTLGGKLKQIWRTLQLEWHYSKDEILEMYLNRAPFGGTLQGVGAASWAYLAKPPSELSAGEAALLAVLPQAPSRLRPDRYPERAQAARDKVLQRLAHYKIWSEQTIADIRQETLWLAPRQVPQLAPLLARRMAKGIRQEIIKTTLDVGLQRQLEDMAVNWQYQLPEKTSIGVLVVDHTDMAVKAYIGSLDLRDDSRFGHVDMISSWRSPGSTLKPFLYAMALDDGLIHGESLLQDVPRRFDYYRPGNFDSGFHGPVSASEALVRSLNLPAVQLLEAYGAKRFTANMRNVGTVLRFPPGSEPNLSLILGGTATRMDQLVAAYTAFARQGRVSPLRFTPQQKLRDRQLFSPGAAWIVRRIMAGEALPQPDDVLPAQVPLAWKTGTSYGYRDAWAIGLSARYTIGVWVGRPDGTPVVGQFGYATAIPIMNQVNNLLFVNMRNGTKRIPVDPRPASVSRAIICWPGGQSLPKEENNCRQRRLSWILNNTIPPTLPAVGQEAISGTNEQVWLDKHGLRVAPDCPGAQAKNIALWPITLESWLPAQERRAQRLPPVNPECPPLKSDEAPLLIVGIHNGDVLKRLPGFGSLDLRVTTQGGSGGQQWWFLNGEQVMTTENNQGFVQTLTQPGKYQLSVLDLGGQVDAVNFTLKZ

SEQ ID NO: 1861 - protein, 379 aa, Photorhabdus luminescens
VSETPEKKGGKINLLDLNRKQMRQFFIDMGEKPFRADQVMKWIYHYCYDDFEQMTDINKILRAKLQQVAEIRAPEVAEEQRSADGTIKWAITVGDQQVETVYIPEDDRATLCVSSQVGCALECKFCSTAQQGFNRNLRVSEIIGQVWRAAKIIGSLKSSGRRPITNVVMMGMGEPLLNLNNVVPAMEIMMDDFGFGLSKRRVTLSTSGVVPALDKLGDMIDVALAISLHAPTDDVRDDIVPINRKYNIEQFLAGVRRYLTKSNANQGRVTVEYVMLDHINDSVEQAHQLAECLKETPSKINLIPWNPFPGAPYGRSSNSRIDRFAKVLMEYGFTTIVRKTRGDDIDAACGQLAGDVIDRTKRTLKKRQAGEPIQIRSVZ

SEQ ID NO: 1862 - protein, 347 aa, Photorhabdus luminescens
MNTETTPEQAYLTAGQLLRQAREQHGLTQQTVADRLCLKLSTIRDIEEDNIPATMVPTFLRGYVRSYAKLVQIPEAEILAILDKHTPAKTAKVSPMQSFSLGKKRKKRESWLMWITWLIILVVISLTGAWWWQNHIAQQKELISMADHSAAKIAQKKASSEDLPTENHDQVTQLPTREQATSEPSPSVAVAENIAENAVAANNTSSHHQEVAQSVASTQNQAVKTPETQLAGNGPQAQTAPLSANQGTAQVPSVSENNSTTVADSNKLMMNFKASCWLQVVDANGKKLFSGTKHKGDHLSLSGSLPYELTIGAPAVVDVQFRGQVVDLSRFIKESRIARLKVPTAQZ

SEQ ID NO: 1863 - protein, 374 aa, Photorhabdus luminescens
MHNESPIKRRKSTRIYVGNVPVGDGAPIAVQSMTNTRTTDVEATVKQIKSLERVGVDIVRVSIPTMDAAEAFKLIKQQANVPLVADIHFDYRIALKVAEYGVDCLRINPGNIGNEARIREVVAAARDKNIPIRIGVNGGSLEKDIQEKYGEPTPEALLESAMRHVDILNRLNFDQFKISVKASDVFLAVGAYRLLAQEIEQPLHLGITEAGGARAGSVKSAIGLGILLSEGIGDTLRISLAADPVEEVKVGFDILKALRIRSRGINFIACPTCSRQEFDVIGTVNALEQRLEDLLTPMDVSIIGCVVNGPGEAEVSTLGVTGARTKSGFYEDGIRQKVRLDNADMIDQLEAKIRAKASMLDENKRIGISQLDKZ

SEQ ID NO: 1864 - protein, 426 aa, Photorhabdus luminescens
VAKNIQAIRGMNDYLPADTVIWQRIETILKRVLAGYGYSEIRTPIVEQTPLFRRAIGEVTDVVEKEMYTFDDRNGESVTLRPENTAGCVRAGIEHGLLYNQEQRVWYLGPMFRYERPQKGRYRQFYQLGAEVFGLQGPDIDAELILLTARWWRELGIFEHVTLELNSIGSLAARANYREALVAFLEQHQDKLDEDCKRRMYSNPLRVLDSKNPEVQQLLNDAPELCDYLDAESKEHFDGLCALLDGAGIKYRINQRLVRGLDYYNRTVFEWVTTALGAQGTVCAGGRYDGLVEQLGGRPTPAVGFAMGMERLILLVQEINPAFVAERTVADVYLASFGEGSQQAALILAEQVRDTLPQLRLMMNHGGGNFKKQLGRADKQGAKIALILGEDEVRSGQVAIKDLRTGEQQTLPQSEIAARLVELLSZ

SEQ ID NO: 1865 - protein, 337 aa, Photorhabdus luminescens
LHVWFYFGVIYMSETANWQPSAAIANLLKRATILAEIRRFFADRGVLEVETPAMGQFTVTDIQLFSFQTEFVGPGAADGMTLYLMTSPEYHMKRLLAAGSGPIYQLGRCFRNEEAGRYHNPEFTMLEWYRPHYDMYRLMNEVDDLLQQILDCESAESLSYQQAFLRYLDIDPLSAEKEKLREIAAKLDLSNIADIEEDRDTLLQLLFAVGVEPHIGTEKPTFIYHFPASQASLAEISKEDHRVAERFEVYFKGVELANGFRELTDSHEQCQRFERDNRKRAALGLPVRPIDENLIGALKQGMPECAGVALGVDRLVMLALGAEKLSDVMAFSITKAZ

SEQ ID NO: 1866 - protein, 207 aa, Photorhabdus luminescens
VEVYTNENEQVDVIRRFFANNGKALVLGLVLGAGALIGWRYWQSHQTNQLQESAEAFERVDRGLITSTKESHTAAEKFASETNNSYGVMAHMHLAQLAVEKNELTKADQFLSAATGQVKNEDLQALVNIRLARVQLAEDKADAALKTLEQVKGSGWVGVAEDIRGDALVKKGDIAGARAAYTKGLSSNSPQAIKSMLNLKLNNLSSZ

SEQ ID NO: 1867 - protein, 391 aa, Photorhabdus luminescens
MQLRKTLLVGLVASVLLAGCSTEQDTVTMSPLPQVENQFNPSEVWDKSVGDGVGRYYSHLTPTWQGSAVYVADRHGIVKALDIDSGKEIWSVNLAEKAGFLSSRIPALLSGGLTVAGDHLYVGTERAKVIALNTKDGQVAWQSDVAGEALSRPVVSDGLVLIHTSNGMLQALNESDGKVQWSVNLDTPSLSLRGESAPAAAYGAAIVGGDNGRVNAVLISQGQLIWQQRISQVTSSTEIGRLNDVDTTPVISDGVIYAIAYNGNLVALDMRSGQILWKRDLGSVNEMVVYGDNIYIVDQNDRVMGLRQSDGVTLWTQTKLQHRNLTAPEMYNGYLVVGDSEGYLHWLNMDDGKFVAQHKVDSSGLMSRPVVASDKLMVQAKDGTVYLFTRZ

SEQ ID NO: 1868 - protein, 494 aa, Photorhabdus luminescens
MIPVVALVGRPNVGKSTLFNRLTRTRDALVADFPGLTRDRKYGRAEVEGQEFIIIDTGGIDGTEDGVETHMAAQSLLAIEEADIVLFMVDARAGLMPADHAIAKHLRGREKATFLVANKTDGVDIDTAIAEFYSLGLGDIYSIAASHGRGVTQLIERVLLPFSGKGEEEVVELTEEEANAAYWAEQEQNEIEMVEEEEDFDPSTLPLKLAIVGKPNVGKSTLTNRILGEERVVVYDMPGTTRDSIYIPMERDGREYILIDTAGVRKRGKITETVEKFSVIKTLQAIEDANVVLLVIDAREGISDQDLSLLGFILNSGRSLVIAVNKWDGMSQEDKERVKEMLDYRLGFVDFARVHFISALHGSGVGNLFDSILEAYDCATRRVNTSLLTRIMHMAEEDHQPPMIRGRRVKMKYAHAGGYNPPIVVIHGNQVTDLPDSYKRYLMNYFRRSLKVMGTPIRIQFKEGANPYADKRNTLTPNQMRKRKRLMAHLKKRZ

SEQ ID NO: 1869 - protein, 366 aa, Photorhabdus luminescens
MQIQNNNYRGLIPPYILQNIYNNDNKKKKVLMTLNHTKSLMLDTVINESSDDSDDDDKVTKTTIHRSIHDAENKRKLPGKLVRDEGDPDNGDKSVDNAYRYLEATYNFYKEVFNRNSLDDKGMKLIATVHYGEEYMNAFWGNGQMVFGDGDGKTFNDFTTSVDVIGHELSHGVIEKTADLVYFFQSGALNESIADVFGTLVKQHYLKQKAEEADWIIGSELLGKDVKGVGIRSMKNPGSAYDDKELGKDPQPGHMDDYKDLPIYRDNGGVHINSGIPNKAFYNLAIKLGGYAWERAGKIWYNTLLDKDLARDTNFVSFAKLTIKHARELFDEDVEKATIDSWTEVGVKVKEDKDDKDKNKDKTEEZ

SEQ ID NO: 1870 - protein, 303 aa, Photorhabdus luminescens
MNTPNINQIKSFFLSLQDEICQQLEQIDGKEKFTEQCWQREEGGGGRSRIMKEGTIFEQAGANFSHVSGDMLPLSATAHRPELVGRHYQAMGVSLVIHPLNPYIPTSHANVRFFIAEKEGEAPVWWFGGGFDLTPYYGFKEDAIHWHTTARNICRPYGEDVYPKYKEWCDNYFYIKHRNEARGIGGLFYDDLNTPDFEHCFNFTQDIGKGFLSAYLPIVEKRKEILWGERERQFQLYRRGRYVEFNLVWDRGTLFGLQSGGRTESILMSMPPLARWEHDYHPEPESAEAALYTDFLPAKNWIZ

SEQ ID NO: 1871 - protein, 194 aa, Photorhabdus luminescens
LSGLRFFIISGALLLAGCTGSSGFSWSDLSPISWFGSPLKISDQGVGEINALTAMNEEAIEKGLDGKYHLRSGMETKNGQLVTVFQAMDSDQLKIALFGQADGKVNRIEVLDEDIKTVWGTKVGMPFSALYSKAFDVCRNAVSESEKSAIVCVSPQSKHVSYLFTGNWNGPEGLIPSDDVLKNWKVERIIWKRZ

SEQ ID NO: 1872 - protein, 346 aa, Photorhabdus luminescens
RIRWKMKKYSIKNTILNGLVVVTLLGSSHAFAVELLNSSYDVARELFSALNPEFEKQWNEQYPQDKLIIKQSHAGSSKQALAILQGLRADVVTYNQVTDVQILHDRGNLISADWQNRLPNSSSPYYSTMAFLVRKGNPKNIRNWDDLVRQDVKLVLPNPKTSGNGRYAYLAAWGVIQQENGGDQGKTREWMQRFLKNVAVFDTGGRGATTSFIERGLGDVLISFESEVNNIRKQYGEDKYEVLVPPVGILAEFPVAWIDKHIAKNGTEKAAKAYLNYLYSPQAQQIITSFNYRVSNKNVMNQQRARFPATKLFRLEDQFGSWPQVMKTHFNTGGILDQLLAEGHKZ

SEQ ID NO: 1873 - protein, 278 aa, Photorhabdus luminescens
MFSRSSKRVLPGFGLSLGSSLFYTCLILLLPLSALVVQLSSMTWEQYWQVIANPQVVAAYKVTLLAAAVASLFNAVFGMLMAWVLTRYRFPGRSLLDGLMDLPFALPTAVAGLTLATLFSVSGWYGSLLGHFDVKVVNTWLGIAVAMAFTSLPFVVRTIQPVLEELGPEYEEAAQTLGANRWQTFWRVVLPELSPALIAGTALSFTRSLGEFGAVIFIAGNIAWQTEVVSLMIFIRLQEFDYPAASAIASVILAISLILLFSINTLQSRFGRRIGGHZ

SEQ ID NO: 1874 - protein, 282 aa, Photorhabdus luminescens
MVELSESYVAQRPPVNWAKWTLIITGVLFSILLLVIPIVWIFMTAFSKGVEIVTENLLDPDMLHAIWLTILIALITVPVNLIFGVMIAWLVTRFQFPGRQCLLTLIDIPFAVSPVVAGLIYLLFYGSNGWAGSLLEPYDIQLMFSWPGMALVTIFVTCPFVVRELVPMMLSQGSQEDEAAILLGASGWKMFWRVTLPNIRWALLYGVVLTNARAIGEFGAVSVVSGAIRGETYTLPLQVELLHQDYNTVGAFTAAALLALMAIITLIVKSALQWRLSRQHGZ

SEQ ID NO: 1875 - protein, 363 aa, Photorhabdus luminescens
MSIEINNISKYFGRTQVLSDITLNVFSGEMVALLGPSGSGKTTLLRIIAGLEQQTAGKLSFHGQDVSRMHAKDRQVGFVFQHYALFRHMTVFDNVAFGLTVLPRRRRPNMAAIRRKVMELLEMVQLTHFAERYPSQLSGGQKQRVALARALAVEPQILLLDEPFGALDAQVRMELRRWLRQLHEELKFTSVFVTHDQEEAMEVADRVVVMRQGNIEQVGTPQEVWRYPASRFVMEFLGEVNHFSGEIKGSQLLIGGQHLPLNVTPIHQGNVDVFLRPWDIMMNSQPTLSSPLPVQVTEVSPRGHFWQLSVQPLGWHHESVAVVWFDETSVPTRGNRYFIGGTEARLYAGDKQLQTLSLAQTAZ

SEQ ID NO: 1876 - protein, 356 aa, Photorhabdus luminescens; identical to SEQ ID NO: 52

SEQ ID NO: 1877 - protein, 294 aa, Photorhabdus luminescens
VASLEHFIGNTPLVKLQRITDKLGGEIWVKLEGNNPAGSIKDRTALSMIQQAELRGEISPGDVLIEATSGNTGIALAMIAAVKGYHLKLLMPDNMSLERQASMRAYGAELILVSRAMGMEGARDLAQQMERNGEGKVLDQFNNPDNPLAHFTTTGPEIWQQTQGRITHFVSSMGTTGTITGVSRYLKSQSNRVQIIGLQPAENSHIPGIRRWSPAYLPGIFRKELVDQVLDITQKEAEDTMRLLAQKEGIFCGVSSGGAVAGALSIAAQNPGSVIVTIICDRGDRYLSTGVFNZ

SEQ ID NO: 1878 - protein, 231 aa, Photorhabdus luminescens
  misc_feature (14)..(14): Xaa can be any naturally occurring amino acid
EAINSILNQTYHTXEFIFVANNCTDKLWNSLQDYNDDRIKCYRTNIGQLSFNLNYGLNISTGEYIVRMDADDISLSDRLENLNLQIDKNNKPDVIGTSVLFIDENSTVLNKYTPPMKKFIQTIPFKNIFVHPTVAIKRATLIKEKGYLGGFQSEDYDLWIRLLRNKKYHLCNVDIVTLKYRISVNQSRGSRLPYAESASYCLREFLLRPRLIWLLGFMISSLKVFILPKKZ

SEQ ID NO: 1879 - protein, 373 aa, Photorhabdus luminescens
FILMNVIHTVVNTFTAKRFIEPLILSEIEYGLKSSLLVDPLNGSSKFLDALRCKYIKSKFCFSLNPFLLIVNLIRLICFFKKNHTDIIICHMTKGAFLPLLASFIFGIKRRVYYNHGVPYIGYSGLLKYALKSIEKINCFFATDILTVNKELVPYLSCLTYKNVSVIGSGSISGLPNEFYDNKLSLSYIDDLKEKHGIDKNMKVFIYVGRPHKRKGFNLLLKSFEKTFSHTNTKPLLLIVGCTSKDVKTVLGYIPDSFKIYDSVLDIHELYKCSDFAVLPSYHEGLGYALLEGAAASCILLGSDIIGLNVLCRKENSIKFTLQIDGLSTALLKAFLMDEKEKMKMASSSFTIANEFRQKSVTQNYISYLYSKZ

SEQ ID NO: 1880 - protein, 343 aa, Photorhabdus luminescens
VKIRSRAPLRLGIAGGGTDVSPYSDEFGGCVLNATINMYAHAFIDDDIKGNQVIFEAKDLGIIDIIELDNDVSLDGNLVLHRAVYKRIMEQYNKGKYIPLRLTTQSDAPPGSGLGSSSTMVVAMLEGFRQLLSLPLGEYDIAQLAYEIERRDCKLSGGKQDQYAATFGGFNFIEFYANDRVIVNPLRMRRYIISELESSLILFFTGTSRDSAKIIDDQIKSIKKDNGARLDAMHKVKESAYKIKELLFKADILGVAQEFRNAWESKKATSPSISNALIDAVESSILNAGAISMKISGAGGGGFMMIFVEPENKLDVIKALEQFDGHVHKFQFTNEGAYSWTIZ

SEQ ID NO: 1881 - protein, 197 aa, Photorhabdus luminescens
MDNLDYINTYLLNSIKVKQKLADDIVTLKAISDVANLIVDAYTKNNKVLLAGNGGSAADSQHIAAEFVSRFFYDRPGLPAIAMTTDSSMLTAIGNDYGFDKLFARQLQAQSRLGDIFIGISTSGNSLNIIKAIEVAKEEGVTSVVLCGSGGKLKDLADIAICVPDSVTPYIQECHICIGHMICAIVEAKIFPKEKLZ

SEQ ID NO: 1882 - protein, 226 aa, Photorhabdus luminescens
MFEAIILAGGQGARLKAVTGDLPKPMVDINGKPFLYRLMKRLEEQGCSKIVLSLCYQADYIIGCIQKDQPVSCEVDFVIEETPLGTGGAIKLASSKINSSKFLVLNGDTMSEINYNSIINFSNDADLVISGVYIDDVSRYGTLKLDEYNNVLAMLEKGLTGKGIINSGIYLIKKDLIRNFPLEKFSFENDFIKNFNGIFKAFVSNGYFIDIGIPEDYYKACNTIKZ

SEQ ID NO: 1883 - protein, 394 aa, Photorhabdus luminescens
VAQVIVIAGKNNIAVHVLNLLKIKYNIKNLAVVINKTDSGNNTWQYSLKKRANEINVPIISLEEAERNASIFLSLEFDQLIKIGRFRTKKIFNIHFSLLPKYKGMYTSIWPILNNEISTGVSLHYIDNGIDTGEIIDQTTINIDERYTSKDIYLNYISHSCTLIEDYIEKIIKNNNIFSNPQKSKHSSYYSKNTISFSSESINLHKTAWEIGRYIRAFSFREYQLPHYQNTNYCNYEITSIRSSGRPGALIKDNENFSEFSTIDYNIILYKDKIDLLFDFCKKNNLSEIKKYIKNISGIDERNQHTWSLLMVASYHGYLGIVKYLIDSGANVNATNYKGTSVLMYAKEYALKNGDTRIIKLLIEKGANILTKDMHYKCLVEYLTEDERLKVGIZ

SEQ ID NO: 1884 - protein, 341 aa, Photorhabdus luminescens
MPILITGGAGYIGSHTVLTLLERGADVVVIDNLCNSSPESLRRVEKLTGKSVKFYQGDILNLDLLHKIFQENKIETVIHFAGLKAVGESTRKPLEYYQNNVTGTLVLLQAMRANSVHQLIFSSSATVYGDPEFVPLTENAKVGGTTNPYGTSKLMVEQILKDFAAAEPSFKITSLRYFNPVGAHSSGMIGEDPNGIPNNLLPYITQVAIGRLECLSVYGNDYPTKDGTGIRDYIHVMDLAEGHIAAIDYLDKQQSYEVFNLGTGAGYSVLELLHAFEKASGKDIPYKITDRRPGDIAECWSDPSRARNILGWQATRNIDDMMRDSWNWQKNNPHGFRSGKZ

SEQ ID NO: 1885 - protein, 240 aa, Photorhabdus luminescens
LVYWSFFMKTENSRELLNDVIEWDIGNWSHALKYWQDHSNLELKSANILELGSRNGGLSLWAALNGGNVLCTDLNGPTSKAQEKHKRYNIESSIRYGKLSALDIKYKNHFDIVMFKSVLGGIGYNSNKSAQKKAINQIFHSLKKGGEFWFAENLVASPLHQFLRKNYVNWGNAWGYVTVNEMVEYLSAFSNINYTTLGFLATFGRNESQRKFLGMLDNKVLNKVVPKHWHYIIIGVAKKZ

SEQ ID NO: 1886 - protein, 245 aa, Photorhabdus luminescens
NNSFSLIYIGYTMKAKNSKEFLHDVIEWDIYNWSHSLKYWQDHSGLELKSANILELGSRNGGLSLWAALNGANVLCTDLDGPTPKALEKHKRYNIEKSIQYDKLNASDIKYKNHFDIVMFKSVLGAVGYNFNKTAQKEAINQIFYSLKEGGELWFAENLVASPLHKFLRKNYVNWGNTWGYVTTKEMTEYLSAFSDVNYTTLGFLATLGRNEFQRKFLGVLDNKVLNKVIPKHWHYIIIGVAKKZ

SEQ ID NO: 1887 - protein, 599 aa, Photorhabdus luminescens
VQIFNADLAIIGAGGAGLRAAIAAAEANPQMKIALISKVYPMRSHTVAAEGGSAAVTQAHDSYDFHFNDTVSGGDWLCEQDVVEYFVEHCPTEMIQLEQWGCPWSRKEDGSVNVRRFGGMKIERTWFAADKTGFHMLHTLFQTSLKYPQIQRFDEHFVLDILVDEGQARGLVALNMMEGTKIQIRANAVIMATGGAGRVYRYNTNGGIVTGDGMGMAFRHGVPLRDMEFVQYHPTGLPGSGILMTEGCRGEGGILVNKDGYRYLQDYGLGPETPLGKPENKYMELGPRDKVSQAFWHEWRAGRTISTPRGNVVYLDLRHLGEKKLLERLPFICELAKAYVGVDPVKEPIPVRPTAHYTMGGIETDQKCETRIKGLFAVGECSSIGLHGANRLGSNSLAELVVFGRLAGEEAVKHVQQTKPINDRTLDAQACDVVARLNNLLKQKGTESWSKIRDEMGISMEEGCGIYRTPELMLKTIDKIAELKDRFKRVKITDNSNVFNTDLLYTIELGFSLDVAECMIHSAINRKESRGAHQRLDEGCTERDDEKCLKHTLAFYDPESVPHLEYSDVKITKSIPAKRVYGGEAAAQEKKYKEQENGZ

SEQ ID NO: 1888 - protein, 274 aa, Photorhabdus luminescens
MSLEELDEVWKNIKTEARALAECEPMLASFFHATLLKHENLGSALSYMLANKLATPIMPAIAVREIVEEAYGSDQKMIVSAARDIIAVRLRDPAVDKYSTPLLYLKGFHALQAYRIAHWIWGEDRKALAIYLQNQISMSFGVDIHPAAKIGCGIMLDHATGIVIGETAVVENDVSILQSVTLGGTGKTGGDRHPKVREGVMIGAGSKILGNIEIGRGAKIGAGSVVLRSVPPHTTAAGVPARIVGKPESEKPSLDMNQHFNGINHGFEYGDGIZ

SEQ ID NO: 1889 - protein, 341 aa, Photorhabdus luminescens
MNSTVSMTVIGAGSYGTSLAITLARNGHNVVLWGHNPEHVGALQRVRCNQKFLPDVSFPDSLLLETDLIKALTASRDILVVVPSHVFGEVLKQIKPHLRPDSRIVWATKGLEADTGRLLQDVAREILGNEIPLAVLSGPTFAKELAAGLPTAIAISATESAFGDGLQQLFHCGKSFRVYKNPDFIGVQLGGAVKNVIAIGAGISDGMGFGANARTALITRGLAEMSRLGAALGADPSTFMGMAGLGDLVLTCTDNQSRNRRFGMMLGQGISVEEAQYQIGQVVEGYRNTKEVRALANRANVEMPIAEQIYQILYCNKNVIEAAQALLGRARKDESDNVRSZ

SEQ ID NO: 1890 - protein, 442 aa, Photorhabdus luminescens
QGIFTEMADDKEMHSRNYRRNQNSRRNDIFALLFYVFLLVIFSFNTFANQIIDNKNQLKDLQQNIAEKEKSVQQQQQKRSSLLNQLKDQENTISKIGQSLHNAQTQLSKLNKEITFLVSNIKKLEKQQKAQRDMLARQLDAAFRQGQYQGLELMFRGEEGKRGERILAYYSYLNQARQDTIVKLEQTAVDLTEQKKLEQQKQEEQKQVLTEQQQQKQQMEVARNARQKTLSELESSLKKDQKNLAELKQNETRLRDKIAKAEREAKARAEREAREAARVRAQIAAKQKQAQQKGSSYKPTEDERALMARTGGLGRPAGQAIWPVHGKVIHQFGEALQGELRWKGMVISATEGTEVKAISDGRVLLADWLQGYGLVVVIEHGKGDMSLYGYNQSALVSVGQQVRAGQPIALVGNSGGQQQPALYFEIRRQGRAVNPQPWLGRZ

SEQ ID NO: 1891 - protein, 223 aa, Photorhabdus luminescens
LQMPVAISIAILPDSPHGREMAEKAYKQGREILIHLPMAPLSKQLLEPDTLQPTMSSEDIDRIIQRAIQKVPYAVGINNHMGSAMTSSLPGMQKVMRSLSGYNLYFLDSVTIGNTQATKAAQGTPVRVIRRNVFLDDVQSEAETRHQLNRAISIARKNGSAIAIGHPHSTTIRALQQMLPTLPADIELVSPSRLLSGKPVGDNPHKWGKLCELNNHRLKSVGZ

SEQ ID NO: 1892 - protein, 359 aa, Photorhabdus luminescens
KYYIHLREHFMKITGIAGLLPSRFVSNQEVIDLVEYYSKEIFHGDLPKTLKLIGKMLNKAGINSRYWLADNEKPMELIEAAFNHALAQANIIKEDIDLLIYSSVARGFIEPANSTFVSKALGLTCRNYDVVDACNGWVAAMDIINSKMKAGEIRHAAIVNMEFIMSQNGPIFPKTFSLNSLSEVAYKFIGCTVGEAATVTIISNESPENFKFNYINRPDLSDLSTISLPDWRLFCNDTDVERIGPTGGKYQVNSHSALLHDHGEKETINLFNHHKISDDIEHIFIHTGSPKTWARLGQKMGIDDKIHHVGQRVGNIATASIPFGIFDAINQGILEKNQLCMGWAGSGGMVFAAMTFKFZ

SEQ ID NO: 1893 - protein, 342 aa, Photorhabdus luminescens
MKALSKLKAEEGIWMIDVPEPELGHNDVMIKIRKTAICGTDVHIYNWDDWSQKTIPVPMVVGHEYVGEVVAIGQEVKGFKIGDRVSGEGHITCGYCRNCRGGRTHLCRNTIGVGVNRAGCFAQYLVIPAFNAFKIPDNISDELAAIFDPFGNAVHTALSFDLVGEDVLVSGAGPIGIMAAAVCKHVGARHVVITDVNEYRLELARKMGVTRAVNVSQENLTDVMAELGMTEGFDVGLEMSGAPAAFRTLLNTMNHGGRVALLGIPPSDMAIDWNQVIFKGLFIKGIYGREMFETWYKMATLIQSGLDLTPIITHRFSIDDFQKGFDIMRSGQSGKVILNWDZ

SEQ ID NO: 1894 - protein, 399 aa, Photorhabdus luminescens
MSASFYQQINEQLEQAHSEGLFKNERIITSAQNADIAVADGSHVINFCANNYLGLANHPELIAAAKAGMDSHGFGMASVRFICGTQDTHKALERKLAEFLGMEDAILYSSCFDANGGLFETLFGPEDAIISDALNHASIIDGVRLCKAKRYRYANNDMQELRAQLEKAKADNARHIVIATDGVFSMDGVIADLKSICDLADEFDAMVMVDDSHAVGFVGAHGRGTHEYCDVMDRIDIITGTLGKALGGASGGYTAARKEVVEWLRQRSRPYLFSNSLAPAIVAASIKVLDMLKEGDALRDRLWKNANLFREKMTAAGFTLAGADHAIIPVMLGDAKLAQEFAAELLKEGIYVTGFFYPVVPKNQARIRTQMSAAHTEEQIERAVAAFTRIGKQLNVIAZ

SEQ ID NO: 1895 - protein, 313 aa, Photorhabdus luminescens
MIIVTGGAGFIGSNIVKALNDEGYKDILVVDNLKDGTKFINLADLDIADYMDKEEFIASILAGDDFGDIDAIFHEGACSSTTEWDGKYMMDNNYQYSKELLHYCLERRTPFLYASSAATYGGRTDNFIEERQYEKPLNVYGYSKFLFDQYVREILPQADSQICGFRYFNVYGPREGHKGSMASVAFHLNNQINQRQNPKLFAGSEGFQRDFIYVGDAAAVNLWFWKNGVSGIYNCGTGRAESFQAVADAVVECHKDKSLTVEHIDFPEHLKGRYQRFTQADLTKLRAAGYDKPFKTVAEGVTEYMHWLNQDKZ

SEQ ID NO: 1896 - protein, 350 aa, Photorhabdus luminescens
MKILVIGPSWVGDMMMSQSLYRTLKALHPNAEIDVMAPAWCRPLLDKMPEVNQALAMPLGHGALALGERRRLGVALRERKYHRAYVLPNSFKSALVPFFANIPLRTGWRGEMRYGLLNDIRTLNKEAFPLMVQRYAALAYDAKPSSAADLPQPLLWPQLDVSDEDIAESTAAFNISDHRPIIGFCPGAEFGPAKRWPHYHYAALAQQLITQKGYQILLFGSAKDHEGGEDIRNSLTGEAREHCINLAGQTSLEQAVNIIAACDAIVTNDSGLMHVAAALNRPLVALYGPSSPDFTPPLSDKAEVIRLITGYHKVRKGDSSHGYHQSLIDIQPEQVITSLEKLLQAENQSZ

SEQ ID NO: 1897 - protein, 322 aa, Photorhabdus luminescens
MRVLLVKTSSMGDVLHSLPALTDAERNLPDVRFDWVVEEGFAQIPGWHNAVDQIIPVAIRRWRKNWFSPEIRAERRLFKEKLKLHQYDAIIDAQGLLKSAFLVTRLAYGPKHGYDRKSIREPLASFFYDCRHTVSKQQHAVERIRELFAVSLGYTKLAAQGDYGIARHFLKQKLENQGDYLVFLHATTRDEKHWPESHWRQLIAEIQPTGMKIKLPWGAEHEYQRALRLAENFPHVEVLPKLTLAQVAQELAGAKAVVSVDTGLSHLTAALDRPNITLFGPTDPGLIGGYGKEQISLKAADGNIKSITPSKVLAHLQENIGZ

SEQ ID NO: 1898 - protein, 286 aa, Photorhabdus luminescens
MSDLICYKRIPIWQKNTLPEMFTERHNTKEGTYACLEIFEGELEFVIFDGDQEETAYFNVQKQPPIIQPQIWHKIKWVSDDIKCQLSFLCEPQYLFYKQNNLSLPHSEIIYLANIISPCKTLDLGAGHGRNTFYLAERGYDVTAVDISQQCINTINVIKEKQQFKNIRTAVYDINSHNITEKYDLIISTVVLMFLQREKITDIIYNMQKQTNKGGINLIVCPIETDFAPYSLLPFKSFLMPGELENYYSDWEIIKYNENPGHLHKTDENGNRIKLNFATLLARKRZ

SEQ ID NO: 1899 - protein, 245 aa, Photorhabdus luminescens
MVDMNTLRMEVMRYNPESDHKPHFITYEIPYDEQTSLLDALGYIKDNLAPDLSYRWSCRMAICGSCGMMVNRVPKLACKTFLRDYPQGMKVEALANFPIERDLVVDMTHFIESLEAIKPYIIGNDRRPSDGPNIQTPAQMAKYHQFSGCINCGLCYAACPQFGLNPEFIGPAAITLAHRYNLDNRDHGKKKRMPQLNSQNGVWSCTFVGYCSEVCPKHVDPAAAIQQGKIESAKDFMIAMLKPQZ

SEQ ID NO: 1900 - protein, 342 aa, Photorhabdus luminescens
LHYFIDLRTIKAIILFYCGHILMTRPAFIITIDTEGDDLWQNHGQISTKNTHYLPRFQHLCERFGFKPVWLTNYEMAMDDLYIEFAKDVIARGQGEIGMHLHAWNNPPLVPLTDDDMRYKPYLIEFPKEQIRAKIDLMTKLLEDKLQIKMLSHRAGRWAFNEYYAELLVEYGYQVDCSVTPRVNWRFTKGDPNGNGGTDYRHFPSYAYFMDLQNIAKEGDSPLLEVPMSIQYKHPPLMNFLKQKYDSLRGKPRSPSVNWLRPKGGNLEQMKKVVQQTLAEGSDYIEFMLHSSEFMPGGSPTFKNEQQIELLYQDLEALFNYLQPQVRGMTLAEYYQWKRLSZ

SEQ ID NO: 1901 - protein, 368 aa, Photorhabdus luminescens
MKGHVLFIIDGLPGGGAENVTIRLCDGLQQRGYDVTLLSLAEKCEYSIPSGIELIIDVDGYRGPFRRQTEICRRAKSMDKVLEKVFLRKGIPTLIVSNLHKTDRIVVQSKVLAGLNVWFCIHGVFSNSYLGNKTGLSRWIKKQKIKWTYNNRNLICVSDAVGKDLKNNLLLTPNEMVTIYNPFNIPDIKEKSLQNNPYSDETYLLHIGRFHRVKRHDRLLEAFAKADIPCKLLIVGHGDEAITQQIKQKIVDLNLQSKVVLTGFLENPLPVIRGAKAVVLSSDSEGLGNVLIESLICDTPIVSTMCPGGVNEIMVGELEKYKSELTTDSLAEKMKFIYHEPPVITEDMYKKFDLDIILAKYLSLMKRZ

SEQ ID NO: 1902 - protein, 377 aa, Photorhabdus luminescens
MKLVRLAIVRQKYRPDGGAERFVSRALEALGNENLELNVITRSWQGDVNPDWHVHLTNPHKWGRISRERGFAKAAKTIWQQEQFDLVQSHERIAGCDIYRAGDGVHQRWLQQRARVLSPWRSKLLFTSRYHRYVMDAEQKMYSAPELKMVICNSEMVKREVMTDFGLSEEKISVIYNSIDNKQFFPATESQRTQLRKAHNLPLQAKCLVYVGSGFERKGLKAAIQAVSATDAYLIVVGQDKEEKKYKQLANSLGCNERIRFMGVQKRTLPFYQLADGLLLPTLYDPFPNVILEAMACGLPVITSMTCGGAEFITSGNNGFVCDALAVSDITEAIQNTPSDHLNNKMSELARTGILGYTPEHLSQQLIGLYERVLSSZ

SEQ ID NO: 1903 - protein, 398 aa, Photorhabdus luminescens
KGKLGFLRKIVLLLYMKVKRIFCSFCTCCGSFFFYLYLYTGNAMSKLQAQFDRILIIKLRHHGDVLLITPVINTLKDNYPAVEIDVLLYKETEPILADFPAVANLFSIDRQWKKQGVKTHLGHEWRLLKRLRHRQYDLVINLTDQWYSAFVTRFTGAKVRIGFDLAKRRSLFWKKCFTNFVPTEHSQFLHIVEQNLSALSLLNLPLINTTVTMSYRQQDKEAVLMLLDKHGVDQKYIVVQPTSRWFFKCWDEKKMSKTINALQSDGWTIVVTSGPDRKEEEMVAKILSNCLKERVISFAGQLTLPQLAALIDGANLFIGMDSVAMHMAAALKTPGIALFGPSKLVFWRPWEAKGEVIWAGDYGDLPDPDDVDTKTDIRYLNVIPSEMVIAAARRNLLZ

SEQ ID NO: 1904 - protein, 426 aa, Photorhabdus luminescens
MLLRLYQVLLYLIQPLIWLRLLLRSRQAPAYRQRWGERYGFCAGKVASGGILLHSVSVGETLAAIPLVRALRHHYPFLPITVTTMTPTGSERVLSALGNDVNHVYLPYDLPGSMERFLNQVNPKLVIIMETELWPNLIFQLHQRNIPLVIANARLSARSAEGYQKVGSFVKTILRSITLIAAQNPEDGERFIELGLKRSQLTITGSLKFDISVTPELAAKAVTLRRQWAAHRPVWIATSTHDGEESIILDAHCKLLKQCPSLLLILVPRHPERFIKAEELTKKAGLSYILRSSDKIPDANIQVVIGDTMGELMLLYGIADLAFVGGSLVERGGHNPLEAAAHAIPVLMGPHTFNFKDICTKLNQANGLITVMDSHSLFTEINSLLTDEDYRLYYGRHAAEVLHENQGALQRLLKLLEPYLPPRSHZ

SEQ ID NO: 1905 - protein, 258 aa, Photorhabdus luminescens
MSDKKRLSVVMIAKNSADLIADCLTSVRWADEIIVLDSGSSDDTCQIARAMGAKVFSNTHWPGFGRQRQLAQQYASGDYIFMIDTDERVTSELRASIEQTLAHIDNNKVYSCARRNLFLGRFMKHSGWYPDRVIRLYARDRYQYNDNQVHESLETHGAPVVILQGDLLHLTCRDLMEFQRKQLNYAKAWAEQRDEQGKQCSYFSIFSHTFGAFFKTWLLRAGFLDGKQGLVLAIVNAQYTFNKYVALWEKRQQKGKNZ

SEQ ID NO: 1906 - protein, 270 aa, Photorhabdus luminescens
MPELPEVETSRRGIEPHLVGNVIQYAVVRNGRLRWPVAEEIMKLSDQLVLSIQRRAKYLLIELANGWIIVHLGMSGSLRILPEERPAEKHDHVDLVMADGKVLRYTDPRRFGAWLWSDDLERCSVLAHLGPEPLSDDFNGFYLYTRSSNKKTLIKPWLMDNKLVVGVGNIYANEALFTAHIQPDRPAQTLTEREAHLLAETIKKVLQRSIERGGTTLRDFLQSDGKPGYFAQELFVYGRAGEPCRICGEQIESIKLGQRSTFFCRHCQYZ

SEQ ID NO: 1907 - protein, 409 aa, Photorhabdus luminescens
LMNMFNIKSRDKRSLWNLSIIGIYIALVYLPDITRYKNLVIVLIGITALTYLVTDFRQVMHSMRNSLFLSIMLFIVAMFYSVAISVDPALSFQEMNKPILNGLLLFSFTFPVVLYKENKESIAKMILYSFAIGMLAICLTDVGKYIINYNKGEMPFTNFNHREFSYGFIFYFPILLCTWALWKKHTLVSWLILAAASAISLFLLLGTLARGAWVAIAVITAFIIIINREWKLTIIVGLILSFSVVLSHTTIIANENTKLLFWKLTQTDSSHRYKNGTQGTAFELILENPIKGYGYGNKVYHKVYNERVADYPDWIYRTSIGPHNILLALWFAGGIIGLITTLLMTFSALYTSSYIISRNNGVIKQASIILLTGFIGLFIVRGAFENTYINEIGILFGLMIALYQQKNDZ

SEQ ID NO: 1908 - protein, 393 aa, Photorhabdus luminescens
IMKIAYIDPYPVPDYRVASLQILQNVDAFARQGACVYLVTPEGKNTAEEVLGRSLSPSARLISLRNIRRKWYFPFNTQKMFYFQVSHWLKRNEVDAVFTRNLKMAKYLLCEHPEIPLFFESHEIFAQSFKESHDLSKNKNQRKYQKLREIEHFVYRRSRITFVLTSLLRDDIISEYNVSTPIVVAPDGVDMLAVESMSLDKRVSDDGELPTQILYLGSLHRWKGVPTAIKAMAYLENAVLNIAGGEPGQIQQLRQIAQQMGVGDKINFLGFIQPKLRFQIIADNDICLLPLTKTSIGSRYTSPLKLFEYMAMDKPVVISDFLSIRDVADENAVSFADSENAESFAQQIQLLRDNPEKVKSQVSYAKMLVTERFNWEQRAKLIMQTISKDISAZ

SEQ ID NO: 1909 - protein, 381 aa, Photorhabdus luminescens
KLSCQEEKMKIGLVDVTVTMSYGGIQTAVWELAKALTDAGHEIHIFGGKGDIQPELNGRAIQVHTFPFIPREKVINIGRRFQRIIERYSFARHARDTVVTEDFDWVILTKPFDFFWPRMMPKESRTKFCYMSGGTSFFKGDRKLSKRISAWVACSHFNAWQIQHHFKQFPKVIYNGVDINKFRPIDSSVRTRLGISDKTFLLTFAGRLVGWKGMHVAIDAMAQLQDKDVKLLIIGSGEDLKHLEKRVAVLRLKKQIIFHPPVGHDQLPEYYAAGDAGIFPSIGDEAFGITIAEAMACGRPVIASYIGGIPEVVGNENNSGILVTPGDASAIADAVNFLLSQPDRGQKMGKAARQRIETMYTWEHSANRLLKAINNEDCLYZ

SEQ ID NO: 1910 - protein, 295 aa, Photorhabdus luminescens; identical to SEQ ID NO: 1209

SEQ ID NO: 1911 - protein, 346 aa, Photorhabdus luminescens
LDNCLMQIKNILVIVIARFGDTLLVTPVIRALKQKWPGANIDVMAHKRTKQILENISDINKLTAFSKGKAKWCGWFTRKHYDLALVYSDDKPLLQYAKRKSHLTVSFSDKSALQSGWLTVEKPKGLMPAQQERAMLASAVDVEVNDWRLNYCVSEKELHFAEGFIRQYHLENKLLIGFQLQSFPAKAYRDWPVEHFYQLAQHICGRYPQSHIMLLGSADGKIAAQSLAKRLGAEKCTSLVGRLTMRQNAAIMSQLDLYVGVDTGPTHLAGALGIPMVAMYHSFHPGRFLAPQQHSHLVVIEHPVHYMQATRKDSMSAISVEQVWQATQKLLETQLSGRKDENRFGZ

SEQ ID NO: 1912 - protein, 380 aa, Photorhabdus luminescens
AEYRNKMAKEKLNILHTESSCGWGGQEIRILTESQGMIKRGHKVVIVCCPSSNIYREAKSYGVPAVALPIEKKRLSCLLAMRRWLKKEGRQFDVINTHSSTDAWLVAVACATLRHMPPMVRTRHVSTHVSNSISTRWLYLKACWHIATTGEKLRQHLHANNRYPLQHMTSVPTGIDLDRFRPEDKKVCRQRIGIQNKPTLGVVATMRTWKGHRYLLESWKVLHQKYPDWQLLFVGDGPQRKSLEPLVKREGLSNSVIFLGNRQDVPDCLNAMDLFALPSFGNEGVPQGIMQAMACGIPVVSTSVGAITEAVVDGETGYIVEPRNTELLTKSLELLIHNNELRLQFSHSSLERAMALFGMDNMLDKMENIFFHSIKGKKRZ

SEQ ID NO: 1913 - protein, 254 aa, Photorhabdus luminescens
YSPLYLRRGILFVSGETEQGDEYMGIDVAENTGEIYSNLAPREKLLAYGSVSLTDAELLAIFLRTGTRGLPVLRMAEFLLKEFGSLYHLLSADYDTFCSHKGMGLAKYAQLQAIAELAKRFFSSQFMHEDIMSSPSVTQEYLQNLLSGRDREIFVVLFLNNQNRVICHEEMFKGTINKVEVHPREIVRSAIKVNASSVILAHNHPSGHAEPSLADKIVTDKVIDACNLVGVKVLDHLVIGRQCCVSFAERGWIZ

SEQ ID NO: 1914 - protein, 428 aa, Photorhabdus luminescens
LLNSVISCDKILAPCNLYIRTIMMAGLSGKQIVLGISGGIAAYKTPELVRRLRDRGAQVRVVMTPAAESFITPMTLQAVSGYPVSDDLLDPAAEAAMGHIELGKWADLIILAPATADLLARLVVGMANDLVTTLCLASPAPIAAVPAMNQQMFRAQATQHNLKHLEERGVLLWGPDNGSQACGDVGPGRMLNPMAIVELAEQHFQASQDLAHLKLAITAGPTREALDPVRFISNHSSGKMGFAIAQAAATRGAEVTLITGPVNLPTPPGVKRINVTSALEMNEQAQAVAGSQNIFIGCAAVADYRAKQIAEEKIKKQGDEITFTLIKNPDIVANVAAMQENRPFVVGFAAETQNVEEYARKKLNQKHLDLICANDVSLTGHGFNSDTNALHLFWHEGEIRLPHSNKLLLSHHLLDEIVRRYDEKNRRZ

SEQ ID NO: 1915 - protein, 200 aa, Photorhabdus luminescens
MAENENTKKRNRREEILQALAHMLQSSDGSHRITTAKLAANVGVSEAALYRHFPSKTRMFDSLIEFIEDSLISRINLILQDEKDTITRIRLILVLILGFSEKNPGLTRIMTGHALMFEQNRLQGRINQLFERIEVQIRQVLKEKKLRDGQGFSYDESLLASQLLAFCEGMLSRFVRSEFHYRPTQEFEARWPLLLAQLQZ

SEQ ID NO: 1916 - protein, 214 aa, Photorhabdus luminescens
MKAYQREFIELALKKQVLKFGEFTLKSGRKSPYFFNAGLFNTGRDLALIGRFYAAALLDSGIQCDLLFGPAYKGIPIATTTAVALAEHHDIDMPYCFNRKEAKDHGEGGTLVGSPLKGNVVLVDDVITAGTAIRESMEIIKQHNATLAGVMICLDRQERGNGEISAIQEVERDYGCKVFSIITLNDLINYLSGQPEMKDHLDAVKAYRAQYGIZ

SEQ ID NO: 1917 - protein, 243 aa, Photorhabdus luminescens
MRPTGRAAEQVRPITITRHYTKHAEGSVLVEFGDTKVLCNASVEEGVPRFLKGQGQGWVTAEYGMLPRSTHTRNAREAARGKQGGRTMEIQRLIARSLRAAVDLKKLGEYTITLDCDVIQADGGTRTASITGACVALVDALNKIVEAGKLKESPLKSMVAAVSVGIVDGEGRCDLEYVEDSAAETDMNVVMMEDGRMIEVQGTAEGEPFSHDELLSLLALAKGGLEDIFDAQRNALKQNALKZ

SEQ ID NO: 1918 - protein, 288 aa, Photorhabdus luminescens
MIRSMTAFARRDIKSEWGNAAWELRSVNQRYLETYIRLPEQFRSLEPVIRERIRSRLTRGKVECNLRFELDSRSQGELILNETLAKQLVNAANWVKQQSNEGEINPVDILRWPGVMAAEEQDLDAINTQLLQELDTTLDAFIQSREAEGNALKIMIEQRLDAVTEEVGKVRQQMPEIMQWQRERLQTKLEEAQVQLENNRLEQELVLLAQRLDVAEELDRLDAHTKETRNILKKKEAVGRRLDFMMQEFNRESNTLASKSINADITNSAIELKVLIEQMREQIQNIEZ

SEQ ID NO: 1919 - protein, 394 aa, Photorhabdus luminescens
MPKGFSFKDTFTPIQRKESLIGLLGIKDIEKFESLLRDGVENAYYIKPPIKKKNGGERIVYAPNRMLKSILRKINNRIFNQINFPDYLYGSIPDKENPRDYILCAHQHCKAKILIKLDIENFFPTMKTKFVFNIFKDLFKFSDEVSNILTKLTTYDGFVPQGAPTSTYLANLYFYDCEPNKVNYLRSLGFRYTRLIDDITVSRLKKEGDWKFVETIISEFITQKELSVNKDKTQLLSANSPQSFKVHGLCIEETTPRFTKNERINIKTQVKRVVKTGYNRDNIRMQKNYHDVYFSVKGKITKLKRVNCPDYPLLKKLLAKHCDPLPEHKEIKRINRVISNLSKDHATFGSTERYRSRYFQVIFRLEILKKLYPVEANEFKARLKLISPIKNENZ

SEQ ID NO: 1920 - protein, 318 aa, Photorhabdus luminescens
NMSLDVAYSIELNEYIDPDRAYDLYWSGLITNKKLFICPGEDCSAQVTCANLDEDMQNMRVVPHYRIYGKHHPNCEIERKIPLKILSVIENAKQGEKKTLDQSIVDSFILHRPDSYYESKKKDDNKNHGNKRNKYLSKSHALNLKEIGNIGKVYSVRTIVSRYIRYIKDNTLINRKLNISGMDIPYSGVFKCIWEQKIDSLPEYGIIYYGWAYIDKYEGKGYRIKFKKKIKNSHGELLQTTCFISKKLIDKYHVKKLVIKRLSKIIQTQKSTAFVFIYGRPEIIRSKINNKEYVNFYVDNLDYIDINVDNPLPKRKVZ

SEQ ID NO: 1921 - protein, 343 aa, Photorhabdus luminescens
MAHIITPKIIIREDWLKQLTDVITDPDELLQLLSLDKHPTLTKGSGARRLFPLRVPRAFVTRMQVSDPNDPLLLQVITTPEEFTLTPGFSTDPLDEQRSAVPGLLHKYRNRALLLVKGGCAINCRYCFRRHFPYEDNKGNKRNWQQALDYIQQHPELDEIIFSGGDPLMAKDHELDWLISNLEKISHIKRLRIHTRLPVVIPARITTTLCDRLAQSRLQVIMVTHINHANEIDQSLRNSMILLKQAGITLLNQSVLLRGINNHSDTLADLSNALFDAGILPYYIHVLDKVQGAAHFMVNDEEAKGLIRELLTKISGYLVPRLAREIGGEPSKTPLDLGLRQNZ

SEQ ID NO: 1922 - protein, 314 aa, Photorhabdus luminescens
  misc_feature (304)..(304): Xaa can be any naturally occurring amino acid
MTWQPDAPFNAIPLLPPTVKVMESIAVLKACIPARAALAELKQAGELSPNQGLLINLLPLLEAKDSSEIENIVTTSDKLFQYAQEDSLADPATKEALRYRTALYEGFIQLTRRPLCTNTAIEVCSRLKAVDMNIRKVPGTTLSNQATGEIIYTPPEGESQIRDLLSNWEQFLHAEDGIDPLIKMAIAHYQFEAIHPFTDGNGRTGRIINILYLIEQQLLTLPILYLTCYIVQHKSDYYRLLSQVTAAGKWEEWIIYMLTAVEQTAKWTTDKIAAVRELIEHTSEYIKQGLPKIYSHELVQVIFXQPYARISNWZ

SEQ ID NO: 1923 - protein, 413 aa, Photorhabdus luminescens
VLRGVVKMSALLPGWKRKTALFLSAQTISLLGSSIVQFSIVWYITLSTSSGEMLAISVLCAFLPQVLISLFAGVWADTYNRKWLSIASDALIALVTLGLAISFMLGFKSIELLFVALIVRSFGTGIQMPAVNAIIPQLVPKEKLLRVNGINTSLTSLMMLASPAISGFLYSQTSIENIFLVDVTTAIIGISIVAFIPIPKIVSGSMPDNKFQAILAGFRYLQENKLIRNLLIFLICVCFLVSPAAFLTPLLVNRTFGEEPWRLAINEMTFSAGAVLGGLLISFWSEYKNKMRITAVACALFGIFMIALGNAYWFPFYLVLNIFLGMVTPCFNAPITAVFQERVEPEMMGRVFSLVQIAMSCSLPLGMVLFGPIADYISIQSLLMISGGLILLTGTLFFMFNGEVSRESSSAVZ

SEQ ID NO: 1924 - protein, 311 aa, Photorhabdus luminescens
EESLMAGLLPITVIAAAAGDIVLSLPRLPRSGADQEAKEIDRQIGGSGFNVARALVRLQIPVINGIPVGNGCWGEQITKEMQDLGLEVTLTNPYLDNGWCLAMVEPDGERSFVSVSGCEVDWSTAMLSSIVLPERGYIYSSGYVMASKSTAILCDWLLASPSGQTLLLDFGPRLPEIDPTFLDALPADRTILTLNRDEVAILCGEGDPAVQASRYSSERKITIICRLGSQGTWICLPDRKPEYVAAYKVKVVDTIGAGDAHSGGMLAGLSQGMSLRDAVELGNRVAAIVVNRSGAAGAPTIKELEEFVFEZ

SEQ ID NO: 1925 - protein, 297 aa, Photorhabdus luminescens
QLLKTYYLFMSINITAILHNYNYQLMKHLSILRITFTGNPTLKTHIIIQSAKQRPDLKNATDELIYNNWPLFMQNSPVTYEHWNKLFKSDFSRFQQFAILQQGEKQRLIGVANSVPFPWEGDSLEQLPDNGWDEVFRRGMFARGKKVTKMLSALSVTVSPEFRGKNLPALLISSLKQAAIEEGLKGLVVPVRPTLKQNYPLQDFVQYCRWKNDNNEPFDPWIRTPWCLGAKIIQPAMHSMSINATLDKWQEWTGMKFLQSGQYIIPGGLGPLVVDVQQQMAYYIEPNLWMFHNLHAZ

SEQ ID NO: 1926 - protein, 296 aa, Photorhabdus luminescens
YRLFFPHNYCVVTLLGTHLMYNVKSGKLLPFGVIEGVTRTNVQQKHHFDTLKVDWIAEEVPVALVYNGISHVVMMASPKDLEYFAIGFSLSEGIIESQHEIRSIDIVAHCRGGIELQIELSSRRFAGLKERRRNLAGRTGCGICGAEQLSDIFRPISPLPFTQTFSLNQLDYALSQLTSVQDVGALTGCTHAAGWINPEGKLLGGCEDVGRHVALDKMLGMKAKTGWQQGAVLVSSRASYEMVQKSAICGVEILLAVSAATSLAVEIADRCHLTLVGFCKPGKATIYTHAERLISZ

SEQ ID NO: 1927 - protein, 196 aa, Photorhabdus luminescens
MQVSRRQFFKICAGGMAGTTVAALGFAPTAALAQTRNYKLLRARETRNTCTYCSVGCGLLMYSLGDGAKNAKATIFHIEGDPDHPVNRGALCPKGAGLVDFIHSESRLKYPEYRAAGSDKWQRITWDEAFDRIAKLMKADRDANFIKTNQEGVTVNRWLTTGMLCASAASNETGYLSQKFSRALGMLAVDNQARVZ

SEQ ID NO: 1928 - protein, 820 aa, Photorhabdus luminescens
HGPTVASLAPTFGRGAMTNHWVDIKNANLIVVMGGNAAEAHPVGFRWAMEAKIHNNAKLIVIDPRFTRTASVADFYTPIRSGTDIAFLSGVILYLLTNDKINHEYVEAYTNASLIVREDYSFDDGLFSGYDAEKRQYDKTSWNYALDENGFAQRDITLKHPRCVWNLLKEHVSRYTPDVVSNICGTPKEDFLKVCEYIAETCVKDKTASFLYALGWTQHSVGAQNIRTMAIIQLLLGNMGMAGGGVNALRGHSNIQGLTDLGLLSQSLPGYLTLPSEKQADLQTYLQANTPKPMRPGQVNYWGNYPKFFISLMKSFYGDNARKDNDWGFDWLPKWDKGYDVLQFFDMMSKGEVNGYICQGFNPVASFPNKNKVVGALSKLKFLITIDPLNTETSTFWQNHGEFNEVDSSKIQTEVFRLPCCCFAEENGSIVNSGRWLQWHWKGADAPGEAIGDGEILSGIFKRLRDMYRTEGGASPEPMLSMTWDYFNPDNPTSEEVAQESNGRALVDLIDANGNVIVKQGQQLTSFAQLRDDGTTASGCWIFAGSWTPEGNQMARRDNADPSGLGNTLGWAWAWPLNRRILYNRASADPQGKPWDPKRQLLTWDGTKWGGVDTADYSVAAPETDVGPFIMQPEGMARLFAIDKMAEGPFPEHYEPFETPLGTNPLHPNVVSNPAARVFKSDFEAMGKPDKFPYVGTTYRLTEHFHYWTKHALLNSIIQPEQFVEIGEKLAEKKGIKHGDTVKVSSNRGYIKAKAVVTKRIRTLNVHGREVDTIGIPIHWGFEGAAKKGFIANTLTPFVGDANTQTPEFKAFLVNIEKVZ

SEQ ID NO: 1929 - protein, 310 aa, Photorhabdus luminescens
MSLQTQDIIRRSATNSFTPAPRVRDDQEGVAKLIDVTTCIGCKACQVACSEWNDIRDEIGHNVGVYDNPADLTAKSWTVMRFSEVEENGKLEWLIRKDGCMHCADPGCLKACPAEGAIIQYANGIVDFQSEHCIGCGYCIAGCPFNVPRINKEDNRVYKCTLCVDRVNVGQEPACVKTCPTGAIHFGSKKAMKDLAAERVSELKGRGYENAGLYDPDGVGGTHVMYVLHHANKPQLYHGLPDNPAISPTVTFWKGIWKPLAAVGFAATFAASLFHYVGIGPNRVTEEDEENARRDTESSQKSANGEEQRZ

SEQ ID NO: 1930 - protein, 214 aa, Photorhabdus luminescens
MKSRKDIIIRHSPVERINHWAVVLCFFFTAISGLGFFFPSFNWLMNIFGTPQLSRILHPFVGSVMFILFIFMFFRYFKHNFIDKDDIIWLKNIRKIVKNEEAGDIGQYNLGQKGVYWSITIFLILLAVSGVIIWRPYFADLFSIPIIRIALLIHSMSAIGLILTIMVHAYAAFWVKGTLRAMVEGWVTRGWAKKHHPRWYREIMKQEQQEEKRZ

SEQ ID NO: 1931 - protein, 399 aa, Photorhabdus luminescens
RITGINRLLRYPIYHHVISWILDKILNFFIIYTLWISRCFATARERIPGSIDNDVTGVSECSQQRGNLKDNGYTDKKDGSMLTELIASNRRSAAIHAFVDTGLSTHFKDGIYVDISELSRKSGVNYARFSRLCDFLVEMGVLVSNDNKFRLSDECHVFANPESFESFMIKLEICSHYSNAWLMYGKSLFEDDGKSAFEMAHGRPFFEYLDGNKFLKSNFDALMTRVSNLIVEKLLGIYDFNQHNRILDVGGGEGELLVRISEKVKGKHYAVLDRYSELPVSDNIDFINGNFLNSIPSGYDLYILKNVLHNWSDSDSILILENFRKAMDKNSSLLLINMVKEPEFSRSFDILMDVLFLGKERSFTEFEYLANQAGLVVQETKVIDQSYSPYSFIKLQIKZ

SEQ ID NO: 1932 - protein, 303 aa, Photorhabdus luminescens
MHKFNRSTEMAVFVQVIESEGLSAAARKLDMTPSAVSKLINRLEMRLGVRLLNRTTRKLQLTAEGSVFYERSVRILEDIIAAEQEANQGTALRGRIRVNCHVAFGKHCLMPLLPDFLQRYPEITLDISLCDLIVDLLDDRSDVAIRTGPLDDSCFMVRKLGASRMVVVGSPSYLERMGIPSMPSDLGRYNRLGFGFTRHMKAWPFIDSEEWGQQLPSGNLLLGDGETMRKAAIAGLGLARLARFHVDADIRSGLLLPVLENYNPGDKEEIYAVFVGQGRQLPSRVRVFLDYLTERIHIGDGWZ

SEQ ID NO: 1933 - protein, 330 aa, Photorhabdus luminescens
NTSFLYDIQDNAMLIDLITSCRKSTVIYAFVDMGLSVHFKDGACVNISELASQYGLDHSRFSRLCEYLIKIGVLVSCNEGVALSEECSALADPESMESLMIRCEVSPEYWKAWSMYSKSLYENNSKTAFEIAHGKPFFEYLDHHELFRSNFDSFMSKNSDKIIEKLLDIYDFSQHNRILDVGGGEGNLLIRINEKIKGKHYAVLDRYNETPVLEDIEFINGDFFKLVPSGYDLYILKNVIHNWSDSNAILILENCRKAMDDNATILLIGTVKKLKLEIIDSTDILMDVLLLGKERYLNELEDLAHQAGFVVKDIKEINEKYSIIELGVKZ

SEQ ID NO: 1934 - protein, 301 aa, Photorhabdus luminescens
MKRPDYRTLQALDAVIRERGFERAAQKLCITQSAVSQRIKQLENLFGQPLLVRTVPPRPTEQGQKLLALLHQVELLEEQWLGNEQGTDTPLLLSLAVNADSLATWLLPALHPVLADLPIRLNIQVEDETRTQEQLRRGEVVGAVSIQPQPLPSCLIDKLGALDYLFVASPEFATRHFPNGVTRSALLKAPAVAFDHLDDMHQAFLQQNFELSPGSVPCHIVNSSEAFVQLAKQGSTCCMIPHLQIDQELKNGELIDLTPGLCQRRMLYWHRFAPESRTMKKVTDALLKLGRQMLRQDDINZ

SEQ ID NO: 1935 - protein, 241 aa, Photorhabdus luminescens
VKLKSLGLAAMLSAGVPLAAQAADLPGVPHVITSGNAVVKAEPDIATLLINVNIAAKDASGAKKQVDELVAKYFDFLKNHGIEKKDIDAANLRTQPDYEYDNVSGKSVLKGYRAIRSVEVKVRKLDQLNDLLDGALKAGLNEIVSVQFGVDNPQKYRDEARQKAIENAIEQAGALAKGFNSKVGSIYSINYRAPEVIDHMKYRNTDVMMSGGAAAGVGETYQQDSINFSDQVDVVFELKPZ

SEQ ID NO: 1936 - protein, 208 aa, Photorhabdus luminescens
MLSTFVQGFFLSAAMILPLGPQNAFVMQQGSRRQFHLMSATLCAISDGFLIGVGVFGGSALLSQSTLLLQFVTWGGVAFLFWYGWGALRVVLFANVELAQVNNSVKNRWRVVAIIFAVTWLNPHVYLDTIVVLGSIGGQLSSDLRPWFTFGAASASVSWFFSLSLLAAWFSPVLSKPLSQRIINGFICIIMWYIAWQLAKQGLLISDZ

SEQ ID NO: 1937 - protein, 446 aa, Photorhabdus luminescens
KPSTKITLKREVKMNEKIEVRNIDVNSDMSTNYTKKRPKIPQELYAYEDIKKIPIQDILSDEEIEIYENEMQKKIKAKPLGSNKLVVVTKATRLCNLRCSYCHSWAEGKNNTMSFSSLVAMTKRILDIPDLIRIEFVWHGGEVTRLRPEFFIKFIWLQQHIKRDNQFVTNAIQTNAVNISEKWIALIKRLNISVGISLDGHPEINDSRRVDLKGVGTSKRIEKTIQTFRNNNIKYGGLVVVDRLILEANKRELLSYFARINLNDLVFLDIVPDNRLLPGESPGDSYVNYFEYMDFLSELFLIWWKEYKDTINIPLFNSFVGVLKGASNVLMSCYWSEKCHQEVVTIEPNATVSACDKYVGSENFYYGSLLDNDLKTLLENSIHYEKSEKEEITNNNNMKNCQWFHLCHGGCPQTRISNRKHNKMYSDILACCGTDKLLNTISGVLZ

SEQ ID NO: 1938 - protein, 291 aa, Photorhabdus luminescens
MEDINLSGGINEATSWLINHQDLIIQYLVNAVAAILILVLGLMAAKLISKGVKRVMSLRGIDVTVSDFLAAVVRYLIIAFTIIAVLGKLGVQTASVIAVIGAAGLAVGLALQGSLSNFAAGVLLVAFRPIRAGEYVILGAVEGTVVQVQIFSTTLRTADDRIVVIPNGKIIADNVINTSREPNRRTQIMVGVAYNADIDEVKKVLGNVIAADNRIQHEKGVTIRLHEMAPSSLNFIVRVWTTNGDAWEVYWDLMEDFKRTLDKHNISIPYPQMDVYLHQNQAVSQNRVSDZ

SEQ ID NO: 1939 - protein, 866 aa, Photorhabdus luminescens
VLEEYRKHVAERAAQGVVPKPLDATQAAALVELLKSPPKGEEDFLLDLLINRIPPGVDEAAYVKAGFLAAIVKDETISPLITPEKAVELLGTMQGGYNIHPLIDALDNEKLAPIAAKALSHTLLMFDNFYDVEEKAKAGNPQAKQIMQSWADAQWYLERPELAEKITVTVFKVTGETNTDDLSPAQDAWSRPDIPLHALAMLKNAREGIVPDQAGVIGPIKQIEELNKKGYPLAYVGDVVGTGSSRKSATNSVLWFMGDDIPFVPNKRGGGVVLGGKIAPIFFNTMEDAGALPIELDVNKLNMGEVIDIYPYKGEVRHHETNELLAEFELKTDVLLDEVRAGGRIPLIIGRGLTSKARESLGLPPSDVFRQAKAVEESRRGFSLAQKMVGRACGTVGIRPGEYCEPKMTSVGSQDTTGPMTRDELKDLACLGFSADLVMQSFCHTAAYPKPVDVTTHHTLPDFIMNRGGVSLRPGDGIIHSWLNRMLLPDTVGTGGDSHTRFPIGISFPAGSGLVAFAAATGVMPLDMPESVLVRFKGQMQPGITLRDLVHAIPYYAIQQGLLTVEKKGKKNIFSGRILEIEGLPDLKVEQAFELADASAERSAAGCTIKLDKAPIIEYLQSNIVLLKWMIAEGYGDRRTLERRVTGMENWLKDPQLLEADADAEYAAVIEIDLAEIKQPILCAPNDPDDARLLSDVANSKIDEVFIGSCMTNIGHFRAAGKLLDQHKGQLPTRLWVAPPTKMDAAQLTEEGYYSIFGKSGARVEIPGCSLCMGNQARVADGVTVVSTSTRNFPNRLGTGANVYLASAELAAVASLLGRLPTPEEYQQFMDKVDETAEDTYRYLNFDQLNQYTEKADDVIFQTTVZ

SEQ ID NO: 1940 - protein, 386 aa, Photorhabdus luminescens
IDRFKKLFLFLRFRIWQISNTAFKDFSSQTYRLMQRWVSMDSQCDIFRITTHFNCQTDFTQQFTTVSTHNRTTDNTITFFIENQFGHTVSTIRSNCAARSCPRESSRFIANAFLFRFFLSQANPCNFWFSVSNGWNHFWIKVVFLTRNNFRRNVTFMNTFMRQHRLTNDVTNSKDVRYIGAHLLINMDKAAVINVNTGFTCIQHFTVRYTTDSNQNRVITLWFCWCVFAFHRDVDTIFFGFYHGNFGFQHQIELFADTFGKDFHHVFISRRNNLIQHFNNINLRAQSVVNGSHFQTDNTTAHDQQAARNRSQRQSIGRIPNARVIMRNKWQLDRTGARGNNGVIKINRCCATFTFNNQRVRPCKFTKTINHFNFAAFSHTSQTTGZ

SEQ ID NO: 1941 - protein, 477 aa, Photorhabdus luminescens
MMSTEIKAQVVVLGAGPAGYSAAFRCADLGLETVLVERYSTLGGVCLNVGCIPSKALLHVAKVIEEAKALADHGIVFGEPKTDIEKVRVWKEKVINQLTGGLAGMAKGRKVKVVNGFGKFTGANTLVVEGEGGATTINFDNAIIAAGSRPIQLPFIPHDDPRVWDSTDALALTTVPGRLLVMGGGIIGLEMGTVYHALGSQIDVVEMLDQVIPAADKDVVKVFTKRISKQFNLMLETKVTVVEAKEDGIYVTMEGKNAPAEPQRYDAVLVAIGRVPNGKMLDAGKAGVDVDDRGFIHVDKQMRTNVPHIFAIGDIVGQPMLAHKGVHEGHVAAEVISGKKHYFDPKVIPSIAYTEPEVAWVGLTEKEAKEKGISYETATFPWAASGRAIASDCADGMTKLIFDKESNRIIGGAIVGTNGGELLGEIGLAIEMGCDAEDIALTIHAHPTLHESVGLAAEVFEGSITDLPNAKAKKKKZ

SEQ ID NO: 1942 - protein, 280 aa, Photorhabdus luminescens
CRSRFCTFNRVFHVSLNIFTQNTAFTPCTFHFSQVNAEFTRQATDHRRCMNISAIFSEIIFVFFCEASASNNRYCCFLWFSSWSWRRGNRSNRCCTRDFEYHDHRTGFHFITGFDLNFFNDTGEWRGDFHRGFIALYGDQRLFSFHCIANFHHHFGNFDLITADIRYMNLHSRRSYGFWLCHTRRQCYRCWRFRWRSFYSTFRGIKNHNQFVGFNFIANRNDDLFNNTRLWGWNFHRSLITFHGDQRLLSFHCIANFHHDFGDFNFVRTDIRYLNFDSHZ

SEQ ID NO: 1943 - protein, 549 aa, Photorhabdus luminescens
MAAKDVKFGSDARVKMLRGVNILADAVKVTLGPKGRNVVLDKSFGAPAITKDGVSVAREIELEDKFENMGAQMVKEVASKANDAAGDGTTTATVLAQSIVTEGLKAVAAGMNPMDLKRGIDKAVVAAVAELKKLSVPCSDSISIAQVGTISANSDETVGKLIAEAMDKVGKEGVITVEEGTGLEDELDVVEGMQFDRGYLSPYFINKPENGSVELENPYILLVDKKISNIRELLPVLEGVAKASKPLLIVAEDVEGEALATLVVNTMRGIVKVAAVKAPGFGDRRKAMLHDIAVLTNGNVISEEIGLELEKATLEDLGQAKRIVINKDTTTIIDGVGEEDAIKGRVSQINQQIKESTSDYDREKLQERVAKLAGGVAVIKVGAATEVEMKEKRARVDDALHATRAAVEEGVVAGGGVALVRVAAAIVGLKGDNEDQNVGIRVAMRAMEAPLRQIVDNSGEEPSVIANSVKAGEGNYGYNATTEQYGDMIAMGILDPTKVTRSALQFAASIAGLMITTECMITDLPKDDKADLGAAGGMGGMGGMGGMMZ

SEQ ID NO: 1944 - protein, 533 aa, Photorhabdus luminescens
MAIKIKVPDIGADEVEVTEIMVKVGDTVEAEQSLITVEGDKASMEVPSPQAGVVKEIIIAVGDKVETDKLIMIFDSAEGAVEAAPAEAPAAVTLSSRMAEPEPVASAAMKVHVPDIGGDEVEVTEVMVKVGDAVEAEQSLITVEGDKASMEVPAPFAGIVKEIQIKAGDKVETGSMIMVFEVAGAAPVAPVASAPAPTAEPEKAAVPVIASRSFAEEDKNDFAENSAYVHATPVIRRLAREFGVNLAKVKGTGRKGRVLREDVQAYVKDAVKRAESAPASAGGGLPGMLPWPKVDFSKFGEIEEVELGRIQKISGANLSRNWVVIPHVTQFDETDITEVENFRKQQNQEAEKKQLGVKITPLVFIIKAVAKALEEMPRFNSSISEDGQKLTLKKYINIGVAVDTPNGLVVPVFRDVNKKGIIELSRELTEMSKKARAGKLTASDMQGGCFTISSLGGIGGTAFTPIVNAPEVAILGVSRSSMKPVWNGKEFVPRLMLPLSLSFDHRVIDGADGARFITFINHAMSDIRRLVMZ

SEQ ID NO: 1945 - protein, 888 aa, Photorhabdus luminescens
MSDILKNDVDPIETRDWLQAIESVIREEGVDRAQFLIDQVLNEARKGGVNVAAGAANRDYINTIAVEDEPAYPGNLDLERRIRSTIRWNAVMTVLRASKKDLELGGHMASFQSSATMYEVCFNHFFRARNENDGGDLVYFQGHISPGVYARAFLEGRLTEEQMNNFRQEIHGNGLSSYPHPKLMPEFWQFPTVSMGLGPIGAIYQAKFLKYLEHRGLKDTSKQTVYAFLGDGEMDEPESKGAITIATREKLDNLVFVINCNLQRLDGPVTGNGKIVNELEGIFDGAGWQVIKVLWGDRWDELLRKDTSGKLIQVMNETLDGDYQTFKSKDGAYVRQHFFGRYPETAELVKDMTDDQIWALNRGGHDPKKVFAALKKAQETTGKPTVILAQTIKGYGMGDTAEGKNIAHQVKKMNMEGVRHFRDRFNVPVADDQLEKLPYVTFDKDSEEYKYLHEHRAALGGYLPSRRTHFEEKLELPTLEDFGALLEEQNKEISTTIAFVRALNVMLKNKSIKDRLVPIIADEARTFGMEGLFRQIGIYSSNGQQYTPQDREQVAYYKEDSKGQILQEGINELGAGSSWLAAATSYSTNNLPMIPFYIYYSMFGFQRIGDLCWAAGDQQARGFLIGGTSGRTTLNGEGLQHEDGHSHIQSLTIPNCISYDPAFAYEVAVIMHDGLERMYGEKQENIYYYITTLNENYHMPAMPQGAEEGIRKGIYKLESLEGSKGKVQLLGSGSILRHVREAAQILANDYGVGSDVYSVTSFTELARDGQDCERWNMLHPTETPRVPYVAQIMNEAPAVASTDYMKLFAEQIRNFIPASEFRVLGTDGFGRSDSRENLRHHFEVDASYVVVAALGELAKRGEIAVSVVEEAINKYNINPEKVNPRLAZ

SEQ ID NO: 1946 - protein, 255 aa, Photorhabdus luminescens
MAYNKIRQPKLSDVIEQRLEHLILEGSVRPGEKLPPERELAKQFDVSRPSLREAIQRLEAKGFLFRRQGGGTFVQSNLWQSFSDPLVQLLAGHPESQFDLLETRHALEGVAAYYAALRGTDEDFERIRQYHLVIQQAQESGDVNAESEAVLQYQLVVAEAAHNVVLLHLLRCMAPMLEQNIRQNFEFLYTRREMLTAVSDHRAKIFAAIMARQPEKAREASHRHLAFIEDVLLDLSREHTRRERSLRCLQQHQEZ

SEQ ID NO: 1947 - protein, 266 aa, Photorhabdus luminescens
GHHSSGIGQRSPTLADATPNQTHSGDSVKRLMTAMMMAGLLGCPITSTQAERVGIDATRIIYRADSYAATALLRNSSKEAVYLMQVTVSSIPDGSKTAPFLVTPPLFRMEPGSQNQVRIIKTGQALPADRESLFWFTAQAIPLSTESNNLSSKQSSGGVQVLANTIKLMYRPSGLPVAPEKGFGALRFKTTAEGITITNPSPYYITFTSLKVGGQELMTKQQKENMVSPFSTLFLPLKGVHYPAKVSWTVINDLGGGSTYQGEIPZ

SEQ ID NO: 1948 - protein, 330 aa, Photorhabdus luminescens
AMATKTSFPPALREDNQHAPGQPGGFWPRPVYLCLLCSLTATTLPASAREYFNPMFLMGADGEHSHVDLLAYENARYVAPGRYLVDVYMNQNKVDSREIEFRLVNGHLQPVFTVAQLERYGVNTRELPAFQGKADDSPITELTKQIPHARVTLDFVRLRLDLSVPQSAMQPRYSGTVNPSLWDPEIPAFLMNYTVNGSEKHYDNQGNWEGSRSRNLFASFRNGLNLGLWRLRSPQTYSYNHQRHEDASCFSAPTQTQWQVNNTYLQRDIPALRSEFTAGETYTGGDIFYSIPFRDMKLASEEAMLPDSQHGFAPEITGVANSNAQVTVFZ

SEQ ID NO: 1949 - protein, 285 aa, Photorhabdus luminescens
MTLFILLLVLAWERVFKMGDHWQLEHRLEPLLTGMKSFSLWKSLLMTLAVMLIAWLLIEILNDFMFGVLELVLWVFICLLCIGAGRLRHDYREYFRTVHQDNREQQREYLTRLAIIHGLPSDASKENMLREIQNALLWINFRYYLAPIFWLIVAGKLGPVALMGYGFLRAYQGWLAQYGTPVQRAQSGVDSLLHWLDWVPARLAGVAYALLGHGERALPAWVASLSDLRTSQYKVLCQLAQFSLSREPHLDSIQTPIAAVILAKKVTFSVIVVVALLTIYGALVZ

SEQ ID NO: 1950 - protein, 297 aa, Photorhabdus luminescens
MTKQNCNTDQRRAVLMEHLQNDIPASVTLALKEDLGGNTNFTADITGQLIPADKQATAVIITREDGIFCGQQWLNEVFTQLGDQISIEWLVKDSDAITANQKLCLLRGPAQILLTGERTALNFIQTLSGVATEVSHYVHCLTGLKTQLLDTRKTLPGLRTALKYAVLCGGGNNHRLGLFDAFLIKENHIIANGSIKQAVDKARYSHPDVPVEVEVETLDELILALKANVDIIMLDNFTIPMMKEAVAITSGKVALEVSGNITLDTLRSYAETGIDFISVGALTKHIRALDLSMRFNZ

SEQ ID NO: 1951 - protein, 470 aa, Photorhabdus luminescens
MEKEIHDICQRHQSVVIKKDDNTITIASSELPNDDLLSALRFISGCIVNVEIWPLARIESVLHQNISLSHVPEEESSLLPLKTDINTDENDAPVIQLINQTLLTAIQRRASDIHFEPFQQGYRIRIRVDGSLHLLSSPSYQMNASIAARLKIMAKLNIAEKRLPQDGQFDWFDTRHNYAIRMATLPTIHGEKVVLRILNTMQQLSLDQLGIPDPLLNQLRQKLALPQGMILVTGPTGSGKTVTLYSCLQYLNQNKKNICSVEDPVEIPLNGINQTQTNSKIELNFAKVLRALLRQDPDVIMVGEIRDGETAEISVKAAQTGHLVLSTLHTNSTIDTLSRLQNLGISGYMAASCIKLIIAQRLVRKLCLHCRKQQTEETVINIENNSLFINQWLAVGCEHCFSGYYGRTAIYEFLEITYDIQQILSEQNPKNVQNTIMAQRKDTLLSSGILLVEQGITTLEEIYQVTGQEZ

SEQ ID NO: 1952 - protein, 400 aa, Photorhabdus luminescens
MKIHYIYNWQAVNNKGEISKGKSLCDNRKALYQQLIHSGLQPYNIKCEKLIFYHHQQIAYRLNFIRQLATLLSSGMPLLNCLNILIRECAHPLWHCVLLDISKKITRGESFSSSLKNYPFLFPPLFCQLISVGELTGQLEVCCQLLVKQQEQQDKLQKKITKALRYPLIITIVASIIILLMLIFVLPEFEHIYHSFDAQLPLLTRSLLITSNWLIQYGGYGVIGLILLLLFYLQLRQRHTIWITREKNLMLRLPVIAKLISCQQLGQLFHILFMTQKAGLTLTAGLDSAIASINHPVFLQATKFLRAQINQGVPMSETLKQQSCFPALCQQFVSVGEESGNLELLLGNLANWYQQQALEISDNMTQLLEPILIVIIAIIVGTLLLAMYLPIFQLGTILTZ

SEQ ID NO: 1953 - protein, 208 aa, Photorhabdus luminescens
MTYIIALTGGIGSGKTTIANAFAALGVPLVDADIIAREIVVPGTPALQAITEHFGHDILTPDGNLNRALLRQKIFTNNQEKQWVNQLLHPLIHQETRRQLEQIIAPYVIWVIPLLVENNLRHLADRILVVDVSPEIQISRIATRDGINYQQIENILAAQASRSERLAYADDIISNHDNVQAITPRVAELHQQYLRLAESARQDNHDEZ

SEQ ID NO: 1954 - protein, 475 aa, Photorhabdus luminescens
MSNNIRIEEDLLGKREVPAEAYYGIHTLRAIENFHISNNTINDVPEFIRGMVMVKKAAALANKELQTIPKKIADIIIKACDEVLYTGRCMDQFPVDVFQGGAGTSLNMNTNEVLANIGLELLGHKKGEYEYLNPNDHLNKSQSTNDAYPTGFRIAVYNSILKLIESIELLIVGFDKKSREFNDILKMGRTQLQDAVPMTLGQEFNAFSILLKEEVKNLNRTSELLLEINLGATAIGTRLNTAPGYQKLAVEKLAEVSGLPCVPAEDLIEATSDCGAYVMVHGALKRLAVKLSKICNDLRLLSSGPRAGLNEINLPELQAGSSIMPAKVNPVIPEVVNQVCFKVIGNDICVTMASEAGQLQLNVMEPAIGQAMFESISLLSNACRNLVEKCVNGITANKEVCENFVFNSIGIVTYLNPFIGHHNGDIVGKICAETGKSVREVVLERGLLTETQLDDIFSVENLKCPSYKAKRFDDZ

SEQ ID NO: 1955 - protein, 251 aa, Photorhabdus luminescens
MSDTTSTIIFEHPLNEKMRAWLRIESSLQQLTSQRHLNSLASSLAFFRTITELLEVLERGEVRSELLKELERQQAKLKQWAEIPDVDINIVNSFRLKLKERAIALSKAPRLGQSLKEDKIISLVRQRLSIPSGCCGFDLPTLHLWLHLPQSERDKMVAFWIDSLLPLQQALDSILELIRQSAIFRSEISKNGFHQNTAEGADLLRLRLPLTPLLFPQISGHKTRFAIRFLPLDSEKGSVPAHLPFELACCZ

SEQ ID NO: 1956 - protein, 904 aa, Photorhabdus luminescens
MLIKLLTKVFGSRNDRTLRRMRKVVDVINRMEPEFEKLSDDELKGKTAEFRARLEKGESLENLLPEAFATVREASKRVFAMRHFDVQLLGGMVLNERCIAEMRTGEGKTLTATLPAYLNALTGRGVHVVTVNDYLAQRDAENNRPLFEFLGLSVGINLPGMPAPVKRQAYAADITYGTNNEYGFDYLRDNMAFSPEERVQRKLHYALVDEVDSILIDEARTPLIISGPAEDSSELYIKVNKLIPKLIRQEKEDSETFQGEGHFSVDEKSRQVNLTERGLVLIEQLLSEASLMEEGESLYSPTNIMLMHHVTAALRAHALFTRDVDYIVKDGEVIIVDEHTGRTMQGRRWSDGLHQAVEAKEGVEIQNENQTLASITFQNYFRLYEKLAGMTGTADTEAFEFSSIYKLDTIVVPTNRPMIRNDLPDLVYMTEAEKIEAIIEDIRERTGKGQPVLVGTISIEKSELVSRELTNAGIEHNVLNAKFHAMEADIIAQAGQASAVTIATNMAGRGTDIVLGGSWQAEIAKLTEPTEAQIEEIKAAWQERHDRVLAAGGLHIIGTERHESRRIDNQLRGRSGRQGDAGSSRFYLSMEDSLMRIFASDRVTSMMRKLGMKPGEAIEHPWVTKAIANAQRKVESRNFDIRKQLLEYDDVANDQRRAIYAQRNDLLDVSDVSETIGSIREDVFKATIDAYIPPQSLEEMWDVEGLQQRLVTDFDLELPIKEWLDKEPELHEETLRERILEQAVEVYKRKEEIVGIEMMRNFEKGIMLQTLDMLWKEHLAAMDYLRQGIHLRGYAQKDPKQEYKRESFAMFASMLESLKYEVISTLSKVQVRLPEEVEALEQQRRAEAERLAKQQQLSHEVEKGALMSTTEAQIASGARKVGRNDPCPCGSGKKYKHCHGRLQZ

SEQ ID NO: 1957 - protein, 217 aa, Photorhabdus luminescens
ERQYLPQPPLITDVTRNNVCQIVAKDLEYPLILHHTGATFIMRDSRPQSLDVLFEDAAAVEKSPLHVIQQRAVALLKLNRAVISLLPAQLHPWCRVANYRKQILVLEAGNASWMTRLRYELPTLLSTLRSGILPSLSSIDIRINPSLMIKHGNSAQSFAKTMRDDHKTLPTRQLSQESAKELITLANRSPKKLKERLERLAALAGESASTAKTTKRZ

SEQ ID NO: 1958 - protein, 311 aa, Photorhabdus luminescens
LRDKTMIKQRTLKRIVQATGVGLHTGKKVTLTMRPAPANTGVIYRRTDLNPPVDFPADAKSVRDTMLCTCLVNEHDVRISTVEHLNAALAGLGIDNIIIEVDAPEIPIMDGSASPFVFLLLDAGIEELNTSKKFLRIKETVRVEEGDKWAEMTPYNGFSLDFTIDFNHPAIDSSTQRYCLDFSAEAFVRQISRARTFGFMRDIEYLQSKGLCLGGSFDCAIVVDDYRVLNEDGLRFEDEFVRHKMLDAIGDLFMCGYNIIGAFTAFKSGHALNNKLLQAVLAQESAWELTTFEDEAEMPLAFRAPSTVMAZ

SEQ ID NO: 1959 - protein, 387 aa, Photorhabdus luminescens
MFEPIELTNDAVIKVIGVGGGGGNAVEHMVRERIEGVEFFAVNTDAQALRKTAVGQTIQIGNGITKGLGAGANPEVGRTAAQEDRDALRTALDGADMVFIAAGMGGGTGTGAAPVVAEIAKELGILTVAVVTKPFNFEGKKRMAFAEQGITELSKHVDSLITIPNDKLLKVLGRGISLLDAFGAANDVLKGAVQGIAELITRPGLMNVDFADVRTVMSEMGYAMMGSGIAQGEDRAEEAAEMAISSPLLEDIDLSGARGVLVNITAGFDLRLDEFETVGNTIRAFASDNATVVIGTSLDPDMNDELRVTVVATGIGMDKRPEITLVTNKSSQSSVMEHRHQQMSGGMSSLSEENKPAAKVVNDQSVQTSKEPDYLDIPAFLRKQADZ

SEQ ID NO: 1960 - protein, 419 aa, Photorhabdus luminescens
MIKSTDRKLVVGLEIGTAKVSALVGEILPDGMVNIIGVGSCPSRGMDKGGVNDLESVVKCVQRAIDQAELMADCQISSVYLALSGKHISCQNEIGMVPISEEEVTQEDVDNVVHTAKSVRVRDEYRILHVIPQEYAIDYQEGIKNPVGLSGVRMQAKVHLITCHNDMAKNIAKAVERCGLKVDQLIFSGLAASYAVLTEDERELGVCVVDIGGGTMDIAVYTGGALRHTKVIPYAGNVVTSDIAYAFGTPPSDAETIKVRHGCALGSLVSKDESVEVPSVGGRPPRSLQRQTLAEVIEPRYIELLNLVNDEILRLQEQLRQQGVKHHLAAGIVLTGGGAQIDGLAECAQRVFHAQVRIGQPLNITGLTDYAQQPYYSTAVGLLHYGKASHLNGDADIEKHVSVSRWFKRVSSWLKKEFZ

SEQ ID NO: 1961 - protein, 269 aa, Photorhabdus luminescens
MSQAALKVRGRDNESSSSRPSNGSYLAGLIFFLMVLGTIIWGGLAVLNWMKDANRLPISKLVVTGERHYTTNDDIRRAILSLGQPGTFMTQDVNIIQQQIERMPWIRQVTVRKQWPDELRIHLVEYVPYVRWNDTQMLDAEGQVFSIPAEWGAKGYFPMLYGPQGSEKEVLDGYRAMTKLLAANKLKLKSAAMTARRSWQLTLDNGIQLKLGRMDTTGRIKRFIELYPLLQQNTEKRVDYVDLRYDSGAAVGWAPLPIGDPNAPVKRQZ

SEQ ID NO: 1962 - protein, 307 aa, Photorhabdus luminescens
MAEKVAVLLGGTSAEREVSLLSGQAVLAGLREAGIDAHPVDTKDFPVTQLKEAGFEKVFIALHGRGGEDGTLQGVLEFLQLPYTGSGVMASALSMDKLRTKQVWQGIGLTVSPYVSINSQQVERLTDSQLQEYVADLGLPLIVKPSLEGSSVGMTKVNEISELRGALEAAFRYDVDLLVEKWLHGPEYTVAILGDTALPSIRIQPAAVFYDYDAKYWSEETQYFCPSGLSDEKEQQLAELALKAYQSVGCSGWGRVDVMMDTDGDFYLLEVNTSPGMTSHSLVPMAARQAGLSFSQLVVKILELADZ

SEQ ID NO: 1963 - protein, 492 aa, Photorhabdus luminescens
VNTQQLAKLRAFVPEMRKVRHIHFVGIGGAGMGGIAEVLANEGYQISGSDLAPNPVTRQLTKLGAQIYFNHRPENILDASVVVASSAILADNPEIVAAREARIPVIRRAEMLAELMRYRHGIAIAGTHGKTTTTAMISSIYAQAGLDPTFVNGGLVKAAGTHARLGSSRYLIAEADESDASFLHLQPMVAVITNIEADHMDTYHGDFENLKQTFINFLHNLPFYGRAVMCIDDPVVKELIPRVGRYITTYGFSEEADVRITHYQQKGAQGYFTVSRQDMADLKVVLNAPGRHNALNAAAAVAVATEEGISGSDILAALAGFQGTGRRFDFLGNFSLEHVNGKGGSAMLVDDYGHHPTEVDATIKAARAGWPDKRIVMIFQPHRYTRTRDLYDDFANVLNQVDVLLMLDVYSAGEVVIPGADSRSLCRTIRSRGKLDPILVSDPAKVTAVLAQVLDGHDLILVQGAGNIGKIARNLAETKLQPSLNEEKHNGZ

SEQ ID NO: 1964 - protein, 356 aa, Photorhabdus luminescens
MSGKTRRLMVMAGGTGGHVFPGLAVAHHLKDQGWDVLWLGTADRMEADLVPKHGIDIEFIQISGLRGKGIKALLAAPVRIFKAIRQAKAIMRRYQPDVVLGMGGYVSGPGGIAAWMCGVPVVLHEQNGIAGLTNRWLAKIATTVLQAFPGAFPKAPVVGNPVREDVLALPIPEQRLTGREGPIRVLVVGGSQGARILNQAMPEIAARMGDKITLWHQTGKGAKESVQNAYDNSVKCEHKITEFIDDMAQAYAWADVVICRSGALTVSEVSAAGLPGIFVPFQHKDRQQYWNALPLEKVGAAKILEQPQFTVDAVIELLTQWQRPQLLEMAEKARSAAIVDATEQVSAALIDAAKKZ

SEQ ID NO: 1965 - protein, 434 aa, Photorhabdus luminescens
MLAVELIIVLLAIFLGARLGGIGIGFAGGLGVLVLAVIGVKPGHIPFDVISIIMAVIAAISAMQVAGGLDYLVQQTEKLLRKNPKYITILAPIVTYFLTLFAGTGNISLSALPVITEVAKEQGIKPCRPLSTAVVAAQIGITASPISAAVVYMSSLMEGHGVSYIHLLMVLLPSTFAAIVLMSFIISWAFNSKLSDDPIYLKRLEDNLVTLRGSKQIEIKPRAKASVLLFLSGVISVVIYAIVNSPSIGLVEEPLMNTTHAILIIMLSVATITTMFCSVDTDAILNSSTFKAGMSACICILGVAWLGDTFVQANMDWIKGTAGDLIHSQPWLLAIIFFFCSALLYSQAATAKALMPMALALNVTPLTAIASFSAVSGLFILPTYPTLVAAVQMDDTGTTRIGRFVFNHPFFIPGTIGVALAVAFGFLFGSMILZ

SEQ ID NO: 1966 - protein, 399 aa, Photorhabdus luminescens
LMSIPGFSRLKDWVIGGRETDATNMVLYDRTLVWLTLGLGIIGFVMVTSASMPVGQRLAEDPFLFAKRDAIYLLLAFGLSLITLRISMDFWQRYSNLMLLVSVILLLVVLVVGNSVNGASRWIAIGPLRIQPAELSKLSLFCYLASYLVRKVEEVRNNFWGFCKPMGVMVVLAVLLLAQPDLGTVVVLFVTTLAMLFLAGAKLWQFLAIIGSGVFAVVLLIIAEPYRIRRVTSFLDPWEDPYGKGYQLTQSLMAFGRGEFLGQGLGNSVQKLEYLPEAHTDFIFSVLAEELGYVGVVLVLLMIFFVAFRAMTIGRRALQMDQRFSGFLACSVGIWFSFQALVNVGAAAGMLPTKGLTLPLISYGGSSLLIMSTAIVLLLRIDFETRLAKAQAFVRSPRZ

SEQ ID NO: 1967 - protein, 437 aa, Photorhabdus luminescens
MADYLGKKVVIIGLGLTGLSCVDFFMARGVIPRVMDTRTAPPGKDKLPDGVECHSGSLNADWLMDADLIVVSPGIALATAVLQAAANAGIEIVGDIELFCREATAPIVAITGSNGKSTVTSLVGEMAKAANWQVGVGGNIGLPALELLKKSCQLYVLELSSFQLETTYSLNATAAAVLNVTEDHMDRYPQGVSQYRAAKLRIYHQAKRCIVNAQDPLTLPEMGMDSRCVSFGVDCGDYQLDSENAFLKVHNQSLLATNEIKLTGRHNYANGLVALALADAVGIPREASLATLTVYPGLDHRFQLARLNKGVRWINDSKATNVGSTMAALDGLNLEGTLYLLLGGDGKSADFSPLKPFLCGNKVQLYCFGRDGKQLAQLRPEIATLTETMEQAIRDIAPRLVAGDMVLLSPACASLDQFRNFEQRGHEFTRLAEELGZ

SEQ ID NO: 1968 - protein, 361 aa, Photorhabdus luminescens
MLVWLAEYLVKYHSGFNVFSYLTFRAIVSLLTALAIALWMGPRMIAFLQKLQIGQVVRNDGPESHFSKRGTPTMGGLLILLSITISTLLWVRLNNPYVWCVLIVLIGYGIVGFVDDYRKVVRKDTKGLIARWKYFWQSVLALGVAFAMYSFGKDTPATQLVVPFFKDVMPQLGVLYILLTYFVIVGTSNAVNLTDGLDGLAIMPTVFVAAGFALVAWATGNVNFANYLHIPYLSHAGELVIVCTAIVGAGLGFLWFNTYPAQVFMGDVGSLALGGALGTIAVLLRQEFLLVIMGGVFVVETLSVILQVGSFKLRGQRIFRMAPIHHHYELKGWPEPRVIVRFWIISLMLVLIGLATLKVRZ

SEQ ID NO: 1969 - protein, 460 aa, Photorhabdus luminescens
MISLTLQQLSQVTDGVLNQVTEQQAANICISDVTTDSRRVGNGSLFIALKGERFDAHDFFADAVKAGAGALLVSRVLDINFPQVVVKDTRLAMGKLASWVRQQSNARVVALTGSSGKTSVKEMTAAILRQCGNTLYTAGNLNNDIGVPLTLFRLTEQHEFAVVELGASHVGEIAYTVEMARPETALVNNLFAAHLADFGSLASIAKAKGEIFTGLSEKGTAIINMESNDWAHWQQVIGDKTVQRFSMQQASGADFYATDIQVKQLTTDFCLHTPIGSTEINLPLPGKHNVANALAASALAISVGATLQDIRLGLSELKAVPGRLFPINLAEGKLLLDDTYNANVGSMTVAVQVLSQMPGYRVLVVGDIGALGEQSADYHRQIGETVASCGINSVFSVGKLSIHVSEASGCGQHFADKAALIATLVPLLQQHKVFSVLVKGSRNTTMEDVVHALQESFTCZ

SEQ ID NO: 1970 - protein, 496 aa, Photorhabdus luminescens
VADRNLRDLLAPLGIDAPVRELREMTLDSRKSSAGDLFVAIKGHQTDGRHYIPQAIAQGVAAVIAEAQGEVDNGTVQIMHGVPVVYVNDLNNKLSQLAGEFYCHPGDKLHLIGVTGTNGKTTTTQLLAQWSHGLGETSAVMGTVGNGLLGRVAPSENTTGSAVDIQLDLQQLVRQEATFAAMEVSSHGLVQGRVAALPFEAAVFTNLSRDHLDYHGDMEHYEAAKWLLFSTHNVKQQIINADDEIGLKWLSRLPQAVAVTMENRLPENWQGRWLAAREIKYHDKGVSITFESSWGGGTIDSSLMGAFNVSNLLLALSTLLALDYPLEKLLETASCLEPVCGRMEVFTTPGKPVVVVDYAHTPDALEKALMAARLHCQGKLWCVFGCGGDRDKGKRPLMGGVAEQLADYVIVTDDNPRNEEPQAIIADILTGFLDPGRAIAIHGRVEAVTNAIMQAKADDVVLIAGKGHEDYQLVGHRRLDYSDRLTVARLLGVIAZ

SEQ ID NO: 1971 - protein, 589 aa, Photorhabdus luminescens
MKAVRSVKLKRQEDKASFVSWRFALLCGGIAVALIALLLRVTYLQVINPDQLVKEGDLRSLRVQSIPTARGMISDRMGRPLAVSVPVNAVWADPKEVFEKGGITDDTRWKALSDAINLPLEQLNDKVSANPKGRFVYLARQVNPSVGDYIHKLKLPGIYLRQESRRYYPSGQVTAHIIGVTNVDGQGIEGVEKSFDRWLTGQPGERTVRKDRFGRVIEDISSVDSLAAHNLVLSIDERLQALVYRELTNAVAFNKAESGTAVLVDVNTGEVLAMANSPSYNPNNRINTPKEVMRNRAITDIFEPGSTVKPMVVMAALNDGIIKENTVINTVPYRISGKEIRDVSRYPELSITGILQKSSNVGVSKLALAMPATELVDVYSRFGLGKATNLGLVGESSGLYPTGKQRWSDLDRATFSYGYGLMVTPLQLARVYATIGSLGIYRPLSITKVDPPVPGTRVFPEPIMRTVVHMMESVALPGGGGVRAAIKGYRIAIKTGTAKKVGPDGKYASRYISYAAGVAPASNPRFALVVIINDPLTGKYYGGVVSAPVFGAIMGGVLRIMNVEPDALAAGDKNEFVINKKEDTGGRSZ

SEQ ID NO: 1972 - protein, 315 aa, Photorhabdus luminescens
MANSHFKHTSVLLDEAVNGLNIRENGIYIDGTFGRGGHSRLILSQLGTEGRLIAIDRDPQAIEVAKAITDPRFSIVHGPFSKLAHYTEKAGLIGKIDGVLLDLGVSSPQLDDPERGFSFMRDGPLDMRMDPTRGQSAAEWLMNATADDIAWVLKTFGEERFAKRIARAIVACNQEEPITRTKALADLIAQASPIKEKHKHPATKSFQAIRIYINSELEEIEQALEGALQVLAPQGRLSVISFHSLEDRIVKRFIRQNSRGPQVPAGLPLTEEQLKARGGRSLKSIGKMKPSEEEVADNPRARSSVLRFAEKVSEZ

SEQ ID NO: 1973 - protein, 336 aa, Photorhabdus luminescens
VKLDEIARLAGVSRTTASYVINGKAKQYRVSDKTVEKVMAVVREHNYHPNAVAAGLRAGRTRSIGLVIPDLENTSYTRIANYLERQARQRGYQLLIACSEDQPENEMRCVEHLLQRQVDAIIVSTALPPEHPFYQRWASRSLPIIALDRALENEHFISVVGDDFEDAKMLAQEFRQFPAESVLYLGALPELSVSFLREQGFREAWKDDPRKVMYLYSNSYERDAAAEVFTKWLETHPMPQALFTTSFALLQGVMDVTLKHSGRLPNQLVIATFGDHELLDFLECPVLSVAQRHREIAERVLELVLASLDEKQKPGPGITRIHRDLCRRGSLSRKIZ

SEQ ID NO: 1974 - protein, 576 aa, Photorhabdus luminescens
MEMLSGAEMVVRSLIDQGVKHIFCYPGGAVLDIYDALHTAGGIEHILVRHEQGAVHMADGYARSTGKVGVVLITYGPGATNAITGIATAYMDSIPMVVLSGQVASSLIGNDAFQECDMVGISRPIVKHSFLVKKAEDIPKVLKKAFYLASSGRPGPVVIDLPKDTVNPAVKLPYIYPDQISMRSYNPTIQGHKGQIKRALRKLLNAKKPVIYVGGGAINADCSAELLVLAEKFNIPVVSSLMGLGSFPATHPQSLGMLGMHGTFEANKAIHNSDVIFAVGVRFDDRTTNNLEKYCPEATVLHIDIDPTSISKTVSADVPIVGDAKQVLGQMLSLLETVEDTQDPDALKDWWLSIQQWRSRKCLSFDRSGEKIKPQAAIEVLYRLTKGEAYVTSDVGQHQMFVALHYPFDKPRRWISSGGLGTMGFGLPAALGVKLVKPEATVVCVTGDGSIQMNIQELSTALQYGLPVLVLNLNNRFLGMIRQWQDMIYAGRHSQSYMESLPDFVKLAEAYGHVGISIQRYDELESKLAEALKEVTENQRLVFVDITVDETEHVYPMQIRGGAMDEMWLSKTERTZ

SEQ ID NO: 1975 - protein, 434 aa, Photorhabdus luminescens
ELFFKSMRKKPHMPDETLQQPKHKTIGIFENYQEIMPDDKLSYFENTPSITLHVAPQGAPIAGENGINIGKSLTGHVFYTIRNNNPKTGNFESITAGLSPGEDWGTVKDNLSFNDHIRYPTASSLTMVSQNLQFLMDLDMVFQKTIDYRDGKTQPPSYNLLTNNCIDFVKETFHRKGGHAGYSGITLNLEKTPNQVLNQIFPNPKKVTKTYITPLVIDLNGDGVQTVTSELGVIFDFDGQGQKVNTGWIDANDSLLVWDKNNDGLINNGTELFGENSQLSSGVKAQHGFMALADIDSNQDGIIDNQDVTWNTLKIWQDRNLDGLSTPDELNSLEETDIKSIQLNYQESDYFDLQGNYHGLTSTVNWSNGYQTEITDVWFKQEPISIHEAELSNELHNLINAMACFVSQQTAEINNTISVGITPIQLLTVNSIGZ

SEQ ID NO: 1976 - protein, 576 aa, Photorhabdus luminescens
MIKRTLMLFLLLCSPLLTPAAANALFEQPGQNPYLPVDQAFMFDFQQKGDKLTLDWQIKPGYYLYHKQLHIEPQQATLGKITLPQGTAHRDEFFGETEVYFQQLIVNVPVTKANNNSNIVVTYQGCAAAGYCYPPETRLVPLSAVIPSKTTDAISAEPVHKTPESASNDQQHLPFSPLWAILIGIGIAFTPCVLPMYPLISSIILGSQRPKSLKQIFWLALSYVQGMAVTYTLLGLIVAAAGLQFQAALQHPYVLIGLSVLFILLALSMFGLYSLQLPSAVQTRLVNWSNQQKNGSLFGVFAMGALAGLICSPCTTAPLSAILLYIAQSGNTVAGGLTLYLYALGMGLPLIAVTLFGHKLLPRSGPWMQYVKEAFGFIILALPVFLLERVIGDAWGIRLWSLLAVSFLGWGFVLTIRSQNGWVRVIQLILLILMLIATRPLQDWFWGTTVTQQSQHSLNFRQINNWQELEQIMTQNSHKTVMLDFYADWCTACKEFEKYTFSDPQVQSQLGDTLLLQANVTNNSPQQKQLLEKLSVRGLPTILFFDSQGKEIPDSRVNGFMDATRFNEHLQHLPKZ

SEQ ID NO: 1977 - protein, 212 aa, Photorhabdus luminescens
TSRMKYILLLIIVLFTNACAEPTKTNIPRTVFDGIKYTGMVKELPLKVPRTVEEFRELEKQAQNGSSNAYFLLGKLYTDSSLKKSERDYQKAIEYYSKALKLDKNHAESLYNLGIIYSFGYGVQEDQIKANDLLQRAGDSGIINGYQIIGVNYLHGLGNSPQDLEKAFHYIKINAEKGIVEKEISQEIINHWDNFLILMGYKPIPLVGKSNZ

SEQ ID NO: 1978 - protein, 388 aa, Photorhabdus luminescens
DHILALTDQDISLSFLPLSHVFERAWSFYVMHVGAQNVYLTDTNFVRQAMADVCPTVMCAVPRFYEKIYSAVFEKVSKAPWHRRKLFNWAIKCGERQFLRKLQSKKSCPWSTAMHRLADKLVLSKLRNVLGGRVRFLPAAGARLDETIILFFLAVGINIKYGYGMTETCATVSCWEEQGYVLGSIGKPSPGIDVRIGEEDEIQVRGPIVMKGYFNNQQETTKAFTQDGWLRTGDAGKLDENGNLFITERLKDLMKTSNGKYIAPQMIEGILGQDRFIEHVAIIADARKFVSALIVPCHEALEEYARSINLKYHDRVELLRHSQIINMFEQRLKEMQKNFAHFDQVKRFILLPKPFSMETGELTPTLKLRRKIIMQRYYEEIESMYQDZ

SEQ ID NO: 1979 - protein, 495 aa, Photorhabdus luminescens
MSTKNDFKAFSISNNANVVSQEKYEKDQSLQAGFPPDNITSNLLNKVLRQSSTIASVVANFIATQSGGDVLDDGDVAKLTEQLSKALKQKITTEVPNASLTQKGIVQLTNVLGDSDTLAVTQKLAQEIVNSLRESINAKVSNTRKINGKLLSEDITITSQDILGGQAISLGDKADLNSYKIPGIYHQEYDAHAKNGLNYPEFLAGALVVLKSAGTVQRYFVYNSSRVYTRSQFHDNPWTPWTREYNTLNKPTADEIGAYTKIESDSRYIAGIRRVNGKSLATDVTITSQDILNGQAISLGDNVNLDHCKTPGIYYQDYNAHAKNGVNYPEPLSGSLIVLKAAGIIQRYFVYNSSRVYTRSQFHDNAWTPWAQEYNTLNKPADRVISGYTKAEVDNLVNAKGNKNTALKSVNGWWKCGDTGVIYQWGIVNWAAHDTPVNFPIQFPNACVNVSLTLSDKSNLESSYNVVARQLSVTGFSYWAYETESSAFWFAIGYZ

SEQ ID NO: 1980 - protein, 213 aa, Photorhabdus luminescens
MSIENTDIAEQTTGKDSVVLGHAEAPAIHSIAIGASPRNSKTISEAAIAIGQNQIAGKQGDTKVIWPIAIGADSVSNGLASIALGQKVTASAAQAVAIGQHASATEKGSIALGADSIANKPNVVSVGKTGHERKIIHVAAGEISNHSTEAVNGQQLHAESARIDILLDAKNKELEEKVQSLESDIANLTLLVQNSVDDVASLKKRLLDALNYZ

SEQ ID NO: 1981 - protein, 235 aa, Photorhabdus luminescens
FRVVCVNDRRRFMLDYLPMFCQIRDKTCLLVGGGQVAERKARLLLDAGAHLLVNAREFTPQFKLWGDNGQVTLIRGEFEPHWLEHCWLVIAATNDAAVNSYVCDCATERRIFCNVVDEPQQASFITPSVIDRSPLVIAISSGGNAPVLVRLWREKLERLLPMHLGRLAAYGGTLRQRVKRHFHHLAARRHFWERFFTNERLMQSLVSQDHQQVDRVVETLFSESSQANTNKTNSZ

SEQ ID NO: 1982 - protein, 302 aa, Photorhabdus luminescens
MIIAVWYRRYVRYSVMAEARCPASCGELIQGWILGGEKLISCPVNWFSEVSVTDGVPGKDERPRMRQVMKTVLAYFGLSVEMARGLRIALTSTIPMAKGLASSTADIAATALATARYLGKTLDETTLASFCVQLEPTDSTLFSRLTLFDHQTGTTQIACDWQPSIDILLLESPEIVITADYHRLDRHPALLENASVLERAWKLFCQAVTTRNYWRLGEATTLSAQASQKLLVKPAFDSLLELVERSGIYGLNVAHSGSVVGLLCDRHHHDVEYLCWWLKQRGIIRFYPRQHLLTMIPGGVRZ

SEQ ID NO: 1983 - protein, 359 aa, Photorhabdus luminescens
LMSEHGGNVLEMALKIGVTVEEMIDFSANINPLGMPESLKTAIIDQLQCAEYYPDTEYRRLHAALAQAHHCPVENLMAGNGATELIYAVVNYLKPRRAMLLIPGFAEYRRALQRVDCQIDEYVMSEADSYQPDERLLMALERHRPDCLFLATPNNPTGLMPDAVLLQAIFERCRQHNIALIVDEAFIDFLPDIAGFIPQIAHFPRLYILRSLTKFFAIPGLRLGYLVSSDVMGIRAMKRWREPWTINAFAALAGEMVLNDNAYIQATHRWLAEQQRWLYQALAALPALRVWPPSANYIFLRCLRPEIDLQHALLKQRILIRHCANYPGLDAAHYRVAIKGEHDNRRLVSALRQVFGYGZ

SEQ ID NO: 1984 - protein, 262 aa, Photorhabdus luminescens
MMNSGKVWLVGAGPGDAALITVRGLHCIRQAEALVYDRLVSPDLLSEAPDDCKMINVGKTPNYHPVPQQQINQILVECAQQGLNVVRLKGGDPYVFGRGGEEAEALALAKIPFEVVPGISSSIGGLACAGIPVTHRDYASGFHVVTGHLRQENESQDWATLAKLEGTLVILMGMTQLASICEQLIAGGKAPTTPAAVVMYASHQQQQVASATLLTLAQQVAAQGLSAPALIVIGDVVRLRETLAFSRDHLLLSSVPSLMALZ

SEQ ID NO: 1985 - protein, 476 aa, Photorhabdus luminescens
MEAKELFSVGIDIGTTTTQVIFSRLSLVNRAAVSQVPRYEFVRREIIWQSPVLFTPVDFAGQLREDELFSLIQAQYQAANIAPESVDSGAVIITGETAKTCNARPAIMTLAQKLGDFVVATAGPHLESMIAGLGSGAQALSQQKMARVLNIDIGGGTANYALFDAGRLIASACLNVGGRLLETDPQGNVLRAHPPGVRIVDSLFGENTDIQHLTATQLQQIAMRMSQLLWEVVTGQLTPLAQQLLMTEPLPNCDELNCDELYAVTLSGGVGECYREASEHDLFRFHDLGPLLAQAIHRDNDFAKLPLQMPKQTVRATVIGAGAHTLSLSGSTIWLDALSLPLRNIPVVHPDTEATESLAEAWQQALTQMDLHAEQDLYALALPDALPVNYAAVQTCITALQNFAARYPSSHPLLIVAGQDFGKALGMLLHPLMGERPLAVIDEVITRTGDYIDIGTPLFNGTVVPVTIKSLAFPSZ

SEQ ID NO: 1986 - protein, 454 aa, Photorhabdus luminescens
MKLKTQLFGKTYQFKDVKQVLAMANELRSGDVLAGVAAESSQQRVAAKHVLSEMTIADIRMNPIIPYEEDCVTRIIQDDINEIAYAGIKNWSIGELREYILSDDTRVDDIAFLRKGISSEVVAAVAKISSNADLIYGAKKMPVIKKANTTIGTPGTFSARLQPNDTRDDVQSILAQIYEGLSFGVGDAVIGVNPVTDDVENLTRVLDTLYEVIDKFSIPTQGCVLAHVTTQIEAIKRGAPGGLIFQSICGSEKGLKEFGVELAMLDEARAVGAEYCRLAGDNCLYLETGQGSALSAGAHFGADQVTMEARNYGLARHYDPFLVNTVVGFIGPEYLYNDRQIIRAGLEDHFMGKLSGVSMGCDCCYTNHADSDQNQNENLMILLATAGCNFIMGMPLGDDIMLNYQTSAFHDTATIRHLLNLRPSPEFERWLEQMGLMANGRLTSRAGDASFFFZ

SEQ ID NO: 1987 - protein, 198 aa, Photorhabdus luminescens
MTQKENTMQREQVLSHALNLLEQHGLSITTEVLFGSLNMDIEYLKQFWPDREALLYDCLRYHGQQIEVWQRQILLDENLTPEQKLLARYTALDEKVKEKRYPGCLFIAACSAFPEPDHPIHQLAELQKQSSSRYTTELLHQLDIEDCELVAKQMELILEGCLSKLLLKRDIGDITTAKLLAEDVLAIALCRKNGALSZ

SEQ ID NO: 1988 - protein, 287 aa, Photorhabdus luminescens
IIMNQKTIEKNVSERVSNLKPHASPEITNEIESCMPDLGSLEAKQWIGVQNPNRIEVLQELRRSTVARVGTGRSGPRPRTQALLRFQADHSRSKDTVLKEVPTEWIEKQGLLEVQSQVSDKNLYLTRPDLGRKLSANAVETLLTQCKTAPDVQVVISDGLSTDAITTNYEDLVPPLLKGLEQAGMCIGTPFFVRYGRVKIEDQIGELLKAKVVVLLIGERPGLGQSESLSCYAVYQPTVEKTVEADRTCISNIHRGGTPPIEAAAIIVDLAKNMLEQQASGIALSRZ

SEQ ID NO: 1989 - protein, 225 aa, Photorhabdus luminescens
TTEIIRKKIMSLKKTISIAPLGTVEIYSNSDIVIPSVAPTAIIKNKSMVPIRAINYWAGLIGDYQQYSHVDVYPSELKIFVGPSDLFYRYKVVVSNLSNTENAEIEFVMDSLWKKYGMPTKMVYMNSNEPFEFYSKGNAIFPTDFSDAIIKNNSVAYIRAVNFWAGPLGNYNMYSYVDISPGKTEILASPPNIVNYYKIVFTNMSNYVQNVELEVISHLLSGYDZ

SEQ ID NO: 1990 - protein, 300 aa, Photorhabdus luminescens
RGNILCPAPVHIAYGKTTFTEDFMKGISHLSYDLNNYASSLKRKAHLAASFFIEDSQLRMSYLKEVDDFVNIKTREFKNTFDVNEKKRLIYAVKDEYEITEKEYQALRRKDYTKYIVTDIFEDQGVVKYAKIGGGVVAGIAQTAAGIAVINSGRIVRSKRVQLMGAVLVAHGGSNFYEAISPILYENQKIGLVRKGYRYASHALGYGDDVADVAYSSVDLVASLYGTYGVLKLKPVKSKNNISGGYSVKPGTGKLFRYINSDLARKWQLTPKPMLTIQVLSSGYKVKLLIDDINKLHDDZ

SEQ ID NO: 1991 - protein, 361 aa, Photorhabdus luminescens
LTGSLRHGNNIMQTLSSIINAIVPLDNVAMARTATRLNGLVKPTGSFGRLEHLAIQLAGMRGLSGHHIDRKQIIVMVADHGVYDEGVTISPKSATAIHAQNMMKGITGVCVLAENAGADVKVVDVGIDSDPVPGLVNMKVERGSGNIAQGPAMSRQQAEDLLLASACLTLEQITNGVQLFGVGELGMANTTPAAAVVSVFTDNDPQQIVGIGANFPSERLHHKVAVVRQAIEINRPDARDSIDVLAKVGGYDLVGMAGVMLGAASVGLPVILDGFPSYAAALAACRIAPDVRHYLIPSHLSAEKGSIIALQHLQLAPYLHLDMRLGEGSGAALAMHLVDAACAMYNNMGLLAESNIVLPFZ

SEQ ID NO: 1992 - protein, 206 aa, Photorhabdus luminescens
MRLFLVRHGQTEANLSGVFCGMTDVELTETGINQARQVARYLSAVTFSQAISSALRRARHTAEIILAGHSLSANIDTQLNEMHFGAWEMRHHRDLQHEDAEAWAAWLADWQQASPTGGETFSAFAARIENVVQQLLTPESQDNLLLVAHQGVLGLLLARLLAIPPAAMWHFHFEQGTYSVVEIQHGFTTLRTFNNRTDWQLETRKZ

SEQ ID NO: 1993 - protein, 249 aa, Photorhabdus luminescens
MSLRLFLATLQFMTRIPVPSRWTQGVEIDQYVRGIASFPLVGLIVGVLASAVFTLLAPWSGAPLAALGYVLALALLTGALHLDGLADTCDGVFSARKRERMLEIMRDSRLGTNGGLALILLILAKVLVVSELSLRGASMLMALTAASVAGRSAIILLMYRQRCAREGSGLGNLYIGRVNGYQALLTLLGGAILIALLIRWSGVLALAITLLVIGLLAMYLHRRLGGQTGDTLGASVEVGELVFLLALLZ

SEQ ID NO: 1994 - protein, 514 aa, Photorhabdus luminescens
MMGLSLMLQGTASDVGKSVLVAGLCRIFVQDGYRCAPFKSQNMALNSGITINGEEMGRAQIFQAEAAGIEPDVRMNPVLLKPTSERKAQVVLMGKVACSMNAVEYHQYKPSLQQQICEVFHSLASEYDVIVLEGAGSPAEINLRDRDIVNMGMAEMVDAPVLLVADIDRGGVFAAIYGTLALLRPAEKARVKGVIINKFRGDISLLQPGIEQIEALTGVPVLGVMPWLDIDLEDEDGVALQTGKYDGATEKALDITVIRLPHIANFTDFNALAVQPDVRLRYVTQPSALQPSDLIILPGSKNTLGDLQWLRQNGLADALLTAHQAGVPVIGICGGYQMLGKRIIDGVESGIEQMDGLGLLDMETRFAHEKVTTRVNGNCLLALPGLLSECVEQPIRGYEIHMGSSLLGADATPFIDITERNGQSGGWCDGAVNREGSVMGSYIHGLFDSANFTRALLNALRQRKGLAAYQGEILDYTHYKQTQFDLLAKAMREHLDIERIYQCMKTHRQGSVPZ

SEQ ID NO: 1995 - protein, 238 aa, Photorhabdus luminescens
MNGKLYAIGVGPGASDLVTVRAARILARLDVLYAPAGRKGGDSLALSIVREYLLPHTEIRTCHFPMNSNGDEKQVVWDEVAQQLQDEVAKGRQVGFITLGDAMLFSTWVFLLARIGRQEWLEIVPGITSFAAIAARSVLPLAMEQQSMAIMSCTAPEAELEQALQTHDCVVLMKVYSRFAAVSTLLARLNLFEHALLMADATLPSEQCWCRLDQVDADQKLPYFSTILVNKQWHTEKZ

SEQ ID NO: 1996 - protein, 265 aa, Photorhabdus luminescens
MKKALLIISFGTSYHQTRQKNIDVCEQQLAAAYRDRDLYRAFTSEMIIRKLKKRDGLQVDNPRQALERLVNEGYQDVAIQSLHVINGDEYEKIVSEVRTFSDHFQRLVVGTPLLNSFADYQQLLIALKSQMPPLAEDERVVFMGHGASHHAFSAYACLDHLMNSHNFPALVGAVESYPEIDHIIIRLRRQAIRKVHLMPLMLVAGDHAINDMASDEPDSWRSQLEAVGIKTQSWLQGLGENPLIREMFVQHLADALQAEQQEVVZ

SEQ ID NO: 1997 - protein, 262 aa, Photorhabdus luminescens
MSHPAIHVFGGTSDARLLCQALDAAGAGYRLSVATDAGRQLAGDIQGEVVVGRMDAEAMVDYFDQHKVRWVIDASHPYADALSQNVLTACRRLSLRLTRYQRPSEIDLLSHPLLHKVNSIEAACDVARTLGQRILLTTGSKQLELYQRLLPGKTLLVRVLPTAEVLIQCEALGLGVDHIIALRGPFTAEFNHAVYEFCHPDVVITKESGAEGGYQQKVAPCLALNIPCIVVCRPTQTLQGDEGEQISSLDEFVQHLASWQEZ

SEQ ID NO: 1998 - protein, 278 aa, Photorhabdus luminescens
ARPSRVRDCGNGMNHMRLDDGLSTGPRQFYQLPINVTLLDKVLDQMVHSHHRRRTFQFDLQMLVRHRLATEHLAHHQGRAIGRVSQHQVILMATNEDFFRINHRHDQAVQSLARVIVVNDNRAVMRPHLLAEAVGIVISTAMQHHTVDTGDQRWGQVVPATTRTPAPNQQRRTNTLDTSVMIQLLHTIILDPVQCLVRWAVHIRALLPGSNSDETQIVFSLDATVGEHLTTADIEPTLCVIALQGQHAFGSPLISNLSKCLWQTSEVVLLPAFIDGDZ

SEQ ID NO: 1999 - protein, 242 aa, Photorhabdus luminescens
MLTVIGIGPGNESMMTQDAIAAIQEAEIIVGYKTYTHLVKHLTMDKEVIKTGMCKEIERCQKAIDLALSGRKVALISSGDAGIYGMAGLVLELVCQQQCDLEVKLVAGITASIAAASLLGAPLMHDFCHISLSDLLTPWPMIEKRIIAAAQADFVICFYNPRSRGREGHLAKAFDLMRPWKAAQTPVGVVKAAGRKKQDKWITTFGEMDFSPVDMTSLVIVGNQTTYCRDGLMITPRGYELZ

SEQ ID NO: 2000 - protein, 354 aa, Photorhabdus luminescens
MNIAGHESIAVFCLTPGGVRLVHRLKTHLPLTCFTSEKLLEPGFTPFNGSFGDTLREAFKHYSALVVVAALGITVRLLAPLINDKMHDPAVVVIDEGGQHVISLLSGHVGGANALTHHLAALLGADPVITTATDVNGMAALDTLATQLDADMQDFRHVVKVINQMLVSGQKVGLWWDEPLLSEREQCDIRGFVSVACLEELPELDALVCITLRDALPELPLPVYKLVPKRVVAGIGCRRDTPLQTVIELLQQQMAENHFDLMALRAIGSVVIKKDEPALNQLAQRWRVPFQLFSVNELSLHEQRFPASDFVRQTVGVGSVSQPVAWLMSEGKLVGRTLRQQGVTITLGVSQSCZ

SEQ ID NO: 2001 - protein, 258 aa, Photorhabdus luminescens
MSEYFDPRKVWFVGAGPGDKELITLKGYRLLQQAQVVIYAGSLINTELLDYCPPEAECHDSAGLTLEQIVALMVDGVRAGKLVVRLQTGDLSLYGSIREQGEVLTEAGISFVSIPGVSAFLGAAAQLGVEYTVPEVAQSLIITRIEGRTPVPPLEQLESFAAHQTSMAIYLSVQKMRHVAARLQAGGYPATTPVAVIYKATWDESLTVRGTLADIAEKVQTAGIRKTALILVGAFLGEEYHYSKLYDAGFSHEYRRAZ

SEQ ID NO: 2002 - protein, 201 aa, Photorhabdus luminescens
MITVVGIGPGDTAYLIPQAQHSITEAEVLVGGRRHLEIFSGITHETRVLDADLAGLLAWLQNNSTRRIVVLASGDPLLYGIGKLLSEYFTADDLRIIPGISSIQYLCAKAALDMNDIYLTSSHGRTPDFDWLLQHDKVGMVTDGRVGPRAIAQAIIERGLNRTLIIGENLSLPNERIHRLRPEAVAIDYDMNVVVILNERZ

SEQ ID NO: 2003 - protein, 379 aa, Photorhabdus luminescens
MSDTMQLDSIWHNGKQYRKGYTTGSCATAAAKVAALMVLRQQVIDHVSIVTPSGVTLRLNVEQPLIEGQQATAAIRKDGGDDVDATHGMLIFARVTLCDHGEIHLRGGEGVGTVTRKGVGLPVGSSAINRTPRQTIEAAVREAIGPLRGAEVEIFAPEGEERAKKTYNGRLGILGGISIIGTTGIVTPMSEESWKRSLAIELEMKRSAGAEKVILVPGNHGERFVREQLGLDGQLVVTMSNFVGYMLQEAVRLGFRHIMLVGHPGKLVKVAAGIFHTHSHIADGRMETLIAYLALMGASQELLLEVSHCDTTEAAMELIAEHGLQAVYDRIAERICERMSEMLRFAVNPPRCDAIMFSFDNQILGTSRPLNDILEAMRZ

SEQ ID NO: 2004 - protein, 211 aa, Photorhabdus luminescens
MNYLQKPQQIEQNSFAIIGDIIASERPDYRFVDEMQEAVIKRVIHTTADFDWLDILWFSPGVLSRMTEALRRGCTLYTDTTMAQSGINKALLHQMGCECRCYISDPRVVAMAKAQGITRSMAAVDVALAEEGDKIFVFGNAPTALFRLLERKASPLAVVGVPVGFVGAAESKAALMQSELPCIAAAGRKGGSNIAAAIINAILYRLQEAQZ

SEQ ID NO: 2005 - protein, 320 aa, Photorhabdus luminescens
VTLAAWFAAFLLDSWLGDPPHWPHPVRWIGKLISLVQRAVRRCCHSERALKVGGAGLWIVVVGLTWLVSWGCLWLMNAIHPWVGWLVEVWMIYTLLAGRCLSDTALEVHGVLQQGLLDESRQQLSWIVGRDTSQLDAPQITRAVVETVAENSVDGVIAPLFFLMIGGAPLAMAYKAINTLDSMVGYKTQEYHAIGYVSARMDDLANWLPARLSWLLLSAAAWFIRLDFRQALRIGWRDRYQHTSPNCGWSEATVAGALGIRLGGPSCYFGERVEKPWMGDERRKIALTDIPLSIYLMMIASQLALLLFALLRLLLVGMAZ

SEQ ID NO: 2006 - protein, 537 aa, Photorhabdus luminescens
KSSAAPAAVMLTTPLMPLVGKTGKVAGKGDAKPEDRPDRHETLTPSVGSELSSKWCARCWHVLLALLFRSTYREFSMQWSGRKAFVIAGTGSGCGKTTVTLGILRALMLRGLTVQPFKVGPDYLDSGWHSSVCGVASRNLDAFMLPTATLNGLYNQHMRHADVAVIEGVMGLYDGYGTNPNYCSSAAMAKQLGCPVILLVDGKAVSTSVAATVLGFCRFDPSLTIAGVIVNRVNSENHFELIRHAIEHYCGVPVLGRLPVMKDVSLPSRHLGLIPAQEQADNDARWQRLAQQVEAHINLDRLLALCDCPTLPKGEAPSLPDPALADGLTLALADDEAFNFYYPDNLEMLERVGVRIHRFSPLHDRRLPDCQMIYLGGGYPEIYAAKLAANSAMREALQDAHCRQVPIYAECGGLMYLGKSLTDGEGASHQMAGILPGESHMGTRLMRFGYCQAQARFDTLLAAEGEILRGHEFHYSDFISSVPSVFDCTKWRDGMAIQQWAGGYQVQQTLASYLHIHFAQRPSLLDRWLRSARRLLZ

SEQ ID NO: 2007 - protein, 515 aa, Photorhabdus luminescens
TTRGKNMKKIFLATLITGIVSASFFAQALPENNSEHIADLQDNTSNEAPLLKSTDPGAERFKHVGKLSGRGQCTATLIAGSETPDANQQALILSAGHCFDSSLDTNEVIIDQPVGPGWTYTPNYFIDLINEHQPVDVDRVLYATMKGGDLAVFRLKATYGELAKRGILPVTLQKDHEPSALELTSQQIELAHIPVNGIESDKRYLRYSACNITGKASLVYEGIWAWSPAAAVNCAGVAGGTSGSPVMLKDQSKIIGVLNTTVDRSYWGCGLNRPCEFIIDHSFSRTGASYYMPIDKIARAFTSDGKLDLSKFDDGKGITINTSGPLITKGTVNNKPVTWNLRLEEKGFDNIRYKRGLASNVDCTDPKGYSKPVPVTTQPLEKLTVPSKEGIYTMCVIGQHSANKRWQSTSNASIKLREIDNTLPGIRPDSTLLFQTDDSWVIDLRFRPWEVVDIRYKAGPRKSTKCDDYKNYSTYRRVPITIKKKDSPIRFCMYGLDQAGNIGAIFFEDFGEQKZ

SEQ ID NO: 2008 - protein, 212 aa, Photorhabdus luminescens
KLTHKNHLMRFRIISSKEFINMITLKTLIGTTIVILASSTQLALAAETKENITDKEATLEVSESRISNLSATYALQIKNSSATKSITLVTQSSNCMYDSGDEKIRLEAGKTYLGNLQDNNNWIDGCTNETKTVDWSVSYINVANTDTENYTLTFRHGRGHANSDGSGPEWYTLIKGCPDIVENAICGGQICYNSQAYWVRNRSVNIELSVKZ

SEQ ID NO: 2009 - protein, 716 aa, Photorhabdus luminescens
MTTSDKSSHTHTDSDEIDLGRLLSALFDYRWVIGGITLLFTVIGLCYSLIATPIYKANALLQVEKRSSALPLIGDMSDMLSGKPSDTSAELELLTSRMILGKTVKDLNLDVQVTADYFPVIGKGIARLRGMPKPNIVIKHFTISPEYINEGIKIYVDDAENYRLFFDDQVFHGQVNKVFDTDGINLLISNISASPGQSFTLVKRGQLGVIRGLQQALRVKEKGNNTGIILLEIEGDDRARIKLILDSIGKNYLQQNVTRKTEEAESSLNFLKNHLPKVKIELNRSEELLNQYRQANESIDLSLEAKSALETLVQIEKQINELTFKEAELQQLYTKQHPAYVALLDKRKTLVDTKKELNQSIKRLPKTQQEILRLTRDVQVDQEIYVQLLNKQQELNIVKAGTVGNVRIIDEAIVESSAVKPKKSLIIASMMVLGFILSAGLICIRVMFRKGIESPEQLEEIGVSVYATIPLSETQIKLDQQQKKRIHRQKLRLLAIQDPTDLAIEALRSLRTTLHFSMMESANKIILLSGSAPELGKSFISVNLAAVLALSNKRVLLIDADMRRGRLHKVLESPQSLGLSEYLAGQHQLKGIITRTYLTELDFINRGAIPPNPSELLMHNRLKELLSWAEEHYDYVLVDTPPILAVTDAAIIGRYAGTSLLIARYHKTRVKEVNVTIRRFRQNGIHIKGVLLNAVEKKSGLYYDSSGCYQYSYKDZ

SEQ ID NO: 2010 - protein, 209 aa, Photorhabdus luminescens
PTDLARILIKPRLKLRVDLSGGDVYPPRCRIVGVVEIGMVTHHRTQLGMSGLLVGGVGEQHPLLAYIIERSTNISSVVAVVLHHYVLPVQLMRFGQITQVLLDLLAGHLPLARIFAYHLSCQAGKVNFSYLALAVDHQYLPVLGRVKFDYHPANHQLVLRHADAVTGELTAINDPARQCTGAIARELNLGAFVKANQVLATRSLDLVAZ

SEQ ID NO: 2011 - protein, 243 aa, Photorhabdus luminescens
NLGLTETVNLAKNSAQQSFVDANFARGNVEIVNTKSIYPRINFFPPLGKESRGFFAIEADLTNDNTQSIYLYKRNVAGNNIYLINFPNKSGILATIDDITAPVGVPLPYPSRYTPAGYLTCNGQAFDKSRYPQLAIAYPSGILPDLRGEFIRGWDDSRGVDMGRGMLSWQPAGIQDHMHYKVISKQVVEDLVLAGNQSWGTEKNSTYTRSLDQNISTGGVIGTTVNETRPRNIAFNYIVRAAZ

SEQ ID NO: 2012 - protein, 190 aa, Photorhabdus luminescens
LAEKAGWLTIYHAAPHSREFIGVTPEYLMKGVGIPASSYTNAPTLPDSDSLAVRRTADGEHWEIVPDYRGKTAYNTQTRLPQEITDLGELPKTLTFEQPATHFDRWDGSKWVTDKVAIKDSEIEQAEQLRDTLCTQSNETITLLQYAVDTELASEEEQTLLLEWKKYLVLLNRVDTSLAPDIKWPEMPEZ

SEQ ID NO: 2013 - protein, 519 aa, Photorhabdus luminescens
  misc_feature (118)..(118): Xaa can be any naturally occurring amino acid
  misc_feature (123)..(123): Xaa can be any naturally occurring amino acid
INMKLTKNHLIKLLPVVALFIFCLLAHMALGYRLKIAYVFAIFFIFLLLNKATVVYRPLLIILGIATLVYAPIGLTYGSPNLNSILSLFYTNKQEASEFISSIPVEYYLFSALILIFXLLSLXVNVNLHRNISVFLFSFALITVIHHPLKSFIQGEEFNILDSGLPEIRAVKDVTINFIRVKSEYEKMQQILSEHDTWGTVSAKSKYSTYIVVIGESVRRDFMNVYGFPIHNTPFMSTANGTLFTNYISVGPSTQISLANSLAMVKDGKNILSNNIVTLAKKAGFYTYWISNQGSMGIFDTPVASMGARADSPLFIKKGESSSGLNRNIPDTDIIPIVKKALEDKREKKLIVIHLMGSHSPSCTRTNYEYKVFFKSEQVSCYIQSIENTDDLLSIITDEAQKNEKNWSLMYFADHGVSFFEKDSKKMRLAHNDKYKQDYQVPMFITSYDDTSRNIINVQRNSMNFLTLFSDWTGIKESTIPENCKMLSNEICENQDDVLNFSNKVMKYSSLPEDKIPEZ

SEQ ID NO: 2014 - protein, 367 aa, Photorhabdus luminescens
AMNIMITNFHTGNGGGHTTYIMNIVKYFDYNKGKLLIACPPESRLYKELTNSGFNNVIPLYFFCKLNKLKQLVITCKILSQIARRQKIDIIHTNGTSDNKIAILAKILFGMKCKIIYTKHNHYPVSWLSKIRLKKFNERIIFVSDSTRNQCSSFISDKQVVTIKNGIDTDKWKTEHPVIEKGKITLISSAGTAEHKGWHFLIRCLAKNKELSDKFRIKIIGRIPRQEDINKLVGALFSHVDIEFTGYINDDKEIINYMENASIGFVLSTDCETISFACREMMACSLPVIVSDFGGLPENVDHGVNGWITKARDETSIHNVLNLIASLSSQELKELSEKAREKAVNEFDVRKMVSETISTYSSVRNSZ

SEQ ID NO: 2015 - protein, 268 aa, Photorhabdus luminescens
TTESLGLTETVNLAKSAVPNSRKVNGKVLSGDVNITSQDIFNGQAISIPDKADLNDYQTPGLYYQGLNVQATAGKNYPEASAGSLVVLQAAGTIQRYFVYNSSRIYTRALYPWSGPGWTPWAQEYNTQNKPIAGDVGAYPKSGGIVNGNVDATGYISGKGVYEAPGVRVYSSMNKPSPGELGAYTTGECDNRYALKNDVGVINLRLGSWVTEGGWTDETKDWSAPSGHVLVGLGTVMWSSGRQHLASVHYRPVQAYINGIWVTISSIZ

SEQ ID NO: 2016 - protein, 326 aa, Photorhabdus luminescens
MNNDVLVSIIIPAFNVEDIIENAINSVLNQTYKNTEIIIVNDGSTDGTMDVLNRLSEQYFNIEVFSQENRGISAARNVGLSKAKGDYVTFLDSDDSFEPSFIESVLRKNGETKSDITFCLFKNVYTDKEICSKDYRDLNNLAFNFLNFDYFGICCMLIKRNFLLENKIWFDENLIVGEDISFILLCICKAKFSYIPEYLYNYIYRSDSIMNKRWDVKNYIDEIQAWDKIYQDMDTQYHNEDRETFMRKVKSKALSLKGQLMWKMLASKRFDELSSFLSDFSYQRQDAEFIRKRNKFLFRLKIIKSKNKIIWLLANLLLTKRKDRIZ

SEQ ID NO: 2017 - protein, 323 aa, Photorhabdus luminescens
MAYTQLTETERYQISSLKEAGFSQLFIAESLKRSPSTISRELKRNQEVQTYCPEQAHLKVLARRHFAKKAVKITPEVKRWIKRLIWKDLSPEQVADYLKQHKGISLHHETIYRLIYQDKREGGDLWQHLRIARKPYRKRYGRYERRGKIKNRVSIDERPEIVDKKERIGDWEGDTIIGKDKKSVLLTLVDRKTLYTIIVKLDSKQASEVAKAAVKVLYPLKQRVKTITFDNGLEFADHEIIGEELETQIYFAHPYSPWERGINENINGLIRQYFPKGTDFNEVSDQEINFVVNRLNNRPRKTRGGKTPNELFKGIRTCLLPDZ

SEQ ID NO: 2018 - protein, 259 aa, Photorhabdus luminescens
INMKLTKNHLIKLLPVVAFFIFCLLAHMALGYRLKIAYVFAIFFIFLLLNKVTVVYRPLLIVLGVVTLVYAPIGLTYGSPNFNSILSLFYTNEQEASEFISSIPVEYYLFSTFILISCLFSLKVKINLHRNINIVLFSFALITVIHHPLKAFIQGKEFNILDSGLPEIRAVKDVTINFIRVKSEYKKMQQILSEKDTWGTVSAKPKYITYIVVQGIYYISSNCKTGPADIITNEVNCELYPVDKPSELISKLQNTEYSZ

SEQ ID NO: 2019 - protein, 225 aa, Photorhabdus luminescens
VQYQRLFTVIFLYIISINFAIAGVVIGGTRVIYMSDKKEASISISNPEKDAPYLIQSWIQDENDNMKTPFIVTPPIFKLAADHENILRIVKTESNLPQDRESLFWLNVKSIPTSVKSNQNQLQITVKSKFKLFYRPANLAEKSSTAYKELKFRTENNSLIAENPTPYFISFSYLKVDQHEIKPAGMIKPFSQLSWPLPAKNIKQVNWKAINDFGGATAEEKTTIZ

SEQ ID NO: 2020 - protein, 879 aa, Photorhabdus luminescens
IGKQLMILVVLLPRKKQPFNKTTTLLYARKLIMGKCSQHKINKQPYNIEHSWLLLLPFITVGVLFYPAKTYSEDYFNIHALEIGTDFGSPEDIDLSIFTQDDYPPGIYWVDIYLNRDKIDTRNVTFVTINNKLLPKLTIQQLQDMGVKIDSFPELISLPPETELSDLSQYIPSASTTFNFSQQRLDISIPQAILNSQARGYVSPELWQQGLTSLLINYNYSGSNTWQDNPSGSTQTHYLNLRTGANWQAWRLRNYSTYTSRDKSWKSINTYLQRDIHALKGQLTLGDSFTPSYIFEGVQFRGLQLVSDDNMLPDSLQGFAPSVRGIAQSNAQVTIKQNGYIIYQTYVSPGPFVINDLFPTTTSGNLDVIIKEADGQEYRSTQSFSTIPIMLREGGLQYSITLGQYQSSNNRGREPNFTQGALVYGFSNNITAYGGTIFSKDYQSVALGSGYNFGILGSLSFDITHANTDLPSNISTKGQSYRFQYAKDLSLTGTNFTLAGYRYSTHGFYDFKEANDIENSNKSDWRYRTNKRSKLQLHINQSLGNFGSLYLSAFQQNYWQQPGYERNINAGYSTNYNNINYSLNYTYSQLPDTNKNEQLFSFSIQIPLDRWLKNSWTSYNFNTNKNKDISHQVGLSGTALQDNNLIYSLQQSYTNHGTGAGGHIHAEYKGAYGQLSTGYSYDRHSHQLNYGLQGGIVAHPYGMTLSQHLGDTLALVRADGAQGIKIQNNVGIATDWNGYAVIPYVSSYRKNRIALDTHSLADNVDIDVNAQTVIPTRGALVLADFKTRIGHRVLINLYYQENPIPFGAVVTLEKHHDIDEVNSAIVSHEGQVYLTGLPDSGRLFVKWGYKDIQECVVNYNLPEKTPLSGIYIIAAHCKZ

SEQ ID NO: 2021 - protein, 3043 aa, Photorhabdus luminescens
LNTFVPKVMVFRSGRMSNLYRQTTNDKQLFAARRVSLKNRQRSIAMVSISKDFTNLLNTLIDGQIEAASRQTEWFNMRPDERADYIRQVDERLQEMQQSTLSVLAAQHFQMQDSPVSVGDQLQTLQQRRQQMNDVPGTPAINAYKQQLDRDILLYSRQQMTITHFDGTWRKALTMLNPGGSKTLNTTTLRENAAGKQVKLDIKIKRLEQQLTMQVAASTLFGPKYVMLFSELQAYKEVNARYNALLKASSTEEAAALGGLTTVPPASDDLPVNISLLMMEERPGYIRMNVALVNASTDGRFKDFFLENGRLVVSADKVFNFSFGTAARSLAWQQQYRLKSEPPSFRSPTYAPIRSVLVKTEFVEKYFANYLVSESTLREGFKAQLLGNGRKMLLTSVDRKVPNQVGIQISGQVSNTTITREVPLASALSDLINQNADIASFQTIGLEGFRQNGYHPDRDGLFVNIHELERSVGFASRQYLLEMPQGNGYLSATPFGVMNVDDNKVSSSHLSKAQTDTLYQYNAAFFEKLEQLRDGGTKASRLFKGSEDRKAFEQQLVRLLERNHITPAGVLAPEYFRNNMRDIKGNNLNKALWEQAFAASVWRSSDNDPLLFGLATRLVKNPAVVKVLQNGYVQSDIVQARGLLAPLYEQWRIRAIEVEIQRVASANAAQHPSNPKVQVFDQAAVDRSLDDKLLTLLLTGSQGLESADAQLRPAVEAVLLSNEGRSLRKQVLFHALRPVADSFSKAAVPVNPHAALGDGKVMINNRLNQPDPYLILNTSSEEQTYHEDSYLIKDDKYRSYNQFRPDPKNDATRYMNDLDTPFVGGISGTTQTVSNALPELFGGALSVKQYWQFQMANAAFMIRNGYHSFFETLYVAARYEPEGADSIGKDMLQMFDKYRAEGSKRELWGELYDGVMARVLPIINQGLPAADEFHPPRFTYMGPKPALLGQAVKDLELKAGLVSVGDGFEPRQGSADIHQFATDPALFAKTHTISAEVLVRSGHLPAKGSAQLVKVRSGLYEIEYTKQNANSISSSSVSAYFLGYNGLNQANAVPAYVDIPKHVAAGSFLFTGTLSGGSLVVTSLDDNTYRVYHDGRFNSSLLYDNVVMAVDYKDYQISDTAGGFAAAYMQYVNGEWQLVFQRQEYQRDGQMVWPKLRGDVEPLSIQIAGSQVVERNQAEFATYREQVHQQLKTVATQFGVSVEGVTDGVYTEGEFSPEHPAIAAWTRLREAVQAKVKANMDPVADKLYQLQQARRTSSDTALIDQQIKQLNLTQDYYRAQYDPILREASSVEKTWLWQQIKAKDGSVAVVQIDDTAIQGEERTSSVGERYAASEVYQRGAQGTGFNDGLRNFREIKIPGVDDKMSVLEMKRRFLEGKLTHEQREALSARIAEISQAEYIDKVLRQTAMFSEDFHDAGSVFNRLVPQDFYLSLVGDRTGGRCYPLVRTMAVALAGGGEAGINSLVQKLFFASADPQAGSSTLLKNSLISLHYNVEAVQASTELGQFNLSEVVSRLAATTGTSMFALNTQNHSMMVGSTVTAEGRRYYFYDPNVGIFAFDNTKSLSRAMEQHLVVRGLAAHYGSFGSKSVPAFNLIEIDTRKMAEVPVGNGLNVADLTRFEELASVIGQRRQVEQVVSVQEWVMEDLRLSPALKTFDAEQWGARFEVASARLAQEHQLDSRWLPIIATTEDQGEGRYRVQFINRDQPEQTRWLITSDSTFVEFRRFIDEHMAVLNEHFTLEHGRMRLRGGVGEAAPVDGLNAGFAVQTLIQWFADKNRHDAASGVISPDLATALKVHSYLNLVQMAHGGVQDIAKVTALVRTALRGEVVAAETSLKDFASNLGHTVNEGAGVLFGGAMVGLDAYELAHAENDVQKAVFGTQLAFDSASFVTGAAGVGAGLVGASTAGAVLGGASVILGGLAVGFTALAQAFGAVAEDAKAVGRYFDTVDKAYKGNGYRYDNKNKVLVPLAGAVIKSLDLRKHQISFDSQYIYRTHSGSTGSGEINYFFWVGDFPRMVHDRGQAIEVRSGIGYKDISRPLEHSDSNVVILPGTPKSYISYEYMLLPGATTRHDAGFDVIRRLEEDKRFDYDFYIFPGEETIRRIHHEYVDTPIEVVLDQRNRQLVVPELPKELHSFLRYEIKGAGGEYLIGLNEGTQVKLTSDSASALSRWIIDSSQLASDSISVSKNQLVVGGVVVELDPTQNGQVLVVNGKGEVREVDFAGLTTQVVSEDAGKWQVPGQQIEQHLSDLAKAHQLHGQYVVVENYSHNGRDVGRAFYDVGKERMLFTNTTHEQTRHAQLGAVMGDHAYFYDADNAAAWRVDIATGQVDAQFEPWFNQNAGQISRLWQEGDAVYLARRYRLKEKEAELEKEAELCYRILSDRMELVSAVGDDALIQLLARTSQHSDVLKAILQGYESKSIQRETPMYTLGTRLLQPTSAALVTVFGVDAAGVAHRYWIRTGDGTLIKPNLAPPADQTPHFKENEQTRSAWPIPADLVLAGSMPQPGGKEVFFFYSKEQKVLFRQEGPGQAVLDASHPTALRISTPALANLVNLNGSLLAITEDGRVARLDALGQLNYEAVNEHWLKGRTHWWQDLASVADGRATLAVFGIKGTDGKSLLPVWYHKGQVIVASAPLQDKRLQFLGFEVDGSGARLFEPASGKLYRQPPMTADALAAAFGTDEVLEVSSQLPAAGELASGLHLKAVEQVDVGLRLTTVKGEILLQTNDGKLQLVAVDKGWQQDNFARLPQALAEVADKWRTKGVLTLQGDDTQGWFDVGSGQVFSYGSIQAKDNLRFIGIAAGKKGAYVYSPTDQALYRVKDDSVQKLNHYTSVERIGSSLLIRGGGTGGRRDDLTPPLITGVDSVVLHGGADNDTYRLSQEMWSHYRTVIIDNDDPGQALDRLIMPMVDAEKILVSRHEDNLMLTDSANGTTLVVRKVFGSQAVTHQHLQIELEGSSSVMGVDHLVKNFIQKSYINGELVELSWASRQPVIEPHVIHSVAAVPDTGGPSLAKLSGAMASFPDIGGAREHLPQNRQSAPAALVPPLSZ

SEQ ID NO: 2022 - protein, 343 aa, Photorhabdus luminescens
QLTVNNHPQENAMFNIYNKFKYFLIITNLLIGLIVSSYSFAANCQFEKGFKPEITHLSFGTLYVPRDQAIGTTIYEYRADELDNKNNIFYCDTNINTSWGYTSYKSAEYNKDAVYESGVPGVGIRINTWGPGYGIDWLPRIANNPVSCDNSGRWYCGKTWGYLTIQLIKIAPTTGSGFVRNEQLIQARVNNHIVHTYRLGNTRIITKSCSLKNNNVTVPMGDIKKSDFSGINSIAGGKDFEVILDCDDDVQIQLMLDGKKAKNNLYHVWALDQNDNRTTASGVGMQILYNNQPVIIHSQINIGNSYSGGKLSIPLHARYFQTDRNITPGQANVTATMTLTYQZ

SEQ ID NO: 2023 - protein, 303 aa, Photorhabdus luminescens
RYNSGSRMKKLILFLMLVSFNSLAVDRHITAKNPYPNLTPEQLSLQIKQQGARAVIKNMPEGDNGEWNYITDHIASGDITWLKVAPLLAKGSDAHSSETLSTALATALPKNVNGVLSILDDSNVSISTDSVCLLSTSVSLESNLFSDFVNLASNLPSTSVNLESNLFSDFVNLASNLPSTSVNLESNLFSDFVNLASNLPSTSVNLESNLFSDFVNLALSCSSLGFLDKVLLITSNFCMITATSVFIVPTSLMTDFRSAFTSLIVALICSTSDSSFATRASNISPPPPPLPFPYFIVLGKCLZ

SEQ ID NO: 2024 - protein, 249 aa, Photorhabdus luminescens
VMAKIYEFSANDIATIESHKHLPNTMKYGNGNGGGGGDMLEARVAKLESDVEHIKATMSDVKADLKSVISDVGTMKTDVAVIMQKLDVINNTLSKKPSEEQLNARLTKSENRFDSKFTEVEGKFDARLTKSENRFDSKFTEVEGKFDARLTKSENRFDSKFTEVEGKFDARLTKSENRFDSKLTEVESKQTESVLIETLESSRIDNTPFTFLGNAVANAVDSVSDEWASLPFASKGATLSHVISPLAIZ

SEQ ID NO: 2025 - protein, 1248 aa, Photorhabdus luminescens
VKESQKIINRQAACPTIKYPENLPVSQKKDDIYKAIRDHQVVIIAGETGSGKTTQIPKICLELGRGIKGLIGHTQPRRLAARAVANRLAEELETSVGSAVGYKVRFSDHVGDNTLIKLMTDGILLAELQNDRLLKQYDTLIIDEAHERSLNIDFILGYLRQLLPKRPDLKVIITSATIDPERFSRHFNHAPIIEVSGRTYPVEVRYRPVMGEDNGGERDQLEAIIDAVDELNREGPGDILIFMSGEREIRDTADALNKLNLRHTEVLPLFARLSNSDQNRIFQSHTGRRIVLATNVAETSLTVPGIKYVIDTGYARISRYSYRTKVQRLPIEPISQASANQRKGRCGRVSDGICIRLYSEDDFLSRPEFTDPEILRTNLASVILQMTAIGLGDVSAFPFVQPPDKRNIQDGVRLLEELGAIDQGAMAKSHYRLTSIGRQLAQLPVDPRLARMVLEARQHGCVREVMVITSALSIQDPRERPLEKQQASDEKHRRFADKDSDFIAFLKLWDFLKEQQKALSSSQFRKLCRQDYLNYLRVREWQDIYTQLRQVVKEIGLSVNSQEADYRGIHTALLSGLLSHIGQKDTDKQEYTGARNARFAIFPGSGLFKKPPKWSMAAELVETSRLWGRIAARIEPEWVEPLAGHLVKYHYSEPHWQKSQGAIMAREKVTLYGLPIVASRLVNYSKIDPMLCRELFIRHALVEGDWQTRHAFFRANLKLREEIEELEHKSRRRDILVDDETLFSFYDQRLPQDVVSARHFDRWWMKTGKEQPDLLNFEKNMLIKGDADKISALDYPNYWYQGALKLRLSYQFEPGMQADGVTVHIPLPVLNQVKDEGFDWQIPGIRYDLVVALIKSLPKPVRRNFVPAPNYAQAFMERVPQPQSTLLDSFEKELRRMTGVTVSRDDWQLEQVPEHLKMTFRVVGEKNRTIAEGKDLSALKLRLKEKVQETLSAVADDGIEQSGLHIWSFGELPGRYEQKRGGYSVKAFPALVDEKESIGIKLFETEPEQKIAMWEGTRRLLLLNIPSPIKYLHEKLPNKSKLGLYFNPYGKVLDLIDDCISCGVDKLMTVNGGPAWNEQGFIQLQDKVRAELNDTVVEIAKQVEQILTTIFAINKRLKGKIDISLALALSDIKEQLSGLIFKGFVTTNGWKRLPDVLRYLQGIERRIEKLAIDPHRDRAQMGRVENVQQQWQQWLAKLSLQQKQLPEVQEIRWMIEELRISLFAQQLGTPYPVSDKRILQTMEQIASZ

SEQ ID NO: 2026 - protein, 201 aa, Photorhabdus luminescens
MSKVLVLKSSIMAQHSHTNQMADFFIEKWQTNHADDSITVRDLTAQSIPALDNELVHALRPSGNEMTARQKETLALSDELIAELQDNDVIVITAPMYNFHIPTQLKSYFDMIARAGVTFRYTENGPEGLLKGKQVIILTSRGGIHKDGPSDLLVPYLRLFLSFIGLTDIEFVFTEGVALGPDAANQAQQTAREVLQAIASZ

SEQ ID NO: 2027 - protein, 876 aa, Photorhabdus luminescens
LITKGLKIFITILMLSVLLIAVGWFSIPHWLPKVTGRWLPPGMMVSLKQPKWKNGALQLDDISLQVKDCRLIRVSRLSVSYPYSEIDNSYHWRLNAADISGDINCLNQLPKSTQSHDPLSVADILALIPQGSLSVENLSFHPWQDFAGRLEFNSSSQGQELSYQGKKVKLSAHIYGKESLVIDQLAIKLPEQEISLNGEMTLPLNVDKLPPHGDVKGKIIARQYAHPLNIKLGWRGTSGKLIIGEEGTTVPLAELPWQFNQDQFDITDGKWQWTSAEQPLAGGVNIKIAHWQQGLDNLLMSGRINLVTQGKRGKANIVLTIKPGRINSLNTQLPLQLTGQINVQDMMMAMSLPAIIDGPLVNPKMTFQSGSLFRVWGRLSDEFMVKDARSPLAGTYLTREGFTGRLQAIVNAQHRDWGKFRLHLDGHAEDFMPDKGYWRWNYWGDGYLPPLQAKWDIVGKGRWHDTLINVNEMTTGFNVIKHGMIRVDTPRLQLTKPLEWQRSEKLPAFKGELRLTAKKTSFRSGGFLPPAELTAKLTGESPNNFIVNGDLSSRNIGPIPFYSRWDGARLRGEARWPTQSLLAFQPLVPKDLGINLRSGDLYAQAAFSATRGQGFVAGGHWVVKNGSMWLKEGEISGLDFVLPWRLKESIWQFGVKSPVQLRVKTINNLFEMRNLTADLQGFYPPSEQKPLELTNVNVGILDGQINLDKLRLPQHHPAILALDKLELSRLLTVLKVKQFAISGKISGKLPLFINNERWIVQQGQITNIDHMTLRLDKDTVDSINKDNISAGAAMDWLRYLEISRLRAQLSLDNLGILALSAEIQGVNSLRDKKRQVKLNYHHEENIFHLWRSLRFGNNLEDWLQQNISVLNGSDKZ

SEQ ID NO: 2028 - protein, 325 aa, Photorhabdus luminescens
MHYGLYTTDPNRKIPEFQFKRSGFSQLFIAKSLKRSPSTISRELKRNQEVQTYCPEQAHLKVLARRHFAKKAVKITPEVKRWIKRLIWKDLSPEQVADYLKQHKGISLHHETIYRLIYQDKREGGDLWQHLRIARKPYRKRYGRYERRGKIKNRVSIDERPEIVDKKERIGDWEGDTIIGKDKKSVLLTLVDRKTLYTIIVKLDSKQASEVAKAAVKVLYPLKQKVKTITFDNGLEFADHEIIGEELETQIYFAHPYSPWERGINENINGLIRQYFPKGTNFNEISDQEINFVVNRLNNRPRKTRGGKTPNELFKGIRTCLLPDZ

SEQ ID NO: 2029 - protein, 313 aa, Photorhabdus luminescens
VAKKEKRPHHDGLFKYFLTQPETAREFLSLYLPEEIQLLCDLATLKLEPGSFVDEHLRQLHSDVLYSVETARGQGYIYCLIEHQSTPDPLMAWRLMYYAMLAMAAHLKKGHTELPLVAPLLFYHGEIRPYPYSNRWLDCFTLPEQAARLYRQAFPLVDVSVLSDEEILTHKGVALMELVQKHIRCRDMQEWLLQLVELLNAGYNTTEQLNVVLLYILLNGHTLDLSHFVHQLIEQSPEHETMLMTIAEQLEQKGLERGIKQGIELGREEGREEGREEGKLETACALLRHGVSLDIIVTSTGLSRDKIEALKHZ

SEQ ID NO: 2030 - protein, 247 aa, Photorhabdus luminescens
MSVLGRIHSFESCGTVDGPGIRFIVFFQGCLMRCLYCHNRDTWDTHGGKDVTVEELIKEATAYRHFMNASGGGVTASGGEAVLQAEFVRDWFRACHAEGIHTCLDTNGFVRRYGPVIDELMDATDLVMLDLKQLNDEIHQKLVGVSNHRTLEFARYLAKRNQKTWIRYVVVPGWSDDNESAHKLGEFTNDMKNIEKIELLPYHELGKHKWTTMGEKYQLEGVKPPAKETMERVKNILESYGHKVIYZ

SEQ ID NO: 2031 - protein, 761 aa, Photorhabdus luminescens
MTELNKKFSVAWQDFNQGDWQSEVNVRDFIQKNYTPYEGDESFLSGATKATDTLWEKVMEGIKIENRTHAPVDFDTDVAATITSHDAGYIEKDLETIVGLQTEAPLKRALIPFGGIKMVEGSCKVYGRELDPKLKQIFTEYRKTHNQGVFDVYTPDILKCRKSGVLTGLPDAYGRGRIIGDYRRVAVYGIDFLRDDKLAQFNSLQEKLENGEDLAMTIQLREEIAEQHRALSQIKEMAAKYGYDISGPATDAKEAIQWTYFAYLAAVKSQNGAAMSFGRVSSFLDIYIERDLKAGKLTEVEAQELIDHLVMKLRMVRFLRTPEYDELFSGDPIWATESLAGMGIDGRTLVTKNSFRFLNTLYTMGPSPEPNMTILWSEKLPTNFKKFAAKVSIDTSSLQYENDDLMRPDFNNDDYAIACCVSPMIVGKQMQFFGARANLAKTMLYAINGGVDEKLKMQVGPKEEPIKDEVLDYDKVMARMDHFMDWLAKQYVTALNIIHYMHDKYSYEAALMALHDRDVYRTMACGIAGLSVAADSLSAIKYAKVTPIRDEDGLAVDFKIEGEYPQFGNNDSRVDDIACDLVERFMKKIQKLNTYRNAVPTQSVLTITSNVVYGKKTGNTPDGRRAGAPFGPGANPMHGRDQKGAVASLTSVAKLPFAYAKDGISYTFSIVPNALGKDDETRKTNLAGLLDGYFHHEAEIEGGQHLNVNVMNRDMLLDAMEDPEKYPQLTIRVSGYAVRFNSLTKEQQQDVITRTFTQSMZ

SEQ ID NO: 2032 - protein, 453 aa, Photorhabdus luminescens
ELCIARDCSHSNQLCTSLRVSSITSLVGRRDDLMKDRVNLRYRVHPGLRYDPVEPGRIEISIPLGTKRLRVSSKIRSLLEQIKSEAVLVGTIIVQRLGISVFEAMVKYHFLFPEDASTALEGGLCIPVSEPAGQSISVFDFDELQADDAVLLHAPILTTTGGEISVAGGGQHVRSQLVQCLRHPLGTAGKGVLLDLDFGTRLEPERLCLFDLGDIVYRPSMDSATDVGERLTYVCRNIVEWDACPIILGGDHAQAFYSISALSERYPRLGVLQFDAHPDLYAMGTPCDLQLSHANVMHWVRRMPHVASIWQIGIRDYFCQPTENLQLEVDPKFHMLSAFEAETVGYERLFRNMDRSLPWFISFDVDVLFGTEVPQTATPVLGGLNYYPLLACFERLLSEFRIVGMEFVEIGDASQGAHGAAAVAARLLSRYLFHLSKAMVAGHCIYSPFHQRZ

SEQ ID NO: 2033 - protein, 286 aa, Photorhabdus luminescens
MKADTPFNLLPPAIMTQIANDIGVYKTTKPVAITYLSAITAGIFISIAFVFYITATTGTTSVPYGLAKLVGGICFSLGLMLVVVCGADLFTSTVLTIISKATGRITWYQMMINWINVYFGNLIGALFFVAIIWFAGQYHVADGLWGLNVLQTANHKIHHSFIEALFLGILANLMVCLAVWMSYAGRSLMDKIFVMILPVSMFVASGFEHSIANMFLIPLSIAIKHFAPTEFWINVGATPEQFSQLTISHFITNNLIPVTIGNIIGGAILVGLTYWSIYLRSEQKHZ

SEQ ID NO: 2034 - protein, 591 aa, Photorhabdus luminescens
VNTMMQTFIPGKDAALEDSINRFQQKLQHLGFNIEEASWLNPVPHVWSVHIRDRDCPLCFTNGKGASKKAALASALGEYFERLSTNYFFADFYLGEAIANGDFVHYPNEKWFALPDDNSLPAGILDDRLHQFYNPENELCASQLVDLQSGNEERGICSLPFTRQSDHHTVYIPMNIIGNLYVSNGMSAGNTMNEARVQGLSEVFERYVKNRIIAEGISLPEIPQEVMNRYPDVVAAVSKLQDEGFPLYCYDASLSGQFPVICVVLFNPNNGTCFASFGAHPEFGVALERTVTELLQGRSLKDLDVFNAPTFDNEEVAEHTNLETHFIDSSGLISWDLFKQDADYAFADWSFSGTTEEEFATLMAIFKQLDAEVYIADYEHLGVYACRILVPGMSDIYPVEDLHLANNTMGIHLREALLALPDSQWQAEEYLALIEQLDEEGLDDFTRIRELLGIAVGKDNGWSNLRIGELKSMLALAGGDLEQALIWVEWTQDFNTSIFTAERANYYRCLQTLLLLALEANKAPAQYYQAFIKMYGQDAVEAASAAISGEHCFYGLWSVDADLKSLPAHQALLAAYEKLQKAKCDFWNTKZ

SEQ ID NO: 2035 - protein, 348 aa, Photorhabdus luminescens
MKKMKHTALASLLALISGSAFALPNITLLATGGTIAGGGKSAIQSNYVAGRVAIDELVNAVPEIKNIANLKGEQVVSIGSQDMNDQVWLTLAKRINADCDKTDGFVITHGTDTMEETAYFLDLTTHCQKPIVMVGAMRPSTALGADGPLNLYNAVVVAGDTASAKRGVLMAMNDAVISGRTVVKMSTTEVQAFQPVNAGAEGFVHNGKVNYYADAKPRANKAIFDVSKLDKLPKVGIVYNYANASDLPAKALLKDGYQGIVSAGVGNGNMYKAIFDTLALAAKDGVVVVRSSRVPVGYVTQDAEVDDSKHGFVASERLNPQKARVLLQLALTETRNPVKIHEMFVKYZ

SEQ ID NO: 2036 - protein, 363 aa, Photorhabdus luminescens
MNQVYNFSSGPAMLPVEVLRRAEQELCNWHGIGTSIMEISHRGKEFIAVAKEAENDLRDLLSVPENYKVLFCHGGARGQFAAIPMNLLGDKVKADYIDGGYWAACAVKEAKKYCTPNVINIKTEINGLKSVKPMREWSLSDDAAYVHYCPNETIDGIAIHEQPDFSDNKIIIADYSSSILSGPLDVSRYGMIYAGAQKNIGPAGITLVIVREDLLGKARKETPSIFDYAVLAENDSMFNTPPTFAWYLSGLVFKWLKEQGGVQEMAKRNRAKAELLYDVIDKSDFYRNQVAPENRSLMNVPFQMVDASLDSKFLAEADAQGLQALKGHRVSGGMRASIYNAMSIEGVQALVDFMADFERRNGZ

SEQ ID NO: 2037 - protein, 429 aa, Photorhabdus luminescens
MQSLMLQPISYINGTINLPGSKSVSNRALLLAAFAKGATCLTNLLDSDDIRHMLNALAALGISYRLSDDRTCCEVDGIGGLITHQGPIELFLGNAGTAMRPLTAALCLGKNDVVLTGEPRMKERPIGHLVDALRQGGAEIDYLEQENYPPLHVKGGFVGGKVMVDGRVSSQFLTALLMAAPLAENDSEIHIQGELVSKPYIDITLALMKSFGITINHDQYQIFHIKGRQQYVSPGHYLVEGDASSASYFLAAAAIKGGTVRVTGIGKNSLQGDTKFANVLEKMGAKIRWGDDFVECERGTLTGIDMDMNEIPDAAMTIATTALFAAGETVIRNIYNWRVKETDRLHAMATELRKVGAEVEEGVDYIRITPPPRLLPAEIGTYNDHRMAMCFSLVALSDTPVTILDPGCTAKTFPDYFNQLERLSQRKSZ

SEQ ID NO: 2038 - protein, 228 aa, Photorhabdus luminescens
MVAIAPVITVDGPSGAGKGTLCQALAEVLGWQLLDSGAIYRVLALAAIHHQVDIQSEDALVPLAANLDVRFVPRKGKLSVMLEGEDVSNEIRTEAVGNTASQAAAFPRVREALLRRQRAFRVAPGLIADGRDMGTVVFSDAPVKIFLDASAEERARRRMLQLQEKGFSVNFECLLSEIQERDYRDRNRAVAPLAPAKDALILDSTSMSIEEVIDKALNYAKKILSITZ

SEQ ID NO: 2039 - protein, 563 aa, Photorhabdus luminescens
LKIINMTESFAQLFEESLLSIETRPGAIVRGIVVAIDKDVVLVDAGLKSESAIPVEQFKNVQGELEIQVGDEIDVALDAVEDGFGETVLSREKAKRHEAWLMLEKAYEDAETVTGIINGKVKGGFTVELNGIRAFLPGSLVDVRPVRDTTHLEGKELEFKVIKLDQKRNNVVVSRRAVIESENSAERDQLLENLQEGMEVKGIVKNLTDYGAFVDLGGVDGLLHITDMAWKRVKHPSEIVNVGDEIAVKVLKFDRERTRVSLGLKQLGEDPWVAIAKRYPEGTKLTGRVTNLTDYGCFVEIEEGVEGLVHVSEMDWTNKNIHPSKVVNVGDVVEVMVLDIDEERRRISLGLKQCKANPWQLFAETHNKNDRVEGKIKSITDFGIFIGLDGGIDGLVHLSDISWNVAGEEAVREYKKGDEIAAVVLQVDAERERISLGIKQLAEDPFNNYLSVNKKGAIVTGKVTAVDAKGATVELADGVEGYLRASEASRDRVEDATLVLNVGDAVEAKYTGVDRKNRVINLSVRAKDEADEKDAIASVNKQEDANFANNAMAEAFKAAKGEZ

SEQ ID NO: 2040 - protein, 313 aa, Photorhabdus luminescens
YNEPVFIIFGSFFMTVEHIPPSEQIYLLNQELVQNADSLAGPAITVGGQAVRYWVNTYLHKYSKDNLPNEVFITSVDVDYVTKRNNVENIARAFNVEPHYNNPLDFPSIAICLLTDKDTKTIKEHEGRLFSNPDNNDECNLVDIIDRPAGFEHDDLSGDKLYLNTERFMINAAPGSHELVRILNPIACIRSRLANIVNKVKDDIEVEKERIRSLMIPTYYFLLEKLEHEDFRTARKYVEDFGYLLQERSRRHCLVKYGIELHKVLESLQVNLSEHRDDYELPDMFLDEELRRMADHHKNQYIRLRAQLQLDQZ

SEQ ID NO: 2041 - protein, 222 aa, Photorhabdus luminescens
INISCYGINYMVDVISTLGTFFLLGLGAAAPVGPINIEIMRRHLNISCLHAVVFGLGACFADIIYLLLLGFGILQFFSNTIFMPILGFLGALMVIWFGITSFINKKNEENINIISKPYHRQFFDGVLLTLLNPYNVIFWLSVSAQLNNIASGKYSLAIGAAGTIIGVIVWVAFINTVIFFSRKMLSHRVIKFINYTSGVVLIMLGIYFFSYSITLFNLKFSZ

SEQ ID NO: 2042 - protein, 248 aa, Photorhabdus luminescens
YQWILRMSEMILMSPILLKGVTLDWSAHRRWSWEFFAGMQEQKLALSNANGEFEVEVPVCEYIQALKSGEGRLANLYASGWRFFEHNPDMLQDFNEPIPAIGDLLQGIPEKLFKPLLWIFIGADCSGTALHYDVLETHAWLAVIEGKKRLALHAPVCWDHEYEQQRAQALQVLETRCNQGEWCYLEVNKGDLLYIPATWWHEVVNEGPTISLTRNFVSPEIARTVTSCARALEFHQLRPWLEGGMTSZ

SEQ ID NO: 2043 - protein, 283 aa, Photorhabdus luminescens
SKNHVKYNKVVFMKNKIIVSDSLQEHHLTKLFNDEVLAIHIKKYVDISLADKLSDFFLSHENLECHPHDLKKGDEVVLVDYGVDRIGPSYNTTFGKSKDSDSYKKYFENALPAIRNVRNFCAPMLAPFDKFRLELDEVWSAGASIANFEGKKMHAGIARVMNRPERSFMVEKQPHFDGLQQQSVNLLGQFSVNIYIKMPATGGELELWDVPEIPITELIEDNAENDWRGTLPPSVLIKPEQGDLIIINTRKPHAIRSFPEGGRISLQSFIGLSLNKHLMLWNZ

SEQ ID NO: 2044 - protein, 778 aa, Photorhabdus luminescens
IRMWFSVVINKITINWKQPIPIISVNQAAIAIIVGIVPLFFLPELPQKWQMMALLLLALFYLFLPFCLCRMVSISLLAFLIGCWQGNHLLEQIIYFSEKAHLSRVIIESLSLDNEENGRVILRIIENENKVIFPPLYVSAYWDISPESLCAGQEWRLKMKLRPVHSQLNQGGYDSQRRALAIRRPLTGKVIHAELIDGKCNLRQRLVSHIAPDIRELKHSGIAMALAFGERQWLSKEDNLLLQQTGTAHLMAISGLHITVASMFGWWMARLLQLFFPVHWIGHRFPLIAGWIVAINYVWLSGWGIPAIRALLGLTIWLYLRYRNILCFPWQWALWTAAMILLFDPLTVLSDSFWLSFFAVMALMFWFCWAPLIEPFRYGWKWLWLRGLYMQMGMMLMLIPLQLLLFHGVNFAALFANFWAVPIISFITVPLIMLALISNFCSFIHALLWQLVDYSVTLSLIPLPVLQQSWSETGRFPPLITFIGWFVVIIWRFAWWQSYKLLITIFLGVMLCYLRRNEDYLWRFSMLDVGHGLAVIIEKDGKALIFDTANRWETGSMAERVIIPYLRWHRLTPEQIIISHDHLDHTGGLAFLQQKYPGIAVRSSLINQQHLPCIRGEQWLWQGLSFRVLWPPVRSLRAGNDESCVIRVEDGKHSLLLTGDLEKQGEYKLLGIEKENLRSTVLQVPHHGSNTSSTAAFIHTVSPQYALASVARYSPWRLPSVKVQRRYRKIGAEWRSTAVSGQITGYFYGDHVEMMSYRQQIMSRWYHQWFGIRSDHEZ

SEQ ID NO: 2045 - protein, 293 aa, Photorhabdus luminescens
MNDKDLSTWQTFCRLWPIVSPFRIGLIVAAVALILNAAGDTLMLSLLKPLLDEGFGKASSDVLKWMPLIVIALMIMRGLSGFVSSYCISWVSGKVVMQMRRRLFSHMMGMPVSFFDQQSTGTLLSRITYDSEQVASSSSSALITVVREGASIIGLFVLMFYYSWQLSLILIVIAPIVSLVIRVVSKRFRSISKNMQNSMGQVTASAEQMLKGHKEVLIFGGQNVETERFNKVSNHMRQQGMKMVSASSISDPIIQLIASFALAFVLYAASFPDIMETLTAGKITVVFSSMIAZ

SEQ ID NO: 2046 - protein, 300 aa, Photorhabdus luminescens
NYGRIFINDCVMRPLKSLTNVNAQFQRGMAACQTLFSILDMEQEKDDGKLELKKANGDIEFRNVTFCYPTKELPALQNISMYIPAGKIVALVGRSGSGKSTIANLLTRFYDVNEGNIFLDGHDLREYKLSSLRGQVALVSQNVHLFNDTVANNIAYASENRYSREEIEKAAEMAYAMDFIRKLDNGLDTMIGENGVLLSGGQRQRIAIARALLRDSPVLILDEATSALDTESERAIQAALDELQKNRTSLVIAHRLSTIENADEILVVEDGHIVERGDHLSLLERNGVYSQLHRMQFGQZ

SEQ ID NO: 2047 - protein, 332 aa, Photorhabdus luminescens
MIERIWSGRSWLYLLLLPFSALYGLISGLRWLSYKTGLRLPWKAPVPVVVVGNLTAGGNGKTPVVIWLVEQLQKKGYRVGVVSRGYGGKAESYPLLVTENVTTAQAGDEPVLIHRRTGAPVAVAPKRVAAVKALLANTSLDIIVTDDGLQHYALQRDFEIAVIDGVRRFGNGWWLPAGPMRELSGRLNRVNTIITNGGTPQPGELSMTLAGELAVNMVSGEKRAVNLIPHAVAMAGIGHPPRFFATLQQLGADLKKEYAFADHQLYTEDQLCHLADTNQNLLMTEKDAVKCFNFAQPNWWYLPVDARLPQEKGEIMLNKICSLLETNNNSKZ

SEQ ID NO: 2048 - protein, 250 aa, Photorhabdus luminescens
MFTVIIPARFASTRLPGKPLADIHGKPMIVRVMERAKRSGAGRVIVATDNHDVVDAVVAAGGEACLTNENHHSGTERLAEVINKYQFSDDEIIVNVQGDEPLIPEEIIKQVAENLAGCKAGMATLAVQIHDAEEAFNPNAVKVVMDKQGYALYFSRATIPWERGRFIQSRETIGDNFLRHIGIYAYRAGFIRRYVQWEPSPLEQIEMLEQLRVLWYGEKIHVGIALKAPGVGVDTPEDLAAIRKVFTEIZ

SEQ ID NO: 2049 - protein, 280 aa, Photorhabdus luminescens
MQFLFKKYLGAMVMPLPLILLISLAALLLLWFTRWQKTGKTILTFSWLTLLLLSLQPVADKLLLPVESVYANSDQSDTSHINPPVDYIVVLGGGFTYNPNWAPSSNLLNNSLPRVTEGIRLYRLNPGSKMVFTGGKGANVKSSAEVAAIVAQSLGVPAEDTIALTKPMDTEQEANEVEKLIGNQPFILVTSANHMQRAITFFQQHGLNPIPGPANQLAITSPLHPWEKYLPSAYYLSHSDRVWYETLGTLWQRIKPSKDPEQPQKSEHSQPLNNPQVTSZ

SEQ ID NO: 2050 - protein, 260 aa, Photorhabdus luminescens
MRDRNFDDIADKFSRNIYGTTKGKIRQAVVWQDISELLAQLPQRPLRILDAGGGEGNMACQLAELGHQVILCDLSEEMIQRARLAAEEKGVSQNMQFIQSPVQEISQYIEQPVDLVLFHAVLEWITDQKYAIEVLMNIINPGGALSLMFYNANGLVMRNAILGNFHLATPNIQRRRKRSLSPQNPLAPEQVYQWLDELNMTITGKTGVRVFHDYLQNRQLQNENFPALLELEQRYCRQEPYISLGRYIHVMARKPALTVZ

SEQ ID NO: 2051 - protein, 441 aa, Photorhabdus luminescens
MSEYSQTVPELVSWARKNDFSISLPVERLAFLMAIAVLNSERLDGEMSESELVDAFREVCKGFEQTTESVAVRANNAINDMVRQKLLNRFTSELADNNAIYRLTPLGMGISDYYIRQREFSTLRLSMQLSVVASELHRAAEAAEEGGDEFHWHRNVFAPLKYSVAEIFDSIDMSQRVMDEQQSSVKEDIAALLNQDWQAAIANCEQLLSETSGTLRELQDTLEAAGDKLQANLLRIQEANMDSGGSELVDKLVFDLQSKLDRIISWGQQAIDLWIGYDRHVHKFIRTAIDMDKNRIFSQRLRQSVQHYFDNPWTLTIANAERLLDMRDEELTLRNEEVTGELPLALEYEEFSEINEQLAEMIEKALLIYRQEQRPLDLGAVLRDYLAQHPLSRHFDVARILVDQAVRLGVAEADFSGLPAEWLAINDYGAKVQAHVIDTYZ

SEQ ID NO: 2052 - protein, 250 aa, Photorhabdus luminescens
MITEPRYRHMSSTHIEQFMPVKLAQALANSLFPELDSQLRAGRHIGIDDLDNHAYLMDFQEQLEEFYARYNVELIRAPEGFFYLRPRSTTLIPRSVLSELDMMVGKILCYLYLSPERLANQGIFTAQELYEELISLADEGKLMKFVNQRSSGSDLDKQKLQEKVRTTLNRLRRLGMVYILPNDNNKFTITEAVFRFGADVRSGDDPREVQLRMIRDGEAMPIEGGLSLDDSENDETSDNSAEGTGDEQPZ

SEQ ID NO: 2053 - protein, 624 aa, Photorhabdus luminescens
ALMRTLMQSIFQSAWRHSIARLASLDIAKPKAIPLEQSGNSIYQYIRAAILACAPVSTIIMIVATVLGTVCNVGQSYVLGGLTALALQGQQEQVLMMLAIIISLWVSAPLLQAVHSLALLYSSQNLRIGVTDHLSTRLMHAKPMNLAENSVGNLVERVELASNSLEDVVGLVAQTVVKLLSVALLTTLVLASVSAPMAMAAGIWMITALLLSSYLAYTGMNIVEDASDAHAKVISDLAEIVTNVPLIRSFVAYRSERHSFSQALRQDLYACRQVRSYWVFVLLIESTYKWLFGIAILLYIGLQYGQGQLTLPQLITTCSLIISLSWHFESVAFYFVDIFDSLGVLRSSLRELSSIPVDIESNESSPILPVPGQIVLSNVCSSYGATSVLRDVSLRIEPGTKVGIVGPSGSGKSTLLAVLRGDMVPDSGTVELHGLPLAKFSMSSLHRVSSEALQSALMFNRSVRENVTYGSAVSSAEEVSHALTMAQAMMLVEGLPQGLDTLVGERGASISTGERQRLSVARALLKKSPLLIFDEATSSVDTISETRILNYLLDKMPERTVIVVTHRVATLSRFDLIVVMEQGQIVDIGTPSELEARNGLFQRLLHREDQSVPELISMDPKNEZ

SEQ ID NO: 2054 - protein, 1483 aa, Photorhabdus luminescens
MIERGKFRSLTLVNWNGFFARTFDLDELVTTLSGGNGAGKSTTMAAFVTALIPDLTLLHFRNTTEAGATSGSRDKGLHGKLRAGVCYSTLDVINSRHQRVVVGVRLQQVAGRDRKVDIKPFMIQGLPTAMQPTQLLTENVGERQARVLPLNELKDRLDEMEGVQFKQFNSITDYHALMFDLGVIPKRLRSASDRSKFYRLIEASLYGGISSAITRSLRDYLLPENSGVRKAFQDMEAALRENRITLEAIRVTQSDRDLFKHLITEATAYVSADYMRHANERRTYLDQALALRGELFGSHRQLATERYRHVEMARELEEQSGASVDLEADHQAASDHLNLVQTAMRQQEKIDRYQGDLEELSYRLEEQTEVVEEAAELQAEYEARAEAAEQEVDELKSQLADYQQALDVQQTRAIQYQQALQALERARELCRLPDLAADNAEAWLETFQAKEQQATESLLTLEQKLSVADAAHSQFERAYQLVKNMVGEISRSEAWQSARELLRDWPSQQHLADRVQPLRMRLAELEQRLTNQQNAEFLLNEFCKRQGQQYQAEDLEGLQSELEARQEALSLSVNESGERRMEMRQALEQLKQKIQSLTARAPVWLAAQDTLSQLCEQNGEALASSNDVTEYMQQLLEREREATVERDEVAAQKRELEKQIERLSQPSGAEDSRMIALAERFGGVLLSEIYDDITIDDAPYFSALYGPARHGIVVPDLSLVRSHLETLEDCPEDLYLIEGDPQSFDDSVFNAEEQANAVLVKSSDRQWRYSRYPELPLFGRAARENRLEALNLERDTLAERYATLSFDVQKIQRAHQAFSQFVGKHLSVAFDTDPEAEIRELRQRHTELERELSRFEEQTQQQRQQYTQAKESLTTLNRLIPQVTLLLDETLIDRVEEIREELDEAQEAARFLQQHGSALAKLEPMVAVLQSDPQQHEQLQQDYETAKQSQHQAKQQAFALVEVVQRRAHFSYSDSAGMLSENADLNDKLRQRLEHAESDRSRAREQLRQQQAQYSQFNQVLASLKSSYETKQDMLKELHQEMKEIGVRADANAEMRARERRDQLHEALSANRSRVNQLEKQIAFCEAEMDSLQKKLRKLERDYYQIREQVVSAKAGWCAVMRMVKDNGVERRLHRRELAYMEGGALRSMSDKALGALRLAVSDNEHLRDALRLSEDPKRPERKIQFFIAVYQHLRERIRQDIIRTDDPVDAIEQMEIELARLTEELTAREQKLAISSKSVANIIRKTIQREQNRIRMLNQGLQAVSFGQVRGVRLNVNVRESHALLLDVLSEQQEQHQDLFNSQRLTFSEAMAKLYQRLNPQVDMGQRLPQTIGEELLDYRNYLELDVEVNRGSDGWLKAESGALSTGEAIGTGMSILVMVVQSWEEESRRLRGKDISPCRLLFLDEAARLDAKSIATLFELCERLQMQLIIAAPENISPEKGTTYKLVRKVFKNHEHVHVVGLRGFGQDVPATQLISDATAZ

SEQ ID NO: 2055 - protein, 242 aa, Photorhabdus luminescens
GKAYGETYLWGYLTMQTKETSLSKFDYPNLDQEITAIFEDDSLPTHSPGNGDLKRWQRKEWPSAINFSTGDGRYNAPDDTFGVCYMADKAVSALAESFGHLIHKDGRKFVEESVIENSRMCLIRPLRPLVFVDVGKLLGMLHITLDVSVGDDYTVTQRVIACLYKLARDKFDGVCYLSRHFPSTDFCYAVWESDEERFEDVGMKNLAEYHDSEYMPSNWKYSSITAEELLEDVLRFKVVPLZ

SEQ ID NO: 2056 - protein, 216 aa, Photorhabdus luminescens
NNGQEIGGFMNTATKQRNLNELQVLLQKRFDIIFGSLMPEFAEKAKASNALVLPDSELFGLLYSTVLEKSARTPDRELRKLKRRAENLSNFYKEIERMGGVIKAVDVADILGITRQAVNLRVKGNKLLAFKKNSDHVFPLFQFKEGGLLPHFEDVMKTMSNDIGPISRISFLTTPLSDKNGKGKTPIEIMKEDSSIDDVSKMLRAAKQMGEQIASZ

SEQ ID NO: 2057 - protein, 321 aa, Photorhabdus luminescens
MKRKNTPTPHDAVFKQFLSHIDTARDFLEIHLPATLRAVCDLDTLRLESGSFIEDNLRAHYSDILYSLKTAQGDGYVYCVIEHQSSPDKMMAFRLMRYGISAMQRHLEQGHEKLPLVIPVLFYHGKIQPYPWSTNWLDCFDDPALAEEIYSNKFPLVDVTVIPDDEILTHKRVALLEMVQKHIRQRDMAELLQELVILLTYDYYTDEQLKSVLNYLLQVGDTADPEGFIRRLAEQSPRYEEVLVTIAQRLEHKARQEGRQEGRQEGRQEGRQEGRQEGRQEGRQEATLKIAHALLNSGIDCETVMKTTGLSQNELEQIRHZ

SEQ ID NO: 2058 - protein, 323 aa, Photorhabdus luminescens
IEEAITESFLLRRRFFNDGLSRIRVNLNGFLYFFKGSLYLKFDIAKAEVVDRPNFIVDGWPGLEGTEFENGIDAAIELTTNTVCFFKGKYCVDYTIDSHTIKMNTISDRWGMTGKYAAFSSNLDAIISWPDIDGNFIYFFKGDSFIRFDPNLNALDAGPIIISSDNEGWRGLAFKNIQAAVSVDTDLLGSNRDNSGGNSKVCNGTCGTNDTGKYCFQLPQSIRFGLIAYANTNISQTVKVYIDDLLVDTLTGKGQNNLMATKAYTSGTGKICIEIEGDGKPCKLRYFDNIFDGKPGTAIISAENGTNSHYNDSVVFLNWPLTZ

SEQ ID NO: 2059 - protein, 295 aa, Photorhabdus luminescens; identical to SEQ ID NO: 1209

SEQ ID NO: 2060 - protein, 278 aa, Photorhabdus luminescens
IKQPNIIYKVIKMEKKYNRSTSESNTENINTMDRHEVGKTPCQTDKPNSALKPGDDYTQAIKINPDGGLTADKDGLGVKIKVGNGIKVDSSGISIDPNNVLPKGMIMMFSGRDAPTGWAFCDGNNGTPDLRSRFVMCGETISETGKSSNKASGRGNGKNFSIDTTLTVVSVNVTVENTILTESQIPSHKHIGGMPYYSCFGNKYDAVSATQTECQINDIPDSSIWMKPSSGLNCYANTSNTGGGQGHNHPATASSPSHNHSIDIIPPYYLLAFIMKLZ

SEQ ID NO: 2061 - protein, 319 aa, Photorhabdus luminescens
EHNTGTLTLSSGAICSGKRIKPLMLANVLPNLASFLKYEKETPLFFIEDGFNFQNLNPGRVPLIKTPEQRKAGDTQSPAFLCSGVILRGTIHSNDYKFWQPSPSSIKSGGVSFSYLRKDAKFKRLAYGYKNGFIIFPEHIAPEDRVDFSVLCAFPIDGYTNERANQGCGENITKAKDKGKSCQEQNVTNSDDWIKNYRKVNSQDFFQCGFNVTKDVNNPAIAFYQMLESIKKLPRTPNTPPKQNEIRISTWEESDPNKLPIEALFYSENSGLADAQKDQRDYKNATGKFLPIVKMLLPRTLNEDALFKFNIKDQVINPZ

SEQ ID NO: 2062 - protein, 237 aa, Photorhabdus luminescens
VSPAFLCSGVLMRGTRPGFKFWKLNPSSIKNNGVSFSYLRKDAKFGNTFASINGFILFPEQMAPEDKVKVPVLCSYVLDANTWARQGNYCGAPPKPSDGKSCQDFGVFTAHQLNKAIARKSAGGICAFDVRPTAKNPADAFYQTLLAMPYHGNGLNYNEIVVQPWDENKPQTIPIEALFYSENPGLVNAQKDQRDYKDATGKFLPIVQIKLPKGINVKQATDAVFTFNPKDQVVSQZ

SEQ ID NO: 2063 - protein, 336 aa, Photorhabdus luminescens
IFNKGDNMPNKKYSENTHQGKNPLMKSGANNEHDLQDSPLGIGLDLNSMLVNSSTSLSQIQDYSFWKENISEYYKWMVVVESHLKQLDWTLKSMDSPESAGTNVAKNMGVTALQSLLNTGSSIAGGAIGGAIGSAIAPGVGTIAGAGIGALAGTGLNYLNDTAMSKLSKKLEIAHPYPKTRNMILDINNYDKNPIIKAIKKNVNKDNLKVTAGSSLTSKLVGTVTSPIKFPAYKFAELAVSHHRALEGLSDDKARHILDFTNSIREVLKESHSDAVAFMRKNYGDNAMGLSGFSSKIKREKLTLNTLAKTKNEIENRINSINKQTLKVSSRSRNEZ

SEQ ID NO: 2064 - protein, 1234 aa, Photorhabdus luminescens
GKKIKRMTAKFERLQQLARHVDFSALIPPLLAFPADKAFAITAVSPHADAELLRTIYSKYITEHHDWVKQVEEVCGPPLWIVRSAGLEDGDIFVNAGGYASVICHRTADFADTVAEVTFSGFEPQAIAQQRLINPDYQPQPVTCFVQRLIQGTPPQVELLQAPYLTADVCHSLYKIIRQLHQHFSEIALDTEWVLETDHGLVSATGLTLAGSNGVRGELAFGFGFAAAQSPGSRVNSVAYHWPTLAAPLWYGTQLRQVNVDKLWLVQVRPAPGYTLERRVQRLTAEVRTELAHCMRAVPVAALLPPSFPSLGSFLSASTLNDAWSRYLRFPLSVQTALTAVFVESGVGSEHAGIMFRQQNLPVFLTQLTDIPAVPWVVIDSMGELAYFSAQKPLIELKTETAESVNLPISVQRVFDDSESLRITELTSQRVTDILQNALIGLPVLTEKTYTTLKRRTVFPTDTWLQNGNAIRSPSLTGWLLAQAGERAIEFFPSDWPTTDATADYLCALTAKSNPQSVLPRLCKAIPTLAGRLTRFNDLCLIMQLIKTEAWIEKLPSIQLTSLVDAAITAPYSDARLLLECILHVLADTEILSIYEDTERLNIVYTLVNVAESTLSPASLLEIIHHGQLAPTALASLVCAPKACAAYLAFLTPLRCFKAAAALAGASEVADLLQATASLMETLHKANLPTLQGLCRIDLVDTYDQVLKAVLIDVVDRRDPSTHQRYLDLLSGWIAFAQLSTLSATEAAALRSFLRWIEHVRYQPMPDNFLLELKEDMVECLGDDFLRWQVLIPIAGNMMPDQLPMENAHQLHNLLHQWMLAHFRAHSGSELPAPLRKLINIADGFGDARSCLLRLTRNILEISLPFVVHKASFLFNEKELIVEFAELPNAPEEDIGRLHVFEALALRIVEWKPIWRVSPNRVCQLGTWTLFLRMQRTDGARWQAEDLHQLVLWLRVLFDTAYDFSYVPNDEVSHVYEMVGHSPWRDLFRAYAAYRAAVDFSIQRITVYSLPFATTLAALCLNQFVRDEVIGACIAGFEGAWKAFRCMAEELEKTEADQNQWHVLHTTAGQLGLLLSAMWPEQTLLRMVQVPLSPVAAERIGVSLLHRRDLTATLQQLIAEPENAALRDLVLHHVPEIAVNASSAATIADEVAGWQSKFKRCKEYLLAYHANLLSDSQCQQCVKQLGLVPYGITEEIETYIQRALIHTAAEEKGRFKLDEVDPIAIIRAIGTEAZ

SEQ ID NO: 2065 - protein, 336 aa, Photorhabdus luminescens
SLRTNRKQTYRSSGYSRIKQNWPANFLKPNKIGVNMTTIIASDNAIIEINQALNTILSQYLNINGNKIDIRFDLPEINSIQPEPTVSVFLYNIHEDLQLRSAEPRRYNPATRSLLPGWVNINCNYLITYWDANKPSSDSSSPDSQPNNQAAQVMTRVLNALINNRQLTGIPGAYTRVIPQQENLNSLGNFWQALGNRPRLSLLYSITAPMKLQDIKEDITPISQISASVDQKPNLDNSQINQALADKLCTDLGGTEDIRLALAKVNLITEPTTDNNYNQENENVVLEVSGMTLSTYLPKIKDILSTWKNSQSAIIKINGIGIIIVEENADKLIGIZ

SEQ ID NO: 2066 - protein, 703 aa, Photorhabdus luminescens
KVYMDYLPTHNHHIVAESHWIYPHLERIDLRLQHYYYQKSDKYDSLPESFLLTEDELDQRLKKPQGIPHWLTKPNNIVIPPETEKSPTIDPLSIDLLSILVDRFELTEFERDALLLGLLPHFDSRYHALFAALHGSSRKQWPTFALAINLFSQRQSDRQLLQNSFLPQTPLISHQLLRLNNHEESIWLQTQFLTHNAVWHFLSGQQVILPPLITCAYWHSPASHRWYPQALYHSFEKILLNQTDEIRPLVILRGKQDSARELAVSHIMASHNIRTLTLDLARLPDEDNITVITNLLTDAVRETRLYDGCLLIRNFSLFTEKKKILNNELSTLLNQPKLRVVCLAEPQDSLIWIKHLPMVQIDMPAATLADKKTMLEASLPDNIVQKINIPQLCQRFSFTAETLPLILKEAHQYQILRQPAGQLEETDLRKALSFRAQQNFDKLAQRITPKRRFNDLVISDALTQQLKEIIAAIHYRDQILSAGFQEKIGYGTGISALFYGESGTGKTMAAEVIAGHLGVDLVKVDLSSVVNKYIGETEKNISRIFDLAEADSGVLFFDEADALFGKRSETKDAQDRHANIEVSYLLQRLENYPGLVILATNNRSHLDSAFNRRFTFITRFTYPDEILRKKMWQTIWPEQLQLSDELDLEHLVKRTDLTGANIRNIALLASMLAKNDHCEQIENKHIDRAVTLELNKTGRLIFZ

SEQ ID NO: 2067 - protein, 310 aa, Photorhabdus luminescens
MPICIPDELPAVNFLQNENVFVMTSTRANIQNIRPLKVLLLNLMPKKIETENQFLRLLSNTPLQVDIQLLRIDNRKCRNTPAEHLNNFYCDFEQIKHQNFDGLIVTGAPLGLVEFEDVAYWKQIERIISWAKEHVTSTLFICWAVQAALNILYGLPKFTREVKLSGVYYHSTLNPLALLTRGFDESFFAPHSRYADFPEQVVREHTDLDILSSSEDAGVYLLASKDKRMVFVTGHPEYDAGTLASEYLRDLAAGLAPKIPINYFPDNNPERKPLASWRSHGHLLFSNWLNYYVYQITPYDLTYMNPTLDZ

SEQ ID NO: 2068 - protein, 533 aa, Photorhabdus luminescens
MTQQTLATELSFIKRFGAAEQEVLIPEAVDFLKDLVVRFTDARKKLLVERDIWQKKIDDGELPDFISETGSIRESEWEIQNIPADLRDRRVEITGPVERKMVINALNANVKVFMADFEDSLAPAWDKVIEGQINLRDAVNGTISYVNEQGKQYQLQPDPAVLIARVRGIHLPEKHVLYQNEPIAGGLFDFALYFYHNHKQLLAKGSGPYFYLPKIQSYHEAQWWSDVFSFAEDRFDLPRGTIKATVLIETLPAVFQMDEILYHLRHHIVGLNCGRWDYIFSYIKTLKNHSDRVLPDRQSVTMDQPFLNAYSRLLIKTCHKRGAFAMGGMAAFIPSKDIERNNWVLDKVRADKELEARNGHDGTWIAHPGLADTVMDVFDRVLAERQNQLDIFREEDAPITAAQLLEPCPGDRTEEGMRANIRVAVQYIEAWISGNGCVPIYGLMEDAATAEISRTSIWQWIHHEKSLSNGKKVTKSLFKQMLAEEMEVIKQEVGETRFSQGRFSDAAKLMERITTQDELIDFLTLPGYQLLDZ

SEQ ID NO: 2069 - protein, 436 aa, Photorhabdus luminescens
MTISRTQQIAQLEQEWKSDRWNGIIRPYSAEDVVKLRGSVNPEHTLAQLGAKKLWELLHGMAKKGYVNSLGALTGGQALQQAKAGIEAVYLSGWQVAADANTASSMYPDQSLYPVDSVPAVVKRINNSFRRADQIQWANGIGTDHQEYIDYFLPIVADAEAGFGGVLNAFELMKAMIEAGAAAVHFEDQLAAVKKCGHMGGKVLVPTQEAIQKLVAARLAADVSGVPTLLIARTDADAADLLTSDSDAYDSEFITGERTFEGFFRTRAGIDQAISRGLAYAPYADLIWCETSTPDIEMARRFAEAIHAKYPGKLLAYNCSPSFNWKKNLDDKTIARFQDELSAMGYKFQFITLAGIHSMWFNMFDLAHAYAQGEGMKHYVEKVQEREFESINRGYTFSSHQQEVGTGYFDKVTTIIQGGTSSVTALTGSTEEQQFZ

SEQ ID NO: 2070 - protein, 586 aa, Photorhabdus luminescens
MGIDSAHLIAQTILQGFDAQYGRFLEVTSGAQQRFEQADWHAVQQAMKKRINLYDHHVGLVVEQLKCIHSAFGYDEEYIAKVKVVYTGLLPDYPRFEIAESFFNSVYCRLFEHRNLTPDKLFIFTSQPARRFRDIPRPLSRDFFPNDNLALMLRTILNDLPLRLPWENLERDIYYITDYLQQTFPVGELLQATFQIANELFYRNKAAWLVGKIRIGGQVYPFLLPIHHNESGGIFIDTCLTDYADASIVFGFARSYFMVYAPLPAALVEWLREILPAKSTSELYMAIGCQKHGKTEYYREYLAFITFSKEQLIIAPGVKGMVMLVFTSPSFDRVFKVIKDQFAPQKEVTQERVQECYRLVKEHDRVGRMADTQEFENFVIDKARISPELMEELQKEVPEKLEDLGDKILIKHLYMERRMTPLNIYMEQVEERKLKDVIEEYGNAIKQLAAANIFPGDMLFKNFGVTRHGRVVFYDYDEICYMTEVNFRDIPPPRYPEDELAGEPWYSVAPNDVFPEEFRHFLCTDSRIRRYFEEMHSDLFKADYWRALQERIRSGHVEDVFAYRRKQRFSQRTEIETYSIAKVSAZ

SEQ ID NO: 2071 - protein, 202 aa, Photorhabdus luminescens
HIYNCVKVFKETIMASVILYGDNIYIRNNYLGNGGYLDTNGYATAQGAKYNVYTANSPTRAPGTGTGTWQILSASGKAIGTQIYSGDIVFLFNLYQNNGGYLGTNGYAPSPELYNVYTADKAARPVETLTWYIFSDTTSGYDGKVRESDVIRFLNGYDSVRGGFLDTCFNATVPNELYNVYTSRLSNRGNGTGTWNLSKVIZ

SEQ ID NO: 2072 - protein, 277 aa, Photorhabdus luminescens
MSTAVTSKKTKKTKITANNAVANGQVQSLSRGLTLLEYISESPGGIALTDLAQQAGLPNSTTHRLLTTLQQHGFIRQIGDLGLWVIGSHTFIVGSSFLQSRNLLALIHPILRRLMEDSGETVNLAILDHSEYEAVIVDQVQCNALMRMSAPIGGKLPMHASGAGKAFLSTLSDNQLVQLLHKKGLHSYTQHTKTTPSNLKENLEQARKQGYSFDDEEHALGLRCIAACIYDEHHQAFAAISISGPVSRITDDRITELGALVIRAAKEISKEYGGIRZ

SEQ ID NO: 2073 - protein, 512 aa, Photorhabdus luminescens
YFVTILSEWESLMKRIFLIICFLASVIVAIIQGIGLVLPDKVPVEYFKESGFKNVMRTLGVIAAEPHPAASTQQALVRAYLINEMNDMGYSVTEQTFYYTAADLAARQKRIYSNFNSQQRRAFDKEFARINTGNFAKQVEEQSELTGTNLIAKLEVPAPEGTLLFVSHYDSVRTAPGASDNGIAVASVLQLMRDLAERTDIKNNVIFLFSDAEELGLLGAHHFVKNINEIATQPIDVVFNFDARGNNGVPLLFETSAKNLALVSEWNQNAYKPVAFSFSPIVYQMLRNNTDFSVFLDRGFTGMNFATILGYEHYHRMSDTVENLNLGTLWRYQRTIRDLGAHFAVKDEINLFKESVDAVYFPVPYIGLIIISIFSAFVIGILTFLLSISLAIRNIWFSSSLRTVSNIQSILRILAGLFSLVAALVVPTASYLITLPVLLFLLTDLMLREFNKFSVALILLIICTYITSILYVPIIYLVSIGLHAPVVGGVLAILPMLILGFGIAGFWKRVIZ

SEQ ID NO: 2074 - protein, 356 aa, Photorhabdus luminescens; identical to SEQ ID NO: 52

SEQ ID NO: 2075 - protein, 287 aa, Photorhabdus luminescens
CSCWEHIDMKNNINGNHFKVAGNFLCNYKVYQGDSNGRVVILLPAIGVEIRKYDALIQQLVKEGFQVVTADMPGYGDNQPKPSRKNDYNYSDLLQDYLPALLDKAVKLNSNKIPIVFGHSLGGHIATLFASSTDRPFSLFCVATGNVWYKNWQGMGRVQIITAAIIFNILTALYGYLPGKKIGFGIREAKGLMRDWSRTAYTGNYYHVRAYKGKENKHLSKAVYICVKEDNWAPLKSTQVLASLIPNAEVREITLSFKGNPHSAWIKQPGDIIEIMKKEMMENSDDZ

SEQ ID NO: 2076 - protein, 304 aa, Photorhabdus luminescens
RGIYIMNLIKQASEVEMRAKDWGLDEWFTEQISVEQSKRTHYANDPKLTYLPGDLRESLIRELSFKSISEYEATKALLLLADKAPDNINFDYMLTQIFDEGRHAKLFREHLVRIGFADIDNVAGKMESLLRGKMTNMLETLRTYFDKWVVLKNDYIAGVLIITVVLEGVLAPTSELSEIKWRPFDIVAAETQARANADELRHLTVCANIVKMALENESSLKQSALECIEEGLALWNQVSVDDLFVEREMFYQRGMQNYLRFIEGYELAPGMLLSDSTVESRLELSHSLVEQMQQSRLKYMGLVZ

SEQ ID NO: 2077 - protein, 365 aa, Photorhabdus luminescens
IWPYSAGCLNRLRRIKMTNIVEELRKNSGKYQHLTPDRLKRLLLGSEAASQCLRLMAQSNMDGLHQVGNTIREASAWLPAIGIALTMHNHIVLACSKFPDIFEDSNVLLNEVMTSKALVASAFAEGLPGTNIFIPSLKMHSKEGKLFVNGSKKPCSLSSVADYYVLSVCDTDNNNDMRIVLVSKSDQNFKVIPFWRLGIMAESDNQEVKFSDTEISLTRLSHYKGLEQQIILSYGLSLFNYFAANTYSGILDGLTRFIPEKVVEQQTIKYTLTQADYKINVILGQMLIIAFYASQDENAVHKILALRYTLEKILEETASFIFRCCGGIKVMTTPEIMNFYLAVQLFKFHPIGEFQMINQIMQQAZ

SEQ ID NO: 2078 - protein, 867 aa, Photorhabdus luminescens
FYAPKKKRERTMFVNQYRESLLNSVGLELDIKSAQDNQLTLSDGRVVKDFLAQYGALPFGHNPDFAIAEIDRFTKDKEPIFFQPNIHKKVRLLAEMLAEQIDKEKYTHCTFTNSGAETVEAAIKFTRLFTGRKRILSLHRSFHGKTYSALSATGSNRFKADFIYDDKLYEQVDSEDLDEIKRKLESREFAAFIIEPVQGEGGMKVIPPDTLSNILALCKDNGTLSVFDEVQTGIGRLGAFCAATLYALKPDVILFSKALGAGISPIGAMLYSDEFYLSEFDRKHSSTFANNVLAATMGIAVIEHLTKEEGKALTHVQEVSRYVDECLEQLSAKYPQHFYWQGAGLMRGLEIQDSKAASNIFINFSQRSGGLAYIICSFLLKHYGLFTMPLMSRPCSVRFEPPLNVSKEDIKTFFTAFDEVCQLVENGRYDILFSHLIDVPVADLPPASVSYPISKNNNLAQIKAPIPGLIEGKKFAFLIHTTSVNELAHSYCVSIKENYTQEQQKQLGNWITQVSSIDFNPDIAVEFGVESSTAYANGMLLFSPISPEDMMALSAKERAVLMKEYLDVAEKNGAEIVGLGAYTSVITNGGTSLVNNRQGRILTNGNSLTAVAVIEGIRSMLVENASRQTLAVVGARGSVGRLSVIGLAHNFGRIILVSRPNKARILLSELTKALLSAVLRTHDVIQPDSVMDKMRKWLFKQNPGVTDAQTLHQQVLDVVDTFGLEAIESYEYSLSQADFIVSATSEGKPFLNTNYLKDSAIVFDAARPFDFIRDGNHQIYEGGLVYQPEKVTYSDCNVIDVPAGVNLACLSETVAVALEGVSVHQSIGKSIDYNDALAIRDIARKHGFIPVQYSRNNQGERYEHVAZ

SEQ ID NO: 2079 - protein, 386 aa, Photorhabdus luminescens
VFIKASVNLLIITMHWRFGILPGSMGSSLSSIPEIIKVSVMSMLLDAPQIIATGNAQDVLGNSHLRNVLCYSKHPLSSLLFNSETYWFTNQKGAIGFFQDKNLHMCVGGILAPDEERAALLHSFLNFTREKRAFPVFLHGDESDFVLLKNSGFSVNQLGASYSLSLDGYDMKGKRFQQLRNKINKSKRAGISVREICSQEEYYRFKPQLEQINQLWLKEKHAKALKKLVIDFNTVEVNSGQHRVYIATQGEQIQAYIVYSYTWGETSGWFHNLSRKKPDIPDGTMQFINETAINDFLKEGVVSYLHLGFTPLVEFGEEGYINDSAIFYKVAKWLSSKGGIVYPAASQRQYKMSWRPSLIEPEYIAFPRGKAMKALWSTLRTTNSIZ

SEQ ID NO: 2080 - protein, 494 aa, Photorhabdus luminescens
WIQFYKMKYLNEYSESNFDLLINDRIIAPSHPENPVIVGSDKVIYWRDLYYEIKKWHSKYLELNLNRNTPLILYGHKEANFLVSIYACITYKIPFIPVDIIYPIQRLLEIASLSNTPYYYDVINNQFKTTNVDYIEFDEDNVAYIMFTSGSTGKPKGVVIGRESVYDLMRWMYNDFKLGEKPVFMNQALFNFDLSMYETFGTLVYGGTCLCISQETATDSEKFYQVLNHYQPTVWVSTPSFSYKQLLSQSFNYSLLKNLKHFLFCGEILSKNLVKHLRKRFPSAIIYNTYGPTEATVATTLIEISDQHLHSDMELLPIGESRSGSTLTLENGEIVISGAHVMRKYIGAKTEDNNRLTINQHGTRSFRTGDIGKLIDNIWYCFGRKDNQIKLNGYRIELHEIEERLMNIPIVDSAVVLPLKKEDGSIVRLVAFCKFKTITNKENLVNLLKNNLPSYMIPSEFINIDNFPVTNNSKIDTKSLLSIYNNNECEVVKZ

SEQ ID NO: 2081 - protein, 382 aa, Photorhabdus luminescens
NKKGIKNMFANFNFFIYLFSASFVFSLFFLFFNKRINSKIALSVLSIICWCIIFRYKIYIPIALSVYFYLITLIFKKNIINKLVSSLLIISPLFLVKLNLEFSHLLSVIGLSFFTFRAIDVILFSSKQQKIVIYEYFSYLFLPLVWLAGPMYRWNSFKRDLLELQVPVSLEKWFSGAGQILYGIVQKFLFAALIYNVFLSDYINKDTIESYLVVAISYSFYLYFDFAGYTNMACGAGKLFGINLPINFHYPILAKNPQDFWRRFHISLSEWLRDVIFMPLYKTLMEKAFFKNHRLFAQNISIFITLFCMGIWNGLELNYIISGALFGSYSVMHNCLINYTRDKENIANILNTKIISFFGRLTTLTFICFSLYIFSGYSFIKZ

SEQ ID NO: 2082 - protein, 411 aa, Photorhabdus luminescens
VNYQLFEQLEMMLKKISINIAALLFAAITFSFIIVFVNSFNQKLVEYKYIEDDSKSINYIPTITDQHNAIDFLKEKSLEYGFKHNHVILFGSSELTNRTHKFIPYDFLTKNLNIPTIGIGKAHFELLAIYGYLSAYQEYLNKDSRIVIILSPGWFEKTDLLPQAYNSHFPSYIANKLANDESAKNIFSNYLNENQDNFENLNATQLKLIHKDNIIASSVTNILNYIAEARVNIKNIITDNHEIKADNIYVLHEGPLMKKQFQIANTEVQWLDLANDAKNIELKNMSKETQWVNKKYYEKYVKDKKSKKAFPNGIKYSKEMNAFDNILNLLTKYNVDALFIMQPLNPYVYTDTNDFKLVENIISEKIKSHGMGYLNLIEEQYQPGVLTDIMHMGEYGWLLTDKAIVEHFAKZ

SEQ ID NO: 2083 - protein, 465 aa, Photorhabdus luminescens
QKVIAMSAVSSQCPEIGGHVVAKFGGTSVANFDAMNNSADIVLANKAVRVVVLSASAGITNLLVALAAGCDADKRADYLKQIHSIQYAIIDRLHESDTIRQEIDRLLENIKTLAKAASLATSAALTDELVSHGELMSTRLFTELLRQRGKDAEWFDIRKVMYTDESFGRAEPNYEQLQSLATEHLLPQLKNSLIVTQGFIGREENGRTTTLGRGGSDYTAALLGEALGLKRVDIWTDVPGIYTTDPRVVPAAQRIDKIAFDEAAEMATFGAKILHPATLFPAIRCGIPVFVGSSKNPQAGGTLVCDTTEAPPQFRAIALRQKQTLLTLHSLKMLHAQGFLAEIFTILSRHNISVDLITTSEVNVALTLDTTGSTSTNGSLLTNALMTELSTLCRVEVEEDLALVAIIGNQLSQTNGLGKKVFSVLEKFNLRMISHGASNHNLCLLVQGKDAEQIVQTLHQRLFEZ

SEQ ID NO: 2084 - protein, 549 aa, Photorhabdus luminescens
MKNINPSQTSAWKALEQHFAQIKDIHLRELFEQDPDRFAKFSATFDDQILVDFSKNRITTETLKKLQALAKETDVAGAMRSLFSGEKINCTENRAVLHIALRNRSNTPMMVDGEDVMQQVNAVLAKMKDFSERVIHGEWKGYTGKGITDVVNIGIGGSDLGPYMVTEALKPYKNHLNMHFVSNVDGTHIAETLKALNPETTLFLIASKTFTTQETMTNAHSARDWFLKSAGDEGHIAKHFAALSTNGQEVKQFGIDTKNMFEFWDWVGGRYSLWSAIGLSIALSIGFENFEQLLSGAHAMDQHVANTPFEQNIPVLLALIGIWYNNFFGAETEAILPYDQYMHRFAAYFQQGNMESNGKYIDRNGHPVDYQTGPIIWGEPGTNGQHAFYQLIHQGTKLIPCDFIAPAISHNPLSDHHSKLLSNFFAQTEALAFGKSREQVDAEFATSGKTVVEVEHVAPFKVFEGNRPTNSILLREITPFSLGALIAMYEHKIFVQGAILNIFTFDQWGVELGKQLANRILPELKDDNRVVSHDSSTNGLINRFKAWRZ

SEQ ID NO: 2085 - protein, 560 aa, Photorhabdus luminescens
MEDVMSNANDIINSLRMCSVALGWDAVVAYDRNKVNQLLLQQYIEKRAAGVQYPPISFENEKYGIKLQDVVLGVPLISFEDSKITASQATATMKFISGSIVYTNSNGQVIKWEKISPANNYAIKLNVNLEYGNGVVENIGNGVSENSGKVVIKFEKGTLLDIEGLNDAPAEIVQYFRQYIQSNPNEYILGVLKPNNGKNRLYPKKFIVRTQPAPSGTLRDSKNYGDGAVLLFIATNYNAGGGNLPGDNYPYIIPEGKSAALIIGNATLFGNIFAEHFKKYIDDAAFTTINSGQNSPVTLQFTGGYTPTNEIIDGSVTFLDSTTRYKSCDEKGEVQVAHLPFNKFTIAADVEDNESKHVVLQFPENHTYNHRFSASWDYYGPAGWIHQDYLNDYTFSCDGKCKAEVSLKENNIISFSTVGKITVKCIKSEHSRLSLIESNGTEKMANQLTDKINKTGFFELPDINTFYIQHILFPNSEVLEFDQIAVPGDLVLFGDISPTLTGLKVEPAEILLSANKTQQFTVTPAKNVKWSISPVDLGSISTSGLYTAPSVASIGESKPZ

SEQ ID NO: 2086 - protein, 289 aa, Photorhabdus luminescens
VAGSMAQSKWLAYCRLMRINKPIGALLLLWPTFWALWMAGKGIPDMHILLVFTAGVFLMRAAGCAINDFADRKFDGYVERTKTRPLPSGAISEKESKILFVVLALISFGLVLTLNKMAIWLSAVGLALAWLYPFVKRFSHFPQFVLGAAYGWAIPMGFAAVSESLPLECWLLFLVNIFWSVIYDTQYAMVDRNDDLKIGVKSTAILFGRFDKLIIGLLQLAMLLLLVLVGYLINLGGIYYWSLLLTGTLFIYQQKLIAGRERELCFQAFLNNNYVGLVLFLGIFFSYVZ

SEQ ID NO: 2087 - protein, 819 aa, Photorhabdus luminescens
MSSWRKIYYKLLNLPLKILVKSKLIPTDPITELRLDTTRPILYVLPYHSKADLLALRQQCLEQDLPDPLNLLEIGDTELPSYVFIDNGPRVFRYCAPKQESVKIFHAYLDLHRNNPNLDIQLLPVSVMFGRSPGREGQNAPHLRLLNGIQKFFAILWLGRDSFVRFSNTVSLRYMATEHGTDKTIAHKLARVARMHYSRQRLAAVGPRLPVRQELFNKLLASKAIEKAVSDEARTKKISHEKARQNAINMMEEIAANFSYETVRLSGRVLGWTWNRLYQGINVHNAERIRRLAQDGHELVYAPCHRSHMDYLLLSYVLYHQGLVPPHIAAGINLNFWPAGPIFRRLGAFFIRRTFKGNKLYATIFREYLGELFARGYSVEYFMEGGRSRTGRLLDPKTGTLSMTLQALLRGESRPITIIPIYIGYEHVMEVATYAKELRGATKEKEGFFQMIRGLRKLRNLGQGYVNFGEPIPLIQYLNNHVPSWRDSIDPIEFHRPEWFNPTVNQLSEKIMVNINNTAAANAINLCSTALLASRQRALTREQLLEQLDCYIQLMRNAPYATDVTVPKKTAEELLEHALQMDKFEVDKDSMGDIIILPRDRAVLMTYYRNNIQHLLVLPSLIACIVIHHRRISREALLSQVAIIYPLLKAELFMRYSKTELPEVVNTLINELTRQCLICNKEHGMLVLNPARIRPLQLLAAGIRETLQRYAITLSLLNANPVISRGVLEKESRMLAQRLSVLHGINAPEFFDKAVFTTSVNTLREEGYISDSGNAITANTQELYQVLGELMSPEIRLTIESVSLPPEHNDTEESAREGZ

SEQ ID NO: 2088 - protein, 202 aa, Photorhabdus luminescens
MKALTARQQQVYDLVRDHISQTGMPPTRAEIAARLGFRSPNAAEEHLKALARKGVIEIVAGASRGIRLLLEESGLPLIGRVAAGEPLLAQEHIESHYQVDPALFKPSADFLLRVSGMSMKDVGIMDGDLLAVHKTQNVRNGQIIVARIEDEVTVKRFKQTGNKVELLAENPEFKPIEVDLREQGLTIEGLAVGVIRNGNWSZ

SEQ ID NO: 2089 - protein, 391 aa, Photorhabdus luminescens
QIIFGKEAFVMKELLQNQPHYRQFPVKGYQVMKHIISEKRKLPFLSALYALINILFVIAVCMGIVLSVAIVLFIIGNVSVPDTDYLLLAQVGGVALFGVMLLLVIIYRIVKRPEWEQRRYYQQAGLSLLPEDKRQVLRLNIVGDYWLGFWSETLEHYPLQSRVAHDSYRYCLLPLSPTQEHQSQLYSDWGIIDEEGYMKMLTGLWEGVHSKHFAIDAALSDGKMFKVLAKLVEVTPDYIHKCAKPINKRPPALVWGFDLWLAIVLSRNCFCAGYISEEMAWKNMLKTADYIYEIFGSFDEFYTNFRLGNAYWSNDFDRSKERLEQFNYYKSHCDWPIASLPWPEPKGIIMERQMMTGFSALVEDVLRSNMEEQQSYEFDITELSASRVLHZ

SEQ ID NO: 2090 - protein, 363 aa, Photorhabdus luminescens
LTGAYKTNSAEKSLDIINLYDLEEEARKLIPTPQFDYISGGSGDEWTLRENTRAFDDFQIIPRYLAGVKEPDTTTELLGSNVDMPIFIPPIAAHGLAHTTAELGTARGAASAGTLFTAQTLSNSSLEEIAKVSNGPKWFQIYLTKDMGINRELIRRAKAMGATAIVFTVDLEWSGNREADKRNKFIFPHSLPFPNIPGAPVGATLSEITELFKRDLNFSDLEFLAKESGLPIIVKGIQSAENAKECVNHGAAAIQVSNHGGRQLDTVPAAIASLPHIVEAVGSKIPVYLDGGIRRGTHVFKALALGAKAVAIGRPILYALALGGAPGVTSILNLLKDELKLSMKLAGCAAIKDIERKFISLIZ

SEQ ID NO: 2091 - protein, 282 aa, Photorhabdus luminescens
GELMSNKNDFKAFSVSQDANVVSQGEYEKSQELNTGIPPNIISIGLLNKVLRQSSTISSVVANFISTQCSDDVLDDGDIDKLTAQLNIALEQKAVTEIPSASLTQKGVIQLTDVLGDSNTLAVTQKLVQEMITLLSESINSRVPNIRQVNGKELSENIDLDAVDIGVYTKEEVDNEVNAKGNRNSASKAINGWWRCGDTGVIYQWGRTKVIDAGYIERIQLPISFSNTHYAVNINAIQSKMGFMGASVGYVNVINNSSFDLLNSWVNAKWDSPFFWIAIGYZ

SEQ ID NO: 2092 - protein, 204 aa, Photorhabdus luminescens
DYILYKLMGKIMIDFKGLGHINIVVDDMTAAIDFYKNLFGAIPRQFFPHFKNKGFAKSAGFIDNPEQVDVSMAFLEIPGARVFIELMEYHSPIGIKRVEIKEVNDIGGIGHICLRVQNIDSVFEHIKNSPDVRLINSSPLYKPYKIDEITRDEFMFFNEEDEKNSVLKQETCEIMGKIRYFYFIDKYNIQWEFEEGHDDIGTDZ

SEQ ID NO: 2093 - protein, 346 aa, Photorhabdus luminescens
MYQSKEIEKTFKFSEKDKETVKYSLNRFSVAPMLDWTDRHCRYFHRLLSRQTLLYTEMVTTGAIIHGKGDYLAYSEQEHPIALQLGGSDPQALAHCAKIAQERGYDEINLNVGCPSDRVQNGRFGACLMGEAELVADCVKAMQDVVNVPVTVKTRIGIDEQDSYQFLCDFIDIVVQHSGCNIFTMHARKAWLSGLSPKENREIPPLDYPRVYQLKKDFPQLTIAINGGIKSLEEAKQHLQHVDGIMIGREAYQNPSILAQVDHELFDASMPVVNTVAVVKALYPYIEQELSKGTYLGHITRHILGIFQGIPGARQWRRHLSENAHKPGADISVVEQALAMVTERMZ

SEQ ID NO: 2094 - protein, 356 aa, Photorhabdus luminescens
RCLILSEMEIIILAMKIFITSEQKIKLERLHDTTRDGQVRDRIKAILLASEGWSSVMIAQALRLHQTTVDRHISDYLNQGKLQSDNGGSDSLLSREQTDFLINHLSQHLFHHTHEIVAYVAQLWNITFSIPGMNKWLHRQGFSYKKPGGVPHKFDAEKQRQFIEYYENLKVTAKDEPILFLDAVHPTQGTKLGYGWMRKGEKKTVKTTGSRTRLNILGALNLNAIGRTVFQEYQTINDYNICCFFNEIRKSYPDYHQKIHLIVDGAGYNKAHLVKEWAYVSNIELHYLPPYSPNLNPIERLWKVMNEQVRNNRYFADKHEFRDNVFKFFTTTLPDIADSLMSRINDHFQVLKTASZ

SEQ ID NO: 2095 - protein, 213 aa, Photorhabdus luminescens
SFLGIEFVYVRDLTLTNGDIFLDYPLIVHKTKNKYLLSIYPEFHTRLFPDSRLLTESPDIVQDVSHTNSIHKIYICAMKDVLHMKRGDIIVIYRTADKQGPARYRSVISSLCVVEEVRCINEFSTLESYIDYCSKFSVFSEDELIEKYKIRKYPYIIRFTYNMALPKRIIRDRLINEVGLNSSDYWGMMKLTDDQFNKIIKLSEVNESFIINZ

SEQ ID NO: 2096 - protein, 201 aa, Photorhabdus luminescens
LFAAFWIVSVLFIITPGADWAYTISAGMHGRAVLPAVMGLLCGHLIATIVVAAGVGAIVAGTPIALTVLTVAGAGYLLWLGINMIRHPSVPTASNEREVGSRSQWAIKGLWVSSLNPKVFLLFLALLPQFTNPTAAWPIPVQIMALGLLHILSCGVIYLIVGYGSRAILKTRAQAAHIVSRVSGSVMIIIAVLLLAEQFIZ

SEQ ID NO: 2097 - protein, 328 aa, Photorhabdus luminescens
MAKHIEFSSIGGPEVLQYCEFTPRAPADNEVQVENRAIGINYIDTYIRSGLYPPAQLPSGLGTEAAGIVTKVGSAVTTIKVGDRVVYAQSTLGAYSEVHNVAESKVAVLPDTISFEQAAASFLKGLTVYYLLRRTYKIQSGEPFLFHAAAGGVGLIACQWAKALGAKLIGTVGSEEKVQRAKDAGAWQVINYNCENIVERIYEITNGEKVGVVYDSVGKSTWLHSLDCLKRHGLMVSFGNASGPVTGVDLGILNQKGSLFVTRPSIAGYISTREELDEASKELFDLIASGKINVDVPENQKFSLSEAIRAHQILESRTTQGSSLLIPZ

SEQ ID NO: 2098 - protein, 470 aa, Photorhabdus luminescens
MAGKKSTHNKMAEPKDRQMEGLKLPPHSLEAEQSVLGGLMLDNERWDNVSERVTSNDFFSRPHRRIFAEMQRLLEMGNPIDLITLSESLEQSGELNNVGGFAYLAELSKNTPSAANINAYADIVRERAVVREMIAVANEIADAGYDPQGRSSEELLDLAESRVFQIAENRASKDEGPKGIEQILEETVERIEQLYQRPHDGVTGVSTGYQDLDKKTAGLQKSDLIIVAARPSMGKTTFAMNLCENAAMMQDKPVLIFSLEMPGNQIMMRMLASLSRVDQTRIRTGQLDDEDWARISSTMGILLEKRNMYIDDSSGLTPTEVRSRARRVFRENGGLSLIMIDYLQLMRVPALSDNRTLEIAEISRSLKALAKELQVPVVALSQLNRSLEQRADKRPVNSDLRESGSIEQDADLIMFIYRDEVYHENSDMKGVAEIILGKQRNGPIGTVRLTFNGQWSRFDNYAGPSYDDEZ

SEQ ID NO: 2099 - protein, 360 aa, Photorhabdus luminescens
MKAATAVIDRRALRHNLQRVREIAPKSNLIAVVKANAYGHGLLETAHTLDDADCFGVARIGEALTLRHGGIVKPILLLEGCFDAADLLVLVANHIETVVHSVEQLQALEQAKLSHPVKVWMKLDSGMHRLGVRPEDAEEFYQRLSRCKNVQQPVNIVSHFGRADEPTVDTTCQQIACFQAFCADKPGEKSIDASGGILLWPEVHQDWVRPGLMMYGVSPLSDKTAVDFNLIPAMTLKSSLIAVRKHKAGESVGYGGIWVSERDTYLGVVAIGYGDGYPRSAPSGTPIHINGREVPIAGRVSMDMISVDLGPEATDKVGDEVVLWGDVLPVERVAKHTGIITYELVTKLTSRVVMEYLDEZ

SEQ ID NO: 2100 - protein, 401 aa, Photorhabdus luminescens
LMFQNVDAYAGDPILSLAEEFKKDPRAEKINLSIGLYYDEQGVTPQLQAVATAEEQLRALSQTASLYLPMEGLESYRLAVQELLFGKDHPVLKQRVVATIQSLGGSGALKIGADFLHRYFPDSEVWCSDPTWENHAAIFAGAGIKVNYYPYFDTQTKGVKFSEMLETFRKLPAKSIIVMHPCCHNPTGSDLTYDQWDQVVQIVKERELLPFLDIAYQGLADGMEKDAYAIRAMATAGLPCLVSNSFSKIFSMYGERVGGLSVICDDEQTKERVLGQLKAGVRRVYSSPPSFGAQVVAKVLTDPALKAQWLTEVEHMRLRILEMRTVLVDALKTALPEKNFEYFLKQRGMFSYTGFSQKQVDRLRQEFAVYLVGNGRVCMAGVNHRNVARIAETFAAVNKSZ

SEQ ID NO: 2101 - protein, 338 aa, Photorhabdus luminescens
MPIIAPIPRNERRQMKKIIQNTRDKDYARRLMAILMLHRGESVSLVAKTLCASRSSVYRWINWLTLYGLEGLKSLPVGRPAVWNLIPLYPLLSFLLQYSPQQLGCLRSRWSLEFFIIKINELLNIKLSISTFYRYLHKMGIVWRRAAPTLKLPDPEYHEKMAKITEALSTCSEKHPVFYEDEVDIELNPKIGADWYLKGQQKRIVTPGKNQKHYFAGCLNVQTGKVTYADGLNKNSHLFINVLEELERQYCHAETLTLILDNYSIHKSRRVRDWLACHPKFNLLFLPVYSPWLNKIERLWQSLHETVTRNHGCQYMWQLLEKVKTFLNSCLYRNSREZ

SEQ ID NO: 2102 - protein, 362 aa, Photorhabdus luminescens
MTNREKQILQLLRRDPLIPQQEMADILGISRSGVAGHIMNLMNKGYIKGKGYILSDHHYVVVVGSINMDVYGYSSNKLIYQDSNPGKIKCTPGGVGRNIAQNIALLGKECHLISVVGDDFYGSTLLDQARCAGVNVDYCYKLYGESTSTYISLLDDGGEMLVAINDMHILEKLTPSLLANHCDLIQHAGVLVIDCNLSEEALVWLLTNAGTVPVFVDTVSAFKAPKIKNWLSYIHTLKPNCLEAEALSGMKITQPTDVPAVARWFHDQGVQRLVLSMGVEGVYFSESDGVAGWSLPISIKIVNVTGAGDAMMAGLVNCWLENMTLAESVRFAQGCSALTLSCELTNNPNLSNGSVQKLLELZ

SEQ ID NO: 2103 - protein, 313 aa, Photorhabdus luminescens
MKNHAISNKYLDISPEVTEALENNRPVVALESTIIAHGMPYPQNVKTALQVEQKIRENGAVPATIAVINGMMKAGLSHEEIAFLARKGDEITKVSRRDLPFVIAAGKNGATTVASTMIIAAMAGIRIFATGGIGGVHRGAEQTFDISADLQELAKTSVAVVCAGAKSILDLGLTTEYLETHGVPLIGYQTHALPAFFCRTSPFSVNIRLDSPEQIAQAMAVKWDTGLQGGLVVANPIPEPYAMPEAEISAAIEQAVRESIEQRVNGKACTPFLLARVSELTGGNSLSSNIQLVLNNAELAAKIACCYWERHMZ

SEQ ID NO: 2104 - protein, 945 aa, Photorhabdus luminescens
MDNIEVRGARTHNLKNINLIIPRDKLIVITGLSGSGKSSLAFDTLYAEGQRRYVESLSAYARQFLSLMEKPDVDHIEGLSPAISIEQKSTSHNPRSTVGTITEIHDYLRLLFARVGEPRCPDHDIPLTAQTVSQMVDNVLTLPEGHRLMLLAPIVKERKGEHTKLLDNLAAQGYIRARIDGEVCDLSDPPKLELQKKHTIEVVIDRFKVRADLAQRLAESFETALELSGGTAIVANIDDNTAEELIFSANFACPTCGYSMSELEPRLFSFNNPAGACPTCDGLGIQQFFDPDRVIQNGDISLAGGAIRGWDRRNFYYFQMLRSLAEHYKFDIEAPFNSLSANIQQVVLYGSGKQSIEFKYTNDRGDTTVRNHPFEGVLHNMERRYKETESTAVREELAKYISNRSCISCHGTRLRKEARYVFIENTTLPEISDFSIGHAMDFFQNIKLSGQRAQIAEKVLKEIRDRLKFLVNVGLNYLTLSRSAETLSGGEAQRIRLASQIGAGLVGVMYVLDEPSIGLHQRDNERLLETLIHLRNLGNTVIVVEHDEDAIRAADHIIDIGPGAGVHGGEIVAEGSVKDIMVSKDSLTGQFLSGEREIAIPEKRISADPKKVLKLIGAKGNNLKNVTFNLPVGLFTCITGVSGSGKSTLINDTLFPIAQRQLNGATNITPAPYIDIQGLEHFDKVIDIDQSPIGRTPRSNPATYTGVFTPVRELFAGVPESRTRGYTPGRFSFNVKGGRCEACQGDGVIKVEMHFLPDIYVPCDQCKGKRYNRETLEVKYKGKNINEVLDMTIEEAREFFDAVPALARKLQTLMDVGLSYIRLGQSATTLSGGEAQRVKLARELSKRGTGQTLYILDEPTTGLHFADIQQLLTVLHQLRDQGNTIVVIEHNLDVIKTADWIVDLGPEGGSGGGEVLISGTPEEVAECEKSHTARFLKPILKKEAZ

SEQ ID NO: 2105 - protein, 179 aa, Photorhabdus luminescens
MASRGINKVILIGNLGQDPEVRYMPNGGAVTNITLATSESWRDKQTGEMKEKTEWHRVVLFGKLAEVAGEYLRKGSQVYIEGSLQTRKWQDQNGQERYTTEVVVNMGGTMQMLGGRAGGGSFQDSQQSQGGGWGQPQQPQPQQQSQQFSGGGAPSRPAQSSAPQSNEPPMDFDDDIPFZ

SEQ ID NO: 2106 - protein, 365 aa, Photorhabdus luminescens
GKYSMLRLKVLKAKNGDCILLSWENNGVTRNILIDGGKSSVYKTGPLKGELYKTLKLIEERNERVDKLILTHVDDDHIGGILNGFRSGELLISLCDKVWFNSGKLIKEAFDSDVLPENELELERINVQDGKTSIQQGVSFEKRISELGIWENWLIESGYTCEFFGAKITVLSPKREDLARLLCKWEKEVPQSITSGKKTDYGKSLEELNLNDKFLSDKSIHNGSSIAILFEYNNHKILLLGDAHDGVVCDAISSLKDEQGQNISSSNKLKVDYIKLSHHGSEFNTSARFLNLIDCKNFIISTDGSSHELPNKKTIARIVKNVDNANIIFNYPTLLNRIFSVKEIEELKNIGITTDNCDELIHVKZ

SEQ ID NO: 2107 - protein, 368 aa, Photorhabdus luminescens
IITLEPNMNNETYVAINESLFELSEHGLTDAERGQALAELDSYVKKTREKFLGYQANQELHYSSEFSKYLDVQLNNVGDPFMAGNFRLNSKFVERAVLDYFAKLWNAPGRDSTTPGEAYWGYVLSMGSTEGNLYALRNARDYLAAKVLWVDSNANSSLEQGEFVGGNENSLTPVLFYSEDTHYSIDKAKDILALSTFSKLGESLYPGQCPIKTSDGKWPTKVPSLPTGSVDIAKLSVLVDFFASRGFPIVVNFNYGTSFKGALDDVSGAIDLLLPILERHGLKERTLEITLENGKVIKSLRNGYWFHIDGALGAAYGPFLEKAREQGIDIGEGHLPSFDFRNPVHSIVTSGHKEMGAPWPTGIYSSKZ

SEQ ID NO: 2108 - protein, 327 aa, Photorhabdus luminescens
SMLNDELEKLKSATVRVEEGSGVLINPYSTQYSYILTAKHVVEDISVDKIEVKNIEGRNISVLDKVEHPVIDVAILKVERLDGVEISHIENFYNQEKKLKFYGYPKNKRHNHIFREQLYSYDCLLHDIQGNTSVFTINELTQYEDIEGFSGGGIFFINEENQDVSLVAIEFEVSNTQAADSKINCIRIDAYLDFLQDKGWDEIKPIHLSSFKFYRDNIFENLDLENEDSLDVVKNLLKITLNNYKIFNSYYVTPNKIVEEFANRILAHNQDLKKLYDKELWCAFLEFFAIYLSIFAPDDEDSCNSNYLERLFLNFRFIYDHYQFKIZ

SEQ ID NO: 2109 - protein, 347 aa, Photorhabdus luminescens
MPIIAPIPQDECQKMRKLIHKTRDKNYSRRLTALLMLNEGLTVTYVAKTLHAARSSVNRWVQWFTLYGLEGLESLPVGRPVVWDLSPLYNLLLFLLQQSPQKLGYLRSRWSLELMTHTLNELLNLSLTQNVLYRYFAQVGIVWRRAAPTVKQPDPEYDEKMAKIAEAKANISEKHPVFYEDEVDIDLNPKIGADWCFKGQQKRVITPGKNEKHYLAGCLNAQTEQITYVKGIKKNSDLFIKMLDELNHQYPHAETLTLILDNYCIHKSQKVKDWLARHPKFTLLFLPVYSPWLNKIERLWQSLHETITRNHCCQFMWQLLNYVDAFLASFSSQQKPGRQKMGVAQLZ

SEQ ID NO: 2110 - protein, 199 aa, Photorhabdus luminescens
MNNISIRNSTFIPLKSINNESEFISFNGFTQDKEHLAIRIGKWSEKHIPLVRIHSECVTGEIFHSLLCDCGEQLNESLKEIDIHGGVLIYLRQEGRGIGLYNKIDAYKLQRNGLDTYQANQALGFLDDYRDFSLAAKMLLAMNISKIRLITNNPDKIHPISQNGIEIYEVINTKTFLNEKNKNYLTAKKIKTFHALELZ

SEQ ID NO: 2111 - protein, 566 aa, Photorhabdus luminescens
RIYSMHKHTSPISGVATYGNKFVLSAGYDNKVILWDAYNKKPIRRVYHDHLVNQCAFSPCGNYIATVSSDYTCRIWLLPDMTLYGIINSHTDDVESVSFHPNKNIVATCSRDKTIIVSDYKGNVIAQLKGHVEDVISVEWSSSGNLISSSDDGTIRIWDVDYQKEIECIDLDNIETDTISITPDGVIYAGNEHGQIITIINGKLKITSAHEAGIKRLVYDFPQKIMVSLSYDRKMKLWKEKDNNLESYHIAELPPIVWPRSCAFLDSDNLVFASFGDSYVQYTISTQAWHQDHVRPTYGSNAVYVSGKDIWSVGDAGIVFCNNRPFAEMGSLCNFIIEFENVLITGGQMGKIFNARTGDIIYEHHSPLNCAAVSWEDNQFCLVGTYTGEGIVLRKIAGDIVVDNIVSLHKNAIKGVFISKEFVFSVCANAAVALHSIEDFSCYAYIPKAHEKIANGCDGSKEGLFVSVSRDLTLRIWRNENYEIIKTPSSHSIKCVAFDAKNNHISIGNYTGWIGVYDLNENKWILWEKRSFYGISSIRYIQHDFIYSTYDGINEFVFNYGVKYDZ

SEQ ID NO: 2112 - protein, 344 aa, Photorhabdus luminescens
NMIEKELSLTGIKTQHINIENKDINSLTIKEAMGLPDKTNQTLMGELFKIYDEHSKLDSCTLQSIIRDFNECFSHRYVAGNLLAIRGDSRISIFEPDVIIIPGGKVRLGLSPDNVDEIVSMYSQYGVLKEWILKEIPSYEITLSSFGLARYCVTNYEYYLFLGDTGYQEIPDSWAWGMYPHQRSNYPVYSVSYEAAMSYALWLSEKTGRNFHIPSEAQWEYAATGGNGREFPWGNEFLPDHCNSIESGIVDATPVGIFPLGMGPFGHLDLAGNVEEYTSDSYLPYQSGTAVYDDLMLTEGSHYKVARGGSFTRFRDLCRTRRRHGRYHSPLYIMGFRLAENLVZ

SEQ ID NO: 2113 - protein, 214 aa, Photorhabdus luminescens
MKKISAFVLAAATLVPSFAFAHEAGDFIFRTGTATVRPNTGSDNVLGVGSFSADNNTQMGLTFSYMMTDNIGFELLAGTPFQHRVSLPGVGDIAKVKHLPPTLMAQYYFGSKESSFRPYVGVGLNYTTFFNEKFNGNSAVKDNNLHSLDLKDSWGVAGQVGLDYELDQNWMLNASVWWVNIETDVKFKAGDQQYKIDTRLDPWVFMFGVGYHFZ

SEQ ID NO: 2114 - protein, 257 aa, Photorhabdus luminescens
MPITANTLYRDSFNFFKNQLLSTLTLAVLAALVTTLLGHLFIPDSEQMKLLTEAEFTFATSGKAGIQELVSQMTPEQQSMIMRAGIGTIFSSMIGSVLLVGGVLTLVAAVSAGNRISSLQAIGLSASQLPKLFLLLLICTLLIQFGLMLMLVPGIILSIALALSPVIMTAERRGVFASMKISWKLAFANIRLLVPAILLWLTARLLLVFIIDRLTFIHSEMAGIILGVFNNLISAILLIYLYRLYMLIASPQQKSIZ

SEQ ID NO: 2115 - protein, 586 aa, Photorhabdus luminescens
MQWKKLQRWMPGLGNFSHYRKEWFSHDLRAGLSVAAVALPVAIAYAELMGISAIIGLYACILPMFAYALFGTSRQLIVGPDAATCAVIAAAVAPLVFGNEDVRWQLTIVMTLMTGIWCVLASHFRLGAFADFLSKPILKGLMNGVALTIIVDQLAKVFGFAGVPMGLIERVIALPAKLMSTHLPTLAMSVAMVLILLTVRFLRPTWPGPLLAMVLATYISWQFDLEKYGVQIVGSVSGGGLPVVPMPDFQPGIMRELVIPSLNLAVISFVSFMMTARSFASKNGYQIDADCELRALGIANIASALSQGFAVSAASSRTAVNDTIGGKTQLVSVIAATIILLVLLFMTRFLAYIPLSSLGVVLIYSASSLLGLRQIWSLRKRNHQAFTLSLFTFIAVLVVGLINGVGFAVLLGLLQFLRIIFRPTDQLLGVNDQGMIHSINHGNDIKPIDGVMMYRFNSPLTYFNVSYFKKRVLQHVDRIQKINKTQKRPGWLVVDAAVSFTHDDVSVFAAIDELISELKVRDITLVLAGRRTELTRWIKQNKLRSSDDDLIVVPDLYFAVRMIQSKPEWYSNYAKRYNSVIEINQZ

SEQ ID NO: 2116 - protein, 227 aa, Photorhabdus luminescens
MLLIKNSLMRWIHWPILLSVCLHVSVAAALFCSAIPEKQPDAALMSVAMIQLAAEEAPVSEPAAPEPESEPEEPEPVPEPVIPKPEVKKLKPEVKKKIVKKQSEPVEKRAEQPEKPLFNQNALANRTDNNQNKPVVKPQNGPRALSKALPVYPSRASALGTEGYVKVKYDIDEDGRVKNIEVIGANPPNVFEREVKKAMRKWRFEKIPALGYITTVEFKITGISQSZ

SEQ ID NO: 2117 - protein, 490 aa, Photorhabdus luminescens
LPNMTTFYSVLSWLAIFFYWLIVASITLRILIKRRPVTSAMTWLLIIYILPLVGIIAYLSFGELHLGKRRVEQAKAMWPSTTVWLEELRKSRHIFATENSEVATPLFQLCERRQGLAGVKGNKIQLLKTYDHSLKTIIKDIENAKHSIDMVFYIWQTGGLVEQVTDALMAAAHRGVRCRIMVDSAGSWLYCRSQYPDIMRQAGIEFVEALQVNIFRLFLRRMDLRQHRKIILIDDYISYAGSMNMVDPRFFKQDAGVGQWIDIMVRMEGPVTTTMGVIYACDWEMETGQRIFPPSPDNNIMPFEQASGHTTQVIASGPGFPEELIQQSLMTAIFSARKQLILTTPYFVPSDDLTNAICTAALRGVEVIIIVPRRNNFFLVRWASRAFFAELLNAGVKIYQFEDGLLHTKSVLVDGQLSMVGSVNLDMRSLWLNFEITVVIDDENFGNDLTLVQYDYIAHSTLLETHEWEQRPLWHRIIERICYFFSPLLZ

SEQ ID NO: 2118 - protein, 383 aa, Photorhabdus luminescens
LMNIKELIIVLALSGSMLLGGCTVMPGSGLTVYNKEIINDDDSNYDINNLVNVYPVTPKLIENLRVNSAIARPNPELDKELQQYEYRIGVGDVIMVTVWDHPELTIPAGQYRSASDTGNWVHSDGTIFYPYVGKLHVKGKTVTQVRTMITDKLSKYIESPQVDVNIAAFRSQKAYVTGEVARSAQQPITNVPLTIIDAINHAGGLTENADWRRIILTHKGKETIISLQDLMQNGDLKQNRLLYSGDILYIPRNDDLKVFVMGEVRKQTTLRMDRSGMTLTEALGNAEGIDQLSSDANGIFVIRSLRNVPDNKGKIANIYQLNAKDATALVLGTEFNLQPYDIVYVTSAPVVRWNRVINQLVPTISSINSLTETTKWIRKWPNZ

SEQ ID NO: 2119 - protein, 360 aa, Photorhabdus luminescens
WIIVRGVKYPMPTPQSSSDRDAAQQQEQGVISLFGSIKRSLSRVLFHIKIFVLAFILACVVLYTPWSFLVLPAGDGHISSIVVLSVYIGLLALYPSRPHRPATLAGWLVVVLSPLAELWAAALLFGGLAALLITIIRQRKLEVSRFPLLLMTASTIVALFRIDAHAIPVWFGVVFFVVVLVTVLIEPWNNFRRQKALQQQQQLVARQQAEEQRRQDETQAEFAEYYEQLAQIKRYKSGMAYEMQELVNLIEEKTQAIIDCMQADARDVTPGKLFLNRYLPMIVKALERCVSLEEQSADSAQFEEVKSLTYQGIKEMSVVFSEMHQRLLDNDIDDLLVDLKVMNQLVRSQGFAAKYDQKGZ

SEQ ID NO: 2120 - protein, 334 aa, Photorhabdus luminescens
MSPIEERRVLLEVADLKVHFDIKDGKQWFWQPTKTLKAVDGVTLRLYEGETLGVVGESGCGKSTFARAIIGLVKSSGGSVTWLGKSLLDMDDKQWRDIRSDIQMIFQDPLASLNPRMTIGDIIAEPLRTYHPKMKGLEIKERVKAMMMKVGLLPNLINRYPHEFSGGQCQRIGIARALILEPKLVICDEPVSALDVSIQAQVVNLLQKLQREMGLSLIFIAHDLAVVKHISDRVLVMYLGHAVELGTYDEVYHNPQHPYTKALMSAVPVPDPDKERNKHIELLEGELPSPINPPSGCVFRTRCPMADPECAKTRPLMEGSFRHAVSCLKVDPLZ

SEQ ID NO: 2121 - protein, 333 aa, Photorhabdus luminescens
MDSVKNQKSSEPLLIVKELDVTFSTPDGDVTAVNKLNFDLRAGETLGIVGESGSGKSQTAFALMGLLARNGKIGGSAIFNGREILNLEEKALNRMRAEEISMIFQDPMTSLNPYMRIGDQLTEVLMLHKHMSKSEAYLESIRMLDAVKMPEALKRMRMYPHEFSGGMRQRVMIAMALLCRPKLLIADEPTTALDVTVQAQIMTLLNELKREFNTAIIMITHDLGVVAGICDKVLVMYAGRTMEYGSAREVFYQPTHPYSIGLLNAVPRLDGDEASLTTIPGNPPNLLRLPKGCPFQPRCQFSVDRCVNCDPGLETFGNGRLRACFKAPGELVZ

SEQ ID NO: 2122 - protein, 303 aa, Photorhabdus luminescens
MIVNKQNSEALENFSEQLEIEGRSLWQDARRRFIHNRAAIASLCLLSLITLFVILAPMLAQFTYDDTDWAMMSMRPDFESGHYFGTDSSGRDLLVRVAIGGRISLMVGVAAALVAVVVGTLYGSLSGYMGGKIDSVMMRMLEILNSFPFMFFVILLVTFFGQNIFLIFIAIGMVSWLDMARIVRGQTLSLKRKEFIEAALVCGVPTRHIVLRHIVPNVLGVVVVYASLLVPSMILFESFLSFLGLGTQEPLSSWGALLSDGANSMEVSPWLLMFPAGFLVVTLFCFNFIGDGLRDALDPKDRZ

SEQ ID NO: 2123 - protein, 307 aa, Photorhabdus luminescens
MLKFILRRCLEAIPTLFILITISFFMMRLAPGSPFTGERKLPPEVLANIEAKYHLNDPIYKQYFDYLIQLTKGDFGPSFKYKDYSVNDLVATAFPVSAKLGVSAFIMAVVLGVSAGVIAALNQNTKWDYTVMGFAMTGVVIPGFVVAPLLVLGFAIHLKWLPGGGWNGGAPKYMILPMVALSLAYIASISRITRSSMIEVLHSNFIRTARAKGLPLRIIIFRHALKPALLPVISYMGPAFVGILTGSMVIETIFGLPGIGQLFVNGALNRDYSLVLSLTILVGSLTILFNAIVDVLYAVIDPKIRYZ

SEQ ID NO: 2124 - protein, 547 aa, Photorhabdus luminescens
MINTTKKRLLTVSISAALSMIMASQVFAAKVPDGVQLADKQVLVRNNGSEPQSLDPHKIEGVPESHLARDLFEGVVIVGPNGEILPGSATNWENKDFTVWTFHMRKDAKWSNGDPVTAHDFVYSWQRLADPNTASPYESYLQYAHITNIDDIISGKKKPDALGVKALDDYTLQLTLSEAVPYLPRLLAHSSMSPVHKATVEKYGEKWTQSQNFVGNGAYKLKNWVVNERIVMERSPTYWDNKNTVIDQVTFLPISSEVTDVNRYRSGEIDMTYTNLPIELFQKLKKEIPNELHINPQLCTYYYEINNEKPPFNDPRVRTALKLAMDRDIVTNKVKAQGDIPASGYTPPVTDGMKEMKPVWFTGWSQEQRNQEAKKLLAEAGYNKDNPLKFNLLYNTSDLHKKIAIAVASIWKKNLGADVRLENQEWKTFLDTRHQGNYDVARAGWCADYNEPSSFLNSMLSYSSNNTAHYKSDEFDKLMKQSLKVATDDERAAVYQQAEAQLDKDSAIVPLYYYVNTRLVKPYVGGYTGKDPLDNLHTKDFYIIKHZ

SEQ ID NO: 2125 - protein, 546 aa, Photorhabdus luminescens
MKIKRLKLHKFISCIFLLSAFSVTAVSAAELPDGVKLADKQQIIINNGAEVASLDPHKVEGVPESNIILNLLEGLVRTGSEGEVVPGVATHWENQDYKVWTFYLRDNAKWSDGTPVTAHDFVYSWQRLADPKVGSPYASYLQYAYVENISDVLKGKKLPDQLGVKALDDHRLQVTLTHPVPYFVSMLSHTAMKPVKKDVVEKLGNKWTLPENYVGNGAYLLKEWVVNERIVIERNPRYWNNAKTVIDQATLLPLQSETSDINRYRSGEVNITNSAIPPTLYQKMKKELPEQVRVSPYLCTFYYEINNKKPPFTDVRVREAVKLSLDRDIIAGKIMGQGQIPAYGFTPTFIGGGDFVKPEWANWTQEQRNKRAKELLAQAGFNQANPLKFTLLYNTSEQNKQQAIAAASMWKKNLGADVILQNQEWKTSLESRHQGNYEVTRATWCADYNEPTAFLNMLLSDSSNNTTFYQNKNFDSYLEQALIAKDAIERKKLYQQAEFQLDKDSVLIPVYYRVSVRLVSPSVGGFSGKDPLDYMDIKRLYRIKNZ

SEQ ID NO: 2126 - protein, 215 aa, Photorhabdus luminescens
VGDLLLDLPGYIKFFVGLFALVNPVGILPVFISMTHYQAQSARNRTNFIANISVAIILWTALLLGDLILRMFGISIDSFRIAGGILVVTIAMSMINGKLGEDKQNKQEKSETAVRESVGVVPLALPLMAGPGAISSCIVWSSRYQGWQNFIGLMLTSALFAFCCWLLFRSAPLVVKYLGQTGINVITRIMGLLLMSLGIELIVTGIRALFPGLLZ

SEQ ID NO: 2127 - protein, 878 aa, Photorhabdus luminescens
MTVTHVTELNELVARVKKAQREFANFSQEQVDKIFRAAALAAADARIPLAKLAVAESGMGIVEDKVIKNHFASEYIYNAYKDEKTCGILSEDKTFGTITIAEPIGLICGIVPTTNPTSTAIFKALISLKTRNGIILSPHPRAKKATTKAAELVLSAAVAAGAPKDIIGWIDEPSVELSNALMHHQDINLILATGGPGMVKAAYSSGKPAIGVGAGNTPVVIDESADIKRAVASILMSKTFDNGVICASEQSVIVVDEIYDQVRKRFFTHGGYLLQGKELKAVQDIILKNGSLNAEIVGQSATKIAEMAGINVPEKTKILIGEVSLTDEAEPFAHEKLSPLLAMYRGNSFEDAVEKAEKLVEMGGIGHTSCLYTDQDNQAARIKYFGDKMKTARILVNTPASQGGIGDLYNFKLAPSLTLGCGSWGGNSISENVGPKHLINTKTVAKRAENMLWHKLPKSIYFRRGSLPVALEEVATDGAKRAFIVTDRFLFNHGYADQVTDVLKSHGIETEVFFEVEADPTLSTVRKGAEQMHSFKPDIIIALGGGSPMDAAKIMWVMYEHPETHFEELALRFMDIRKRIYRFPKMGVKAKMVAITTTSGTGSEVTPFAVVTDDATGQKYPLADYELTPNIAIVDANLVMDMPKSLCAFGGLDAITHALEAYVSVLANEYSDGQALQALKLLKEFLPTSYHEGATNPVARERVHNAATIAGIAFANAFLGVCHSMAHKLGSEFHIPHGLANALLICNVIRYNANDNPTKQTAFSQYDRPQARRRYAEIADHLGLSATGDHTVTKIEKLLAWLKELKSELGIPTSIREAGVQEADFLAKIDKLSEDAFDDQCTGANPRYPLISELKQLLLDSYYGREFTETVATEKSQZ

SEQ ID NO: 2128 - protein, 203 aa, Photorhabdus luminescens
LMAQLYFYYSAMNAGKSTSLLQSSYNYNERGMRTLVFTAEIDTRFENGKVNSRIGLSSDALLFSQQTDIGELIRNENKQAKVHCVLIDECHFLTKAQIEQICKVTDYDDIPVLCYGLRTDFRGELFSGSQYLLAWADKLVELKTICYCGRKANRVLRFDSEGAAIYDGEQVDIGGNEKYVSVCRKHYMEAINEARKNRKDSVZ

SEQ ID NO: 2129 - protein, 342 aa, Photorhabdus luminescens
LSNTMKFLVTGAAGFIGFHVSQRLLQMGHEVVGIDNLNDYYDVNLKQARLDLLFDRSGFKFEKLDLADRIAIPDLFSRHQFQRVIHLGAQAGVRYSLQNPMAYIDSNIIGHINILEGCRHNNVEHLLYSSSSSVYGLNRKQPFSTNDSVDHPVSLYAATKKSDELMSHSYSHLYQLPTTGLRFFTVYGPWGRPDMALFKFTKAMLSGQPIDVYNHGNMVRDFTYIDDIVESIIRLQEIIPTSNEGWMVEDGQISASSAPYCIYNIGNGQPTRLGDFIEAIEESLGIQAKKNFMPMQDGDVLSTCADSSGIVQKIGFAPNTSVKQGVKQFVEWYLSFYHQSKZ

SEQ ID NO: 2130 - protein, 372 aa, Photorhabdus luminescens
QGYVMSTKVTPIPSFGRDMAINESTVLIDQEHINTLIEKIDISQPAAVIGYGAQPMGGIARFADTLLENVKTKEADEVGQKLSDLVMFIREHDALSPEEKSSRFLRKLPLIGGIFKKVERTMIDQKTLTQQVDTIATHLDSAMLNLLRDITVLDQLYDRNLGFYKEISLYVEAGKQKLRQIKTVELPSLQRKAETSQDMMDAQSVKDLLENINRFERRLHDLELSKTIAIQTAPQIRIVQNNNQQLAEKIQSSILSTLPIWKSQMVLNLSLKAQSRAAKLQKEVADTTNELLRKNAEILQQSSIATATEVERSIVDIETLRDVQSRLVNTIEDTMRIASEARIKRTEIEKELSSMEGNLRQRLTAAANAQYZ

SEQ ID NO: 2131 - protein, 448 aa, Photorhabdus luminescens
MKVTVFGIGYVGLVQAAVLAEVGHNVLCIDIDANKVENLKNGQIPIFEPGLAPLVKKNYEEGRLNFSTDAKAGVAHGKLQFIAVGTPPDEDGSADLKYVTAVARTIAEYMDSYKVIIDKSTVPVGTADKVNAVVNETLRQRNIDIPFDVVSNPEFLKEGAAVADCMRPERIIIGCDNERVVDLMYELYEPFNRNHDRMIVMDIRSAELTKYAANCMLATKISFMNEISNLAEMLGADIEHVRQGIGSDSRIGYHFIYPGCGYGGSCFPKDVQALIRTAEQIGYQPKILRAVEQVNELQKHKLPSFVTRHFGEDLSGKTFSVWGLSFKPNTDDMREASSRVLMEALWQAGAKIQAYDPEAMQEAQRIYGQRDDLLLMGTKEAALKGADALIICTEWQSFRAPDFDVIKESLKTPVIFDGRNLYDPERLQSRGFTYYGIGRGASINPVIZ

SEQ ID NO: 2132 - protein, 353 aa, Photorhabdus luminescens
RIGTDFELKTDLFQPKNIGRKVMPLVNEPLVEKSLVEKVSVEKTSVEKTSVEKIVKKAVIPVAGLGTRMLPATKAIPKEMLPLVDKPLIQYVVNECIAAGINEIILVTHSSKNSIENHFDTSFELEAILEKRVKRQLLDEVQSICPSHVTIMQTRQGIAKGLGHAVLCAKPLIGDEPFAVILPDVILDEYSTDLTRYNLSEMLVRYNETGASQILVEPVPHEEVSSYGIVDCQGENLQPGDSKLIKRVVEKPKPKEAPSNLSIVGRYVLSEKIWPLLAKTAPGAGDEIQLTDAIAMLIEREPVEAYHLQGVSHDCGNKLGYMQAFVRYGMKHHALGKEFTDWLVALQDQVKEZ

SEQ ID NO: 2133 - protein, 342 aa, Photorhabdus luminescens
MEKALAGKKILIVEDEPVFCSLLAGYLRTLGAKVLVASNGAVALQVLGREAHVELILCDLDMPVMNGIEFIAKLTNEGISIPVIIISATNKMAEIDEVLRLGAKDVLLKPVSDLNEIKKSVLAYLHPTVFMSGAIEQNNLNKDWLTLKHNSDEALNMLKQLQPPVSQVIAHCKVNYRKLNMIDNPGLILDMAALSDNELAFYCLDISRSKEYGVISALLLRVIFNSLLQEHIIHHSRRLPNMAAILNRINNLLEGAGLQGQFPLLLGYYHTINKTVLLTSAGLHASIKSGNRQIQLDSGVPLGTLRTICSNQVCSHSAEWQCRIWNTNSQINLMLSSMYSGZ

SEQ ID NO: 2134 - protein, 283 aa, Photorhabdus luminescens
MQHQHIQKKILRTICPDAKGLIAKITNICYKHQLNIVQNNEFVDHRTGRFFMRTELEGIFNDETLLADLDDALPVGSQRELNSAGRRRIVIMVTKEAHCLGDLLMKSAYDGLDVEIAAVIGNHATLQSLVEQFGIPFHLISHEGLTREQHDEKLIAQIDQYKPDYVVLAKYMRVLTPEFVQHYPNQIINIHHSFLPAFIGARPYHQAYERGVKIIGATAHYVNDNLDEGPIITQKVINIDHTYTAEDMMRAGRDVEKNVLSHALFWVLAQRVFVYGNRTVILZ

SEQ ID NO: 2135 - protein, 302 aa, Photorhabdus luminescens
MSQSIQKIGIIGLGAMGMGIARALIRAGIPTYGFDLNQKACDQLLQAGAKAATNNAANWASELDAILLVVVNGAQIESILFEGETPLVNQLKAGTIIVLHSTVAAEQAKDFAHRLSQHNLNMLDAPISGGALKAEQGQLTVMASGEPALFEQLKPVFDATTERLYHVGNEIGQGSTVKTIHQLLAGIHIAAAAESMALAAKAGISLELMYDIVTHAAGNSWMFENRVPHILAGDYTAKSSVDIFVKDLRLVLETGRDLKLPLPLSATAHQMFLTASNEGFGQWDDSAVIKTFKGITLPEKKZ

SEQ ID NO: 2136 - protein, 426 aa, Photorhabdus luminescens
MTIKLGVIADDFTGATDIAGFMAQSGWRVVQLLDTPDENIAIPQDIDAIVISLKSRSCPIDEAVNNAVKSCRWLRQKTGCQQIFFKYCSTFDSTSKGNIGPVTDALMDELQTDITLISPALPVNGRTVIHGHLFVNGQLLNESGMQHHPVTPMTDANLLRLIEQQAQGKADLVDLACVHQGEQAIRVRLNHLQQQNIRYAITDTLSMNDLLPIARAASALKLITGGSGLGAALASTDTGKPLMPYQPEGATPPAENRRTVILSGSCSVMTNKQVALYQKFAPTKALNIDSCINDPQYAEKLVAWVIQQSENYLAPMLYTTHLPETLQKIQQQYGATTASEAIENTFASVVKGLSQLGFNTFIVAGGETAGKIVQSLDIQQFSIGAPIAPGVPWVHDRQHNYWLALKSGNFGNIDFFLHVQEMFHEZ

SEQ ID NO: 2137 - protein, 220 aa, Photorhabdus luminescens
MYRRCFMSEQALRSELVEWARSMFYRGYSSGGAGNISAKLEDGTIIITPTNSSFGDLQANRLSKLDAEGNWLSGDKPTKEVSMHLAMYRNRPECHAVVHLHSPWLTALSCLSNLDRSNCLPPITPYYVMRVGKLPLVKYLPPGDERIGEEIAKLAAKHNAILLSNHGPVVGGKTLRQAFFNAEELEDTARLYLTLLPHGFTTLNEEQVQELETRYPKTEZ

SEQ ID NO: 2138 - protein, 260 aa, Photorhabdus luminescens
MAKFAANLSMMFNDVPFTERFARAAKAGFKGVEYLFPYEVAAEELAALLKQHQLTQALFNMPAGDWAAGERGIASMPGREKEFAAGVQTALKYALALNCKQVHAMAGKLHEHFTPEQQRECYIRNIRYAADVMAEHNINVLIEPINTRDMPGYFLTTQHQAETLLKEIDRQNVFIQLDLYHCQIMEGDLLRTIERLWDKFSHIQIASVPERHEPDSGEVNYPWLFNKLDEMGYQGWLGCEYHPAGYTEEGLDWLTKAQKZ

SEQ ID NO: 2139 - protein, 256 aa, Photorhabdus luminescens
MLPSERRDFIYRYVHEYRTISISTLVKLMNVSHMTVRRDIHTLEEEGKVVSVSGGVQLSDVLRQELPWNEKAQLNHRHKREIGQYAVSMVEDGQVVYLDAGTTTFEIARVLAERFNLTIITNDFSITQYLMNKPQLNLFHTGGQVDKRNHSCVGPIAAMLLRNLNVDIAFISTSSWDLEHGVSTPHEEKVLVKQAVLEIARRRVLVSDSSKYGKYGMFRVCPLASLDDIVCDSQLPPKVQQQLREHNLVLHTVSVZ

SEQ ID NO: 2140 - protein, 322 aa, Photorhabdus luminescens
MKVIITGGAGFLGQQLASTLLNNHQTLNFDQLILTDIQCPVSPVNDPRVQCLALDLTQSRAAEKLIDENSTVLFHLAAIVSSHAESDFDLGLQVNFDVTRNLLNVARAKNPKLKFIFTSSLAVFGGELPATITDQCAVNPQSSYGAQKAMCELMINDYSRKGYVDGRVLRLPTISIRPGKPNKAASSFASAIIREPLHGESSICPVSRDLTLWLSSPETVIHNFIHAVQIPAEKFGLSRTVNLPGISVTVQEMIDALAEVAGQKAVELIRFEPDENINRIVASWPGHFDISRGLSLGFHADNTFSDTIRAFITNNLSQTGGZ

SEQ ID NO: 2141 - protein, 502 aa, Photorhabdus luminescens
MTLNDLIALDDPGQFRLRALALLQQQGDYIRQLEEALKQAQRWRFGAHSETLPAGPKRSQFEEDADTDIAVLETRLSRLHIKENATPAQPKRQPLPATLPREDIRLAPETESCPDCGHALRFLRDEISERLEYRPATFIVRRYISPQYSCARCQCVHAKAQPAHLIEKGLPEPGLLAQVVVAKYRDHLPLYRQQQIYARSGVTLARSTLSDWVGQVAVALQPLADALKQTLLTSPVLHADETPLPILAPGKGHTQRAYLWTSVTGPDTSPAVVYYELHPGRSGRYAQSLLKDWSGGTLVTDDYAGYNALHARADITEAGCWAHARRKFFDQYKASQSPVAKQALDGIRDLYKLERKIKHRPPDKRRQWRQRYARPWLNEFRSWLQTMQTQTAPNSGLRKAIDYTLKRWSALVCYLDDGGVPIDNNRAENAVRGVALGRKNWLFAGSLAAGQRAAMIMSLLETAKANGHEPWVWLRDVLSRLPVWPNNRLNELLPWPENPFRZ

SEQ ID NO: 2142 - protein, 462 aa, Photorhabdus luminescens
MEHYIPVVGLGVAVFTLIFLVLRTRVHALLAMLIAAAIAGLSGGLTAANTIDVMTKGFGSTLGSIGIVIGLGVMMGRVLEVSGAAEQIAYSFIKWLGKKREEWALAITGYIVSIPIFVDSAFVILYPLAKALAKKGKRHLLTLGVALAGGLVVTHHTVPPTPGPLGVAGIFGVDIGAMMLTGMVLAVPCVIGIVFYAKWLAVKYPEFQPIDEAEEAQDLQTIHQRYMEEKANKPLPSLFLSLLPIIVPIVLIFIKAINSLLLNTKTLTGQENNFYFQTFDFLGAPVIALAISVLLAVYTLMPKANKHEVIDRLEEGLQAAGIILLVTGAGGALGAVLRESGTGTILAQYIATLPLTPVLIPFIIATLVRLIQGSGTVAMITAASISAPIISQIPGINMLVAAQAATMGSLFFGYFNDSLFWVVNRMMGIKDAKQQMFVWSIPTTIAWAIGLCGVIILDLVLZ

SEQ ID NO: 2143 - protein, 388 aa, Photorhabdus luminescens
KGRGDYMYDSKKKNSEPTTKKKFERSNYSQWDDSINHYEDMNRARIKNRNDILTTVDYFGEKKKTMHTFEYQSDIKHDTNFNNKNKSLFESFAASFVLQNPSFFSGVIDKLSKKLFNIISKIDERNNFQKKLYDFIEKDTSPEGQFGRFTLGKNEILNVLQVKSDTPQLFVKKMLLIKSLGAFIIDFSSKDIGNYDFIFDGKGREVNDIIEKNRPTNLFKVRGRTNIKSSQHRSDIGILDTPTFDSLTEEQKSFLTIPELTKRRPLFRTFTHELDAEDKRVVESVFVNRTFDCDSPLIGSVSGSTSCVLVAADILFPDMTMVERKKLAIATFAFLVGGGYHSATEVFDVAYPGLDLNKEIEELIENNPIQENAGVATLRQLIGNSGFZ

SEQ ID NO: 2144 - protein, 315 aa, Photorhabdus luminescens
LLGDDIMPISNLAKESEVRAVKDIPCKNIETDNHLEIGLSSGLSRSKDTSKFKKNSINTIKLIDDIIALHNDPKGNKLLWNDNWQDKIINRDLANIFEKIDESVSELGGLEMYQEMVGVNPYDPTEPVCGLSAQNIFKLMTEGEHAVDPVEMAQTGKIDGNEFAESVDQLSSAKNYVALVNDRRLGHMFLIDIPSNDQETVGYIYQSDLGQGALPPLKIADWLNSRGKDAVSLNKLKKLLSREFNLLSDDEKRALISETLDIHKDVSNVELDRIKRDRGVDIYLTEYDVNNFYENIETLKSKLSNYDKKLSKPKZ

SEQ ID NO: 2145 - protein, 307 aa, Photorhabdus luminescens
IFIKFGVDMKDTIEPNNAIVEVNNALKDILSRYLNNIDIRFDLPDIDSIPSKPTISVFLYDVHEDLQLRSAEPKRYNPVTNLLLPGWVNINYNYLITYWHSNKPSVDGSSPDSQPDNQAAKIMTSILNALINHRQLPKIPGAYTKVIPPQENLNSLGNFWQALGNRPRLSLLYSITAPVKLQDITNIVEPVMDISHSVDQKLYLTSSQICQELLEKLCVDLGGTEDIRLALTKVNLTIEPLVPATGNNENEKIILEASGITFSTYYSKIKEILSTWVNSRKAVVKINGIGIIVDKVDFNKLISIEKZ

SEQ ID NO: 2146 - protein, 698 aa, Photorhabdus luminescens
KVYMNSLLKNSHYVVTELHWIYPHLERIDLLLQRYYYQKRERYDSLPESFLLTENKVEEYLIQPQGFPHWLFEEGNIVDHPKTEEHFASDALSLLVERFELTEFERDVLLLGLLPHFDSRYHALFAALHGNSKKQWPGFALAIELFSQRHSDWQLLQNCFLPSSPLIRNQLLRLNNHEEAIWLQTQFLTHSAVWHFLSGQQVIFPPLINCAYWHSPTSNVWYPSTLYHSFEKILLNETDEIRPLVILRGKQGSARELAVSNIMAFHSISTLILDLARLPEEENLTVIASLLADAVREARLHNACLLIRHFSLLADEKKTLNNLLSILLHQPKLPVVCLVEPGDALVWIKHLSMVQIEMPVATRVDKESMLKECLPDNAAQKVNLAQLCQRFSFTAETLPLILKEAYQYQILRQPDDQLEEIDLRKALSFRAQQNLGKLARRITPKRNFNDLVVSDELAQQLKEIIATINYRDQILGAGFQEKVGYGTGISALFHGESGTGKTMAAEVIAGHLGVDLIKVDLSTVVNKYIGETEKNIARIFDLAESDSGVLFFDEADALFGKRSETKDAQDRHANIEVSYLLQRLEDYPGLVILATNNRSHLDSAFNRRFTFITHFTYPDEVLRKKMWQTIWPEQLKLSGEIDFAHLAKRADLTGANIRNIALLASILATDNNSEKIEHQHIERAVILELNKSGRLIFZ

SEQ ID NO: 2147 - protein, 664 aa, Photorhabdus luminescens
PAVGIIIAIMLLCRIIYWLSLLNFNIYEEIESLNYQLISKRVLFMISEKNLLNRITITIEANNQQGAKKLLHGSLLNQIGVRKLFNLYFNKHVVSQDIYLDKLTLNLGEINSPDFNSLFPIRLNSELNKSLDQYCKNNKEKTITENSIISKSAGKFSLLQSDYLSNIEEFIQYLYQKDIKLNHEKAMESNRNINVNAESLINQLMRIEKNLTLLLAKSCLSEHGLQRLLAISQPTLLSEINHKLSENIDRSQHQGKVVTSWQLVLNALGYIQRHNMQEIPKPDIKVISYIMAEFDSSMLDIVPIITLFRQNIIAESTLLNEWLKPIWQIEWIPKLCKKHLSVQEYKSLANRFGCETQTFREQSLQQTDPVNSMITELLLKLSTKHRENLPPLSQHQLSSITLSLITTAIQKGEIKVKNIIQLLQHPALYNQTGTTWLSPLWQLDSVSQLCKKHLSAEEYNELSQRFMSNNANQALIPQDQTILSISNNFHVKDNNCNQYQISNAGILILWPMLPALFNQLDLLEEKKFIHQQAQFRAVDFLDYLIWGDEEGLVERKTLNKVLCGLMIDEETQSILVEPEKQLIIAQWLDVIIAQLPGWKKLSRNDVRQLFLQRPGELLIDKQEIKITLQHQPFDLLLADWPWPLNIVKLPWLNRPLQVDWQNIZ

SEQ ID NO: 2148 - protein, 427 aa, Photorhabdus luminescens
TNIYKVIKMEKKNNLSNSEINPENTNNKTESPSADDLKKRFKAGSIPLQTDYERLINMADIGRKAVGKAPQQNGPGIGLKLDDNGTLNLKIGTIPDLADKGFSPLMLKNDILSVDLGSGLINKDNGISVGQGNGIVVNTDNIAVKAANGITVDGSGVSIKAGNGISVSGNGVEVKAKNNGSISVEPDGIAVKCWDGGGIVVTDNTGLYLKLEGGNTNNAWSGVSGLSLSKNGVKVKAGNGIKVDDKGVSIDPNKVLPRGMIVMFSGSSVPEGWALCDGKDNRPNLIDRFIMGGTTQNIGGKSSDSFSGAKDNKKFTFISESQTVRISGSTDGHGLTADENGPHQHEQGETLNRQGKCHNGYTEDNTDRDWVDGGRRGPEPPNYRAYTFPSGKGNPHSHPINLTSGGHNHSNNVTVPYYILAFIIKLZ

SEQ ID NO: 2149 - protein, 973 aa, Photorhabdus luminescens
TKELTMNNQDALFPIVKDDIAFDTLLAQAKAVIEQYSGQYWSDMSENDPGITLLEACCYGASDLAYRHSLPLLDLLTPGKEEQAPGDGIFPQEFGPQQMLTCGPITLADYRRALLDLHSGDTVEGYFLFNDVLLICEPDDQRYTYWYSKKKREYSFMQLPDSESKQLTLRGNYWLYLLPSRETQADNKLAQEKLNAFLKDNRNLGEWVSRVIWLKPVDLPLKIDIQLDNDVKDIADVFAQIYMTAEQTVQEKPLRYTTQAMKEMGYSNEEIFDGPYLHHGWIPELPPTKDYNGAIVLSLSHLVNQLLAIKGVQGITRLELDKDNKEIISLLPQDNWSWEIAKGYYPRLWGSDPLKLITSPNSPLNIIAKGGVKVTVSSEEIKKKLITEPLINTQPELLNWGKHRKVRDYYPVSNKLPACYGLQTNKHSLQQLQLHQFMLPFEQLLANGCAELALLPKLLAFTQRGNTVYGAQWPFKVNSVSQNVHQAIMPDLIKKLNDDGQIENDGGIHERNYAKELAILEYLLSYFGAHRAARPLILNPQDFLSTQRGYLAQQPELAYHRNNICIDKVSALQKRIAARLGLGRKCFNEPPDLADLPFYLIEHRQLLPVKPDPVFNSEQTPDNLEIKDHPDSKSHHLIITQQSTAGQLLHGQIIDLIVKGEGGFTLRGQVITEITEKSFYLDTRNSVALEYNLDRVQQAFIDKKLCWQNSPVWLEDMDYQLVYADETDQIDVKDEYWITSSPQSPFPAMIKEGDEITLKYKITPYEPTKKIVASMNSPSDYMLKAVVKKFDRIEGKILIKRDKDNEAAFPQKENAWRYRWYFSGAEYAHTDRFSFVVSVVINRQLIENSKVDPHKLESWVKTEILTEFPAHVSMIIHWLPLEHFRNFASTYKHWQNNGSALGDEAYHILEMLTLGRIPSPLTGTGNMRIATEEQRTEVIGESETEWHSGFIESNQLLYIPKIQEDINRNKGDZ

SEQ ID NO: 2150 - protein, 920 aa, Photorhabdus luminescens
SYIQITGGINMEQTELENKLTAMVSDTTFKLDERSTRDILNWIQEYTEKIPFEQGKEKFWHSFYFIQENHPQQLADIYQNVNKANGLLPAHQAFLLAFLKLLETTKILFNTFPARHRDLYYRELLGLTPRSARADRVAIGITLNGGNAEYLVPQGTYFDAGHDSAGNPLQYVSESNVLVNQGELTDLYWYRKEGDGWKSAMSLNLADSIKLPENGIRLFSPTPNDVSVLSGYLITSPLFAMLAGERTIKVTLASKWDGESEHITANISTENRWLSLAVKLVNKTTLELGLSASDASITPPDALDNMTFDVPVLKLGTKQGPILPKIIDIEVSINGNQSVYYASDSGIERTDASSFPFGQSPLLGSGFNLIAPEWYGTENATLTITPQWVGLPKEGFKEWYKEVKKGKELNPVYRITANDAFKVQGYLITPQERKTLSATQSLFGGDKEPQVQSLKFTLPAMNHLVADSSSPNEWPASVRIELAGQDFMHTQYWQDPTGKNLPYTPQISALQIQFSAKAKPEQFAVYPLTPFGWGEATAEMPALTHEAFYLGFTGVQPGQTLSLYWQLEGIKKLTLSWFYLNKHNTWRKLDKLVDDQTGNLFERGIWRTLLPKEASNKAALMPTGRYWLKAEIVGKTDPQDYPLVKGLLYNATTATLANAETVEQEHFINGLTADSIKQPVTTIPAISSVTQPWASWNGRPQESEQAFLTRIPVRLSHRNRVLSWGNMVTLLKDHFVSLLDVRHHSGSKLTTIPAPEEQQLIVIPDSRYKDNDDALRPKLNPARLAEMVEWLSQLSSPWATIEINNPTYVDVNVDYQVTFISGVNSDYGHHQLQQQLNRIYMPWAENPAIGVTTGNCIDYYQLLATIQQSPLVERVTDLSITIANRTTGDVGASIEANDDEVLILVWTDKRSLNQGVNNEZ

SEQ ID NO: 2151 - protein, 547 aa, Photorhabdus luminescens
FHAGTNATSTEKGMKIPPIAIKIGGKTLNQFTVISLSANYPINGIPSANVTLGIIGDSSHIFDAKVQAELANCRPNHELIVQMQETVLFKGVIVRQTLGLKGQDSLMILTAKHPLQKLTHNFHSQLFSKQSDEAIIKKLCSQAGVPVTIKQAPQLKTVHEQMVQFRCNDWTFLKSRLSATNTWLIPSHDVVTLVTPESLNRSTVHTIRQRGDLRDIVLFEANLQWDNQRSPKTVSVQSWDINQQKLSQAIQVKNSGFGHGQLATDTLKPLTDQEWQWIFSSPLDNEQTKQFTQGIMGNRRNHNISGSFEVAGHDCYQPGDVLALTGFGAGMDGQAIITGVSQIINPRQGWRTRLTLGMQSDIEQVIPQVKELHIGIVEKYQQDGQSLGRIPVNIPALNLTNGTLFARLGKPYASHESGFCFYPEPGDEVIIGFFECDPRFPVILGAMHNPKNRSPLEPSEKNQMKTLVIKQGENQQALIFDNKDNTLAFNSGKNTLSLQQDKDITINSAKNLITQAQEINIQAEKSLSAAGKSGVDIKGAKINLTQZ

SEQ ID NO: 2152 - protein, 1044 aa, Photorhabdus luminescens
MSTPDTALYTQTPTVSVLDNRGLSIRDIGFHRVVIGGDIDTRVTRHQYDARGYLNHSIDPRLYDAKQADNSVKPNFVWQYDLAGHALRTESVDAGRTVALNDIEGRPVMTMNATGVRQTRRYEGNTLPGRLLSVSEQVFDQETSQVTERFIWAENTTAEKEYNLSGLCIRHYDTAGVTRLMSQSLAGAILSQSHQWLAEGQEANWSGDDETVWQRMLASEVYTTQSTTNAIGALLTQTDAKGNIQRLAYDIAGQLKGSWLTVKGQREQVIVKSLSWSAAGHKLREEHGNGVITEYSYEPETQRLMGITTRRAEESQSEARVLQDLRYEYDPVGNVISIHNDAEATRFWRNQKVEPENRYVYDSLYQLMSATGREMANIGQQSNQLPSPAMPVPADNSTYTNYQRTYSYDRGGNLVQIRHSSPATQNSYTTEMTVSSRSNRTVLSTLTTDPTQVDGLFDAGGHQKTLIPGQNLDWNMRGELQRVTPVSRENSSDSEWYRYSSDGVRLLKVSEQQTGNSTQVQRVTYLPGLELRITGVADKTTQNLQVITVGEAGRAQVRVLHWESGKPADIDNNQVRYSYDNLLGSSQIELDSEGQILSQEEYYPYGGTAVWAAKNQTEASYKFIRYSGKERDATGLYYYGYRYYQPWVGRWLSADPAGTVDGLNVYRMVRNNPITLTDHDGLAPSPNRNRNTFWFASFLFRKPDEGMSASMRRGQKIGRAIAGGLAIGGLAAAIAGTAGAALPVILGVAAVGAGIGALMGYNVGSLLEKGGALLARLVQGKSTLVQSAAGAAAGASSAAAYGARAQGVGVASAAGAVTGAVGSWINNADRGIGGAIGAGSAVGTIDTMLGTSSTLTHEVAAAAGGAAGGMITGTQGSTRAGIHAGIGTYYGSWIGFGLDVASNPAGHLANYAVGYAAGLGAEMAINRVIGGGFLGRLLGRAVSPYAAGLARQLVHFSIARPVFEPIFSVLGGLAGGIGTGLHRVMGRDSWVSRGLSAAGSGIDHLAGMIGNQIRGRVLTTTGIANAIDYGTSAIGAARRVISLZ

SEQ ID NO: 2153 - protein, 415 aa, Photorhabdus luminescens
LYWGAVCRACPVEEMIMEITQPGVTSAENLISQKPGDAFIGVPVFIGDIPKSSGSKTIVKLNSLTDFTLKFCESGLMYDSLMYTSVRHFFENGGQQAYVLPLTLDEPLSDFQSLIIALQQDWLKQAIAAESAITLVVVPDIVRFNQTGESGAEIDLWLQFWQSILELCKSRRGIMGLLDAPDDPVLAATCLAQFSSSDRQWGAVYWPGLKTTYQENGQHIILSPTAAVAAVIQRNDHQQGIWTAPANVALAKVVSPVRSFIEADALFNQNGTSLNLIRSFPGKGIKVWGCRTLDNIPGSPWRYIQTRRLVSYIEAHLTRLGRAFVFEPNNAITWMKLKGQTYNWLHQLWLKGGLLGTQEDQAFDILLGVNESMNEADLRAGKMIMKIKLALLIPAEFIELSLTFDTRTGTMGLNZ

SEQ ID NO: 2154 - protein, 469 aa, Photorhabdus luminescens
MPTVPTYPGVYIEEDAPPALSVSQGNTAIPVFIGRFSLKKPSTTTTPQVTRVSSWLDFTNLFHVGCVTSIAIKSTPPSAAKKPKKVEKIEGDISTENKATKENEEVNSNTETEEEKKADYTYEVTVGTYTTSSDALKLYFQNGGGPCYILPIADSEDTKTLALIPELIKQALEITLIVCPEQDSDYQSKIYNNLTSSLLNEGYFLIADNQDKAFAISTNVSSQTATYYPAVKVSQLMQTEESLIDVLGYKDAKANNITNLTELKEKNPNVYKEAITAIKNVNKTIPASAIMAGVYCATDASRGVWKAPANIVLSGISDVEERLTEDEQGTMNQKGINVIRYFNNRGFVVWGTRTLKDDDNWRYIPVRRLFNAAERDIKQAMRFAVFEPNSQPTWERVRSAIDNYLHQLWQQGALVGSHPQEAYFVQIGQGVTMSEVDIKQGRMIVKVGMAAVRPAEFIILQFSQKVAQZ

SEQ ID NO: 2155 - protein, 378 aa, Photorhabdus luminescens
SGTSMQCFLKANIMTTYHYPGVYIEEDASLALSVRTSATAVPVFAVGDENLFRSGDDYHRVNSWLEYLALRGRQFNPSDKLDISLRAYFINGGGYCYLVKTKDLVNQVPKLDDVTLLVAAGEDITTAVGTLCQPGKGLFAIFDGPVTQIDLNQKPDEVLKIYTATAYGAVYYPWLTAEWGEKNEEGKRASVDIPPSAVMAGIYASVDNNRGVWQAPANVAIQGGLQPKYPVTDDLQGQYNKDKALNMIRTFPKSSPLVWGARTLEDSDNWRYIPVRRLFNSAERDIKNAMSFAVFEPNSQPTWEIVRRAIDNYLYSLWQQGGLMGNKAEQAYFVQIGKGITMTDDDIKQGRMIVKIGLAAVRPAEFIILQFTQNIGQZ

SEQ ID NO: 2156 - protein, 201 aa, Photorhabdus luminescens
FIFLHYSFIKYINSNRYKCLLSPPGYIKNRQTLNRGRECVMLKITRDVYLDCDSNKIIHGKNIFIITEKEKRLLLALWEHASQGNTLNREQLIPLVWPERKDGVAETNLLQLICKLRRTLRYCDLGEAIHTVYRQGYRFILPLQDDEQDNRQLQNTQLPIPIATPPKPFYWRFTRMIVMFITAIIWISTILYTAPFLAKKZ

SEQ ID NO: 2157 - protein, 453 aa, Photorhabdus luminescens
VMLSKFKQAKHQQHLAQLPKLPQSVADVKTLYQPEVFRSTLLEKIANAEKHIYIISLYLENDDAGKDILNALYTAKQQRPDLDIKVLVDWHRAQRGRIGAAAIVTNADWYCSMAEAYPDVKIPVLGVPVNTREALGVLHLKGFIFDDTVVYSGASINDVYLHQHDKYRYDRYHLLHNAELAEAMKHFIDNHIIATGAVQKLDCKNRPRIPEIKNLIRQLRFSLRHTTYKINNQATNDELSVTPLAGLGKKNLLNKTISHLIASTEQKLIICTPYFNLPAIIVRRIVHLLRKGKHVEIIVGDKTANDFYIPPEEPFKIIGALPYLYEINLRRFISRLQRYVDNNQLTIRLWKDGDNSYHLKGVWVDNQWQLITGNNLNPRAWGLDLENAILIHDPHKEMQEQRTKELHCIRTHTTVVSDYQELDSIQLYPVKVRKLIRRLRRIRVDKLISRILZ

SEQ ID NO: 2158 - protein, 882 aa, Photorhabdus luminescens
LMSQRGLEALLRPKSIAVIGASEKPERAGSVMMRNLLAGGFAGPILPITPNSRSVQGVLAYPSIDKLPITPDLAVICTHHRRNLQCLEQLGQLGCKTVIILSSPTSQFAELKQCCQHYSIRLLGPNSLGVLAPWQGLNASFSPVPILKGKLAFISQSAAVSNTILDWAKHRGVGFSYFIALGDSVDIDIDHLLDFLARDSKTSAILLYLEHIHDARRFLSASRSASRNKPILVVKSGRTKRAQKLLGEQQNLDAAYDAAIQRAGLLRVQDTHEMFSAVETLSHMSPLRGERLFIVSNGASPAAMALDALFRRNGKLAILGEETTKALKIQLPETISLHNPLDLKDDSTVERYIAALKPLLDSHDHDALLLIHSPSAIAPCIQTATKVIETIRKHPRGKWLTIFTNWCGEYSSQEARRLFSEAGIPTYRTPEGAITAFMHMVEYRRNQKQLTETPALPANITANTARAHQCIQQALEQGNSRLDTHEVQPILEAYGLNTLPTWIAHNSDEAVNIAQQIGYPVALKLRSPDIPHKSEVQGVMLYLRNANEVKASAQAIIERVNQNFPHARIQGLLVQSMANRAGAQELRIAVEQDEVFGPLIMLGEGGIEWSQETQAAVALPPLNMALARYLVIQAIKSRKIKLRGAPQSLDVLALSRLLVQVSNLLLDCPQIVRLDIHPLLASGDEFTLLDVSMELSSIDGDPRTRLAIRPYPSELEESIKLKGGAECLLRPILPEDEPLLKDFIGQVTKEDLYYRYFSEISEFTHDDLANMTQIDYDREMAFVAVRHPKTTPEIIGVTRAIADPDNVEAEFAVLVRSDLKGITLGYQLMIKLINYTREHGISRLNAITMPENRTMIKLAKKLGFTIDVQFEDSIVNLSLELZ

SEQ ID NO: 2159 - protein, 339 aa, Photorhabdus luminescens
MNDSYSGKNGKVKVMYVRSEGGNDSRNNNKRPSGKGRDQGQRRRDNERTSRSPRANERERSPWKTVSRPESDSVTPMHGGISGKSQIDPEQLRRQRMEETRIYGENACQAMFKNRSEAIVRAWFVESVTPRFRNALKWMAANRKAYHVVDEAELTKVSGTEHHGGVCFLIKKRNGLDAETYLKDAPVKDCVLALEDVGNPHNLGGIMRSCAHFGVQGVILQDVALLESGAAIRTAEGGAEHIKGIDADSLVTTLNNFRKAGYTIVTTSSHKGSTALAKAELPEKMVLVLGQERDGLSDSAWEHGDMSLFVGGSGLVESLNVSVATGIMLAEWWRQNKAZ

SEQ ID NO: 2160 - protein, 514 aa, Photorhabdus luminescens
VMRQPLTGAKLAWMTIALSLATFMQVLDSTIANVAIPTISGNLGSSSSQGIWVITSFGVANAISIPITGWLAKRIGEVKLFIWSTALFSIASWLCGISNSLGMLIFFRVIQGLVAGPLIPLSQSLLLNNYPPAKGNMALALWSITIIIAPIFGPILGGYISDNYHWGWIFFINVPVGIAIILIAMQTLKGRETQTEIKPIDTIGLMLLVVGVGCLQIMLDQGKELDWFNSTEIIVLTVIAIISLTFLVVWELTDNNPIIDLSLFKERNFTIGCFCLSLAYMLYFGTIVLLPQLLQEVFGYTATWSGLASAPVGLLPLIISPLIGKFGNKADMRYIVTFSFVVYAICYYWRAYTFEPGMDFAAVAWPQFIQGFAIACFFMPLTTITLSGLPAERVASASSLSNFIRTLAGSIGTSLTTTMWTQRESMHHSHFTEHINPYSPDTQRIYQQLSELGMNNQQISAYLAKEVTHQGLIISANEIFWLSAGVFLILIMLVWLARPPFTQGSKEGMSAAHZ

SEQ ID NO: 2161 - protein, 395 aa, Photorhabdus luminescens
MSENEAIEVQAAQDPTSSKKRQRSRALVLLTLIFTLLGVAYFFYWFLILRHHQETDNAYVTGNQVQIMSQVAGSVITVNFDNTDFVKSGSILVQLDPRDAELALEKAKTTLANSVRQTHQQIVNSKQYQANIALRRSELTKVQNDLSRREILSVQKVIGKEELQHAQEAVASARAALDIAIEQYNANQAIVLDTPLEKQPAIEQAATEVRNAWLALQRTKIVSPIDGYVSRRSVQVGAQINKNTPLMAIVSANDMWIEANFKETQISGMRIGQPVEITSDFYGGSKVFSGKITGLDMGTGSAFSLLPAQNASGNWIKVVQRLPVRIELNPGQLEKYPLRIGLSTKVRVDTTSPDGPVLSDKTRTKSAYHTTALTIDMSPANKIVNNITNSNAGKZ

SEQ ID NO: 2162 - protein, 1565 aa, Photorhabdus luminescens
MLSTMEKQLNESQRDALVTGYMNFVASTLKGVDGQPVTVEDLYEYLLIDPEVADEVETSRVAQAIASIQQYMTRLVNGSEPGRQAMELSTANEWRDNDSQYAIWAAGAEVRNYAENYISPITRQEKSHYFSELETTLNQNRLDPDRVQDAVLGYLNEFEAVSNLYVLSGYINQDKFDQAIYYFIGRTTTKPYRYYWRQMDLSKNRQDPAGNPVTPNCWNDWQEITLPLSGDTVLEHTVRPVFYNDRLYVAWVERDPAVQKDADGKNIGKTHAYSIKFGYKRYDDTWTAPNTTTLMTQQADESSETQRSSLLIDESKTTLRKVNLLATTDFSIDPTEETDSNPYGRLMLGVFVRNFTGTPHQNRPAVYGYLYCDSAFNHHILRPLSKDFLFSTYRDETNDQNCLQFAVYDKKYVITKVISGKPTEDPENTGWVGKVDDLKLGTTGAYVYIDQDGLTLHIQTTTNGDFVNRHIFGYNDIVYDSKSGYGFTWSGNEGFYLDYHDGNYYTFHNAAINYYPAGYGGGSVPNGTWALEQRVNEGWAISPLLDAHHTITVQGSYIAWEGETPASYYLPIPDGTMLLDWSDKINFAISLNKLESVFTSPDWPTLTTIKNFSKIADNRKFYQEINAETADGRNLFKHYSEQTFQLASGATYPTTYTLSEADFSTDPDKNYLQVCLNVVWDHYDRPSGRKGAYSWVSKWFNVYVELQDSKAPDAIPRLISRYDSKRGLVQYLDFWTSSLPAKTRLNTTFVRTLIEKANLGLDSLLDYTLQADPSLEADLVTDGKSEPMDFDGSNGLYFWELFFHLPFLVATRFANEQQFSPAQKSLHYIFDPAMKNKPHNAPAYWNVRPLVEVHSDLSRHLGDPIDPDTQAYAHPVIYQKAVFIAYVSNLIAQGDMWYRQLTRDGLTQARVYYNLAAELLGPRPDVSLSSTWTPQTLDTLAAGQKTALRDFEHQLANSNTVLPALPGNNISHLKLADNGYFNEPLNVLMLSHWDTLDARLYNLRHNLTVDGKPLSLPLYAAPADPVALLAQRAQSGTLANGVSGAILTVPPYRFSAMLPRAYSAVGTLTSFGQNLLSLLERSERAGQEELAQQQLLDMSSYAITLQQQALDGLAADRLALLASQATAQQRHDHYYTLYQNNISSAEQLVMDTQTSAQSLISSSTGVQTASGALKVIPNIFGLADGGSRYEGVTEAIAIGLMAAGQATSVVAERLATTENYRRRREEWQIQYQQAQSEVDALQKQLDALAVREKAAQTSLQQAKAQQVQIRTMLTYLTTRFTQATLYQWLSGQLSALYYQAYDAVVSLCLSAQACWQYELGDYATTFIQTGTWNDHYRGLQVGETLQLNLLQMEAAYLVRHERRLNVIRTVSLKSLLGDDGFGKLKTEGKVDFPLSEKLFDNDYPGHYLRQIKTVSVTLPTLIGPYQNVKATLTQTSSSTLLTADINGVKRLNDPTGKEGDATHIVTNLRASQQVALSSGINDAGSFELRLEDERYLSFEGTGAVSKWTLTFPRSVDEHIDDKTLKADEMQAALLANMDDVLVQVHYTACDGGASFANQVKKTLFZ

SEQ ID NO: 2163 - protein, 261 aa, Photorhabdus luminescens
HSHNQIDSMPVSDTSSPLTSKKSSFTEGIIDSLPIVIGYIPVAFAFGLNAVKLGFNPMEAIFFSCIIYAGASQFVITALLSAGTSLWISALTIMAMDVRHILYGPSLRHRIKDKLTEKKTVIWAFGLTDEVFAAATAKLIKNHRSWSENWMVAIAICSWLAWGAGTAAGAFLGNGYLESYPAIEAAMIFMLPALFLSFLLASCRKQNSYCVATALTGALLGITFFSIPVAILAGIVGGCIAALLQPQNNCNDSSEQKETPZ

SEQ ID NO: 2164 - protein, 397 aa, Photorhabdus luminescens
MEENISRTPLSPALIALIAIATGLVVASNYYAQPLLDTIALQFNLTVNEAGFIVTTAQLSYAVGLTFLVPLGDMFERRSLIVSMTILATIGLLITATSQNIWQMLLGTAMTGLFSVVAQILVPLAATLALPHQRGKAVGTIMSGLLLGILLARTISGTMATLGGWRTVFWVASVLLVILSLTLWRYLPRYKQVTNLSYFQLLGSIVNLITTSPLLRVRAILGALTFANFSLLWTSMAFLLSAPPFNYSEGVIGLFGLVGAAGALMATQTGRLVDKGKGPLTTSISLVLLLLSWIPIGLVKESLIGFIIGVFLLDIAIQGVHVTNQSTIYRIMPEARNRLTAAYMTSYFIGGALGSLVSGYAYKHSGWYGVATAGIAICIISLIVWFLGKKYEPKTLZ

SEQ ID NO: 2165 - protein, 333 aa, Photorhabdus luminescens
MRKIVIWAISLSSLISSQLFAVELPGKGISVQPIQSTLSEETFQTLIVSKALEKLGYDIKPIKEVDYNVAYSSIASGDATFMAVSWEPLHNTQYQAAGGNAKFYRVGNYVENAAQGYLIDKKTAEKYNITNIAQLKDPKIAKLFDTNGNGKADLTGCNPGWGCEIAINHHLKAYGLNNSVEHNQGNYAAMMADTITRYKEGKPILYYTWTPYWVSDVLKPGKDVVWLQVPFSAMPNDEKIETKLPNGANYGFPPSIMHIAANKKWAEDNPTAAKLFSIMRMPLADINAQNLRMHNGEASPANIERHANGWIKAHQKLFDSWVKTAVEAAGKNZ

SEQ ID NO: 2166 - protein, 362 aa, Photorhabdus luminescens
MSNQNEHQTQPVQNSEDTPSIAADNTDPWSSGTSADNATGSDWLDAPATAVQPEHFNIMDPFQHPLIPLDSWVTQAIDWIVLNFRPAFQGIRVPIDFVLSGFEQCLTSIPAPIAILFFALIAWQLSGIGMGITALISLVIIGEIGAWHESMVTLSLALTSLLFCIIVGLPLGIWLAHSKRAAKIIQPLLDAMQTTPAFVYLVPIVMLFGIGNVPGVIVTIIFALPPIVRLTILGIKQVPADLIEAAESFGASPRQMLFKVQLPLAMPTIMAGVNQTLMLALSMVVIASMIAVGGLGQMVLRGIGRLDMGLATVGGVGIVILAILLDRLTQSFGYSNRAKGVNRWYATGPIGLVTRLFSQKAZ

SEQ ID NO: 2167 - protein, 400 aa, Photorhabdus luminescens
MAIKLEVKNLYKIFGDHSEYAFKLLNSGLSKDQIFEKTGMVVGIQNANLTIEEGEIFVIMGLSGSGKSTMVRLLNRLIKPTRGQVLIDGEDISEISTAALREIRRNKISMVFQSFALMPHLNILENSAFGMELAGITKQERNKKALDALKQVNLENYAQSYPDELSGGMRQRVGLARALANNPDILLMDEAFSALDPLIRTEMQDELLSLQGNQPRTIVFISHDLDEAMRIGDRIAIMQDGVVVQVGTPDEILNNPANNYVKTFFRGVDISHVFSAKDIARRRPDSLLHIAPGFGPLSALKVLDDENRNYGYLIERGQKFAGIVSVNSLEKALREKKPIEHAILAEPTSVAADMPLNELIAVVAQSPCAVPVVGNNDKYIGVISKGMLLQALDKETPNEZ

SEQ ID NO: 2168 - protein, 320 aa, Photorhabdus luminescens
MISNPICAINWNRIEDDKDLEVWNRLTTNFWLPEKIPLSNDITSWNTLTTEEKKLTIRVFTGLTLLDTIQNTVGAPALMEDALTPHEEAVMSNISFMEAVHARSYSSIFSTLCLTTDVDDAYRWSEKSFSLQNKAKIILNYYSYHHPLKKKIASVFLESFLFYSGFYLPMYWSSRGILTNTADLIRLIIRDEAIHGYYIGYKFQQSLKKHSTLEQKEIKEFTFSLLLELYENEIKYTEELYDIVGWTEDIKKFLHYNANKALMNLGYETLFPPEITNVSPTILSALSPNANENHDFFSGSGSSYVIGKAVNTEDEDWNFZ

SEQ ID NO: 2169 - protein, 710 aa, Photorhabdus luminescens
MTFQINAQQDYHALNALLNLYDSEGNIQFDKDKLAIHCYFRQHVNPNTLFFHSLKEKLDFLQQEGYYEINVLEQYDFTVIKKLFQQAYSKKFRFQTFLGAFKYYTSYTLKTFDNKRYLERYEDRVCMVALTLAQGDQMLACRLVDEMISGRFQPATPTFLNCGKKQRGELVSCFLLRIEDNMESIGRSVNSALQLSKRGGGVAFLLSNLRETGAPIKMIQNQSSGVIPVMKMLEDAFSYANQLGARQGAGAVYLHAHHPDILRFLDTKRENADEKIRIKTLSIGVVIPDITFKLAKHNEDMYLFSPYDIQRVYGVPMSEISMTEKYAEMVNNQQIRKSKINAREFFMALAELQFESGYPYIMYEDTVNNANPIKGRINMSNLCSEILQVNSASEYEEDLSYHHIGKDISCNLGSMNIAHTMDSPDFTLSIETAVRALTAVSDMSHIRSVPSIEKGNQDSHAIGLGQMNLHGYLAREKIHYGSEEGIDFTNIYFYIVTYHALRTSNQIAIERNSYFKGFKDSRYANGEFFNKYTEITWQPQTKKVSQLFEQAGIKIPNQQDWLELKASIMAHGIYNQNLQAIAPTGSISYINNSTSSIHPIVSRIEIRKDGKTGRVYYPAPFMTNNNLEYYQDAYEIGPEKIIDTYAIATQHVDQGLSLTLFFKDDATTRDINKAQIYAWRKRIKTLYYIRLKQTALEGTEVQDCVSCSLZ

SEQ ID NO: 2170 - protein, 322 aa, Photorhabdus luminescens
MSKPIQMERGVKYRDADKMALIPVKTVMTERTEILRKPEWMKIKLPADSSRIQGIKSAMRKNGLHSVCEEASCPNLAECFNHGTATFMILGAICTRRCPFCDVAHGRPMAPDTNEPVKLAQTIKDMALRYVVITSVDRDDLRDGGAQHFADCISAIREKNPSIKIETLVPDFRGRMDRALEILTATPPDVFNHNLENVPRVYRQVRPGANYEWSLKLLEKFKEAHPDIPTKSGLMVGLGETNEEILDVMRDLRRHGVTMLTLGQYLQPSRHHLPVQRYVSPQEFDEMKEEALAMGFTHAACGPFVRSSYHADLQAKGEEVKZ

SEQ ID NO: 2171 - protein, 214 aa, Photorhabdus luminescens
MKFQLQHKTIFLRQLGIQPYEPISDAMHLFTEQRDTNTPDEIWLVQHPKVFTQGQAGKAEHLLSLGDIPVIQSDRGGQVTYHGPGQQVMYVMIDIKRARIGVRQLVTAIEDTVIKTLAHFGVKAYARPDAPGVYVNEAKICSLGLRIRKGCSFHGLALNIAMDLEPFQRINPCGYAGMKMIQLSDLVPGITVEQVQPVLVEKFCQQLGFKLNSZ

SEQ ID NO: 2172 - protein, 390 aa, Photorhabdus luminescens
LGIALAISASAFANGNDANLKTMIPGVPQIDAEAYILIDYNSGKVLAEMNADAHRDPASLTKMMTSYVIGQAIKSGKIHPSDMVTVGTDAWATGNPVFKGSSLMFLKPGDQVSVSMLSRGINLQSGNDACVAMADYVAGSQESFVNLMNGYVKSLGLKNTNFKTVHGLDAEGQYSSARDMALIGQALIRDVPEEYTIYKEKEFTYNNIRQTNRNGLLWDKSLNVDGIKTGHTSAAGYNLVASATEGDMRLISAVLGGHTYKGRETESKKLLTWGFRFFETVAPLKASKEFASEPVWFGDNDRVQLGVDKDVYLTIPRGRLKDLKASYVMNNSELHAPLAKNQVVGTINFQLDGKTIEQQPLVVMNEIKEGSIFGRFIDYIKLLFHHWFGZ

SEQ ID NO: 2173 - protein, 967 aa, Photorhabdus luminescens
MNQLASPLISRTEEIHNLPGKLTDLGYTSVFDVVRMPRERFIREHRADLGRSAEKMYDLAVGYAHQVLHHFRRNSLSEAVQFSLRSPFSVSGPDYANQFLDANTGWKDKAPSGSPEANDAPVAYLTHIYQLALDQEKSGASAIMNTLVERRPDIGALLINDKAINEVIPQLQLVNEILSKAIQKKLSLTDLEAVNAKLSTTRYPNNLPYHYGHQQIQTAQSVLGTTLQDITLPQTLDLPQNFWATAKGKLSDATAGALTRLQIMASQLSPEQQKIMVETVGQNFYQLNYGDSLLTANSFSDMTVLTDRTSLTVPQVELMLCSTVGGSTVVKSDNVSSGDTTATPFAYGARFIHAGKPQAITLSRSGAEAHFALTVNNLTDDKLDRINRTVRLQKWLNLPYEDIDLLVTSAMDAETGNTALSMNDNTLRMLGVFKHYQAKYGVTAKQFAGWLRVVTPFAITPATPFLDQVFNSVGTFDTPFVIDNQDFVYTLTTGGDGARVKHISTALGLNHRQFLLLADNIARQQGNITQSTLNCNLFVVSAFYRLANLARTLGTNPESFCALVDRLDAGTGIVWQQLAGKPIIMVPQKDSPLAADILSLLQALSVIAQWQQQRDLPIETLLLLLSSGSTFTAQGTDDQLNFIRQVWQNLGSTFVSATLLSRSGAPLVDTNGHAIDWFALLSAGNSPLIDQVGLVTDAGIESVITMVVKTQSLSDEDKKLAITTLTNTLYQAQQTQQGVAVSLLAQTLNVSQSLPALLLRWSGQTTYQWLSATWALKDTVKIAADIPAGYLSLLREVVRRSLLTQQFTLSPAMVQTLLDYPAYFGASAEVVTDISLWMLYTLSRYSDLLLQVGKAGGGTEDDVLAYLRVANAATPLSQADAAQTLATLLGWETNELQAAWEVLGGIAKTTPQLDTLLRLQQAQSQTGLGVTQQQQGYVLSRDSDYTLWQSTGQAMVAGVSHVKGSHZ

SEQ ID NO: 2174 - protein, 333 aa, Photorhabdus luminescens
MRQHWLILSMIAALLSGCTTPDKQKSAPLPAVPTQDVLGAEPRYEPYHPSANDDYQMNGHTYHIVQAPSQFSETGYASWYGEESSGKMTAIGERFNPYALTAAHPTLPIPSYVRVTNLSNGRMMIVRVNDRGPYKPGRIIDLSKASAERLNLTQSTKVKVDFIEVAQDGSASGPGTIGSQIVKQSYALPGRPTLTTSPLGTPTMENIPDQTSSQPLTNQPMKLTIQPEATEQLPAMKLQPPKSVTNSTSIVTTPTAASANGFMVQVGAVSSEQRAKEWQQTLAQRFNVQGRVTQYSNVYRVQLGPFNNRQQAADLQQKLADQIQQSSFIVSPZ

SEQ ID NO: 2175 - protein, 371 aa, Photorhabdus luminescens
MTENQKRVPLWTRLHIDLPLLLCILALLIYSAFVMWSASGQDMGMMERKIGQIGAGLVVMLIMAQIPPRVYESWAPHLYIVCVILLIFVDAFGQISKGAQRWLDLGIIRFQPSEIAKIAVPLMIARFMNRDLCPPSLKNTTIALMLICLPTLLVAAQPDLGTSILIAASGLFVLFLSGMSWRLIGIAALLLACFIPILWFFLMHGYQRDRVMMLLDPESDPLGKGYHIIQSKIAIGSGGLSGKGWLLGTQSQLEFLPERHTDFIFAVLSEELGLIGVLLLLTLYMLLITRGLVIATRAQNTFGRVMVGGLMLILFVYIFVNIGMVSGILPVVGVPLPFVSYGGSALIVLMAGFGIIMSIHTHRKLLSKSLZ

SEQ ID NO: 2176 - protein, 632 aa, Photorhabdus luminescens
MKNKRTPFRDYTAESALFARRALVAFIIILVLTGILMANLYHLQITRHEDYQTRSNENRIKLVPIAPSRGIIYDRNGTPLALNRTIYQLEIIPEKVEHLEQTLNDLRNVIDLTDEDIANFEKERKRSRRFTSIPLKTSLDHIQVARFAVNQYRFPGFEIKGYQRRFYPYGSALTHIIGYVAKINDKDVERLDKEGILPNYAATHDIGKLGIERYYETVLHGKTGYEEVEVNNRGRVIRQLHEQPPQAGQDIYLTIDLELQIYIEKLLTTSRAAVVVSDPRNGEILALVSNPSYDPNLFVNGISNKNYQELLNNPDRPLINRATQGIYPPASTVKPFITVAALSTGVINKNTTIFDPGWWQLPGSEKRYRDWKRWGHGSLNAHRAIVESADTFFYQVAYDMGIDRLSEWMTKFGYGEYTGIDLAEERTGIMPTREWKQRKYKKPWYQGDTIPVGIGQGYWTATPIQMVKALTTLINDGNVKTPHLLLSKKLKGEMIPYQQTENIQIGDIHSGYWELAKSGMYGVANLPNGTGHKSFISTPYKAAVKSGTAQVYSYETYNASKIAEHLRDHKLMTAFAPYENPTVALSIILENGGAGPAVGTLVRQILDHVLLGDNNITLPNAVPTPPGTESDZ

SEQ ID NO: 2177 - protein, 243 aa, Photorhabdus luminescens
KLFPCCYVEKPYLRAFLMPHAIDSTCPKQPVIKALFGGTFDPIHYGHLQPVETLAYQTGLNQVILLPNHVPPHRPQPEATAQQRLEMVQLAVQDSPLFTVDKRELERTIPSYTIDTLESFRQELGNKQPLAFIIGQDALLSLHTWHRWQELLSFCHLLVCARPGYQTQFSTTEMQQWLTKHQIYDPSQLGSKPNGYIYLADTPLLSISATDIRQRHQQGLSCDDLLPLSVQKYIDSQGLYRQZ

SEQ ID NO: 2178 - protein, 347 aa, Photorhabdus luminescens
MIKLYPEQLISQLNEGLRNCYLIWGNEPLLLQESQDHIRKAAEKNAFTEHFTYTLDNHTEWDEIFNICQSLSLFASRQTLTLLLPENGPNTTIAEQLVKLAELLHPDILLILRGLKLTKAQENSHWFKILGKNGVYVSCQTPEQNRLPQWVAQRAKAMKLVLEEQANQLLCYCYEGNLLALAQALERLSLLYPDGKLTLHRVENAVNDAAHFTPYHWVDSLLSGKAKRAWHILKQLKQEDCEAVILLRTVQRELLLLLTLKRQSTTTPMKTLLDQHRVWQNRRSLLTSALQRLTQHDLQRAIHLLVQMERQIKQDYGQSIWSDLETLSMLLCGKTLPESFFNASCHZ

SEQ ID NO: 2179 - protein, 861 aa, Photorhabdus luminescens
MQEQYRPEDIEPQVQLHWQEKQTFKVTEDNSKEKYYCLSMLPYPSGRLHMGHVRNYTIGDVISRYQRMLGKNVLQPIGWDAFGLPAEGAAVKNNTAPAPWTYANIEYMKGQLKTLGFGYDWDREVTTCTPEYYHWEQWFFTKLYEKGLVYKKTSSVNWCPHDLTVLANEQVVDGCCWRCDSKVERKEIPQWFIKITDYAEELLSDLETLEEWPEQVKTMQRNWIGRSEGVEITFDVADSQEKLTVYTTRPDTFLGATYVAIAAGHPLAKQAAENNPELVAFIDECRNTKVAEADMATMEKKGMATGMFAIHSLTKEKVAIWVANFVLMEYGTGAVMAVPGHDQRDWEFATKYNLPIKAVILDNEGNEPNVHEAPVTDKNILFNSGEFSGLNHEAGFNAIANKLVEMGVGKRKVNYRLRDWGVSRQRYWGAPIPMATLENGTVVPVPADQLPVILPEDVKMDGITSPIKADPEWAKTTINGQPALRETDTFDTFMESSWYYARYTCPDYDKGLLDPAAANYWLPVDQYIGGIEHAIMHLMYFRFFHKLMRDASLVNSNEPAKRLLCQGMVLADAFYYIGKNGEKIWVSPADTIVERDDKGRIVKATDKEGHELVYTGMSKMSKSKNNGIDPQLMVEKYGADTVRLFMMFAAPPELTLEWQESSVEGANRFLKRVWRLVYEHSSKGATQPLDITNLTVEQKDLFRDLHKTIAKVTDDVGRRQAFNTAIAAVMELMNKLTRAPQETEQDRALMQEALLAVVRMLSPITPHACFIMWQALGGEGGIDTADWPQANEQAMVDDTKLVVIQVNGKVRGRVTVPADATKEYVHDLAAQEYGVAKYLEGVTIRKVIYVPGKLLNLVVGZ

SEQ ID NO: 2180 - protein, 243 aa, Photorhabdus luminescens
LMISLKNVSKWYGQFQVLSDCSTEVKKGEVVVVCGPSGSGKSTLIKTVNGLESIQQGEILVNDIKVNDKNTNLAQLRSKVGMVFQHFELFPHLSIIENLTLAQIKVLNRDKKAAEEKGLKLLERVGLASQANKFPSQLSGGQQQRVAIARALCMDPIAMLFDEPTSALDPEMINEVLDVMVKLADEGMTMMVVTHEMGFARKVANRVIFMDEGRIVEDSKKEDFFANPKSDRAKEFLAKILHZ

SEQ ID NO: 2181 - protein, 225 aa, Photorhabdus luminescens
MYEFDWSSIIPSIPFLLQGLVITAKITIIAVVVGILWGTVLAVMRLSSVKALSWFATLYVNLFRSVPLVMVLLWFYLIVPSLVQNVLGISPKTDIRLISAMVAFAFFEAAYYSEIIRAGIQSISRGQSSAALALGMTPMQSMRLVILPQAFRAMTPLLLTQGIVLFQDTSLVYVLSLADFFRTAANIGERDGTQVEMILFAGLVYFIISIAASMLVNYLKKRTVZ

SEQ ID NO: 2182 - protein, 247 aa, Photorhabdus luminescens
MSIDWNWGIFLQAAPFGNTTYLGWLIAGFQVTIALSICAWIIAFIVGSLFGILRTVPNKILSGIGTCYVELFRNVPLIVQFFIWYLVVPELLPEKIGLWFKTELDPNIQFFLSSTACLGLFTAARMCEQVRAAIQSLPRGQKAAGLAMGLTLPQTYRYVLLPNAYRVIIPPMTSEMMNLVKNSAIASTIGLVDMAAQAGKLLDYSAHAYETFTAITLAYIGINLVIMLAMHLLEKKVRLPGNIGGQZ

SEQ ID NO: 2183 - protein, 298 aa, Photorhabdus luminescens
MRMRNLVLTMMLLGMAGAAQAEELTGTLKKVKDDGVIIVGHRESSVPFAYYDNHQKVVGYSQDYSNLIVEAVKKKLDMPNLQVKLIPVTSQNRIPLLQNGTYDFECGSTSNNLERQKQVTFSNSIFIITTRLLTKKGSGIKDFPDLAGKNVVVSAGTTSEILLNKLNDEKSMKMRIISAKDHGDSFRTLESGRAIAFMVDDALLAGERAKAKKPDQWEIVGTPQSREAYGCISRKDDLQFKKLIDETIVQAQTSGVAEKSFERWFKHPIPPKNLNLNFSLSDEMKALFKSPNDKALDZ

SEQ ID NO: 2184 - protein, 554 aa, Photorhabdus luminescens
MAIGYFLLVGDKTTCGGQIITGDHTMTFNGRATAREGDKVTCGKHPGTYVIVGGVSDVFDMGRKLAGTLDSVSTCPCRARFINSEMDSYEKQDKTADRVAAPTNMAQQHFSSPVKDVGSPPATQVPPPPIPVFTKSCQRGKGCTDAGTEPESANNFGRMAIYQVPSSPAPATAQKPEPPPQDKKHPPEPGKPRDKKLPWYKRWFRSGKDNAEAAATAVAATTRSAVAEGETLVMRYIGGGAISAGRWLAAPNPVTVGLMGLFYSPSLNQGEEDYLDPYRLRQIAEQYGKAPTRVRFRWIRDEKSGRMTVQGYHVSPESGLDKVPVCMMTLNRTTGNYEFWEPGETRPTILWTPNEQEFKAPAHTGNEEQPFIPSQITVLPIPDKVGSDIESLPMPEEKDFRDYILVFPIPNMPPVYVYLSKPPVKLFEVDLYRNFAGRLRNGTHADHMPSAAAVRAKLKMLYPDLEMDELSLIEKNVAAIIIPAKVHQKFSATYGGRNSQTQIEQDSKDLRAAVERDFSTIEPELRNYGATKAQLENARAKIHRLNQEQGLYKZ

SEQ ID NO: 2185 - protein, 510 aa, Photorhabdus luminescens
MNKASLLNCQRLRALLALFFGASGTLAFSPFDFWPAAIISLFGLQLLTLNRTPRQAAFIAFCWGFGLFGSGTNWVYVSIANFGGMPTTVNILLVILLAAYLSLYPALFAALLNRFFAKTNGLRLAVAAPALWQLTEFLRGWILTGFPWLQFGYSQLDGPMKAIAPILGVEAITFLLMALSGLFVLAVIHRKIVAGIIAVAILLLPWPIRHYQWYSLLSEKTVDVALIQGNIPQSLKWDPKMLSETMDIYMGNSLPYIGKMPIIIWPESAIPSLESYQRHFLTKLDELLRNQHTSLITGIVDERAVGDRDKIYNSVIVLGDKIPYQYPAAIRYDKYHLVPFGEFVPLESLLRPLAPFFNLPMSSFSRGNYIQPQLSVAGYNLTTAICYEIILGEQVRANFKPDTEFLLTVSNDAWFGGSIGPWQHFQMARMRSLELGRPLLRGTNNGITAVIRPDGEVQAALPQFTRNVLVAKVTPATGITPYARWGNWPLWIITVSFSLFALTYNRRKSZ

SEQ ID NO: 2186 - protein, 294 aa, Photorhabdus luminescens
MSDDHPSSNDNPSPKKGFFTLLLNQLFHGEPKSRDELVELIRDSEQNDLIDPDTRDMLEGVMDISDQRVRDIMIPRSQIVTLKRNQTLDECLDVIIDSAHSRFPVISEDKDHIEGILMAKDLLPFMRTDSPPFSIDKVLRQAVVVPESKRVDRMLKEFRSQRYHMAIVIDEFGGVSGLVTIEDILELIVGEIEDEYDEEEDVDIRALSRHTYTVRALTQIEDFNEAFSTQFSDEEVDTIGGLVMQAFGHLPARGESVDINGYLFKVAMADSRRIIQVYVTIPDDAPIPNLEEEZ

SEQ ID NO: 2187 - protein, 351 aa, Photorhabdus luminescens
SVTQQIHSQIATQEIFLEPADNQRLMSLCGPFDDNLKQLERRLGIEISRRDNRFKLMGKPLCVSAATNILQHLYVETSPVRGVIPDVKPEQIHLAITESRVLEQTAESIPEYGKSVNIRTKRGMVKPRTPNQAQYIANILSHDITFGIGPAGTGKTYLAVAAAVDALERQEIRRILLTRPAVEAGEKLGFLPGDLSQKVDPYLRPLYDALFEMLGFEKVEKLIERNVIEVAPLAYMRGRTLNDAFIILDESQNTTIEQMKMFLTRIGFNSKAVVTGDVTQIDLPRGQKSGLRHATEVLSGVGELSFNFFHSDDVVRHPVVAKVVIAYEEWEATEQKRKQTLSEQRKQEAQZ

SEQ ID NO: 2188 - protein, 481 aa, Photorhabdus luminescens
MHKKMSTIKKLYIKTWGCQMNEYDSSKMADLLESTHGYQLTDVAEEADILLLNTCSIREKAQEKVFHQLGRWKNLKDTNPDLIIGVGGCVASQEGDFIRQRAQCVDIIFGPQTLHRLPEMINQVKGTRSPVVDISFPEIEKFDRLPEPRAEGPSAFVSIMEGCNKYCTFCVVPYTRGEEVSRPCDDVLFEIAQLAAQGVREVNLLGQNVNAYRGATYDGDICSFAELIRLVAAIDGIDRIRFTTSHPIEFTDDIIAVYEDTPELVSFLHLPVQSGSDRILTLMKRAHTALEYKSIIRKLRKARPDILISSDFIIGFPGETQDDFEKTMKLIADVNFDMSYSFIYSARPGTPAADLPDDVSEEEKKQRLYLLQQRINQQAMSYSRAMLGSVQRILVEGTSRKNVMELSGRTENNRVVNFEGQPDMIGKFVDVEIVDVYANSLRGKVIRTEDQMDLRIHESPESVIARTRKEDEIGVGTYQPZ

SEQ ID NO: 2189 - protein, 394 aa, Photorhabdus luminescens
MNNSQQIFDVVVVGAGMIGAATALGLAQEGWTVALLDHQPPQSYDAQSQPDVRVSAISCASVDLLKQLGAWDAVLQMRSAPYRTLETWEQNDSNLVFDAQSLGLPELGYMVENRILQLALWQQFEKYPNLTLLCPAVLQAMQWQKVGWLVTLADGTEMAARLIVGADGARSQVRQMAGIGSRGWQYRQSCMLITVKTEQPQQDITWQQFFPSGPRAFLPLFDQWASLVWYDKPARIRQLQAMSMAQLEQEIFQAFPIRLGKVTPVAAGSFPLTRHHANSYVREGLVLLGDAAHTINPLAGQGVNLGYRDVNTLLDVLVKARELTEQWDSLEVLMRYQRRRMPDNRMMQAGMDLFYTVFSNELPGLKVARNLALMAAQRAGVMKKTVLKYALGLZ

SEQ ID NO: 2190 - protein, 409 aa, Photorhabdus luminescens
LMSYNNTQKQIGNIDLVKQLNGAVVYRLIDQQGPISRIQIAEQSQLAPASVTKITRQLLERGLIKEVDQQASTGGRRAISIVTENRHFHTVGVRLGRHDATLALYDMSGKALVEEHYPLPEATQQKVENQLINAIENFIQQNQHRIRELIAISVILPGLVDPDTGIVRYMPHIKVTNWTLVDNLKKHFNISCFVGHDIRSLALAEHYFGATRDCEDSILVRIHRGTGAGVIINSQILLNNRGNLGEIGHIQIDPLGERCHCGNFGCLETIAANSAIEARVQHQLKQGFPSQLTLNNCNIRAICQAANQNDPLASEVIKSVGHYLGKAISIAINLFNPQKVVLAGEITEAQKVLLPAIQSCINSQVLKEFRQDLPIVISELVHCSAIGAFALTKRAMLNGVLLQHLLERZ

SEQ ID NO: 2191 - protein, 387 aa, Photorhabdus luminescens
MYALTNCIIYTGHNRLDEHAVIIADGLIKRICLTQELPEHIEKRDLNGAILCPGFIDLQVNGCGGVQFNDQLENISEKTLDIMQRTNERSGCTSYLPTLITSTDELMMASVEVMRTYLKHNQHQALGLHLEGPYLNPAKRGTHNPELIRKPTSEMINFLCNNADVITKLTLAPEMVEQKYIQQLVEAGIIVSAGHSNASYEEARQGFQNGITISTHLYNAMPAISGRQPGLIGAIFDTPEIYAGIIADGLHVSWPNIRNTKRLKNDKLILVTDATIPAGLDPAISKMAHFTFAGKTIYYRNGLCVDQNGVLSGSSLTMIDAVKNSVEHVGIALDEALRMATLYPARAIGVDKYLGTVETGKIANLCVFNHDLKICTTIVNGKETELZ

SEQ ID NO: 2192 - protein, 271 aa, Photorhabdus luminescens
MRLIPLANASDVGKWSAHYIVSKINAFNPTAEHPFILGLPTGSTPLATYKELIALHKAGKVSFKYVVTFNMDEYVGITENHPQSYHHFMHQNFLDHIDIPKENINLLNGNASDVETECQRYEDKIKSYGQIHLFMGGVGNDGHIAFNEPASSLTSRTRIKTLTVETRTANSRFFDNDINQVPKYALTVGVGTLMDAEEIMILATGLNKAQAIQAAIEGNVNHMWTISCLQMHPKSIIVCDEPATMELKVKTVKYFHQLEADIIGEFASKKZ

SEQ ID NO: 2193 - protein, 505 aa, Photorhabdus luminescens
MGIFNYLQRLGKALMLPIATLPVAALLLRFGQPDVFNIPFIASAGGGIFENLPLLFALGIAIGLAKDNAGAAALAGVVGFLVLTKATSVIDSTINMSFFAGIIAGIVAGHCYNRFSNTRLPEFLAFFAGKRLVPIMTGIICLFIAWICGYVWPYVQHGIDTFSLLVSKSGMAGWFTYGVLNRSLIPFGLHYILHSVFWFSLGDCLKITYDLASSVHNICLAPDIVRSLTIGAAVPGIDGSTITQIATDMSRGDLNRFFAGDPHAGIYMAWAYPIFMGGLPGAALAMYLAAPKERRPQIGGMLLSVALTAFLTGITEPIEFSFLFLAPALYVLHAILAGVSMVIVNSLGILHGFGFSAGLIDLVLSWGLATKPWLLIPLIALFFVLYFVCFTLMIRIFNLRTPGREIGETTQATSASQDNETIQHYITALGGAQNIHAVDACITRLRLTVEDNTQLDEHRLKQLGAKGILKIGKQSVQVVLGPQAESIAGQIRTQLSSDRPDKRSZ

SEQ ID NO: 2194 - protein, 556 aa, Photorhabdus luminescens
MSEADARPTNFIRQIIDEDLATGKHTSVHTRFPPEPNGYLHIGHAKSICLNFGVAKDYQGQCNLRFDDTNPVKEDVEYVDSIKNDVQWLGFEWSGDIRYSSNYFDTLYQYAIELINKGLAYVDQLSPEEIREYRGTLKEPGKNSPYRDRTIEENLVLFEKMRAGEFDEGKACLRAKIDMASPFIVMRDPVLYRIKFAEHHQCGNKWCIYPMYDFTHCISDALEGITHSLCTLEFQDNRRLYDWVLENITIDCRPRQYEFSRLNLEYTVMSKRKLNLLVADKIVEGWDDPRMPTISGLRRRGYTAASIREFCRRIGVTKQDNNVEMAALESCIRDDLNENAPRAMAVLDPVRLVIENMPEGEQILSMPNHPNKPEMGSREVPFSREIYIDRADFREEANRQYKRLVLGKEVRLRNAYIIKAERVEKDADDNITTIYCSYDDQTLNKDPADGRKVKGVIHWVSAVHAVAAEFRLYDRLFCVPNPGAEDDFLATINPESLVIRQGFVEPSLADAKSEQTYQFEREGYFCADSCHSSAENLVFNRTAGLRDTWAKISQDZ

SEQ ID NO: 2195 - protein, 220 aa, Photorhabdus luminescens
PKDQHFVKNLQNYSSFDGLYQITSDNRRWAMLLHKQTCFVGANDEQTDNLRSTLSYYVLEPVKLPNGDDDRAQTLYRQIPPAAKFPLPEASLPLPAVSHISVCVPVTLPPLLPARLSAFLSTLPTDVHDWLYGYLHQPTPPVAEALDQTLESPMSTTVANRKANVPLETASFVKVNNPVLCFPGVPDQTVMLHSPAAIPWCETPDFGPDADYGYATTLAZ

SEQ ID NO: 2196 - protein, 298 aa, Photorhabdus luminescens
MNNLSGFMIFIHVAEARSFATAARQLGLSPSSVSKSISRLEDKLGVRLLQRSTRSVSLTAEGTLFLERCKRILDEISTAEHELLSSISAPQGRLRVSLPLLSNLMLPVLSAFVTCYPQIELELDFSDRLVDVIDEGFDAVVRTGELNDSRLMNKRIGSSRFIYVGAPSYFAQHGKPSHPRELLHHACLMHRFPTTGLLEKWPLCLGRSEIDIHLQAKITSNHVETLLHMAIQGHGIACLPDFTVKQALASGTLLTILDKWAGTSSTFRVLWPSNRWVLPKVRAFVDFMADNLFPKEKZ

SEQ ID NO: 2197 - protein, 255 aa, Photorhabdus luminescens
MELTINTQNELKEEAGYFLSPLWQDVFSKVLLEELNSNIFLVACRSGEADQNLLRKFMIQHHYYSQYFTRYLCSLMGGLADQKDFMLLSHNLLEELTGTDAAKISHAKLYKKAMTAINAVPKSDPILNSTQQLIDAMFRHCRSDDSLRGLAALCLGAEAIVPLVYGPILDALQLIKAPDDALHFFRIHVEEDEDHAIAMRKIIDRMIEEKPYRRGDVIAVGEEMVRFRIGMLNELYQSNIRTNTDVTMLLSECDZ

SEQ ID NO: 2198 - protein, 201 aa, Photorhabdus luminescens
FIFLHYSFIKYINSNRYKCLLSPPGYIKNRQTLNRGRECVMLKITRDVYLDCDSNKIIHGKNIFIITEKEKRLLLALWEHASQGNTLNREQLIPLVWPERKDGVAETNLLQLICKLRRTLRYCDLGEAIHTVYRQGYRFILPLQDDEQDNRQLQNTQLPIPIATPPKPFYWRFTRMIVMFITAIIWISTILYTAPFLAKRZ

SEQ ID NO: 2199 - protein, 262 aa, Photorhabdus luminescens
LSEVFMSEINKPEVTEIENKLPEHKSLNPDQYKCNHVVAPENSCPWAIIQVYLGNQARRGDWDSPNECIRLIPESNANSEGNNLIYIEKCDKHGHWLPWQPTPEDIMGSDWSLLEPDNNMMVFDVTLGTSKYDTGQDWGYMSDKGVFGKGESTFGTLNITQNKIDIKSILRFYYNSSGLYLRVYFDKANYQKVKEVLKKNFYVSVDNVTYDFGTFLHDHDADNDNYEYDVYYYESENPTVEKLGAILKQTGETKRFYCNWRZ

SEQ ID NO: 2200 - protein, 217 aa, Photorhabdus luminescens
CGRRYVYCIPIYLSHRQIKGGHMTVGMTTLVTLLTPLPDVNQLAKLPEYLSAPITQLVQDRAGQKMLTAQEVMSYFSESKMALAYLKENTQIGIELLETIDRDGIEPGIDIRDVVERYESAAKIATSQLHLLKLSYILAESSPAWGPHVKLFQTHSQRALRIFANNRNVLLRIATMLKQYLPVNAGEYTPKADAESYKELVNLSHKKLGIPLPVWGZ

SEQ ID NO: 2201 - protein, 289 aa, Photorhabdus luminescens
IMFFSRKLEAFMAVVENGSLSKAARVMNRTTPPVAKSIKDFEATLGKRLFKREKFGMSLTKDGLELYNDLKDLYLQEKEITKKHISGSICNIVNIYYDWGKNKHLIYLYKAADRNSSQVNIFRFSYDNIEEIVDYDGNTLILSSEKILSDRFSLIRKIKGPELGICCRKELLDIANGDVMQLLKSNTWLCDPVLYKSSFVKNLEEEVIQSGGKVNMRQMDNMGCCMNFIYSRDYIFITDSHPDELEGGDALSFVPIEKPGAANQCYIYKSKSHSSVLNRFIDSVNDMSZ

SEQ ID NO: 2202 - protein, 269 aa, Photorhabdus luminescens
MKFISFNINGLRARPHQLAAIIEQHQPDVIGLQETKVHDEAFPLEEVGKLGYHVFYYGQKAHYGVALLTRQVPLAVYRGFPGDDEEAQRRVIMAEVETPHGLLTVINGYFPQGENREHPVKFPAKEKFYQDLQNYLEQNLTPQSHVIIMGDMNISPTDLDIGIGENNQKRWLKTGKCSFLPEERDWMDRLKNWGLVDTFRHLNPECNDQFSWFDYRSKGFDDNRGLRIDLLLASKPLMDRCIATGIDYKIREMEKPSDHAPVWAEFEIZ

SEQ ID NO: 2203 - protein, 643 aa, Photorhabdus luminescens
MRLFIAEKPSLARAIADVLPKPHRRGDGFIACGDNQFVTWCIGHLLEQAEPDAYDNRFARWSLVDLPIIPEKWQLKPRPSVEKQLNIIQTLLEKADEIVHAGDPDREGQLLVDEVLDFLKLDAVRRKNVRRCLISDLNPQAVTRAVDRLRDNRDFIPLCVSALARARADWLYGINMTRAYTLLGRNAGYQGVLSVGRVQTPILGLVVRRDEEIEHFVPKDFFEVKAHIVTPKDERFIAIWQPSESCIDFLDEEGRLIHRPLADHIVTRITGQPAYVISYQDKRESEVAPLPFSLSSLQIEAAKRFGLNAQQVLDICQRLYETHKLITYPRSDCRYLPDEHFAGRHAVLNAISIHATKLLPQELLEIDRKNRCWDDKKVDAHHAIIPTARSSHINLTDSEANIYGLIARQYLMQFFPDAIFRKCVIELEIAGGKFIAKARFLAEAGWRTLLGNKERDEENDGTPLPVVAKGDELLCERGEVVERQTQPPKPFTDATILSAMTGIARFVQDKELKKVLRATDGLGTEATRAGIIELLFKREFLYKKGRHIHATPAGRALIHVLPDMAALPDMTAHWESRLTQISEKQFRYQDFMGPLEETLQQLIWQAKQNRNLTAFRDLPPLPVKDKKGKKIKAPKNTKRAAPZ

SEQ ID NO: 2204 - protein, 348 aa, Photorhabdus luminescens
MSTEVRLTQYSHGAGCGCKISPKVLETILHSEQEKFLDPHLLVGNETRDDAAVYDIGNGTGIISTTDFFMPIVDDPFDFGRIAATNAISDIYAMGGKPIMAIAILGWPIDKLAPEIARKVIEGGRAACKEAGIVLAGGHSIDAPEPIFGLAVTGIVNIDRVKQNSAAKVGSQLFLTKPLGIGVLTTAEKKGLLLPEHQGIAIETMCRLNKLGMDFAEVAGITAMTDVTGFGLLGHLSEICAGSGVQATLHFAKVPKLPEVESYIAKGCVPGGTGRNFDSYGHLIGEMTELQRKLLCDPQTSGGLLLAVLPEAMDEVKAIARCHGIELTAIGELSEQQSGRVLIEVNEZ

SEQ ID NO: 2205 - protein, 622 aa, Photorhabdus luminescens
MRILWKLIARLFKWSWRLLNFIREVISNLIFIMLILVVVGSFLLYQQTNKTADSYQGALYVNLTGVIVDQVSNRTPLTQLGRELFGTSSNKFQENSLFDIVDSIRQAKTDNKITGLVLKLDDFIGADQPSMQYIGKAINEYKTSGKPVYAISDSYNQSQYYLATFADKIYLSPQGTVGLYGYSTNSLYYKSLLDSLKVTAHIFRVGTYKSAVEPVMRDDMSPAAREADSRWINGLWHNYLNTVATNRKLTVDQVFPGANEMIASLRAVGGDNAQYALKHKLVDYVAPRNVIESDMTKAFGWDEKNRHFNAISIYDYAPQLVEGRLSSKGNIAVIVAQGAIVDGQQTQGMVGGDTTAAQIRQARLDDNIKAVILRVNSPGGSVSASDVIRTELAALRATNKPVVVSMGGMAASGGYWIATPANYIIANQSTLTGSIGIFGVITTYENSLEHIGIHTDGVSTTPLAGISVTKGLSKEFSALMQLNIENGYNNFIGLVATSRHKTREEVDNIAQGHVWIGHDAKTNGLVDQLGDFDDAVTKAAELAKLDNPELDWMQPEMSFSELLMSQLTTTAQAIVPEAVQAWLPAPLVQVAQEVKQQSEFYRHLNDPQNRYAFCLNCGDIRZ

SEQ ID NO: 2206 - protein, 312 aa, Photorhabdus luminescens
REGSMSMNLGIPLVRLFREEDSTGISALFRVVYGEDYVYPEVYLPTMLGRYNAAKQWYSAVAVQDGHVLGHAALWRDEHCSLSAELALIAVHPQARGQGIATALGRYLCDQAKKMGLSILTIKQVSSHNHSQRLAQNLGFHTTGLLPDYVTSPFDQARPESIVLGCLPLQSWPFPEVHWPSGWQLWLTSVTQVFGQEPLQPEELVDADIRITNHGRRLEVWIEKQTTERVKEVAELPAHKLIYVRLPVGEGTLQAMEILQQAGFACTGFVPGHHHHWEALLVRGHSRKELTLDCQFARRLHQQSMFACAGAZ

SEQ ID NO: 2207 - protein, 340 aa, Photorhabdus luminescens
MQKKSIYVVYTGGTIGMQHSSQGYIPVSGHLQHQLTKMPEFHRPEMPTFTIREHQPLIDSSDMTPEDWQFIADDIRENYHDYDGFVILHGTDTMAFTASALSFMFENLGKPVIVTGSQIPLEALRSDGQTNLLNALYLAANYPVNEVSLFFNNKLFRGNRTVKAHADGFDAFASPNCSPLMEAGINIKTFNACSAPANHSEFITHQITPQPIGVITIYPGLSSQIVNNILMQPVKALILRSYGVGNAPQHPELLKELKQATERGIVVVNLTQCISGRVNMEGYATGHALAEAGVISGYDMTFEATLTKLHYLLSQPYSNEKIRYLMQQNLRGELSYIDKZ

SEQ ID NO: 2208 - protein, 213 aa, Photorhabdus luminescens
MKTALLLIDLQNDFCTGGALAVEESEQVIVAANQAMAICLKHNISTIASQDWHPAEHMSFAVNSGQKIGDIGLLNGIPQVWWPVHCVQRQHGADFHPQLNKQAIVEIFHKGENPQIDSYSAFFDNGHQNKTRLDGWLQTQQIERLFIIGIATDYCVKFTALDALALGYETWVITDGCRGVNLSPNDSQSALKELKEQGAILIELAQLEDALLZ

SEQ ID NO: 2209 - protein, 332 aa, Photorhabdus luminescens
MTIKVGINGFGRIGRIVFRAAQERSDIEIVAINDLLDAKYMAYMLKYDSTHGRFNGTVEVKDGHLIVNGKAIRVTAERDPANLKWNEVGVDVVAEATGIFLTDETARKHIAAGAKKVVLTGPSKDDTPMFVMGVNHKAYAGQEIVSNASCTTNCLAPLAKVINDKFGIVEGLMTTVHATTATQKTVDGPSAKDWRGGRGAAQNIIPSSTGAAKAVGKVIPELNGKLTGMAFRVPTPNVSVVDLTVRLEKPATYQQICDAIKDAAEGELKGVLGYTEDDVVSNDFNGEKLTSVFDAKAGIALNDNFVKLVSWYDNETGYSNKVLDLIAHISKZ

SEQ ID NO: 2210 - protein, 251 aa, Photorhabdus luminescens
MINKAKILATVAAFCLSSSLAYAGQWSIGASVLAEASPYKGVKNKDKVLFVPMVNYESDNFYFHTLAAGYYLWNQPKDQLSLDVYYYPQNFRPKDNEDKQMKKLDRRHDTMMGGFSYRHIEDWGTLRSSFAADTLGKSKGITIDLAYLYEFKSDDWSLQPGLGVVWNSKKQNRYEYGIKDSESRHSGLEKYTPDDSWAPYLELSANYKFNQEWSVFMMGRVERLPSEIKDSPMVNKSYSSIVWTGVTYSFZ

SEQ ID NO: 2211 - protein, 363 aa, Photorhabdus luminescens
MPRPISATIHLDALENNLAIIRNKVGNSKIWAVVKANAYGHGLHCIWRSLDQADGFALLDFHEAILLREQGWQGAILLLEGFFKPEDLPIIDEYQLTTVVHSHWQLEAIEAANLSKPINIYLKLNSGMNRLGFPADQYSAVLSLARGIRQIGQITLMSHFANADKDNKEISVTEQLNVIHSVSQGLDISQCLANSAASLWYPQTHRDWVRPGIVLYGASPSGKWKDIADIGLKAVMSLQSEIIAIQNLKAGDKIGYGSEYTAPGPMRVGTVACGYADGYPRCAMTGTPIIVDGVRTQVLGTVSMDMLSVDLTPCPQAQIGSPVELWGQNLPVDDVAESSGTIGYELLCALANRVPVSIPYGFZ

SEQ ID NO: 2212 - protein, 438 aa, Photorhabdus luminescens
MMKILILGSGVIGVTSAWYLVQQGHEVTVIDRQGSAAEETSAANAGQISPGYATPWGAPGIPLKAIKWMFQRHAPLAIRPDGSLFQLRWMWQMLRNCDASHYAINKSRMVRLAEYSRDCIKQLRADTGIQYEGRQRGTLQLFRTNKQFDNAVNDIAVLEQEGVPYNLLTADKLATVEPALAHAAHKLTGGLQLPNDETGDCQLFTKELVKMAEAAGVTFLFNKQVKQLLVEGHRIIGVQCEDGVMTADNYVVAMGAYSTELLKGLVKIPVYPLKGYSLTMPIVDAERAPVSTALDETYKIAITRFDNRIRVGGMAEVVGFNLNLLKARHETLKMVVQDLYPGGGDITQTHFWTGLRPMTPDGTPIVGPTEYHNLYLNTGHGTLGWTMACGSSQLLADIISGKKPAIASDDLSVFRYVNGFNTKLVPFSHQLHTELRGZ

SEQ ID NO: 2213 - protein, 240 aa, Photorhabdus luminescens
MVIKAQSPAGFAEEYIIESIWNGRFPPGSILPAERELSELIGVTRTTLREVLQRLARDGWLTIQHGKPTKVNNFWETSGLNILETLARLDHDRVPELIDNLLAVRTNIAAIFIRTAFKHNPGNSLEVLAEKEHVEDNSESFSMLDYDIFRGLAFASGNPIYGLIINGLKGLYTRIGRYYFSNPEARKLALNFYQQLVILCRDQSYDNVMECVRNYGKESGVIWHSMQSTMPSDLSEVYRZ

SEQ ID NO: 2214 - protein, 516 aa, Photorhabdus luminescens
METSILKTAVKNFLGNSPDWYKLAIIIFLIINPLIFFFINPFVTGWLLVIEFIFTLAMALKCYPLQPGGLLAIEAVIIGMTSPQQVGHEIANNLEVVLLLIFMVAGIYFMKQLLLFAFTKLLLSIKSKRMLALAFCLASAFLSAFLDALTVIAVVISVSLGFYSIYNNFITDQNDVINAKHDNHIDTAKKKQTLEQFRAFLRSLMMHAGVGTALGGVMTMVGEPQNLIIAKNVNWDFVTFFIRMAPITLPVFICGLLVCFLVEHFKLFGYGTELPERVRQVLEDYDKKTSAKRTHKEKAQLIAQALIGIWLIVALAFHLAEVGLIGLSVIILTTSFCGITEEHALGKAFEEALPFTALLTVFFSIVAVIVDQQLFTPFIQFVLQVSETSQLSLFYLFNGLLSSVSDNVFVGTVYINEARTAMQEGLISHKQFEYLAVAINTGTNLPSVATPNGQAAFLFLLTSTLSPLIRLSYGRMVIMALPYTIVMTLVGLLCVEFLLIPVTDMMVHWGLIALPZ

SEQ ID NO: 2215 - protein, 352 aa, Photorhabdus luminescens
RQANMLKATTGTNRVFMKRNIQPGFCVVQQPGGLSFQASLLFSHSNSEAARYFMALNSNYRFLKPGQILLVADPDSYNPPHMIQLLRQSQYQVNQSVSALPNESAAFLHRHFGLFHYVLDQGGTLVGTASSLGDTYFSQIKKNLSKLQKLYQREYRLNGLNRKFASPEFYVERQLIMGNLKGLLNKVGRLSLKIDQHPNLKHALKLSTKAIAHQWDKAGIGAIKGYSQTILQSEKMIKWMKYGGRVAIGLDFVDTTGQVIDACNYGQAGKCEKVTIKEYSKFAGRTGGGIAVGYGGSIAAGAACVALGFATEGLAVGICMAGGGLTGGAIGSYGFEKTMGFFADIFIEHFLZ

SEQ ID NO: 2216 - protein, 307 aa, Photorhabdus luminescens
VSVVDQKQQYNLNKLQKRLRRDVGQAIADFNMIEEGDRIMVCLSGGKDSYTLLSILQNLQKSAPVNFSLVAVNLDQKQPGFPEHILPAYLGELGVEYKIVEENTYGIVKEKIPEGKTTCSLCSRLRRGILYRTATELGATKIALGHHRDDILQTLFLNMFYGGKLKGMPPKLMSDDGKHIVIRPLAYCREKDIERYATAKAFPIIPCNLCGSQPNLQRQVIKDMLREWDKRYPGRIETMFRAVQNVVPSHLSDFNLFDFKSITHGSEVIDGGDLAFDREELPMQPVVDIEDQPNYQSERLDIIEVKZ

SEQ ID NO: 2217 - protein, 425 aa, Photorhabdus luminescens
IMTLSLHDLVEYARNHAPFFKDLYRDLPRSGWALTDLPLINPDDYWQQSQSLENWPVLTGPVNGGHVFKTGGSTSDGRLSVFSCSEWRAFVRAFGQGLAQQLQPGDRVANLFVAGDLYTSLLFIHGALSYSPVPVVEYPFTWSVDDRALADAIVSLRINVLAGVTAQLLRFASTLQQWGQSIPGIDRLLYGGESLFPEQLTLLSQVFPNARIGSVGCASVDAGLIGAASPDCCYGEHRVFDTDTIVEIIDESNGQPITVPGQNGLLVVTNLQRRLMPVIRYPTGDMACWCEESGQPSRKFALQGRAGSAHRVRVFSLSIFPDHIARLLQQQEGILAWQLLLSRQGGMDKIELLLAGDSSLASSTTSVHQTLLAAQPAMAKLCDQGFLHVEVTYCALENMVTHPRSGKLMRVVDHRGYGAEEKAAZ

SEQ ID NO: 2218 - protein, 328 aa, Photorhabdus luminescens
VETIYGSSLKEADAVYACQFDGQGGMTPIDMNGVATPVQPFWQHLDYRNPKSYRWLMDTDLLPETVKAGLAGESLRPKIMRTGDGTMITFRTINNSESERPDQLVVFRIYINSQIVISSRHRKVHSLEQVLSDLQNGIGAKTTGHWLVEMVDAITDEVGNFIEDLHDNLIELENMILEQRIPGRGGLALLRKQLIILRRYMAPQRDVFARLASEKLLWMSDEDRYRMQEISDRLGRELDDLDGCIARTAIISDEITSMMADAMNRRTYTMSLLAMIFLPTTFLTGLFGVNLGGIPGNEYYLGFAIFCLLLFGLVLFVAWWLKKSKWLZ

SEQ ID NO: 2219 - protein, 541 aa, Photorhabdus luminescens
MRYFNLISCALLINSSLITVSAFAAEVPSGTQLNDKQELVRHLKDEPASLDPINAVGLTEAQVQRDLFEGLVNQDAYGNAIPGVAIAWKTADNKTWFFTLRSDARWSNGEPVTATDFVYSWQRLVTPANTSSFAWFAALAGIENAQEIIDGKLLPAKLGVEAIDKHTLKVTLNRPVPYFPNLTANFSLYPVNKKVVEKYGKEWIKVGHLVGNGAFELHDRIVNEKIVLTSNPYYWDHKKTVLTKVTFVPINQESHATKRYLADDLDITESFPKNMYKKLQHELSGQVYTPDQLGTYYYAFNTQRAPTNDARVRKALSMTIDRKIIAEKVLATGEKPAWHFTPDVTAGFHPVISDMEQHTQAELDQQAKVLLHAAGYGPNNPLKLSLLYNNSENHQKIAIAIASMWKKKLGVQVNLVNQEWKTYIDSRNTGNFDVIRASWVGDYNEPSTFLSLLTSTHSGNIAKFHQANYDKLLQSASLRTDDGLRNDDYNKAEQMIAEQAPIAPIYQYTNGRLIKPWLKGYPITNPEDVAYSHTMYIIKHZ

SEQ ID NO: 2220 - protein, 168 aa, Photorhabdus luminescens
MTQTVKFQGNDISVSGQFPKSGEKAQDFTLTAKDLSDVSLSHYAGKRKVLNIFPSIDTGVCAASVRKFNQVASDLENTVVLCISADLPFAQSRFCGAEGLSNVVTLSTLRGGTFSEDYGVAISGSPLSGLTARAVIVLDESDNVIYSQLVDEITNEPDYDSALAALKZ

SEQ ID NO: 2221 - protein, 528 aa, Photorhabdus luminescens
MRLEVVCHDRIGLTRELLDLLVLENIDLKGIEISQIGRIYLNFSPVDFNVFRKLMAEIRRINGVIDVRTVSFMPSEREHKAMCALLESLPEPVFSVDLKGNIELANSAVFKLFGVSEEQTYQKPIGQFISGYNFSRWFENKNIQQRVERITLKGLDYLMDITPIQLMDEKQKMQCVGTVIMLKSAARIGNQLKKLTVNDGSEFKAIIAVSPKMAQIIEQARKMAMLDAPLLLIGETGTGKDILAKACHLHSLRGKQPFLGLNCASMPDDVVESELFGYAAGAYPNAIEGKKGFFEQANGGTVLLDEIGEMSPQMQIKLLRFLNDGTFRRVGEENEVKVNVRVICATQKNLVELVQRGEFREDLYYRLNVLAITLPSLRDRKTDIMPLVEYFIERFSEEQGVPKPKLSPELSHFLTSYSWPGNVRQLQNAIYRALTQLENMELTPRDIQLPEFETEVSFSEDVFNGSLDEISKRFERSVLTRLYRHYPSTRKLAKRLGVSHTAIANKLREYGLSSRKHATEYEPDGDEZ

SEQ ID NO: 2222 - protein, 355 aa, Photorhabdus luminescens
MTEPLKPRIDFAESLSGPQEPVLKPAQIFNEKETANFCPASPELEAEEREGQVEGIVNAALKPKRSGWRKMVYGSLMLLGLSAVAQFVQWIYQSWQQQDWSALGVAAAGSMIVFAGIGSLVSEWHRLYRLRVRSEERDTARALLQHHGVGKGREFCEKLASQAGIEQHNPALQRWRAALHDTHNDREVVVLYSKWVQPVLDSQVRAEISRCAAESALMIAVSPLAIVDMAFIAWRNIRLINRIAALYGIELGYFSRIRLFRLVLLNIVFSGASEVVREVGMDWLSQDIAARLSVRAAQGIGVGLLTARLGIKAMELCRPLPWIEGDKPKLGDFRRQLITQLKNILPNKSKNIVNZ

SEQ ID NO: 2223 - protein, 466 aa, Photorhabdus luminescens
MKRLQNELTALVNRGMDRHLRLAVTGLSRSGKTAFITSLVNQLLNLHSGARLPLFSAVRDGRLLGVKRVPQRDLGVPRFTYDEGLTALYGTPPAWPTPTRGVSEIRLALRYRSGDSLLRHFKDTATLYLEIVDYPGEWLLDLPMLAQSYLAWSHQMNSLLQGQRAEWAKPWLELCQQCDPLAPADENLLATIARSYTEYLIKCKEQGLHFIQPGRFVLPGDMMGAPALQFFPWPDINPITESRFAQADRHTNIGMLRQRFEYYCQSVVKGFYKAHFLRFDRQIVLIDCLQPLNSGPQAFNDMRLALAQLMQSFHYGKRTLFRRLFSPCIDKLMFAASKADHVTADQHANLVSLLQQLVQEARQNAVFEGISMDCVGLASVRATESGMIEHNGESIPALKGYRLTDGKPLTFFPGEVPRRLPEDNFWQKQGFSFEEFSPCPVNVDTPLPHIRLDTVLEFLVGDKVKZ

SEQ ID NO: 2224 - protein, 225 aa, Photorhabdus luminescens
MSIFSRFADIVNANISSLLDKAEDPQKMIRLMIQEMEDTLVEIRSTSARALAEKKQLSRRITAGEQQMHDWQEKAELALNKEREDLARAALLEKQKVATLVDTLKHELTILEETLERMKGEIVELENKLSETRARQQALALRHQAAASSRQVRHQLDSGKIDQAMARFEQFERRIDHMEAEAEAVGMGKQKSLDQQFAELKADDEISAQLAAMKAKINANKEQHZ

SEQ ID NO: 2225 - protein, 341 aa, Photorhabdus luminescens
LSVKITMNDATENLLGEANSFLEILEQVSALAKLSKPVIVIGERGTGKELIARRLHYLSPRWQGPFISLNCAALNENLLDSELFGHEAGAFTGAQKRHQGRFERADGGTLFLDELATAPMQVQEKLLRVIEYGHLERVGGSQSLQVDARLICATNDNLPAMAAKGQFRADLLDRLAFDVVNIPPLRQRQQDIMLLAQHFAIQMCRELDLPLFPGFTDQARQQLQNYTWPGNIRELKNVVERSVYRHGENSAQLDNIIINPFASTPHFIANVDDSHDLSPQLLPSLPVNLKQWQHDSERQLIALSLKESRFNQRKAAEKLRLTYYQLRGLMKKHDINVGEKZ

SEQ ID NO: 2226 - protein, 558 aa, Photorhabdus luminescens
MPYMRSLIYWIILSLSAPAIAETITTPEKNPHVPTDIQQQGFIYCVNGNLNTFNPQLASSGLTVDTLAAQLYERLLDVDPYTYRLLPELASHWEILDNGATYRFYLRHNVSFQSTDWFTPTRNMNADDVIFSFKRLFDKQHYYHNVNGGHYPYFDSLQLADSIQSIRKLNEYTVEFRLNEPDASFLWHLATHYAPILSQEYGQQLHQMNRHEQIDWKPVGTGPFMLEDHRTRQFIRLVRHDKYWKGKPQMRQIVIDVGAGGTGRMSKLLTGECDVLAYPAASQLTVLRDDPRLRLTLRPGMNIAYLAFNTSKPPLDKLQVRQAIAYAINNQRLMQSIYYGTAETASSILPRASWAYDNQTEITEYNPEKSRKILNDLGLNGLQLSLWVPSASQSYNPSPLKMAELIQADLAQVGITMSIKPVEGRFQETKLMDKSHDMTLSGWSTDSNDPDSFFRPLLSCAAIASQTNFSHWCEPTFDKILREALINQQLLSRIKYYHAAQQVLEQQLPILPLAYSLHLQAYRHDIKGLVLSPFGNTSFAGVYREKETNQINQKGSKZ

SEQ ID NO: 2227 - protein, 322 aa, Photorhabdus luminescens
MIIYTLRRLLLLIITLFFLSLISFSLSYFTPNAPLSGASLFDAYIFYFNSLLLWDFGVSSINGELISEQLREVFPATMELCILAFSTALLVGIPLGIIAGVWRNKPADTVIISIALVGFSIPIFWLALLLTLFFSLYLGWLPVSGRFNLLYQIEPVTGFSLIDAWLSKSPYRNEMIISAIQHLLLPVITLAVAPTTEVIRLMRNSTEEVFGENYIKAAATRGLSRLTIIRRHVLHNALPPIIPKLGLQFSTMLTLAMMTELVFNWPGLGHWLVSAIRQQDYSAISASVMVIGTLVISVNVLSDIIGAMTNPLKHKEWYALRZ

SEQ ID NO: 2228 - protein, 1127 aa, Photorhabdus luminescens
ISYQICFKYQYSILTGFYRRSLMTRVPDTDLVHLKQTVSLLGLARKQGRPMKKRGEDYVLRCPFHNEKTPSMVISPAKNLYHCFGCGAAGSVLDWVIQTEGVTLKIAIRRLRELAGLPDMDNAVVAASSLAALPESQAAPLPRPKLADLDDDGQALLHQVIDFYHQHLLASPEAKAWLARRGLNHPELVNHFKLGYAGHHGIGGSAGLLPSKSSQEGQHLRDKLSGLGVLRTTTRQDHFRGCVVVPVIGWAESASVASRGRVLQLYGRRTQPDYKVLKDSPKHLYLPSPLAGVWNEAAMKAAAEIILCEALIDAMTFWCAGFRNVIAAFGVNGFNREHLDALQYHGVKRVLIAFDRDEAGDRGVANVAADLLEAGIEAWRVQFPPGMDANDYAVKSGNAEHALGLALQQAVWLGQGTAPGAVFSHERPVSPGVTEKPHNADVAKPAALAAPPELTVAPVPCERTACGELLMKSGPRIWRIRGMKKSPVPDVMKVNVQVRDETSGLFHVDTLDMYHARHRQNYISTAAQELECELSVIKREAGRVLLMLEQQQDAQQQADAEASGTTAVTVSAEDEAAALALLTSPNLTEQIINDMAACGVVGESTNLLTGYLAAVSRKLDKPLAVLIQSSSAAGKSSLMDAVLNLMPEEERIQYSAMTGQSLYYLGETSLQHKILAIAEEEGVRQAAYALKLLQSDGELKIASTGKNEQSGELVTREYRVQGPVMLMLTTTAIDVDEELLNRCLVLTVNESREQTQAIHAMQRHRQTLAGLLADSEKGYLTQLHQNAQRLLRPLKVVNPYAHQLTFLSDKTRMRRDHMKYLTLIQAIALLHQYQREVKKTTHRGQVIEYIEVTQDDIALANRLAHEVLGRTLDEMPPQTRKLLLLIQEMVNAQAQIQHCQPNEVRFTRRDIRAFTHWSDSQLKNHCQRLTEMEYLLLHGGSRGHLLHYELLWDGEDNGAAHLCGLLDVGEADSETAGSERKSDPEGHKSSPSPGQVWPESGEEKPASAQTAQGPVGAQVRADENAVIKENNHRDALPVPDRDKTPAAVPTGHESKSDLNEHPSASSLGQVRAKSGVKKSLSGQAEHGFSVPQVGVTEDTVIKGKKKTRPLSAPAPQSQPEVNHGKPZ

SEQ ID NO: 2229 - protein, 330 aa, Photorhabdus luminescens
MFQFDITIIIPVFNDENNITYLLDSIFAQENVNFEVIIINDGSTDNSLEVIKEYERKDNRIRIFNQENRGVSIARNYGIKYARGEWILFVDSDDWLKPQILRKWLDHAIEQRLDVLIGNGVSFTKDPFSQGNRRITRRQPYGRVLTGKEWIKYCVECREWPHFVWLQLIKKELIINNQMSFMENIFHEDILWTINLSLIANRIGFCEEQLYCYRHNLQSITRSRESKKLYHRADSYITVVNSIIKISKEIKGEKSLKRSLSRHAIREVGSFFILYRKKIHDPSLKKLLAKRFINQIALRDLLPGVHNYHELWFIIRCNLVLILRRFMDEZ

SEQ ID NO: 2230 - protein, 806 aa, Photorhabdus luminescens
RSPEMYLVNGKVISDLEPASVLAELKGNLAETLACPPSVQQVLACAERFVDDLDNVAVKLALDTAALTALRHFCHRDSLEAKLRHELGEQPFSLRRFDYTQPRFETWQPLGLVVHITPANAPLLPFMAVLESLLVGNVNWLRPSSSDHGLNAQILAEFLRHDLSGTLAPYISVLPLPSDQLSELLACADAVSAWGSNSALTAIRSQLRPGCRWIDWGHRISFAYFDPMAASDADYDALADDVCRFDQQACSSPQCLLVDSADENVLREVVSAVAAALARRATIWPALQTDIQEAAEISSQMAFLKLDHTFAELRGSVEEGNGWRVAWIQRQELAPSPLYRTLQVRPAPRAQLVEILLPWRPYLQSCALIVKEKELPMLSRQLLAAGVSRICQAGVMHDGYEGEPHDGVYALTRLARRVSVSLKPEQLPGHVALDKGSANPPELAGIPVMDKAKFQNGGVTAKAQVFFRSGGSSGEPKLAGFSHRDYHSQMQAAADGLFAAGLEPSQDRVMNLFYGSNLYGGLTSFFTVLDKLSVPHYPMGGPIDDDFSQIRHFIVTQGINTLAGMSSTIHRLFECEEAALRAYGGIRKIFTGGEHIGEERCRFLSSFGVQIIRSAIYGSVDAGPLGHACACCQEGEFHLLSDIQWLEILALDSDQPVPTGESGRLVFTPLAREGQVVQRYDIGDLGYWLPDLCDCGLPTPRFKLGGRHGVLTRVGSIFLNPTELSAGLPFPVQWLVGNSSSGCDYIHILADGDAEQVRMHLLQHRMLNQVVSGGLLQLEVIPTPVGQFHRHPQSGKTPLVLDSRFZ

SEQ ID NO: 2231 - protein, 297 aa, Photorhabdus luminescens
MPLDNFYREKKMPSPIKVIWRFFYSDMLAMMGFYGVLILIALSLFGGYLAPYKLDQQFLGHQLLPPSWSYHGNIAFFLGTDDLGRDILSRLLIGTASTFGSALLVTLAAALCGLIIGCLAGMTRGLKSAVLNHILDTLLSIPSLLLAIIVVAFVGASLQHAIIAIWLALLPRIVRTVYSAVHDELDKEYVIAARLDGASNYHILWYAVLPNITAALVNELTRAISIAILDIASLGFLDLGAQLPSPEWGAMLGDSLELIYVAPWTVMLPGAAIMFCVLLVNLLGDGLHRAINSGVEZ

SEQ ID NO: 2232 - protein, 331 aa, Photorhabdus luminescens
MPLLDIRNLTIEFMTAKGPVKAVDRVSMSLIEGEIRGLVGESGSGKSLIAKAISGVTKDNLKVTADRFRFDDIDLLRLTPRQRRKVIGHNISMIFQEPQSCLDPSENIGRQLIQAIPCWTYKGRWWQRFKWRKRRAIELLHRVGIKDHNDIMSSFPCELTEGECQKVMIAIALANQPRLLIADEPTNAMEPTTQAQIFRLLARLNQNNNTTILLISHDLQIMSKLVDRINVLYCGQTVESAVPDELLVTPHHPYTQALSRAIPDFGSSLPHKSRLNTLSGAIPSLEHLPIGCRLGPRCPYAQKTCIETPRLRVIKNHAFACHFPLNLEEQZ

SEQ ID NO: 2233 - protein, 270 aa, Photorhabdus luminescens
LVNTLLEVRNLAKTFRYRTGFFHRQHLNAVKPVSFTLKAKQTLAIIGENGSGKSTLAKMLSGVIEPTSGEIMIEGHKLTYGDYSYRSQRIRMIFQDPSTSLNPRQRIGQILDIPLLLNTALNTMEREKRINQTLRQVGLLPDHANYYPHMLASGQKQRVALARALILQPQIIIADEALASLDMSMRSQIINLMLELQEKQGISYLYVTQHLGMMKHISDQVLVMHQGEVVERGNTAEVLASPLHDMTRRLIASHFGEALTADAWRQDIPZ

SEQ ID NO: 2234 - protein, 263 aa, Photorhabdus luminescens
MGFMTGKRILITGVASKLSIAYGVAKAMHDQGAELAFTYQNDKLKPRVEEFAASLNSTIVLPCDVAEDESIEVLFTELSKIWPKFDGFVHSIGFAPADQLDGNYVSSVTREGFRIAHDISSYSFVAMAKTCREMLNPNSALLTLTYLGAERSIPNYNVMGLAKASLEANVRYMANAMGAEGIRVNGISAGPIRTLAASGIKDFRKMLAHCESVNPIRRTVTTEDVGNAAAFLCSDLSGGITGEILHVDGGFSIAAMNELELKZ

SEQ ID NO: 2235 - protein, 278 aa, Photorhabdus luminescens
PFSFNIIFHDFIQFNHIYYFSKVHKMKNDFLIISNMFKSITNIKLPECLKNYDLSQEIAASWNEFSGSLYRWPSTLEDYEYAYNSDEQDIDRIIKNIHKATTYLGSLSSGYLGHGYIARVNHALKEIQSDFSKLDGFISKLPQPFEISQIDFESKKNFAEKTHIKIQQLLKNIPDGEDKKQIYKLSLLMEEITLNIPDISFSLRNINNSVNKLNGQIKAINNIYNELVENFNEENKKDIFTRNYRQCMVYFSDFTNKFNLFSYDYKSFNKNNILIILZ

SEQ ID NO: 2236 - protein, 202 aa, Photorhabdus luminescens
MKLYYQPGACSLSPHIILREAGLDFSVIKVDLKTKKTENGDDFFAINPKGQIPTLLLDNNEILTEGSVIVQYIADQKPDKKLIAPAGTMERYRQLEWLSHISSEIHKGFSPLFFPGTPENYRPVAVNNLLRKFKYIDEVLAKQPYIAGEHFTVADAYLFTLSNWAPLVQLDLSDRVHLKAYQERIAERPNVRDALKAEGLIZ

SEQ ID NO: 2237 - protein, 288 aa, Photorhabdus luminescens
VKNILSIQSHVVFGHAGNSAAEFPMRRMGVNVWPLNTVQFSNHTQYAQWKGCVMPANHLTEIVQGIEEIEQLKSCHAVLSGYIGSAEQGGHIIDIVKRVKAVNPDAWYFCDPVMGHPEKGCIVVPGVAEFLCKDALPVSDIIAPNLLELETLSMQKVTNVEQAVMAARTLCDKGPDIVLVKHLSRAGYRTDRFEMLLVTKEHSWHVSRPLVDFGERQPVGVGDLTSGLLLVNLLKGESLQTALEHVAAAVYEVMVTTKEMGEYELQIVAAQDRMVAPNHKFWAIQLDZ

SEQ ID NO: 2238 - protein, 425 aa, Photorhabdus luminescens
MSSNNLIKQLQERGLIAQVTDENALAERLAQGPVSLYCGFDPTADSLHLGHLVPLLCLKRFQLAGHKPVALVGGATGLIGDPSFKATERKLNTEATVKEWVEKIRRQVSPFLDFDCGENSAKTANNYDWFGNMDVLAFLRDIGKHFSVNQMINKEAVKQRLNRDDVGISFTEFSYNLLQSYDFARLNEVHGVELQIGGSDQWGNITSGIDLTRRITQKQVFGMTVPLITKSDGTKFGKTEGGAVWLDPKKTSPYKFYQFWINTADADVYRFLKFFTFMNLEDIDALEEEDKNSGKAPRAQYVLAEQVTGMVHGEEGLAAAKRITESLFSGAAADLTEADFAQLAQDGMPVIELEKGADLQQALVNAGLVPSRGQARTMISSNAVAINGEKQSEPEYLFTDSNRLFDRYTLLRRGKKHDCLICWKZ

SEQ ID NO: 2239 - protein, 218 aa, Photorhabdus luminescens
MSEHNEFDVAELRREYIRGGLRRKDLTEEPIELFERWLNQACNAKLSDPTAMSIATVDENGQPYQRIVLLKHFDSNSLIFYTNLGSRKAKHLAHNNKISLHFPWYPLERQVSFLGKAERLSPVEVVKYFHSRPRDSQIAAWASQQSSRISARGVLEGKFLELKQKFLNGEVPLPSFWGGFKVTFDSVEFWQGGANRLHDRFIYQRQGDSWHVDRLAPZ

SEQ ID NO: 2240 - protein, 373 aa, Photorhabdus luminescens
MVMKSGRYIGVMSGTSLDGVDVVLAAINDKVVAQQASYSHPFPYELKQKILAVCQGQQTTLSAIGRLDYELGSLFAEAVQGLLIKTGLTASDITAVGCHGQTVWHEPNSHTPFTMQLGDNNRIAALTGITVVGDFRRRDMAYGGQGAPLVPAFHFAVLGHLTERRIILNIGGIANITTLLPGSPVKGYDTGPGNMLMDSWVWRHQKKPYDKDAQWAREGVVNNKLLGQMLSDHYFSRPAPKSTGREYFNMSWLEAQLVNFPDIPPVDVQATLAELTAASVSQQIMLSGGCERLLVCGGGAHNPQIMSRLSALLPGTEVCPTDKYGLSGDDMEALAFAWLAFRTMSGAPGNLPSVTGASTETILGAIYPVINQZ

SEQ ID NO: 2241 - protein, 391 aa, Photorhabdus luminescens
GSKCPFFFNFWRRLLTSLAYVDALCALDHPYRVDSVCDQLFDAAMRELTLYHCENTPGYSQWLKANGLEVERLEKLDDWSRLPPIFANYFKRQLLLSTTGRNALELTSSGTTGQKSRMRYDARSMRAAQNMVERIFEYYGWNTPQQPCNYLLLSYEPAGMVTLGTAYTDQYLCKYAPVNQACYALRHNGKSNEFDPFGVIRSLQEFAAQGLPVRILGFPAFLWFTLERMQDMGLPPVQLHPESLVFLGGGWKTHADKAIPKSLLYQRLGEQLGIPDERCRDGYGSVEHPVPYVECRNHHFHVPVYARTYVRDTANMAVQPYGKPGFLHLVSPYITSSPAHSIVVSDLAVLHPAAECGCELATDWFELLGRAGTSKSRSCAIAASELIKESZ

SEQ ID NO: 2242 - protein, 669 aa, Photorhabdus luminescens
LRLQHYYYQKCDKYDSLPESFLLAEDKLEQRLARPQGIPHWLTKPDDIISHPAAKENTVPDALSLLVERFELTEFERDTLLLGLLPHFDSRYHALFAALNGNSKKQWPSFALAIELFSQCQSDRQLLQNSFLPQTPLINNQLLRLNNQEEPIWLQTQFLTHNSVWHFLSGQRVILPPLITCANWHTPAPHNWYPQTLYHSFKKILLNDTNEIQPLIILRGKQDSARELAVSNIMASHGINTLTLDLALLPDDENPTEITHLLADTIRETRLHNACLLIRNFSLLTEAKKILHRNLSILLNQPKLRVVCLAEPGDILVWIKHQPMVQINMPIATLADKQTLLKASLPENIAQKINITRLCQRFSFTAETLPLIVEEAHQYQMIRQPEGQLEETDLRKALSFRAQQNFGKLAQRITPKRSFSDLVVSDMLAQQLKEIVAAINYRDQILSAGFQEKISYGTGISALFYGESGTGKTMAAEVIAGYLGVDLIKVDLSTVVNKYIGETEKNISRIFDLAEADSGVLFFDEADALFGKRSETKDAQDRHANIEVSYLLQRLENYPGLVILATNNRSHLDSAFNRRFTFITRFTYPDEKLRKKMWQKIWPEQLTLSNEIDFSHLAKRADLTGANIRNIALLSSILSADDNCQQIENKHIERAVILELNKTGRLAFZ

SEQ ID NO: 2243 - protein, 573 aa, Photorhabdus luminescens
FYSTNTDLNYLLFTHYQGNINMTSEPNLLNRITITIEANNQQVAKKVLHGSLLNQANINNLFNTLFTQYPINKDIYLETLTLDLGEINFHDFNSLFPARLKVALIKALSQYQINNKEEIHLNAPIPNKITHNSSLSGDNNFINAENFIHFLYQKDPQLNPAEAIANNKNSDIKIKKLINQLTRIDNKSALLLAKSCLSEHSLQRLLTIKQPALLSAINRRLSENINKPQHQEALASSGQLILNALEYIQRHNAQELVKPDAKIISRITTELNNGTLNAASVITLFRQAMTDNIPLNSWLKQLWQTVAISQLCQQHLSVEEHQYLLACFIPNHTDKNRSEIKPSMGGDNSSNDQKYQHPTNQKVIAEDPQALSISDNPSVIRGNNLNPLQTINKPYSEQTLLPEHLFPRPVNNAGILILWPMLPALFNQLGLLEAQKFIHHQAQFNAVDLLDYLIWGTEERPAERKVLNNVLCGLMADEMIELTPVEPEKQLIIDQWLDAVISQLPGWKKLSRNDVRQLFLQRPGELLADEQEIKISIQHQPFDALLADWPWPLNIAKLPWLDRPLKIDWKNIZ

SEQ ID NO: 2244 - protein, 435 aa, Photorhabdus luminescens
MEKEHNPYNSETNLETNLENTNIKSTGPSADDLKSRFKEGSIPLQTDYADLIDIADIGRRAVGKAPDQTNNPNSALELDDNSGLKIKINSTGGLKADQDGLSVKLKDKSLLADPNGLAVNAGRGVKINNDQLEVDGYHGIEIVNEGVKVKASNGINVNSDGVSVKAGNGISVSGKGVEVKAKDKGSISVDSDGIAVKYWDGGGIVATDNSGLYLKLEGGNTNNGWSGVSGLSLSKNGVKVKAGNGITVDSSGVSIDPKTVLPKGMIVMFSGSSAPTGWAFCDGNHGTPDLRSRFVMCSETISETGKSSNKASGSGNGKNYSRNTTSTTVSVSVTVKNTTLTESQIPYHYHIGGMGYWTNKGMKYGTEYYSEYASYIRNDLDSVMQSANGARYAYTSPSGGGQGHNHPATASSPSHDHSVNVIPPYYLLAFIMKLZ

SEQ ID NO: 2245 - protein, 984 aa, Photorhabdus luminescens
  misc_feature (872)..(872): Xaa can be any naturally occurring amino acid
FWFGQKIVPLIKEQTVNNQDALFPIVKDDIAFETLLTQAKTVIEQQSGQLWSNTEENDPGITLLEACCYGASDLAYRHSLPLRDLLTPEKQEQTLGDGIFPQEFGPQQMLTCGPITAEDYRRALLDLHSSDTDNETSEDYFFFNDVRLICEPESERYKYWYNKESREYSFIQEQEQEQEQEQLQLTLRGNYWLYLLPNRETEDDKTLTQKRLNDFLKDNRNLGESVSKIIWLQPVDFLLQLDIELDDDVSDLADIFAQVYMTTEQMVLTSPLRYSTQAMIEQGYSNEEIFEGPYLHHGWIPELSAAKDYTKPTELKLSHLANRLLAIPGVQNITRLALGKHDENISPLADDSWSWTIAQGYYPRLWGNDPLDLISSSASPLTITAKGGVKITVSKQDIENKIIAEPLIETQPELLNWGKHRKVLDYYPVSNKLPACYGLQTYAETQQQVHLHQFMLPFEQMLANGCAELALLPKLLAFKQRGNTVYGTQWPFKANTVGQQVHQEIMPDLIKQLNNDSQINSDDGIHSQNYTKELSILNYLLEYFGTHRAARPLTLDSLDFLSTQRGYLAQQPELTYQRNNIRIDKVSALQKRIAARLGLGGKCFEETSKLDELPFYLIEHRQLLPVKPDTKFDKEQKPDKLKIKSVPNSKNQQLIITQNGTTGQLLYGQVINLIIKEKENQDIRVKFILRGQMITDITGESFILDTRNSTALARSLIDVQNAYNDGNLYWCNSPVWMEDMDYQLVYASEIYQTGTENERWITSSPQSPFPAMIEENDEITLKYVITPSGPKKSDHELKANVIKFDRIQGKILIKLTQDSQDNFPLAADAWRYRWYFSSEKYALADRFSFVVSMVINSQLVKNDDVDPYQLEXWAKTEILAEFPAHLSMIIHWLSPEDFKDFVSTYQRWQNNGAPLGDEAYHVLETLTLGRLPSAATGIGNMRIATAQQRIGVVGESGKEWNTEVIISNQLVYVPYTGENLNKRZ

SEQ ID NO: 2246 - protein, 912 aa, Photorhabdus luminescens
ITGGINMGQAELDNKLSAIVPDTVFKLDERSTLDILNWLKAYAEKIPFDQDKNQFWDSFYFIQENTPEELEDIYQHANKADGLLPPHQAFVFAFLKLLETSNRLLNTFPARHRDLYYRELLGLSPRKAQADSVALGITLNTDNAEYLIPKGTLFDAGQDSVGNPLQYTSETDLLANQGELTDLRWYRKDKDSWQSTIPLSLSDNIALPENGIQLFSPTANDVAVLSGYLIKSSLFSMPEGERHITLTLENDWEGQAEHLTAKISTGDHWLSLSVNPNRTNKNTIELELSSTDDPISPPDNLDGMTFDIPVLKLGTTQKPMLPKITGIEININGNRSVRYASDGGIEQTDTTSSPFGQSPSLGSGFNLVAPEWYGTENATLTMTPQWVGLPTSSFSTWYDKYNPKPASNGVFKVQGYLVTSQKRDVLNDAKSQPLFDGTGAPQGQSLTFILPAMHYPLTDSPSPNEWPASVRIELAEQDFMHAQYWQNPTDKNVPYTPQISALQIQFSTTAKPEQFTVYPLTPFGWANTNEDPPSFTNDALYLGFTNVLPGQTLSLYWQLEGFKALNLSWFYLNQSNTWGSLDQLVDDQTHNLFDQGTWRTLLPQDASNQATLMPTGRYWLKAEITHQAESQDYPKIKGILYNAATATLINAELVETDHFINGLPADSITQPVNALVAIDSINQPWVSWNGRPEETEQAFLTRVSARLSHRNRVLSWDNIVTLLKEQFVSLFDVKYPSASELTKIPAQKEQQLIAIPDSRYKDNDDALRPILNPARLAEMVDWISQLSSPWTTLKINNPTYVDVLISYQLVFVTGINPDYGRHQLQQELSRKYMPWAEDSAIGVTTGNRIDYYPLLATIQQSPLVERVTNLTLKKSSQTAGAVGDSVEAADNEVLILVWSENSSTNKGADSEZ

SEQ ID NO: 2247 - protein, 243 aa, Photorhabdus luminescens
GNEMTNKILADIYGRGWAFPPQFFIGERIPYEDYSSDLNKYLSEKKIEAEQIVKIQACIKESVMCYDFHAKITSTQVSKQTNLPNPLNILVTYTLGDSEISQKIQGVLRVSQDDPPQFSIKDNSRTGIAIAEGTQNVLQSINILFLTEPGERIMREDYGCGLNDYLFANISDELMTDIQTHIEERVLRYEPRAEITSIQVNQRTNLPSTLHVQVTYALRGSDINQQIEGVLEVNEGRVQVSLZ

SEQ ID NO: 2248 - protein, 547 aa, Photorhabdus luminescens
LHPRANTASTGEGMKIPEITIKISGKTLNQFTAINLTVNHYINGIPSVNITLGIAGDANYIFDAKAQAELANCRPNNELIVQIQKTILFKGIIVRQALKFKGQDSLMTLTAKHPLQKLTDGLHSQLFSKQSDEAIIKKLFSQAGIQTTIKQAPQLKTVHEQMVQFRCNDWTFLKSRLIATNTWLLPGNEVVTLITPKALNQSTVHTIHQSTNDQDIVLFEANLQWDNQRSPKTVSVQSWDITQQKLSQTIQVKNSGLGSNKLAVDSITTLTNKDWQWVFNYPLDNEQAKYLAQGIMDNLRSDNVSGSFEVEGDSCYQPGDVLALNGFGQGMDGQGIITGVSQIINQRQGWRTRLTLGMPPDAEQAVPPVKELHVGIVEKYQPDSQSLGRIPVKIPALNLTNSVLFARLGKPYASHESGFCFYPEPGDEVIIGFFECDPRFPVILGSMHNPKNKAPVEPSEKNPMKTLVIKQGDHQQALVFNNQDKTVALNSGKNTLSLQQDKDITLNSANNLITNAQEIKIQAEKSLSASGKSGVDIKGAKINLTQZ

SEQ ID NO: 2249 - protein, 408 aa, Photorhabdus luminescens
GAVKHRVYSVVKEMIMEITQPSVTITENLIFPKQNDSFIGIPVFIGYTSSPVDKTAIKLHSLADFARSFPESGLMYYSVRHFFENGGQQAYVLSLGTEQQLSDFSSLITALQQAWLAQTIAAENDITLIITPDVIRFDQTEISDTQRDLWLQLWQSVLNLCKSRRGIMGLLDAPDDPTLAAKCLQQFSSADRQWGVVYWPLLKSAYQDNTQNPIVLSPTAAVAAVIQRNDNQQGVWTAPANIALSKVISPVRAYIEANALFNPDGTSLNLVRSFPGKGIRIWGCRTLENTHDSPWSYIQTRRLVSYIEAYMTQLGRAFVFEPNNAITWMKFKGQAHNWLRQLWLKGGLRGTQEDQAFEVLLGVDESMREADLRAGKMIIKIRLAVLIPAEFIELNLTFDTRTGTIPSZ

SEQ ID NO: 2250 - protein, 464 aa, Photorhabdus luminescens
MPTIPTYPGVYIEEDASLNLSVNQGNTAIPVFIGLFSPKNTNLKSQVTRVNSWLDFTNLFNAGCIAPITIKSTKRASMPAPTLLENVKGDTAVVATPGISVDADNKDPTYTYKVIVNYTTSSDALKLYFQNGGGPCYILPQLDRLTQGFLDSIPELIKQALEITLIVCPEWDSGYQSKIYNSLTSSLLNAGYFLIADNQDKNTALITEVASQTATYYPAVKVSQLIQAEDSQIAVSGYEDAKTKSDEVKNLAQLKEKNPTVYQQAVQAIQDEIAANGNIIPVSAVMAGIYCATDASRGVWKAPANVVLSGISDVAERLTDDEQGEMNSKGINAIRYFSHKGFVVWGARTLQNDDNWRYIPVRRLFNAAERDIKQAMQSVVFEPNSQPTWERVKSAIDNYLYSLWQQGALAGNKPQEAYFVQIGKDVTMSDDDIKQGKMIVKVGMAAVRPAEFIILQFSQQVAQZ

SEQ ID NO: 2251 - protein, 966 aa, Photorhabdus luminescens
MNNFDPKIYQHTPTITVHDNRGLDVREIHYHRATAEKNSDIRITRHQYDVLGHLHQSIDPRLYDAWQKDSSVKPNFLWQYDLTGSVLRTESADAGNTVTLHDIENRLVLTVTATGVKQTRQYEDNSLPGRLLSVTEQEPDERASHITERLIWAGNTPAEKEQNLAGQYVHHYDTAGATQLNHLSLTGAALSQSRQLLVDGQEADWFGDDKKIWDKKLSNDVYTTENKTDATGTLLTQTDAKGNIQHLAYNVAGQLKGSWLTVKGQKEQIIIKSLTYSAAGQKLREEHGNGIITEYTYEPETQRLMGITTRRSTDSKALQDLRYEYDPVGNIISLRNDAEATRFWRNQKMVPENIYTYDSLYQLISATGREMANIGQQNQNLPSTALPSDNNTYTNYTRTYAYDRGGNLTQIRHSSPASQNNYTTDITVSNRSNRAVLSTLTTDPTKVDALFQAGGHQETLLPGQNLNWNARGELQQMTPVKRDNLTDRDSDIEWYRYGNDGMRLLKVSEQQMQNILQQRRVVYLSGLELRTTQNGDITKEELQIITVGEAGRAQVRVLHWESGKPENINNNQVRYSYGNLIGSSQLELDSDGQIISQEEYYPFGGTALWAARNQTEASYKTIRYSGKERDATGLYYYGYRYYQPWVGRWLSADPAGTIDGLNLYRMVRNNPISYHDNNGLHPNSNNNGLERNHPLYYLDLAGVYYNVNDKEAILSTLKRSFAATSWGNKVSDKTQTILSASAEYGNLKHKKQMEYNNKKLNETSPDGKFKYAKTKLQDQAAHAGIAFNLHPISDNEKEGWTFNYKDEFVNLKDKEKSLGKGKLFPGVELLPDNPEHYKVQNVSEFISGIESAYKNNGVELHPFTSSLIKKHILKNEEVLPMMAGIAGLHAEVQAMNFRFIKGDLDSKVEIGSRSKRSYEIDMLDSYIFTERLTTKEKGKEFTACFNCTGILQWPTRVMTGTMRRQZ

SEQ ID NO: 2252 - protein, 379 aa, Photorhabdus luminescens
NRCSGNSTDSRSCNHSSSLIRRDFMTTITTYPGVYIEEDASLSLSVSSSATAVPVFAVAGDNPLISGKPYIRISNWLEYLTLKNEQFDPANTLDISLRAYFINGGGYCYLVQTTDLEKQVPKLDDVTLLVAAGENITTAVSTLCKPGKGLFAIFDGPTTELKSDGTSNSDYDPNPFAAVYYPWLTADWTTTIDIPPSAAIAGVYCSVDSTRGVWKAPANVPIQGGLQPKYPVTDDLQAQYNQGKALNMIRTFPKSGTLVWGARTLEDNDNWRYIPVRRLFNSAERDIKNAMSFAVFEPNSQPTWERVRSAVNNYLYSLWQQGGLAGNKPDDAYFVQIGKDITMTDDDIKQGKMIIKIGMAAVRPAEFIILQFTQNTAQZ

SEQ ID NO: 2253 - protein, 614 aa, Photorhabdus luminescens
SLCNVSDLRNFYYFIGKIMTLYKRIFIFFTILLTPIISCLADTKLDTLSIEDNKAISELLESIKTPNKPKVINLTIPSHEGGYRALLRYSGITEQKHPDVFKDIETIKAKQHALIKSGKSLEIHRSNKDPENFFGQPVIIPSKDYKSISATVFNSLYYPDPSLPSSFQDSLVVFALDKDKKSRQVIASGSSSIEGKEVRSHTTEAVSEEDILDGINNPNQSSVIAVATYQGKINGISLSDGPIIMKSNILYFDDVPKEMCNTSPNAPDYVKKKICNTDPGYKEYLQHMRPIIVCLNRSNPERGAPDACDYGPMTPEIPYSNTHINMEIIGSVEFDDYILIDENRKPKGTKRLPIGADLTLVGLDTGGGCKAREIDKNIFWEHVTVDESGKRLTWDFSKGSGYANFGSICWKNNERYVLDLQASILTTPDETDKQAYPIQFTYTNKGGSTPSDLQFIYPPINIQYGCIAEGTLIDMADGSKKKVEDIRSGDKVLTKQGGVLQVKSRIVGHDTEFVDLIYNNDEKVSLTPTHPVATLRGIVKADELKIGDTIYTRDGQTTLSSVKLRNTDPLNVYNFVLEKTDDKSELLLEDALLFAGGILVGDNNLQRKVSIANZ

SEQ ID NO: 2254 - protein, 205 aa, Photorhabdus luminescens
RVVTHLFFDFGVISMNKKVNVLRGAKRQLGFTLIEALVVMIVGIVILAAAAAGIGKLFRASEISTESSNITQMAANLKSIKNGAKGYDSLDNKIAINYKVVPTNMTQDGKSGIIFNSWNGKVTISPGDTTAQTFKIEYQNVPDEACQQLSLKLRVAGWSKMTVGGGGGKGQQSATEIKSDSTLAQIEAACNANDANTVTLVSASZ

SEQ ID NO: 2255 - protein, 265 aa, Photorhabdus luminescens
MMIGWLQSSTGCLVLASGLLGLCVGSFLNVVICRLPMMIFSEINNEVASFNLCFPRSHCPRCSHVLAARDIIPLLSYLHQKGLCRYCKGVISIRYPLVEGAVAVLFSLLALELGWSYSLLGFLVLSSMLVVLAVVDFEYLLLPDQLTLSLLWLGLLFNLPSAGFVALPLAVVGAVCGYLFFRLVEWIARRLTRRDALGMGDAKFLAALGAWLGLEALPVVILLAVEFTLVSYLAMRWLRRIKTPQIPFGPGLAVAGLIVALCHRZ

SEQ ID NO: 2256 - protein, 396 aa, Photorhabdus luminescens
EGLFMHDGKSVSVLMIRRRNAGFTLLEVTIALMVLASMMVVGVIYLNRQSDMLVNQVVAGQIQHLGDAVVDYVNNNYTALTHGPTSAPIHWAEMRPYLPPGLDQNTVNPLGQKYDGVLRVVVLPNGKKRIDPLIYTVPAIEGGKQPDVAEHAMKIVQLIGVGGLYLDYQDRDSNNPVTYWNSYGQVNVPKSFAGFFNQQPTEIGRIFYAPFVRDASTYGPGTLAGDLLHRQKIDGHPEWNKMETSINMSGNRLDQVDTLSMQGTGMVEGVNKVAFASRFQQKQSYIAQGNDGAMVVNPTHGTLFILDGNANPARKGTLAAGDVHADKNVVVGNNLVISTKTGSFAGGGCPALGSVSMSKQGELLICQHAGFGIPILQWKDAAGQRTEGRGRSMERZ

SEQ ID NO: 2257 - protein, 568 aa, Photorhabdus luminescens
VRCSTLTQWRIVLSASIFIRNSGLSMYRLRGNNMAIQFLTFYRWLLLPCVAAGLSGCAAIEKVDQQADTEMAQATEIIKGLRNSAAAMSVHVHEHGYWVSTKEIPSKKESETVSCRLTLEEAEPITLGEFADKIKRICGVPVVISADARLAVYPGSASGERGSERGVVVVNSGTPPVSGEGEPEVLKIHVNWHGSLVGLLDSVVSSSGLHWKVHNGAVHIFKTETRVFQIYALPGTDALSSSVTATTSATFGSGVSEGDSGNSGSTQTLATSLTRSVMDEIQKTVSAMLTPGEGKLTLSMATASLAVTDSPEVLDRIKDYIDQQNKLLTTQVVLNVKILNLTFDRADQYGVDWSLAYKSARIGLSNESGNSVIDDGGVSTNIHILKGPFSDSTLLIKALSAQGKVSIVTQPSVTTLNLQAVPMQVATQTGYVASISNTSTPQVGTSVGIEPATVTTGFNMLMLPYAMADKQILLQYNISLSDLKRLEKFGKEETGQVQLPTIDLRAFSQKVRLHSGETLVLSGFEQQSDTSDRSGLGSPDNQLLGGSRQGKRNHNVIVVMITPIVVDZ

SEQ ID NO: 2258 - protein, 432 aa, Photorhabdus luminescens
KMTEIGVEHVMQIKLYGKTLVAGIIWRPPVAVLARANMRRNGIAAGFTLAVRHRVGRGVQVGYAPKEAGEPGYYSLAAVLAKVVDKSNWIGAFRLSDACYALVAVHQGAIMAGRDLIGTREEIETKLRETVQLVEDANGVWHAIYAPKEFESLWPEMPLEQLLSKSILKKSVGQLESLTGEMSKYQIKLFAMTTGLTLLLGGGWWMWHTYKQNRVVEVPDLPREVVETLPPHPWLAQPQMARQFSIWKRVLARVPLSLAGWQVESISLDTDTVSVSYQRHEGMPINIFQVAAINIFRAGPVISNGGEQAQVLIPIEQQSEDQADNDDVLQSSDQALIELISYFQALDLPPPVLTESASVLPPPPPPRAEGETQVWANPDWQTYSWTLSSQLPPDALFSGKPFPGLRVTSAKVVLADGFPQWELNGVFYAKNZ

SEQ ID NO: 2259 - protein, 528 aa, Photorhabdus luminescens
LLSRRFPMEITSSDLLCMVRQGAKVLSALSGALEIELANRSLICLIELPLQKGQCVLAVSASHRLDPHVLAYEETVKRHGFIYQIVTCGMGSILELYRLNKSHNHSHGLGGTESDVQRYIIRLIGEATEERASDLHIVARHNYCEIRCRIDGYLRPVGQLRPEEGLRLCATIYQSMCDVAEPTFKPMQAQRARMKDEFLAECGLSGARINTRPLDRGMLMVLRLLYADSPGTVCTLSDLGYLPEQCQILEELMDHRAGVVLLSGATGSGKSTTLKVVMQKMITEQAGIHLLTLEDPPEYEIEGANQSPITGDRGDSVVIEQEWAMAIADAMRLDPDVIMVGEIRDAVTAKMTFRAAMTGHLIWTTIHANDALAILPRLQDEAVMASLLMDSRLVIGLVSQALIQVLCPHCKVPLQGHEQEVSERLLKRLNLYCQPESVCLQGEGCDYCKQCGTVGRTVVAEVVQTSPGLMQAYRTGHHHEATRYWIMEMGGISKIDALIRKINDGMIDPRAGERVMGPIVPVSYQIEZ

SEQ ID NO: 2260 - protein, 366 aa, Photorhabdus luminescens
MSMTDFVARLNYRMAKIQFSKKVRVRFYEHLIMMLENRVMLIDALREMYNIASDEGHKPNGGYALVLSSCYESVSQGSTLSESLLQWIGPNEVAVIAAGERSGDIRSAFMDAIAMIEAGSKIRSAVIGASIYPAVLIGMICVLLHIVAGSLVPKLAAVSKPETWDGAAYTLYLMGTFVNDYGLYSLIFLVILFILVALSLPFLGGRLRTGLDRFPPWSLYRTIHGSMFILNVSLLIRSGMMLQSALELLLEQAGSRWLYVRIAATLEHISMGAGFGEALRDTGYRFPDNEAISYLRLLSRLQGFDQSMAKFARHWLDETIIKVQIVTRGFLFASILMIGGMLMLVVTAVSGIENAIEQSLSLPSVZ

SEQ ID NO: 2261 - protein, 452 aa, Photorhabdus luminescens
FFQNHIVLLMEKKEMNVGIIGSGIGGACLAHGLRKNGIKVKVYERGSATSSILPGYGIYVDTFGQQAMQECLPETNWLSFKKISKPVGGQTRFYDEHLHLLLAAQRDIYQENGEIITEDRMSISRSELLEVLNEGLSDTVQWNKTFERYEHMPSGKIRLFFTDKSHEDVDVLIGADGSNSKVRKQYLPAIKRLDIGVTLTVGRVRLTQALADSLPPYLLDGSPNNIVPKSPGGLFVSLWRAPINTQVKATSTEIGDFVMWAYAAATNSYPNTITDFPAKSLCDLICSRIASWDPNLHTLIKQSDMENLSVIPLRSMDHLLPWRSSAVTLLGDAIHNMTPMVGMGANIALRDALLLTQTLTRVASGHEDLIKAISDYEQQMRTYANEAVEISLRTALNAADRSMIKRILFRTVLRVAQTLPPIKRVLFPITKSAQHQGKIKLGTTHSFSSTQZ

SEQ ID NO: 2262 - protein, 382 aa, Photorhabdus luminescens
EFITQRDEIYIGASVMNVLINEYKKKMDSVRLGDPERKGFFYDAKQAIWHCYSYDICSYFLNSDYVTKKKLSIPLEIFSASDQSRVARFILYLNNSLIFNDDKYNTDAVSFIRGKFNEMNFEVIANDLLSPLKQCDLLTAKHLRGVNNLLAASLVGLKASAFFSAHALNVGMFFDGSMSGRAHFVSIAESFIAIYQQVLRQITINGGAEDVIHIEKFVADLSVTFIAAHETTMQLIIATFLYIKSHVITVTENNIKSIVTETYRLSSPVLAVNRVFKERLIYKNSCFNKGDRVLFYTGLANFDATVFDHPYQFQLDREGCPLSFGVGVKKCIGMNIAIHFTCQLITKILSCYQLDDVEIHEVTVGSLAIGCSKFTLKISKKZ

SEQ ID NO: 2263 - protein, 231 aa, Photorhabdus luminescens
KFRFFYMTNTPKAQTDHKRTRSYSRISGERVNELLKIAAQVFAERGFDGASISEMAKRANASKGTYYSRFPSKEELLVAVVRQRIEEVEGGLDKTMNPEPDIGKALTIFAEEVFSVILSETMIANYRVVTLEAQRFPQLGKIYYEKGVKKIVDFLVEYLVRKMEEGKLSIVDPKISAEVFIDGIIGTPRLKATLGIGLPTPEEKSQRIAIAVQSFLAAYGTSSCDSTSSSZ

SEQ ID NO: 2264 - protein, 549 aa, Photorhabdus luminescens; identical to SEQ ID NO: 1121

SEQ ID NO: 2265 - protein, 462 aa, Photorhabdus luminescens
RFEQQLSELALAGFQPQFGQWLIELNDAQLSQMGRDLILSDAMLGYLQFVSDVGHQGQRWLYRTVPYKIVLPSPVVIDQWQQAIIDHNVAAYVAALAPQHPQYENMRKEMMKQLADSKPWPQLSGKSALKPGQNNADVAVLKEILIRLGMLNELTAQSDHIYNPELVTAVKNFQHWQGLAPDGVIGKRTRDWLNTSPQTRAGLMALNIQRLRIIPGDVSTGIMVNIPDYSLHYYLNDQEVLDSKVIVGRPSRKTPIMSSVLNNVVINPPWSVPTSLARKDIAPRAVDDPGYFQRRGYVIFSNWRADASVIDPYTIDWNVITPANFPYRIWQAPGPTNSLGRYKFNMPNSDAIYLHDTPNHNLFNKDIRAISSGCVRVNKASELASMLLEDVGWHQSKVNNTLKQGNTVYVNIPQRIPVYLHYLTAWVDEQGVPQYRTDIYDYDNSVRQGAQFLSKLLPLQNZ

SEQ ID NO: 2266 - protein, 183 aa, Photorhabdus luminescens
MDIIDHNRRKWLSAGAAALGLSLLPGHTFATLATPRPRILRFDNLHTGETIKAEFFDGYRYNKEELARLDHLFRDYRQNSVKTIDPKLFDQIYLLQMMIEINKPVQLISGYRSLVTNNQLRKQSKGVAKQSYHTRGRAMDFHIEGIELSRICKAALKMKAGGVGYYPHSNFVHIDTGPVRTWZ

SEQ ID NO: 2267 - protein, 216 aa, Photorhabdus luminescens
MKYQIIPVTAFMQNCTLIWNEDSKEAAIVDPGGEAEKLIAEIERRGLKLTQILLTHGHFDHVGATAEVAKHFNAPVYGPQQEDAFWIEGLQAQSRMFGIEECPSFEPDRWLNEGDELRVGGVDLSVLHCPGHTPGHVVFVNHVDKLIYMGDVLFKGGVGRSDFPRGNHRQLINSIKDKLLPLGDDYEFIPGHGPMSTLGHERQTNPFLQDEVPSWZ

SEQ ID NO: 2268 - protein, 397 aa, Photorhabdus luminescens
MFEKITAAPADPILGLADSFRSDPRTNKINLGIGVYKDETGKTPVLTSVKKAEQYLLENETTKNYLPISGLAEFGRVTQELLFGKDHPVVTDKRARTAQSPGGTGALRIAADFIAKQTNAKRVWISNPTWPNHKNVFSAAGLEVCEYKYYDAEKHALNFEDMLASLSEAQAGDVVLFHGCCHNPTGIDPTPAQWAKLAEMSAEKGWLPIFDFAYQGFAKGLNEDAEGLRIFAKNHNELIVASSYSKNFGLYNERVGACTIVASDSDTAEKAFSQAKAIIRANYSNPPAHGASIVTTILSNEDLKAAWEQELTTMRERIQRMRQLFVNTLQEKGAKQDFSFIISQNGMFSFSGLTKEQVERLRDEFGIYAVSSGRINVAGLTLENMAPLCEAIVAVLZ

SEQ ID NO: 2269 - protein, 228 aa, Photorhabdus luminescens
ANAAEVYYKDGNKLDLYGKVEVQHKFANNKSGEDGDNSFARLGFKGETQVNDQLTGFGRWEYNIKGNRAEGTDEETKTRLAFAGLKLSNYGSLNYGRNYGVVYDVNAWTDVLPVFGGDSMAQTDNFMTGRSTGLLTYRNTDFFGLVDGLNFALQYQGENSENTANSRINRKDNGDGYGFSATYDVGYGISVRGAYSNSARTSAQKTAFSVVEEKRKKRQPYGLYGLGZ

SEQ ID NO: 2270 - protein, 268 aa, Photorhabdus luminescens
ILAFPIIKAAVWSLPTLVSTLAPPIRAAKVLPSPTWVKRLALPIIAAKVIPLPTFVAILPSACISATLVPSPICVNTLPAATINASASPSPTLVKTFTAPPISAQTSPLPTWVNRLPVPVKAAIDVPSPTLVKILPAAAITPSVKPSPTWVNTLPMPNIMPVESPLPTLVKIFALPSITPVVLPSPICVRTFAPPPMTARAWPFPFLVRILAPPNAIAVVFDVSVPSLRWLIILAPPSIPATRLPAPSLVSALAPPNSTEEMLPFPAZ

SEQ ID NO: 2271 - protein, 2854 aa, Photorhabdus luminescens
MKSTVEPNTYLFAFTDKMYTKISKVRLQNNPITGKLGYYATSWYKAGNHLENLAAKEISSGNGFIAINVDGAYHLSGLIFERLQPVTIHAIEENLLSDQWVTYAGGVMVKAEDISLGDAKMEGYVVFSDQGKVDVSAVKSNRKPNTYVYAKVIGSYIEVVEVQLANDPETKHLKYIATAWSKAGDHTGDLANEEFSYANGYTSVCPGYTLSQLQYDINTVRRTAHRLVHSKEYHHQDLVKLSASSNDINFNGAGGGNVITSDVTRGDINFTGAGAANVILHGSKFGDTHFNGAGAANVIVKKGKKGDLIFRGAGLANVLVHQGKSGKMDVYAGGAVNVLVRIGDGQYLAHLLAYGNISIHKGNGSSRVRMLGGYNTHTQIGNGDGNWSGKGGFNVITQAGKGSISSVLLGGANALTKLGAGSLVAGMLGGANIISHLSEGTETSNTTAIALGGANILTKKGKGHARAVMGGGANVLTHIGDGNTTGVMLGSANILTKVGSGDSTGIMFGIGNVLTHVGDGLTLGVMAAAGNIFTKVGEGTSIAALTGTGNLFTHVGKGDVWALMGGAVNVFTKVGDGDALALMVAAGNVFTHIGDGTSVALMQAEGNIATKVGNGMTLAAMIGKANLFTHVGEGNTFAALIGGANVLTKVGNDQTAALMIGKANIYSHVGNGPSIGLFAGELNVMTKVGEGTTLAAMFGRANIMTHVGEGLTGVLALGEANIVTKVGNDFMGVVATVKANVITHVGNAATASILFGKGNILTKVGDGTTVGLLISKVGNVMTHVGEGTTVGFAKGKANIITQIGNGTGVNAAWGEANILTQVGNGDHYAFTKGQANFVTKVGMGREVTVVQGDANIITHVGNGDDYTGAWGKANVVTKVGDGRNVVLAKGKANIITQVGQGDSFNALWSEGNIVTKVGDGVQVTAAKGTANVTTTIGNGLNVTAAQGDANINTHVGKGISVNVAWGKYNVNTKVGNGLNVAVMKGQSNANIQVGQGLAVNASYARNNVAIKIGEGDFYSLAVAASNTESNKLAAFFNNIKQTALGVMGSQAINYLVKGEETNTSGTHKGRGAIHLAEVSAIEGFHIDEIAPVSSNLSNRLLGSVTAAETPDLENIHHSLNINESDDSEQEINLIINGDFEQGELGWLATHGIEAYHPASIYVLETEGYGERVSELDVERNTTIYQDLQNLSEGEVISLSFDFANSLHAALTDSGMEVLWNGKLVFSAFDGAAKWQNKTLELTAKTGSNRIEFKGTGEDDGTGYILDNIVAKSKSSRLTKAVIEHAKQGKAAQNALNDKEKAEKDRQLLEQEKEKQLAAMAKSQSRLESTNQAALNQNGQVQRAAIKEEAQAVTEELTLLADKFKALKDKTDGSRELENHYLDYASGIAEDIQKRLDDIKPTLEKRLVDIHRDAIDIQQKVKDTVVLSAAGTEKGKQNRDKAILDGVEAQLKAEQRKKEALLQQQQAEKAKDNANIAYQNAENRGQRDIAAAESKVAQTQADAKGAKLSNAKPVRSGASGSGLSEEKAYESTGAGETGSHIDPESMPEAGNRYYQGLTEDEWQALASAKQAVSRLQINAGIRAKNAGASVISLFSGTSYTRVVEPISNQPRKLIAKAPVMSGINLQGLGQITGGDSLKSHFSILREFEPFLLSQDDKRFIDSTKRYFGQINTDRPSKALEGVREAFNNAVEQPDEQHVLQLEQALAHWQQHDPHEFAKRGRLVKSLRFEMGELVAYLQAKRAESVGVLGISLAPDHVAQFDQQVSFDGFGRVAGLKGDIAQSDINRLTDLQIKPLTQTNSVAEREAPKTESDSLIVFVSRLQQEAIPEGMPLVERAKNLWFSGQVTQQETIKLFEDAATQLQTYPELHTLAQQLLADARKEKATGQYIDNLFGRHFDSELADELVKTAPQDAMTTARQTGQFLVEQFEQWVEGRYPDVTEREKIVAETMESFVKVINRDCRPWFSRVPELMTFLDEPTFANFKTMMTQVDDGFAVIKVPFLAVRMAGTKEMGMDRAAWKVEGDRFYYDVISEARSLGTKLTVGANVTYEVEVTGKMKTNDYGTALPHQPANGKYDDFLYGRNIAVARILTPGRETTFERNGLAHGHAVLTGASGSTNVMVHLNKYIARKQPTFSAEQGYLNTLAFLVFDGGHSVNESLVVYQALQATTDGQRKQILNSYTVNYRDLVDIVGEKGKVWVSQALDNAFKDTEALYRKHVWVKPQHRPAVEALDGLSGKEEALKPAIIDDTHHQGEKISKPLDDWQMVAVTPQIDGRETRFDGQIIIQMEDDPVAAKAAANLAGKHPDSSVVVQLDSEGKYRVVYGDLARLSGQLRWQVVGHGRDASEQNNMRLSGYTADELATRLTQFYQDANLAKSITHKPDHISLVGCSLINDDKRDGFARHFITALKAQGIHTTVSARRSDVDVDVTGRKFTRDERHQWIHKLADNKVVLSWNEKGELETRSERVRHHIAESDIHLSRVGMADAEMPARGAVVDNTDIFTVPERRKNSIETDSSDISNNRLSYSGNIQVGVGNGEFTALNWGTSNVGVKVGMGGFKSLAFGDNNVMVHIGNGDSKHRVDIAGYQALEGVQMFIGNRNISFNQGRSNDLIVMMDKSLPTPPLVNPFDGTARISGVLQGIAHFGEKQEWLAAQDQQWTLAGAKKFVLDLSGLDQTSSVDYKTLVDLDSQHARSSRGLKQDIEVTLNKKFNQWLTRNVSDMGTMSRANKFRQVNEKLAFNFAVGGRGADIQVTTGNWNLMFGDNIQSILDTQPGFVVWPDDAAIFGTGMAKTTFTYHPQDLPRQLKNKLLGRLAGVNAETTLADIFGVNYTPEGQMVSRTGDPVDSKTPCAVLSSIZ

SEQ ID NO: 2272 - protein, 350 aa, Photorhabdus luminescens
VVIGVCKLDVKHSEFFDIKWMSRRNRIAAGVARGRGDTLLYDLKGFLMGKASNRSAVYLFTGRYYDDNGGNRITAVGAGGEVYAYGGNDDVTVGSFKVDVYHTDGDLTVKGVSGYTGIHKTGNGGLSFTGAAGVAAIDHTGETGNLNYSGAAGYNKLVRKGLSGDTRFRGAGGYNQLWHETNRGNLDFAGAGAGNDINRTWFNRYQDSQGNVIFNGAGVANSINSRVERGNVTFNGAGADNHIVRKGKEGNIILRGAGASNRIERVYQNKDEYEQTRGDITFEGVGGYNQLYSDVAHGNINFSGAGAYNVITRIDANSDFDGETLEFAKAEEIVLTTATMGGRGIEESQZ

SEQ ID NO: 2273 - protein, 258 aa, Photorhabdus luminescens
LVTQYYLFSKTLSYLIFIKMRSSEMSRTERLIVLLQYLRQRRYPVSGKLLASDLNVSLRTLYRDIALLNSQGANIEGEPGLGYILRPGFMLPPLMFTMDEIDALVLGNKWVIEQNDVVLAKSAHSFISKIAAVLPEEQRDQLYYSPMFVKTEGYSKVTNNNLMLSDIRRAIYHKSKIVITFIDLNNTHIVKTTCPLSIFFNNEFFLVSWCEFSHNFLKLQVGKIEKLEVLSEKYIQDRILLLKKWSEKEGLSDNNLSZ

SEQ ID NO: 2274 - protein, 702 aa, Photorhabdus luminescens
MNEIEKLTIASLRLILMIYNRKENITDIDNLKKSNCYYSYISNIEEKFNLSISSKNSVSKKHHNILLPAILFDNNGLPFVLAKSNKESSLIQRVDKENPEIWSEERLIKEWNGKWIKIKQKQAKFNIRWFIPEFLAQKKNLCEILLFSFVLQILALISPLVIQVVMDKVLIHQALSTLDVLVFGLIIAGIIEVILRGLREYQYAHTANRIDIKLGLKLVRHLFGLPLLFFKSRQVGAIVTRVRELDTVREFLTGSMFTLSVDVLFMFIFIYVMSLLSGLLTWVFLATFPFYAILAWWVTPRMEKAVEQQFTHAAINTSFLTETVSGAETLKSLAVEPKFVRRWDSQTEKMVDTSFAVQQLGNRSNHIVMLLQKVTGAAILWLGASEVLSLQMTLGQLIAFNMMVNHTSQPLARLVELWGQFIRTRVAVDKLGDMLNLPTEQQSGQQQVALHGAVSFNNIVFRYQPDIPPTIKGLTLDIRAGEAIGIVGTSGSGKSTLARLLLRLYSPETGAITIDGIPLQNIGIETLRQQVGVVLQENFLFNKTVYENIAQSKPDASLESVIKVAKLAGAHEFILRLPMGYDTTIAEGGQSLSGGQRQRLAIARTLLADPKILILDEATSALDDESQSRIQSNMAEIAQGRTVITIAHRLSTVRHCDRIIVLKQGEILEQGSHEQLLNHGRQYRKLWQLQQELKQEMPCHDZ

SEQ ID NO: 2275 - protein, 458 aa, Photorhabdus luminescens
NRRCLVMIKAFKNKIKTWLRPCPQHYDFLPTHLALSQRPPSPFARYTAITLSIGIIMALLWAYLGKLDVQATATGRLIVSGRSQIIQAYEQSRVTAIHVQNGQRVEKDAPLLTLNTLGVNQDITRLLKQIEYQAHEKIRYQALTEEQEPTKQELFQALPVSQQTQVADNYSREKREYEAVVTNLKAEMNVNLSSQQSRKSDINALTKLRQNISQRLKARQTLSQKQVISKVEYLEQEKEFLETERLIAQQNAEFHVLQSQYISLEERLNSLKTQKEREWFDKRKQAEVQLVVLEQELAKAQVREQLEVIRSPVTGTVQQLSVHTLGAVLQPAQNLMVIVPDDNVQLAEVQILNKDAGFVYSGQQVTIKVDAFPYTRYGTIDGELLSISRDSTTDEQLGLVFPAQVSLKRNSIAIDDTQVEITPGMSIVAEIKTDQRRVIDYLLSPIREYQSEALREKZ

SEQ ID NO: 2276 - protein, 724 aa, Photorhabdus luminescens
SIEGEIIVNLLPSSATDSSNYTHNQALNCIVYVGKQFHKSATVDQLQHSLGFDSLYLSELQLREAANAIGLHSKIERLTVNTGPTLPLPALIELEQRWWVLIEVENDNITILDPVTEQTQSLSLSTSTGNKENVYKILLIADQELTKKHVKFGLSWFYPSIFRQKSQIRDLFLFAMVLQLFALASPILFENIIDKVLVGRSLSSLHVLGMAMLAIALAEPLYSFMRNTVFGHMASQINSELSGRLYRHLAGLPLQYFKQRQTGQIIARVREMSQIRQFLTGSTLMLLLDLIFVIMFIGIMFYYAWILTWIVIGSLFVYFIFWVVAGPVIRRKVEAEYETDANATSFLTEAVTGIETIKTTATENRFLHQWQRILSQQLTKSFAAQKSGLIAGQGIDFVQKFTSAILLWWGVTEVLRGELTPGQLIAFNMLAGHVTQPILRLAQVWQDFQHTLIALKRVGDILDEPMENSKQGLASVPELEGQIEFKNIRFRYHDDTPEVLANLSLLIKSGQFIGITGPSGSGKSTLTRLLQRLYVPQHGQVLIDGMDLAIADPVSLRRNMSVVLQESILFSGSITDNIRLCKPNATDAEVYRAAELAGAIEFIQSLPHGFAHPVGEKGVNLSGGQRQRIALARALLVNPTILILDEATSALDYESEAAIMANMDEICRNRTVISIAHRLNTIRHADKICVLDQGQIIEFGSHDQLLQQGGLYAHLWHQQIGENZ

SEQ ID NO: 2277 - protein, 330 aa, Photorhabdus luminescens
FLSWRILMDRNPVSLSVLVFSGGSLTSITGPIEILTTAARLAGAPEPEINIVTQDNQDAVGMGGVRLKPNKLIGEIKQTDIVLVGSIGAPYCDFDLCTQETLDWLQMMEEKNVLIVSVCTGSFVLAKANLLNNRKATTHWLFTKLFKDMFPQVQLHSEIKVTSDNNIFCTSGTYEYNDVMMHIIEQIYGQNTRETCSQLIFGNMEGLPSHTLASFVPYRQHSDTLIHKLQDWMHSAPSDRLSVGNLADKIHLCERQMKRRFKTATGQTPIQYIQQIRLSLAKCRLEKSNKTIEEISHEVGYEDTRYFRELFKKLNGLTPIEYRRKYQHRZ

SEQ ID NO: 2278 - protein, 892 aa, Photorhabdus luminescens
MKKFKLHTLAALTATVGLMGSAYASQTAQQVVDALSQLKVNYKVVDNQAGDHGVNCAVLGADWAKCNRVDITLTNGNQAIDSIDWAIYFHSIRQVLSVDNEQFKITRITGDLHRLEPTEKFTGIKANEQVKLPFIGEYWQIYSTDFLPRWYATSGDAKPKVLVSTDTEDLSQFLSAFTDDQWKRTQTDNNILMTPENRYMKNLQVKKVGSEKLRGQIIPTPKEVQIFPEDADLSGGVRLELGGLNDEAVILVRKRFTDQGIKLEDSGYSVATQIISSEFPGDWQVKGAYRLNVTQNGAQIVAFDQSGVFYGLQSLLSLIPVDGDRKIATLTAKDAPRFEYRGALLDVGRNFHSKQAVLRLLDQMASYKLNKLHIHLSDDEGWRLEIPGLPELTEVGSQRCHDLSETQCLLPQLGSGPDNNNMGSGYFSRQDYIDILKYAKARYIDVIPEIDMPAHARAAVVSMEARYKKLIAQGNVKGASEYRLLDPTDTTRATSVQLYDRRSYLNPCMDSSKRFVEKVIGEIAAMHKVAGSPLETWHFGGDEAKNIRLGDGFQDKNGPIVPGKGIIDKSAEDKPWAKSQICQKLIEQGVVKDIDHLASDFAIEVSKIVNANGIERMQAWQDGLKHASSAKDFATKRVGVNFWDTLYDGGFDSVNDWANKGYDVVISSPDYIYLDMPYEVHPQERGYYWAARFNDEAKIFSFAPNNIPQNAETSVDRDGNAFSAKSDKPWPGAYGLSGQGWSETVRTDEQMEYMIYPRLLPLAERAWHRAGWELDYIPGQVYKRGETYKVDIDALNRDWTRFANLIGQRELSKLDKAGIAYRLPVPGAKVKRGILRANVALPGLVIQYSTDGGHNWEVYNNHKRPRVRGDVLIRSVSPDGKRYSRIDNVKAZ

SEQ ID NO: 2279 - protein, 556 aa, Photorhabdus luminescens
LTSENISVSPVAIVGGGPVGLMLALFLDLYGVRSVIFNLEEETRWQPKGSTHSARIMEHFRRVGISQPIRSLGVPKEFPLDVSYFTKFNGWELARITLPSEMEKMSMRENAASTDPVPEPIIRANQMYVERFLLQHAKSRPNITIRYGWRVKDFVQYKDEVKLYAEHIDGKYADEVWQAAYMVGCDGGQSFVRSKLGIVYEGTVEAKAGFLTGGMVSSYIRVPGIHQGLLRDKKSWIYNIISPRENMLFICLDGKDDFLFVTQSKDGKVIDDLEVVRIAQAGIGSDAEVLVLGNTIWKGGVALVADKYSEGRVYLAGDSIHLFAPTGGFGMHTGIDDASNLAWKIVASINGWAGNALMDSYESERRPIAWRNTAAARSYTRQTASLYVPANLEDADYAGDLAREKINIELSHFLCQFTSIGVELGARYDSSSHIINSDPVPDDDWLNYKPSSVPGGRLPHLWLTPISGTKVSLFDILGSGFSLLRVGSHFPDISELLAQAYQRKIPVKIIDLPGHDAWQLYQTRLLLVRPDQYIAWRGDRVPDNISSILDKIVGRZ

SEQ ID NO: 2280 - protein, 486 aa, Photorhabdus luminescens
ARKLMPEEERIQYWPMTGQSLYYLGETSLQHKILAIAEEEGVRQAAYALKLLQSDGELKIASTGKNEQSGELVTREYKVQGPVMLMLTTTAIDVDEELLNRCLVLTVNESREQTQAIHAMQRHRQTLAGLLADSEKGYLTQLHQNAQRLLRPLKVVNPYAHQLTFLSDKTRMRRDHMKYLTLIQAIALLHQYQREVKKTTHRGQVIEYIEVTQDDIALANRLAHEVLGRTLDEMPPQTRKLLLLIQEMVNEQAQIQHCQPNEVRFTRRDIRAFTHWSDSQLKNHCQRLTEMEYLLLHGGSRGHLLHYELLWDGEDNGAAHLCGLLDVGEADSETAGSERKSDPEGRKSSPSPGQVWPESGEEKPASARTEQGPAGAQVRADENAVIKENNHRGALPVPDRDKTPAAVPTGHESKSDLNEHPSASSLGQVRAKSGVKKSPSGQAEHGFSVPQVGVTEDTVIKGKKKTRPLSAPAPQSQPEVNHGKPZ

SEQ ID NO: 2281 - protein, 392 aa, Photorhabdus luminescens
KEKRKRAPCLRPPLNLNRRSIMANRKPRKGSLLTVNDVYRQPVGPAHDPKSLYALLLRFVVWRQERNWSESTLKVQTHHTYHFILWATERGLYYAADITRPILERYQRYLYQYRKTNGEPLSTRTQRTQLEPLKVWFKWLTKQNLILANPAADIELPRLEKHLPRYILTIDETEQILAQPDLTTLQGIRDRALMELLWSTGMRRGELTRLDVYSVDGKRKTVTIRQGKGNKDRVLPLGERALSWLQRYQQQVRPQLIVNPDVKALFVAMDGLDGLQANGISNLVTAYINAVGIEKKGACHLFRHAMATQMLENGADLRWIQAMLGHASVESTQVYTQVSIRALQAVHASTHPAEQMADEKVRDADEVGLLADLYADDNADADTPPDSPELTZ

SEQ ID NO: 2282 - protein, 195 aa, Photorhabdus luminescens
MKSASIPIYLQQAIMNTLRQKLQQANLYLNRDFPEPTINYRQRGTTAGSAYIKNWEIRLNPVLLIENQQAFIDEVVPHELAHLLVYRYFGKVPPHGKQWRWMMEEVLNVPANRTHKFKIDSVRSQTFTYYCNCQQHELTLRRHNKILRGESHYICQKCGEKLIAKSIDSLNPNLYPMDFKMHRGGKGVNPREHRZ

SEQ ID NO: 2283 - protein, 391 aa, Photorhabdus luminescens
MTTYLFTSESVSEGHPDKIADQISDAVLDAILEQDPKARVACETYVKTGMVMVGGEITTSAWVDIEEITRQTVREIGYVNSEMGFDANSCAVLSAIGKQSPDINQGVDREDPLQQGAGDQGLMFGYATNETDVLMPAPITYAHRLVQRQAEVRKNGVLPWLRPDAKSQVTFQYNNDKIVGVDAVVLSTQHAENISQKDLQEAVMEEIIKPVLPAEWLNPTTKYFINPTGRFVIGGPMGDCGLTGRKIIVDTYGGMARHGGGAFSGKDPSKVDRSAAYAARYVAKNIVAAGLADRCEIQVSYAIGVAEPTSIMVETFGTEKVSTATLTLLVREFFDLRPHGLIQMLDLLHPIYRDTAAYGHFGRPQFPWEATDKAEALRDAAGLKLSAMNMZ

SEQ ID NO: 2284 - protein, 396 aa, Photorhabdus luminescens
TLVFSNLKENKMNNKNKPNRISPELLATCGYFMPRIFFLNSQYAPQVHWGDVVAALSHFPAGNLDLSSEEFWYEWMINWSKVGDSYINIANSAKSEVSHVRALRSAAACYHWAEFMYFSDRSRKIQLREYIRSCFLSSIKYSDLLVDHQYIVVDKFHMPFFLIFPKGYKEEENHPLPCVILSNGLDSMTEIEILSLAEFFLGKNMAVAIFDGPGQGINLGKSPIAIDMELYVSSIVKLLEDDARINSNLLCFLGISFGGYFALRVAQRIGDKFCCIVNLSGGPEIAEFDKLPRRLKEDFQFAFMQDNSHMQSIFDEIKLDISLPCKTKVFTVHGELDDIFQIDKVKKLDQLWGDNHQLLCYESEAHVCLNKINEYMIQVSDWVSEQFWLNGYKKGZ

SEQ ID NO: 2285 - protein, 635 aa, Photorhabdus luminescens
MNDNIARKMQQTYNIAYWGGSYYYVNDLGNVSVCPNPDLPGAKIDLAELVKRVQQEQKHLRLPALFCFPQILQHRLRSINAAFKRARESYGYKGDYFLVYPIKVNQQRRVIESLASSGEPLGLEAGSKAELMAVLAHAGMTRTVIVCNGYKDREYIRLALIGEKLGHKVYLVIEKMSEIAQVLEEAERLNVIPRLGVRARLASQGSGKWQASGGEKSKFGLAATQVLQLVETLRAVDRLDSLQLLHFHLGSQLANIRDIATGVRESARFYVELHKLGVNIQCFDVGGGLGVDYEGTRSQSDCSVNYGLNEYANNVIWGIGDACDEHGLPHPTVITESGRALTAHHTVLVSNVIGVERNEFTQTTPPAEDASRPLTSLWETWQEMHSEGNRRSLRESLHDGQLDLHDVHTQYAHGMLDLTERAWAEELYLNICRRIQQDLDPSNRAHRPIIDELQERMADKFYVNFSLFQSLPDAWGIDQLFPVLPIEGLDKPLDRRAVLLDITCDSDGIVDHYVDGDGVAATMPMPAYDPDCPPMIGFFMVGAYQEILGNMHNLFGDTAAIDVYVFDNGEVTYNQSEEGDSVADMLQYVKLDPNVLMARFRDQVKGADLDTGLQEQFLLEFESGLYGYTYLEDEZ

SEQ ID NO: 2286 - protein, 308 aa, Photorhabdus luminescens
MTISTLGNQQDDSLVSNAFGFLRFPLNFQPYSSDAEWVITGVPFDMATSGRAGSRHGPAAIRQVSTNLAWESRRWPWDFKLHNCLKVVDCGDVVFNFGDAQDMSDKLQAHAEKVLASGKRMLSFGGDHFITLPLLRAHAKHFGKMALVHFDAHADTYPNGSQFDHGTMFYHAPNEGLIDPHHSVQIGIRTEHGRDNGFTVLDADQVNDRSVDDLLAQIKETVGDMPVYLTFDIDCLDPAFAPGTGTPVIGGLTTDRALKLLRGLQPLNIVGMDVVEVAPAYDQSEITALAGATIALEMLYLQASKKRZ

SEQ ID NO: 2287 - protein, 238 aa, Photorhabdus luminescens
MLEWIVDPHAWMALATLTILEIVLGIDNIIFLSLVVAKLPNHQQNKARKIGLMGAMLMRLALLASIAWVIRLTSPILTVFEHDISARDLILFFGGLFLIWKASKEIHEAIEGDNEGELKRPVHSFLGAIIQIMLLDIIFSLDSVITAVGLSDHLFIMMAAVIIAVGVMMLAARPIGEFVDRHPSVKMLALSFLILVGFTLILESVQVHIPKGYIYFAMFFSMAVETLNLMRGKKKRNZ

SEQ ID NO: 2288 - protein, 229 aa, Photorhabdus luminescens
MNTLFSPPSPPDNEQQLFECAQLLAGLSMGELAAKANLPIPPNLKRDKGWVGMLLEYYLGASAGSKPEQDFEHIGIELKTIPVDRRGYPLETTFVCVAPLTGNSGITWGSCHVRRKLSRVLWIPVEGEREIPLAKRRVGSPLLWSPNQEEEELLRRDWEELMDFIVLGKVESVTARHGEVLQLRPKAANSKALTEAIGVHGQPIMTLPRGFYLRKNFTAPLLARHFLIZ

SEQ ID NO: 2289 - protein, 554 aa, Photorhabdus luminescens
MPSSRLQQQFIRLWQHHQGKEAETTLQELANVLHCSKRHIRSLLNNMQKAGWLQWQAESGRGKRSQLNFLRDGWELQQQRAEELLEQHNVEKLVQLVGDKDTVRHMVLSQIERRFRQGKNLLRILYYRPFPNLLPGSPLRRSEIHLVRQIFNSLTRINEENGEPEADLAHHWQQLSSNHWRFYLRPAIHFHHGRELQMADVIASLQRLRNLPLFSHIEKVTTPTPYVIDIFLSEPDLWLSLLIGSPHAMILPQEWQKLPNFSRMPVGTGPYQVIKNSAQKLQIRAFDNYFGFRALIDQVNIWFLPELAEKLVCTTLHLESDSTDNNSLDSRIEEGCYFLLHDHRSTKCKREDVRQWLCSLLTPINLLAHCDPFYQRHWSPAYGLLLRWHHSKLISELNKPEDITHLTVTLCHQHHEYHTISQILQAILTKCGVELKINIVDYDTWFNGNTESDFWLATANFYNPLEFSLFATLYEMPLLKKCLGNDLSKEVSQWRRQELSLEEWCEKIVDEHWLHPLFHHWLELQGQRSMRGVKMNTFGWFDFKSAWFNPYEGZ

SEQ ID NO: 2290 - protein, 202 aa, Photorhabdus luminescens
MMEKFIQHTGLVAPLDAANVDTDAIIPKQFLQKVTRTGFGQHLFHDWRFLDDAGQKPNPEFVLNQPCYQGASILLARENFGCGSSREHAPWALTDYGFKVVIAPSFADIFYGNAFNNQLLPVKLNDTDVNELFEWVQQNKACRFTVDLEQQKVHAGNKSYDFEIDSFRRHCMMNGLDSIGLTLQHLDAIITYEQEQPVFLRZ

SEQ ID NO: 2291 - protein, 470 aa, Photorhabdus luminescens
MAKTLYQKLYDAHIVREVPNETPLLYIDRHLVHEVTSPQAFDGLRTKGRPVHQPGKTFATMDHNVSTQTKDINACGDMARIQMQELMKNCAEFGITLYDLNHPYQGIVHVIGPEQGITLPGMTIVCGDSHTATHGAFGSLAFGIGTSEVEHVLASQTLKQARAKTMKIEVMGDVGDAITAKDIVLAIIGKTGSAGGTGYVVEFCGKAIEALSMEGRMTLCNMAIEMGAKAGLVAPDETTFTYMKGRQFSPKGELWEQAVAYWKTLKSDPDAQYDTIVTINAEEISPQVTWGTNPGQVIAIDQTIPAPESFSDPVERASAEKALAYMDLKPGIKLTDVKIDKVFIGSCTNSRIEDLRAAAAIAQGHKVAPGVQAIVVPGSGPVQAQAEAEGLDKIFIEAGFEWRLPGCSMCLAMNNDRLQPGERCASTSNRNFEGRQGRGGRTHLVSPAMAAAAAINGHFIDIRHPAQKSZ

SEQ ID NO: 2292 - protein, 364 aa, Photorhabdus luminescens
MSNNYHIAVLPGDGIGPEVMAQAYKILDAIRKRFNICITTSEYDVGGIAIDRHGCSLPAKTVAGCEQADAILFGSVGGPKWEHLPPAEQPERGALLPLRKHFKLFSNLRPARLYAGLEVFCPLRNDIAAKGFDILCVRELTGGIYFGQPKGREGQGKYERAFDTEVYHRFEIERIARIAFESARKRSNKVTSIDKANVLQSSVLWREVVTEIAKAYPDVEINHMYIDNATMQLIKDPSQFDVMLCSNIFGDILSDECAMITGSMGMLPSASLNEKGFGLYEPAGGSAPDIAGKGIANPIAQILSAALLLRYSLGHNDAANAIEQAVNYALEQGYRTTDLAGNGKAISTDEMGSTIARYIAEGVZ

SEQ ID NO: 2293 - protein, 521 aa, Photorhabdus luminescens
MNQQVIIFDTTLRDGEQALQASLCVNEKLQIALALERMGVDIMEVGFPVSSPGDFESVQTIAKQIKNSRVCALARCVEKDIDVAAEALKVADAFRIHVFLATSDLHIESKLKKTFENVMEMATQSIKRARRYTDDVEFSCEDAGRTPIDNLCRIVENAIKAGATTINIPDTVGYTTPYQFGGIITNLIERVPNIDKAIISVHCHDDLGMSVANSITAVQSGARQIEGTINGLGERAGNCSLEEVIMAIKVRQQMLGVYTNINHQEIYRTSQLVSQLCNMPIPANKAIVGSNAFSHSSGIHQDGVLKNRETYEIMTPESIGLKEIQLNLTSRSGRAAVKHRMEEMGYQDKDYDLGSLYEAFLRLADKKGQVFDYDLEALAFINLQQQEPEFFHLDNFNIQSGSNVMATAAVCLVCGKELKSEAATGNGPVDAVYQAISRITEYPIELVSYQLSGKGQGKNALGQVNIVVECFGRRFHGMGLETDIVESSAKAMVHALNCVWRTEQVKKEKQRIQQNTKEMVZ

SEQ ID NO: 2294 - protein, 315 aa, Photorhabdus luminescens
MAEYTSVTAIKKDPNEIHLRNVDLNLLTVFDAVMQMQNVTRAAQMLGMSQPAVSNAVSRLKLMFNDELFVRYGRGIQPTARAHQLFGPVRQALQLVYNELPGVGFEPDNSDRVFSLSICSPLDIRLAAKIVEQVKQNTPNLGVTIRSYLHDNIEHQLRYQETEFVISYTQLERMDFHHYPLFNDELVLAVSNHHPRIENSISEQQLYEEHHAVVSLDNICSFSVPYYDGGKRLRSVVYQGTDLNSVLHIVSQTYLVAIAPRWLVEHYSEQLAIRAVSLPWDKVSRPCYLIWHESTTKDKGHQWMKSLLSQLSSRZ

SEQ ID NO: 2295 - protein, 490 aa, Photorhabdus luminescens
KTIYIEESIMNYVESHSIICNAQIEDVYEIIINSDKWPGMFEPCQEVKTLFRDKEGEKIEIKALINGILMQWESNRKFYPETFSIKSKLNPPMTLVKEMETSWRVIKINSQQCVLLLEHLYDLESEVAGLIDGVETIEQAHQFISKAIDTNSVKELNNIKNIVESTEGSEKVLTGTITHSVVCEVPAQQVYTLVKDVSCWTGIFSFCDGAEVLKRSGNEELVEIKAKQNNKAVSWQTQRYYFDTIYRVDYVMPTPMPLLKTMNGRWQIIPINDQRCILTVQRNWGLLEDVSGIVDGIDNHDQANSFIISFINDNTRMEMDSIKSQVESHKKSNLLTFSAGYYIPHQVDDVYKIFLNIDDWSKILPHCDSVKVIYNDDKHQEFNMEVSTPNGNETFRSIRFCDVDNLLIEYFQPEPPLVLKSHSGSWQILSKGSGSYIVSSHDVELNYELCAVKFGTEDKEKQREIVKNAISENSKKMVFACKEWLDTRIZ

SEQ ID NO: 2296 - protein, 342 aa, Photorhabdus luminescens
MLSLKEFNTFGLSAYAKRLDIAESAESLLALWQKAKSEKQPVLLLGGGSNVLFTTNFEGTVILNRIMGIQQRETDESWHLHVGAGENWHELVCHSLKNQIYGLENLALIPGCSGAAPIQNIGAYGIEFRDVCEYVDVLNLETGEQTRLSVGECQFRYRDSIFKHKYKANHSIISVGLLLKKNWQPILNYGNLTRLSKDNVTPQQIFDSVCAMRTSKLPDPAITGNAGSFFKNPIVSAEVAAKIKENYPDSPQYSYTNGMFKLAAAWLIERCNLKGYRIGGASVHLRQALVLINQENATGKDVVLLAAYIRRQVISKFGVLLEPEVRFIGSKGEIDAVECISZ

SEQ ID NO: 2297 - protein, 320 aa, Photorhabdus luminescens
MKDITVPLQLIKILSDGEVHSGQQLGQYLGMSRAGINKHIQTIREWGIELETTLGKGYSLMAPMQLLDESTILQYLPQDRITVLPVIDSTNQYLLERLSELKSGDACVAEYQYAGRGRRGRKWVSPFGKNLYLSMYWRLEQGPAAAIGLSLVVGIVIAEVLHRFGAGRIRVKWPNDLYLDDKKLAGILVELIGKTGDAAQVVIGAGINISMDHKDEEPINQQWINLLQAGIQVDRNKLAVEIILDLRKALIQFENKGLSSFVSRWFELDNFMDRPVKLIIGSQEVYGIARGINQQGALLLDQNGVITPYIGGEISLRGCZ

SEQ ID NO: 2298 - protein, 317 aa, Photorhabdus luminescens
MNKKEPFLATPYLQFNREQWATLRDSVPLTLTKEELIDLKGINEEISLEEVVEIYLPLSRLLNFYISSNLRRQAVLEQFLGTDGQKVPYVIGIAGSVAVGKSTTARLLQALLSRWPEHRSVELITTDGFLHSNSVLNERGLMKKKGFPQSYDMHSLVKFVSDIKSGSKQVSAPVYSHLTYDIVPNEQKFIKQPDILILEGLNVLQSGMDYPHDPHHVFVSDFVDFSIYVDAPEKLLKSWYISRFLKFRQGAFSDPDSYFHSYSKLSEEEAINTASDIWQEINGLNLRQNILPTRERASLIMTKGTNHTIESVRLRKZ

SEQ ID NO: 2299 - protein, 395 aa, Photorhabdus luminescens
MSKEKFERTKPHVNVGTIGHVDHGKTTLTAAITTVLAKTYGGNARAFDQIDNAPEEKARGITISTSHVEYDTPSRHYAHVDCPGHADYVKNMITGAAQMDGAILVVAATDGPMPQTREHILLGRQVGVPYIIVFLNKCDMVDDEELLELVEMEVRELLSQYDFPGDDTPVIRGSALKALEGDAEWEAKIIELAEALDSYIPEPERAIDQPFLLPIEDVFSISGRGTVVTGRVERGIVKVGEEVEIVGIKDTTKTTCTGVEMFRKLLDEGRAGENVGVLLRGTKRDEIERGQVLAKPGSIKPHTTFESEVYILSKDEGGRHTPFFKGYRPQFYFRTTDVTGTIELPEGVEMVMPGDNIQMKVTLIAPIAMDQGLRFAIREGGRTVGAGVVAKVIAZ

SEQ ID NO: 2300 - protein, 210 aa, Photorhabdus luminescens
MIGLVGKKVGMTRIFTEDGVSIPVTVIEIEDNRVTQVKELDNDGYRAIQVTTGSKKASRVNKPEAGHFAKAGVEAGRILREFRLSEGEEYAVGQSISVEIFADVKKVDVTGTSKGKGFAGTVKRWNFRTQDASHGNSLSHRVPGSIGQNQTPGKVFKGKKMAGQLGNERVTVQSLDVVRVDAERNLLLVKGAVPGSTGGNLIVKPAVKAZ

SEQ ID NO: 2301 - protein, 202 aa, Photorhabdus luminescens
MELVMKDAQGALTVSETTFGRDFNEALVHQVVVAYAAGARQGTRAQKTRAEVSGSGKKPWRQKGTGRARSGSIKSPIWRSGGVTFAAKPQDHSQKVNKKMYRGALKSILSELVRQDRLIVVEKFSVEAPKTKLLVQKLKEMALEDVLIITNEVDENLFLAARNLYKVDVRDVAGIDPVSLIAFDKVVMTADAVKQVEEMLAZ

SEQ ID NO: 2302 - protein, 275 aa, Photorhabdus luminescens
MAIVKCKPTSPGRRHVVKVVNPELHKGKPYAPLLEKSSKTGGRNNNGRITTRHIGGGHKQHYRLIDFKRNKDGIPAVVERLEYDPNRSANIALVLYKDGERRYILAPKGLKAGDQIQSGVDASIKTGNALPMRNIPVGSTVHNVEMKPGKGGQLARSAGAYVQIVARDGSYVTLRLRSGEMRKVLSDCRATLGEVGNAEHMLRVLGKAGASRWRGIRPTVRGTAMNPVDHPHGGGEGRNFGKHPVTPWGVQTKGKKTRSNKRTDQFIVRRRTKKZ

SEQ ID NO: 2303 - protein, 234 aa, Photorhabdus luminescens
MGQKVHPNGIRLGIVKPWNSTWYANTKEFADNLDSDFKVRQYLKKELAKASISRIVIERPAKSIRVTIHTARPGIVIGKKGEDVEKLRKTVAEIAGVPAQINISEVRKPELDAKLVADSITSQLERRIMFRRAMKRAVQNAMRQGAKGIKVEVSGRLGGAEIARPEWYREGRVPLHTLRADIDYNTSEAHTTYGVLGVKVWIFKGEILGGMAAVEQAEKPAAQPKKQQRKGRKZ

SEQ ID NO: 2304 - protein, 178 aa, Photorhabdus luminescens
MSRVAKAPVVIPTDVEVKLDGQVISIKGKNGELSRTIHSAVEVKHADNQLTFAPRDGYVDGWAQAGTTRSLMNAMVIGVTEGFTKKLQLVGVGYRAAVKGNVINMSLGFSHPVDHELPAGITAECPSQTEIVLKGADKQVIGQVAAELRAYRRPEPYKGKGVRYADEVVRIKEAKKKZ

SEQ ID NO: 2305 - protein, 444 aa, Photorhabdus luminescens
MAKQPGLDFQSAKGGLGELKRRLLFVIGALIVFRIGSFIPIPGIDATVLAKLLEQQRGTIIEMFNMFSGGALSRASIFALGIMPYISASIIIQLLTVVHPTLAEIKKEGEAGRRKISQYTRYGTLVLAIFQSIGIATGLPNMPGMQGLVINPGFAFYFTAVVSLVTGTMFLMWLGEQITERGIGNGISIIIFAGIVAGLPPAIGHTIEQARQGDLHFLLLLLVAVLVFAVTFFVVFMERGQRRIVVNYAKRQQGRRVYAAQSTHLPLKVNMAGVIPAIFASSIILFPGTIASWFGGGTGWNWLTTISMYLQPGQPLYVLLYASAIIFFCFFYTALVFNPRETADNLKKSGAFVPGIRPGEQTAKYIDKVMTRLTLVGAMYITFICLIPEFMRDAMKVPFYFGGTSLLIVVVVIMDFMAQVQTLMMSSQYESALKKANLKGYNRZ

SEQ ID NO: 2306 - protein, 520 aa, Photorhabdus luminescens
RETEMKLISMLLHSGRDNLHHDCIITKDYHYTRKEVISSVSHLIDDLLSRGVQKGSKVIVIFEHDELGIFFLAAASAMGLHLLMPYNLSSATIDEWINFTNEVQYDFVVYLKKDKHFVGRLKENNINVIDISDHKIRVSDDIAEIPIITYSPQSIANFIVLFTSGSTGKPKAISISESLVCRRIYSVTEKLKFTQDAKIFMSGLLNNTTGVIFSFGSLLHQSTLFIPEDRNVERWPDYLSRNKITHIMLRPESMKLFVKSTAEHNIDLSDLQVVAYGAAAMPPSVLEKGRQLIGCEWMQGYGLSETYGPFCWVDEQDHRDKRYLNSIYCVGKIDNTLAVAVKPIIGSSDNIGEIIIRGESIMEGYYDVLSGEITPPDEWFATGDLGYIDEEGYLVLKGRKQNTFMSANGHRIYPEEVESILSRIPNVNVATVVGFSFHENGVAIDQPVACMSGEISKKSLPEIEDIISSFLSRKLSREKWPDWFYVTDEYFPKSHNDKILKAELIKSIDPKKLFTLRNQZ

SEQ ID NO: 2307 - protein, 207 aa, Photorhabdus luminescens
MARYLGPKLKLSRREGTDLFLKSGVRAIDTKCKLEQAPGQHGARKPRLSDYGVQLREKQKVRRIYGVLERQFRNYYKEATRLKGNTGENLLSLLEGRLDNVVYRMGFGATRAESRQMVSHKAIMVNGRVVNIASYQVSPNDVVSVREKSKKQSRIKAALELAEQREKPTWLEVDAVKMEGVFKRIPERADLSADINEHLIVELYSKZ

SEQ ID NO: 2308 - protein, 330 aa, Photorhabdus luminescens
MQGSVTEFLKPRLVDIEQVSSTHAKVTLEPLERGFGHTLGNALRRILLSSMPGCAVTEVEIDGVLHEYSTKEGVQEDILEILLNLKGLAVRVQGKDEVILTLNKSGIGPVTAADIIHDGDVEIVKPQHVICHLTDETASISMRIKVQRGRGYVPASARIHSEEDERPIGRLLVDACYSPVERIAYNVEAARVEQRTDLDKLVIEMETNGTIDPEEAIRRAATILAEQLEAFVDLRDVRQPEVKEEKPEFDPILLRPVDDLELTVRSANCLKAEAIHYIGDLVQRTEVELLKTPNLGKKSLTEIKDVLASRGLSLGMRLENWPPASIADEZ

SEQ ID NO: 2309 - protein, 459 aa, Photorhabdus luminescens
MKIIILGAGQVGGTLAENLVGENNDITIVDTDPNRLHQLQDKFDLRVVNGHGSYPRVLREAGAEDADMLVAVTNSDETNMIACQIAYSLFNTPNKVARIRAAEYIREADKLFLPNDIPIDYLISPEQLVIDYIYKLIQYPGALQVVNFAEGRVSIVAVKAYYGGSLVGNALSSLREHMPHINTRVAAIFRQDRPIRPQGSTIIEAGDEVFFVAASQHIRAVMSELQRLEKPYKRIMIVGGGNVGAGLALRLEKDYRVKLIERNQQRAIELAELLHDTIVFYGDASDQELLAEEHIEQVDVFIALTNDDEANIMSAMLAKRMGAKKAIVLIQRSAYVDLVQGGVIDIAISPQQATISALLGHVRKADIVSVSSLRRGVAEAIEAIAHGDENTSKVVGRTVGDIKLPPGTTISAIARGNEVLIASDYSVIEQGDHVIMFITDKKFVPEVEKLFQPSPFFLZ

SEQ ID NO: 2310 - protein, 436 aa, Photorhabdus luminescens
LSALLIMKNTYNLRSITAKAINQVLDQGQSLSTVLPKLQQNITDKDKPLLQELSFGVLRVLPQLEWIIGQLMVKPLKGKQRILHYLLMVGIYQLAYTRIPAHAALAETVNGAVTLKHSQLKGLINGVLRQFQRQQLQLMECTQNNSSHHLHPEWLLTRIQKAYPQQWQQLINANNKKPPMWLRVNRIYHSRDEYLTLLRKSGIDAEPAPKSPSAIRIISPCPVTILPGFDKGWVTVQDLSAQECVELLKPINGEKILDLCAAPGGKTTYILEIAPESQVVAVDIDEQRIKRVKENLKRLNCHATVKTGDGRHPEHWAENQQFDRILLDAPCSATGVIRRHPDIKWLRREEDIAQLVQLQSEILDAIWPYLKKSGTLVYATCSILPDENCQQISSFLKRHSDAKLAGTETNDCLGKQIIPELNGGDGFFYARLTKRZ

SEQ ID NO: 2311 - protein, 316 aa, Photorhabdus luminescens
VSDSLRIVFAGTPDFAARHLEALLMSQHEVVGVLTRPDKPAGRGKKLTPSPVKVLAEERNITVFQPATLRSEENQQWVLKQQPDVLIVVAYGLILPKVVLNIPELGCLNVHGSLLPRWRGAAPIQRSLWAGDTETGVTIMQMDIGLDTGDMLYKARCPITPEDTSASLYEKLANIGPDALLKTLSLITSGKSQPETQNENLVTYAEKLSKEEARINWELSATHLERCIRAFNPWPMSFFEMEGQPIKVWKAEAIEEQTSVEPGTVLKADKEGIYIATADGILNITQLQPAGKKAMSAANLLNSKREWFTPGNKINZ

SEQ ID NO: 2312 - protein, 362 aa, Photorhabdus luminescens
MEAMEVWLRMKMISHLATERAANVAEKLLYSGSRYLTVLKDSGLSPEQCLQFTKVNKTLLASCLKWLEQPEHHLLTYSHPSYPPLLKQIHTPPLVLFVAGKPDILLKKQVAMVGSRTASYYGERWGRIFASELVGYELVIASGLAIGIDGICHRAALDSGGKTVAVLGSGLGQIYPHRHGLLAKQIEENGALVSEFFPDTPPRAKNFPRRNRIISGLSSAVIVVEAGQNSGSLITARCALEQGRDVFALPGLLGNSVSEGNHWLIKQGAYLATNAMDIVEHVYSSLQWLNMERTEEEVKPQFEQTELPFTDVLVNVGAEVTPVDIIAQRSSLPITEVMTKLLELELLGKVTVVAGGYVRVNZ

SEQ ID NO: 2313 - protein, 180 aa, Photorhabdus luminescens
MAKMVPFSTNETEYCPECGSALVMRNGIHGPFLGCSGYPSCQYIRPLKGQRDGHVVKELEGQLCPACGVNLILCQGRYGMFIGCSRYPECEHTELIDKPDETLIACPQCKQGQLLQRKSRFGKIFHACNRYPNCQFVLNNKPIAGKCEFCSYSLLVEKRTSQGVKLFCASKLCGKRQINZ

SEQ ID NO: 2314 - protein, 273 aa, Photorhabdus luminescens
MDQFAVFGNPVAHSKSPRIHQLFARQTGIEHRYGKILVPISKFQEALDTFLKQGGIGVNITVPFKEQAFIRANELTERARLSGAVNTLKLLNNNQLLGDNTDGIGLLTDLMRLEFITQGQHILIIGAGGAARGVLFPLLEFGCKITITNRTFSRAIQVANNFSAIGSIRPAEMKVLNSPEFDLIINATASGINGEIPTISPFIFNENCVCYDMFYQANLTPFISFARKHGVSRYADGLGMLVGQAAHSFKLWHGVLPEISPVLLTLEQELRSZ

SEQ ID NO: 2315 - protein, 300 aa, Photorhabdus luminescens
MQTTLSTEITLPDNYHTHDFFALHQRDKQNIAEIVEQNKVQKGMMWDDKPAELTIAINAKTAHIQLKIDGDTTGPDERLSTLASHMPGLLQPVHLFECLYKRHPVIGSLIARQSGLRIYQSATPFEALSWAVIGQQISVSAAISIRRRFIQAMGVQHSSGLWCFPTARQIINHSEDELRQCGFSVSKAKALLRLSQLIESGELTLAISNSETDIQQLIDNLLAIKGIGMWTINYSLLRGFNYLNGSLHGDVAVRRNIQRLFNQNEKVSAEQAEKWLADFAPWKALLAAHLWQQESSAGYZ

SEQ ID NO: 2316 - protein, 338 aa, Photorhabdus luminescens
ILKFFLTGTISSICGLCICQLKERLMKAYYFNLRQRILTFALLFSCYIGFAYSNTNAHKQFFRHDGSEITYYLKQRGGKNLLVLIQGSDCNSIANNKFVNNTFSDIYPDSDVLTVEKYGINASLPWSDVVERSDCPKAYIRLDTPEQRVKDYIQIIDYLKHQNKYNKIIILGGSEGAVVANLITSQVNYIDRTVSLNGGGRYFADDVIHSIKSEAPPEYLNEEIKGFRDFQQKIAAGDNMSHIEMSNHGANWWRVSLGIDQYKVLSQTKRPILIIQTLNDNSVNPSAAMKMEEQLKKENITFYQYPGLSHGFRNSEGVLQITPIVEDIKNWLSRDYGZ

SEQ ID NO: 2317 - protein, 373 aa, Photorhabdus luminescens
TMRKRVVVTGVGAIHPDGNDVTAIKSKVIQKLLGQESKNNTTASSIIRTLSDFDGAKYINNRLRRKIDEFSVYGIVAVEMALKASRLDVDKLDPNRVGIYVGNCFGGWQHIEDEVKALHIEGIKGMGPYVATAWFPAALQGQLSLLYGFSAQSKTFSTSDVAGMQAIGYAAEAISNGVAEVMLCGASEHLSSPLVKNLLEKTSSQKHSEVFGEKQPGDFSEGAAFLVLEERQHALERGASILCELTGFVDYFAPDKNTRNNTLEYTAELFNHNENAVFIMDGIYDDEKEITSKAFSNKEIKTSFINLRPYLDNQFSVSGVIDSVLASSFLSESHGDEEQQSKKINEFSNTNQIIIQRFSNQGHVCALSFSAIZ

SEQ ID NO: 2318 - protein, 367 aa, Photorhabdus luminescens
MLDSNLTDCNSKNSSPVCSFNEWDPLEEVIVGVVDGARFPGWHMATEPILPPNQVDNFHRYAGRSFPQEQIDAASRELEEFVHILEGEGVTVRRPEPQDQSQVFGAPGWSSTGFYCAMPRDVLLVIGNDIIECPLAWRSRYFETAAYKTLLKDYFKKGAKWSAGPKPQLTEEQYNFEWHRPNSKERVPLAITEFEPTFDAADFIRCGRDIIAQKSHVTNEFGIEWLRRHIGDEYRIHVFEFNDDSPMHIDATFVPMAPGKLLIHPEKVLKIPELFRNWDVLHAPKPVIPDDHPLYTTSKWINMNILMLDEQRVIVEKQDEPMIAAMKRWGFTPIPCNFRNFNTFGGSFHCATVDVRRRGTLQSYLDZ

SEQ ID NO: 2319 - protein, 338 aa, Photorhabdus luminescens
IMMAIWRYSPWDAVMFALSILHTVATITLVVYWNGFTIMGWLTHVILLTLMTTYNIVVISHFFTHTPWFVSNALNMFVSILNSMNIGQSIQSYHLSHVRNHHKYNNDRGVGESGPQDTSSTFINGKERGEHNTLWNYSTIGGIFTLYNSLMRMLWAIFIWHKPLSKADKGYEKLLSRVKVRRMKELWQLRLDRLFQAMWVIILFTWSWEWSLFCYLPSLYFAFVLVNIQNYYEHYGALPGNKFANSVSYYGRVYNFLMFNDGYHQEHHISGNTHWSLLPDLRRKYSTQLSAQKRVISPVPAILGFLHRHRSLLHRSIYPMDFKMHRDGKGTNPREHRZ

SEQ ID NO: 2320 - protein, 399 aa, Photorhabdus luminescens
CLMMAITKNIISQETRIGVYYLIYVGNIRLSFLHRRELLVRYLQYWVFYTDIDLYFIDLYTLWISRCIATARERIPGSIGNYVTGVSECSQQRGNLKDDGYKSKIMGESTIMQEKFEIRGATLAESEFMIYETSNNISVHALSALLDGHLAACRVRNFLPSEQSRKIIENFWRSSARTPRYGEGIEGVEGYFIGASHIEKDTRQYIEEAENFRSAINEVFQDTINPIDRFIDQIVHFSSNNLRVMRPAMYHGVAAGNVKIVYWNNFGEFLLLPHDDLAQLSDPRQSDFEIQQINRVMAVNFYADVPQNGGQLKVWNIQPDDQSRSALGLTYSGFPYPSELLEDHASMVINIEAGDLVLLNGNLVHAVLNGNTISAPERRLLVTCFMGLQQNGDLIWWTZ

SEQ ID NO: 2321 - protein, 294 aa, Photorhabdus luminescens
MISKAQWISYSSTLIFVLLWSSGAIFSRWGLDHSTAFAILTMRFAIALIFLIFLGLLFRHKGYYLPEHGTRKQIAGTGVLLIGGYSICYFFALDNGITPGVLATVMGIQPIITLLVIERRFSVVRLAGLLLALLGLVLVVYQSLVLSRFSIAGITFALAALACMSIGAILQKRIHQAPSAVLPLQYSVSLLLCLLFVPFQPFEFQLVPGFIISLLWLGLVISVVAQLLLYRLIQAGNLVNVTSLFYLVPGVTAVMDYLFLGNSLPALSLLGMAAILSGLVLVFRTKKGSLATEZ

SEQ ID NO: 2322 - protein, 536 aa, Photorhabdus luminescens
IIRKLMMESMISKDNIQLFIKKIDELVNIENEKKGGALAVAIIHDDKIIYQRHIGQASIEHAVAIQPNTKFYLASASKQFTAFCIALLEKEGKLNVKDKVKQYFDYLPAHFSDITIEHLIHHTSGLRDIFLLYNLAGKNSSFDYCHADLVRKLIQRQQTFNAPIGEYYIYSNTGYYLLGEIVSIVSGKSWKKYAEENIFAPLEMKDTIICDDITEIISNRAMGYTYNQNSQQWIRSDINNSVIGSAAVHSTVNDLCRWARAFYSPSIVQDLLPQLSRTPNLTNGNRNNYAYGFIIDQREGQRIIQHSGTYAGFRANICILPDAKLGIAMTAASDVDVGKWTDKYMDILFNTHLEPEKPHCLTSDVDITGIFRGIEPYPYIITKEDVYFLGNLFTKGNPIIFNSDGTFQEQGGKIKFRPVIENDSVIALEHIDENGNVFYLKKMNNEDSVDIQLLSGRYYSHETEAIINIISSGDDLYIDGIIHPVKKEALRHIYGNSYFSPSAEFVIDFEFDPDTNKSRLYIGNARCLNVEFVAVZ

SEQ ID NO: 2323 - protein, 535 aa, Photorhabdus luminescens
IGKFMMESMISKDNIQLFINKIDELVNIENEKKGGALAVAIIHDDKIIYQRHIGQASIEHAVAIQPNTKFYLASTSKQFTAFCIALLEKEGKLNVKDKIRQYLDYLPEHFADITIEHLIHHTSGLRDIFLLYSLVGKNSSFDYCNADLMEKLVQRQQTFNAPAGEYYIYSNTGYYLLGEIINVVSGKSLRDYAEENIFVPLKMKDTVICDDITEIISNRAMGYTYNENAQQWIRSDINNSVMGSAAVHSTVNDLCRWARAFYSPSIVQELLPQLSRTPDLTNGNRNNYAYGLIIEQREGQRIIQHNGTFAGFRANICILPDAKLGMAMTSATDADVDQWTDNYMDILFNTHIEPEKPYCLTSDIDITGIFRGIEPYPYIITKEDIYFLGDLFKKGNPIIFNSDGTFQEKGSKIQFRPVIENDSVIALEHIDENGNVFYLKKMNNESSVDINLLSGRYYSHETEAIINIISSGDDIYIDGIIHPVKKEAMRHIYGNSYFSSSTESVIDFEFDPETNKYCIYIGNSRCLNVEFVAVZ

SEQ ID NO: 2324 - protein, 513 aa, Photorhabdus luminescens
MNWLILRIKKRGALSLLVVTHGNKIIYQRHIGKVSIEHAVAVKPNTKFYLASVSKQFAAFCIALLEKAGKLCVKDKVGQYLDYFPTEFSDITIEHLIHHTSGLRDEFLLYELAGKNSDFDHRHIDLVRKLTQRQQALNFTPGEYHLYSNTGYNLLAEIVRVVSGKSLKEYAEENVFAPLKMKDTFFYDDITEIIPDRAMGYTYNKNSHQWIRDDLNDTVVGGSGLHSTVNDLCRWIRAFYSPSIVQDLLPQLSRTLNLTNGNRNNYAYGFIISQREGQKIIQHGGSYTGFKSHVCILPDAKFGIAITAATGVDVSTWVEQYIDILFDTDIKPEEPHCLTSDIDITGIFRGVEPYPYIITKEETYLLGNLFEKGNPIIFNADGTFQEKGGKIRFRPIIENGSVIALEQIDENGNVFYLKKRVDDGSVDIQRLSGRYYSHETEATITVSASGDGIYIDGVVYIGKKEVLRRIYGNSYFSPSTELIIDFELDTETNKPHLYISNSRCWKIEFVVVZ

SEQ ID NO: 2325 - protein, 580 aa, Photorhabdus luminescens
LYIAFHTLNDDDYHLDDLLFTFYSNYSYMILLLGHIYVLFYNLKIRKFMMESTISTDKVKLFLKKIDELVDIENKKKGGALAIAVTHGNKTIYQRHIGKANIEHAVTAKPNTKFYLASVSKQFTAFCIALLEKEGKLSVKDKVGQYLDYFPVEFSDITIEHLIHHTSGLRDESLLYRLAGKNSRFDYHDIDLIRKLTQRQRTLNFTPSEYYAYSNTGYYLLAEIVSVVSGKSLREYTEENIFAPLKMKDTTFYDDVTEIIFDRAMGYTYSKEPNRWARYDLNGSVVGGTGLYSTVNDLCRWIRAFYSPSIVQELLPQLSRTPDLTNGNHNNYAYGLIISQREGQKIIQHDGSYAGFKSDVCILPDAKLGIAITSATNINVIQWIEQCLDVLFNSNIVEPEKPHCLTSDIDITGIFRGAEPYPYIITKEDCYLLGSLFGKGDPITFNPDGSFQQQGSKTRFKPIIENDNVVSLEQTDEDGNVFYFKKMTDNGGIDIQRLSGNYYSHEIEATMTISASGDGIYIDGVTYPENKGVLRRVYGNSYFSPGTEFVIDFELNSDTNKPHLYINDGGCWRVEFVAVZ

SEQ ID NO: 2326 - protein, 534 aa, Photorhabdus luminescens
IRKFMMELTISRDNIKSLVNKIDNLIDIENKKNGGALAVAVTHGNETIYKRYIGQASIEHAVAITPNTKFYMASVSKQFTAFCIALLEKEGKINVKDKVGKYVDYFPAHFSDITIEHLIHHTSGLRDKYAPYGLAGKNSDFDHRSIDLLRKLIQRQQKLNFTPGEYFSYTNMGYNLLAEIIKVVSGKSLREYAKENIFIPLKMNNTSFYDDVTEVISDRAIGYVYNADSNQWIRSDHNDSTIGSAGLRSTVSDLCRWMKAFYSPSIVRDMLPHLSRMPNLANGNRNNYAYGLMISQREGQKIIRHDGAYDGFKAEVCVLPDAKLGVVITAATGINSVEFTNQCLNVLFNTDMAEPEHCRTSDIDITGMFKGADPYPYIITKEDCYLLGNLFEKGNPIIFNADGTFQEKGGDIRFRPIIENNRVIALEQIDENDNVFYLKKMTDKGDIDIQRLSGRYYNHETESMLSIEVSGDELYIDAVILPGKKEALRWVYENSYFLPSIEFIIDFEFNPDTKEPRLYVNDARCWKIEFIPVZ

SEQ ID NO: 2327 - protein, 450 aa, Photorhabdus luminescens
WISRCIAAASERIPGSIDNDVTGVRECSQQRGNLKDNGYINKTYLFEGDQMMPCDFDSEVVIALVGAVGTDLEIIRDSITKKLNAFRYDVQEIRISSEIISVLRDIPSTRDNYERISCLMSEGNYLRESSQDSSILALAAVAEINKRREKKHFSSIPSIRRAYIINSLKHPDEVNALRDIYVNGFFLIGVYTSESQRLRNLIVDKCIDEVKARELINRDSNEGNKWGQRNRDTYELSDFFINYDGNKNRTDNNIWRILDLIFGNPYVTPTFDEYAMFMAFSASLRSADLSRQVGAVLTKDKNIISTGANDVPRFGGGLYWPDYVGDSIEDAENGRDYKVGEDSNAKEKRLIIEDILEDIEEEQKEKFRGCLLNSKIKDITEYGRVVHAEMEAILACARSNISTHNGILYCTTFPCHNCAKHIVASGIRRVVYIEPYPKSKAFDFHPDSIZ

SEQ ID NO: 2328 - protein, 429 aa, Photorhabdus luminescens
VIINNRNESQPRRVVVTGLGVVAPTGVGVNEFWNNIHNGKSGVSKYEWGRERFGFKSGAIGQVYGSDGNNKEFVLKSERKYLQFALDAAEMAMQDANLRPSDIDGRRFGVAIATAIADAAGMEECLLRITKGGKENIHPDLIKSEDYDSFDFSSAATSVAKKYGASMSVSNISTGCAAGLDALGIAMEHIRYGRADIMLAGASEAPLCPLSIGSFEALGALSSRELENQQAATCPFSLERDGFVIAEGCGILILESYEHAKQRGAHIYAELAGYASVNNAYHMTDLPADGMAMARCIDMALKDAQISPSTVNYISAHGSSTAQNDINESNAIKFVLGESAFGIPINSLKSMTGHALAAANAIESVALCLEIEKQYVHPTINYQTPDPDCDLDYIPNQGCSYPIKTALKLSSGFSGIHSVIVMRAVDNAZ

SEQ ID NO: 2329 - protein, 396 aa, Photorhabdus luminescens
MEQTWRWFGPNDPVSLDDIRQAGATGIVTALHHIPNGHIWNKDEILARKTLIENKGLIWSVVESVPVHEEIKTRTGHYSQWINNYKTSLKNLAECGIDTVCYNFMPVLDWTRTDLEYSLPDGSKALRFDQIAFAAFEIYILKRPNAEADYTVEEQAQAKVYHDNMSAADIKKLTTNIIAGLPGAEEGYTLAEFQAQLDRYKDITRDKLREHLAYFLHQIVPVCEEYGLRLAIHPDDPPRPILGLPRIISTIEDIEWLTTIEPSPANGITMCTGSYGVRSDNDLVEIIKHYGNRIYFTHLRSTQREENSKTFHEATHLAGDVDMYNVVMEILREEYRRKKVGDNRLIPMRPDHGHQIIDDLKKQTNPGYSCIGRLKGLAEIRGLELGLRRAFFENKZ

SEQ ID NO: 2330 - protein, 248 aa, Photorhabdus luminescens
MKHLLEPKRPYQEVGISLREMIANQQYRIGDRLPPERELAELLQVSRTVVREALIMLELESLIEVRKGSGIYIINRPHLPTSSSCSVNAAGPFELLQARQLLESNIAEFAAMQVTPNNIANMRRALQKESEDLASGEDESGDREFHLAIAEATHNSMLVELLKQSWAWRENNPMWQKLHTRITDKDYRKEWLHDHQIILSAMIKKDPAAAKQAMWQHLENVKLRLLELSDIDDPYFDGYLFNSYPCKZ

SEQ ID NO: 2331 - protein, 327 aa, Photorhabdus luminescens
MSNSKRILSTVIGAIFALSASQVMAVTTLKLSHNHNRDHAVHKAMTQFADEVRQKTNGDVRIRIYPDAQLGNQRESMELMQNGALDLVKSNAAELEAFSPTYSAFNLPYLFRDKAHYEKIKNGEIGKEILTSSKNRGFIGITYYEAGARSFYAKKPIRTPEDLKGMKIRVQPSPTAISMVKNLGGNPTPLAYGELYTALQQGVVDAAENNIPSFSLSRHSEVARYFSLDNHTMVPDVLVISTKSLNKLSSEQQKILITAAINSSQYMTKLWEKSEEKERQNAEKIGVKFVDVDQKSFEEAVKPMYDDIKKSDPMLYRMVERIRAVRZ

SEQ ID NO: 2332 - protein, 438 aa, Photorhabdus luminescens
MDWQVVLALFGSFAVLLALGVPVSFAIGLSSLLAIMMTLPMEAAITVVAQRMAVGVDNFSLLAIPFFILAGNIMNQGGIAARLINLAKVMGGRLPGSLVHVNIIANMFFGAISGSAVASAAAVGGTMAPMQKKEGYEPEYSAAVNIASCPAGLLIPPSNTLIVYSLVSGGTSIAALFLAGYIPGILMGASLMIVAAIIAKRRGYPVSPKPTWNEFFTTLVRALPSLMLVVVIMGGIIAGIFTATEASAIAVLYSFILAVLIYREVSITKLPKIILDSAVTTSIVLLLIGASMGMSWAMANADLPYLIADALMAFSENPLVILLVINLVLLLVGTFMDMTPAILIFTPIFLPVAQNMGVDPVHFGIIMTFNLAIGICTPPVGSALFVGCSIGEVSINKVLKPLVPMYCALVIALMLVTFIPQLSLWLPQMLLNYSVFKZ

SEQ ID NO: 2333 - protein, 494 aa, Photorhabdus luminescens
MIRNIANSKINPAISLPSYDRQKLVARVVHLGCGAFHRAHQAVFTHHMLEKTGSDWGICEVSLFSGHRLIQQLKQQDCLCTIAEKGTEQTELKIIGSMVDALHPEFVGQQGILETIAQPQVAVISLTITEKGYCIDAASGKLDVNNALIQRDLANPTEPTSAIGYIVEALRLRYERDLPPLTVMSCDNIRENGNIAREAVVGFARLRDEKLAQWIELNVTFPCTMVDRIVPAATPESVAEIAGQLGVYDPSAITCEPFRQWVIEDNFANGRPNWDVAGAQFVKDVMPFETMKLRMLNGSHSFLAYLGYLAGYAHIADTMANPDYRQAALDLMLKEQAPTLTMPVGTDLFQYAHLLIERFSNPNLKHQTGQIAMDGSQKLPQRMFDSVIYHLANGSDYRHLALGIAGWMRYVSGKDEQGKLIDVRDPLVEQFKSIYQQYGLSVDVVPALLAIFGNPVLANPHFVRAVTAAYQLLLDCGARHAVAALDLADRKMIZ

SEQ ID NO: 2334 - protein, 475 aa, Photorhabdus luminescens
MKNFMCDDFLLNNETARQLYHEHAADMPIYDYHCHLNPREIAENRRFDNLGQIWLEGDHYKWRAMRCAGIDESLITGKQTRDYEKYQAWAETVPLTLGNPLYHWTHLELRRPFGISGILFGPQTADEIWHQCNEKLAAPAFSARGIMQQMNVRMVGTTDDPVDSLQYHRQIATDESFDIEVLPSWRPDRVFKIELAGFIDYIKQLEAVADVSIVAFADVLNALERRLEHFAAHGCRAADHGIENLRYAPIPDETVLNGILQKRLAGGILSELEIAQYTTAILVWLGRQYAARGWVMQMHIGAIRNNNSRMFRLLGADSGFDSIGDNNIAWPLSRLLDSMDVTDELPKTILYCLNPRDNEVIATMASNFQGGGIAGKVQFGSGWWFNDQKDGMLRQLEQLSQLGLLSQFVGMLTDSRSFLSYTRHEYFRRILCNVLGQWAEKGEIPNHKAMLGQIVEDICFNNARRYFALPGENLZ

SEQ ID NO: 2335 - protein, 315 aa, Photorhabdus luminescens
MKQIALLGECMIELNGAPFSTMHQTFGGDVLNSAVYLARASRQKIAVHFVTALGLDSLSEGMITRWQDEGIRTHLILRDPVRQPGLYLIQLDGQGERTFLYWRNNSAARYMVRHPDFSSVMQALQQMDAIYLSGISLAILPVDDREKLLNLLAELAAQGKTIIFDSNYRSALWQSVEETQVCYQKLLAFTSLALVTDDDECKLWGDKSVTETMIRLKQAGVKEAVIKAGAAGCYYQHLVQDTPIELIPTVPVVNVADTTAAGDAFNAGFLAGFLTDCPIQQAAIMGHCLAGTVIQHKGAIIPISATQAVTDSFFZ

SEQ ID NO: 2336 - protein, 211 aa, Photorhabdus luminescens
LMKQMIEQLRQLKIVPVIAVDRAEDIIPLGKALADNGLPVAEITFRSTAAAEAIRLLRAAQPNMLIGAGTVLNRDQVVAAKQAGADFMVSPGFNPNTVKACQQLNIPIIPGVNNPSAIEGAMELGLKLLKFFPAEPSGGLPMIKAILAPYTELQIMPTGGIGPNNIRDYLAVPRIVACGGSWMVSQALVGSQNWQEIGRLTREAVDLVNTZ

SEQ ID NO: 2337 - protein, 502 aa, Photorhabdus luminescens
LSSEFCFVKYGFDKNLNKLINEFQFDELSTGTILFRSTTKVSKFKSERYTAFLIGNIYNISTIRSILGKIEGRSSVLSDVEILLLSRDKFGNSIISIAEGDYCLFIEDKKGNIEVITESRGLNLVNLVQTDLIWITNSLKIVGKVEGDKAFDFKPESEVIKNSLKPDNFSPIRNVSRLKPGTINKLTFDEQRYLHLEVEYVISPVEENSFDIKESVLLEIIDSDLRNSISRLSKNNETIGVPLSGGLDSSLVTALASKYFDKVKTWSIGTELSNEFEFSKIVSDYLGTEHEVKILSEDEVISGVVKAIYYNEIFDGLSSEIQSGLFNVYELAKGKVNSLITGYGSDLLFGGILDPEKSYIEPNKILSEQVYRTKWTGEFSTHGAGNYGLNVYHPFWTNNLISLCHNLDPYFKIRDNEVKNILREYANSINILPKEIVWRKKIGIHEGSSVNKSFATMIGTEVNNYQDKTRFSYSIYKEFLTGRLSIEEANSTKLCEIIRRNZ

SEQ ID NO: 2338 - protein, 250 aa, Photorhabdus luminescens
MVIERDFSSIRVIILNHENKHNPFSESLENSIKKSLIKADQDDNVKAIVVYGGENRSFSSGGDFSEVKNLSGESVERWIDRVIDLYCAVLNVNKPTVAAVDGYAIGMGFQFSLMFDQRIVSSEAKFIMPELKHGIGCSVGAAILSFTHGHNIMKKIVFECEEISSEMCIEYNIANQVIDKEILLETAIERANLLATYPKTAYLNTKKFMNKKFVDILEDSRKESKLVHKNSFGSRDSQKHFKKVLGEKYZ

SEQ ID NO: 2339 - protein, 295 aa, Photorhabdus luminescens
MKINDNASSQGVTSSNGVEVGTDNFVSTPTAHEAAIQQPEKTRLTDKVELIVPKQGLDPSRLGNVGQELNNTLDMMSLLFEIAKRMRELGILQRDTENKASIDAQKSQVDEMRHGAKLMIAMAVVSGLMTLGSGLIGSFSSVKNSQAVKQQKTLESNIAGRNKLIESKLQQLGKSSDADRAAIGKVWNVAQDADKSTLKSLTLVFESRNSNQQLLTSVMKSLEGMSNNSVQVEQGLSQAKAKEHEVGSSIAQHEKQKSEDQISLNNNFMKDVLQLLQQLYQNHVQALRAATGVVZ

SEQ ID NO: 2340 - protein, 272 aa, Photorhabdus luminescens
MSNIIDLSVPIDCDFWEPEKVTRGVVDHKEGANKLGESYLYFHTNSWWKRAFVKLFKRKKWIIDHNDFPDGMGLSLMYYRLTTHTGTHIDAPYHYGWHKGQDQPATITDIPLDWFYSHGVLLDFSHDNQSIDKQAVENQLKKINYKIKENDIVLINTGADKLLGEKSYFTHYKAIESSAVQWLVEQGVKIIGTDAFSFDRPFIEMINDYKKTGNKDCLWPSHFIGRDHPYLQIERLCNLTSIPKPYGFKVCCFPIKLEKADASWSRVVAILZ

SEQ ID NO: 2341 - protein, 274 aa, Photorhabdus luminescens
MNKNLQWSPIMKSGFGANISADDFLKVSAEEIKNLLMRQGFVVVNKINLNADEFRDIYSKYGTIVEYADEKIDVGFGYRDTLKLEGEKGKVVTGRGQLPFHADGGLLLSQVDQVFLYAAEIKNMKFRGATTVCDHVLACKEMPKHLLHVLENEIFEVRVLEYGYYVDVSPAGWFQVPVFTDLGWVRKMLIYFPFDEGQPASWEPRIIGFTDEETKRFFAELTEFMKNPRYYYKHYWERGDLIIMDNRRVIHEREEFDDDNIVRRLYRGQTADIZ

SEQ ID NO: 2342 - protein, 399 aa, Photorhabdus luminescens
KLQIMANKKSNNNKVFKDETSLYSRYSISTLFLKFFVTLLLTNKITKKISLWMMRFILNKKNKFFIRFLNGVYFGGESIDEAKANVIFLSKNNIHSILDYAIEGKNDEIFFDNALESTLKLIDLASKESNIPYVAIKPSSLGDIHLYEEKMRGWNFFGEKINSWSRILERYEKIFHYAEIKSVKVMIDAEQSWIQAAVDKIVIDSIIKHNKILPIITLTIQSYKKESIDLLMLLHKIAIDNNIKVGIKIVRGAYLEEEIKNKEKSIGTFFLNKEETDLNYNYLVEYISKRIEYFYPFFATHNENSISIILNKNELKNKSFWIGQLYGIGDHISSKLAYNGIRTCKYLPYGPIDKSLPYLLRRINENAVASDTFVTENRKIMKEIILRLKNTGDKNGCLZ

SEQ ID NO: 2343 - protein, 269 aa, Photorhabdus luminescens
MKDILTNSDHKIKTVQEWREYVKHRGEKYSKTQQHSDNIFTHFLEIENLSDIQSPASVAATNKYTLFAKKSATSNKYPVSVTEGLQTIINLCRVASGYDPLEPEGNGNAQKFTAFTEEIEKVPFLSLLWADTNTITQQSHDTDVLIDSFVEAFQGLSPQDKITIKIYLKKLIHTALSYADQKEKKSNLVQYALTKTPNGVSLLLYSSILIIKKVDNKGTIKFTSHYNLCQAEYNLSQKTWEIVRSVFEKEDKITIEYLIDCMTTKMKAZ

SEQ ID NO: 2344 - protein, 342 aa, Photorhabdus luminescens
MKIFITSEQKIKLERLHDTTRDGQVRDRIKAILLASEGWSSVMIAQALRLHQTTVDRHISDYLNQGKLKSDNGGSDSLLSREQTDFLINHLSQHLFHHTHEIVAYVAQLWNITFSIPGMNKWLHRQGFSYKKPCGVPHKFDAEKQRQFIEYYENLKVTAKDEPILFLDAVHPTQGTKLSYGWMRKGEKKTVKTTGSRTRLNILGALNLNAIGRTVFQEYQTINDYNICCFFNEIRKSYPDYHQKIHLIVDGAGYNKAHLVKEWAYVSNIELHYLPPYSPNLNPIERLWKVMNEQVRNNRYFADKHEFRDNVFKFFTTTLPDIADSLMSRINDHFQVLKTASZ

SEQ ID NO: 2345 - protein, 293 aa, Photorhabdus luminescens
KITGINLLRIKIMENILNNPDYAVKKAQEWIEHIEKGGTRLLKDWERSGNIIMEYPEAGDYSDVQSPANGAATGNYTQLAKDSASPSKNPLSITEGLQTVINMCRAVSGYNPLDPQGQGNKKNFFSFTAELSGVPFLSLLSTSTQNVIQKSHDADVLINSFLENFLGLSSQEREQMKTPLRQLAIAALSYAGRRQTQSNFVQSVLATSPRGGVSFFLYWSEFSIIAYEDDKGLIEFKSHYFLPQAEYNLRYESWVNVRPAFEKAQKVSLEDWIDSMTTRRKQGSNVRALCIEZ

SEQ ID NO: 2346 - protein, 475 aa, Photorhabdus luminescens
LMKRYEQFARQILQHIEDGTWLVGDRLPSLRESVKLSGLSLMTVVQSYQLLESQGWIISRPQSGYYVAKRLQPFAAAKGGKRLHLSESVEISASIFDVLQACKDPAIIPFGLAFPDPSLLIQPKLSKALAAAARRIAPHSALANLPPGNDKLRRNISRRYAMHGIHVPPDEIVITAGAMESLSFSLQSVTEPGDWVVIESPAFYGALQAIERLRLKAVAIKTDPQNGIDLDALEEVIQKYPIKACWLMTHFQNPLGGTMSAESKLRLVNILNSNQVVLIEDDVYGELYFDQQRPVPAKGLDSENNFMHCSSFSKCLAPGFRVGWVAAGKHAKKIQQLQMMSTVSASMPTQLAIADYLAEGGYDNHLRRLRRILEQRQQLMLRAIGDYMPASVKVNRPKGGYFLWLEFEPLFSAQRLYQLALAEGISIAPGSMFCTSEQFNHAFRLNASFDWNQQMERAMQTLGNICHTLLVEIAZ

SEQ ID NO: 2347 - protein, 446 aa, Photorhabdus luminescens
MFGLSALELARIQFAFTVSFHIIFPAITIGLASFLAVLEGLWLKTRNSDYKVLYHFWSKIFAVNFGMGVVSGLVMAYQFGTNWSFFSDFAGSITGPLLTYEVLTAFFLEAGFLGVMLFGWHRVGEKLHFFATFMVALGTLISTFWILASNSWMQTPQGHEIVNNQVVPVDWLAVIFNPSFPYRLAHMSTAAFLASAFFIAASAAWHLLKGNDSTAMKKMLSMSMWMILIIAPLQALIGDAHGLNTLKHQPAKVAAMEGHWENLPGEATPLILFGIPDMAREETRYAVEIPYLASLILTHSIDKQVPALKEFPPEDRPNALMVFWSFRVMVGLGMLMIVAGFWGLWLRYKRRLYQSKAFLRFIFLMAPSGLIAILAGWFTTEIGRQPWVVYGLLRTKDAVSAHGEIHMNISLLLFIAVYSSVFGVGYAYMMKLIRKGPKKELNNGYZ

SEQ ID NO: 2348 - protein, 336 aa, Photorhabdus luminescens
MGIDLPLIWFIIIVFSIMMYIVMDGFDLGIGLLYPTVKSDKDRDLMMNSVAPVWDGNETWLVLGGAGLFGAFPLAYAVILDALTIPVTLMLFGLIFRGVAFEFRFKCAPEHRHIWDNAFISGSVMATFVQGVVVGAFIQGFPVENRAYTGGYFDWFSPFPLFCGFGLIIAYALLGCGWLIMKTEGHLQQEMYRVARPLTFLMLTVIAIISLWTPFIHPAITERWFSLPNLLFFLPVPLLVVWSGWKLLHSIKRKAHYTPFLVALLLVFLGYSGLGISIWPNLIPPTISYEAAAAPQQSLGFMLVGALLIIPVILVYTYWSYYVFRGKVNHEQGYHZ

SEQ ID NO: 2349 - protein, 424 aa, Photorhabdus luminescens
AKVFISIAERNLSLMKTSSNNTIFKNQKLFVINSIINLFLLFILLLIDKPSIPDLILPLLIMLSITNIYFLIKVVHNSAPVKEWQHARYKAEINALKQKNSYLDFLCQSHFKLQNCKLLPEKLQEIFSHLNRLIPFCEAKIIFYPSQQEYFFRNPHQCPYFDMPLIMRWNLDDNIDSYGTLWIKTHRNSDLTPDEKSLVQDVVTLMTNKLLRENQIQCQHQSMLAAERTAISRELHDSIAQSLSFLKIQVNCLYIGSDNLPKQSLTSLNMIKDELNIAYRQLRELLATFRNEQPQCNLQESLQTLISEFNHRLGFNIEFNYRLTHQHIPDSYSKHLIQIIRECLNNCYKHANANWISIRIYPIDDKIITVVSDNGQGINLDSANKNKFGLAIMQDRVSILGGQLQIKNRKHGGTEVEIQFSVDZ

SEQ ID NO: 2350 - protein, 288 aa, Photorhabdus luminescens
PSVNFPEEFYVTNKTIEEKNIYRPAPPRLVQVKNIFDVTPNMRSMTFTGECLDSYPTECEGGHLKIFLPLPGQTKPVLPTLSPEGPIWPPSELRPITRTYSVRAIRTEQKEIDIEFALHHNGGPAVEFAYRAQIGDWMGITNPGGPDPLLPKVSHYYMAGDPSSLPAIAALLATVKPDATGQVIIRIESEQDIQELKKPAGITVHWITGDVEITDTIVSEFKSWSLPTENVTFWLAGEDKLVKELRHYIRREKGYERHQLYAIPYWRHGFDEEGYHALRHEVVDSDDZ

SEQ ID NO: 2351 - protein, 241 aa, Photorhabdus luminescens
LLIMDDISLSSDFSDLWIIKIDDIDLSSIEQLIHRSDIVRHNQICLADRRKKFIFRRAALRYVLNQYLSDYEIITNDNGKPYISTEQDFKYYFSLSASGNYCAIGFSSREIGVDIEVTPSKIKFSEIIERFIKDKELEYIKGIMLKQLSGVSPGFKNYYHLMSLYCWVRLEAYIKLFASTLHEKLLANNSDSVKDMKELEASTLLIHHQQFVCALSQKKVISTPNIKEINYFEIIRNKDEZ

SEQ ID NO: 2352 - protein, 263 aa, Photorhabdus luminescens
MSRQKAVIKSRREAKRMMKRDLRHQCYRDDNVTSLVQPGGVEAIGMARDNRDTSEILPRTETQWRYMRAINYKKLIIASGEAGCGKTFISAAMAADALINKEIDRIIVTRPVLQADEDLGFLPGDMAEKFAPYFRPVYDVLLKRMGASFLQYCLRPEIGKVEIAPFAYMRGRTFENAFVILDEAQNVTVNQMKMFLTRLGENVTVIVNGDISQCDLPVGVVSGLRDALGRFSDDEVVSVIHFNQEDCVRSQLCQKTLLAYCKZ

SEQ ID NO: 2353 - protein, 333 aa, Photorhabdus luminescens
  misc_feature (67)..(67): Xaa can be any naturally occurring amino acid
LKRKVIFWAIHIGCFSLIAPLSSFAAPATFEQAKVELRKRIYHDQFKSGEGTFYCGCDWQWTGKSGXRAILSSCGYQVRSQQNRAERIEWEHIVPAWVFGHQRQCWRNGGRKNCVSSDPVFRAMESDIHNLVPSIGEVNGDRSNFSYGMLPKNMPNNYGRCTSKVDFKSRTFEPRDEVKGQVARINFYMHDRYNLSMSRQQQQLFIAWDRQYPPSKWERERDNRITGIMGHHNPFVTGEQKWQLWHKNSASGIPKSEQIKGQRNSQTDTQKQRVLSDSSSRGLIKGNNNSKIYHFSHCSGYKVIQEKNSVYFKTEIEARNAGFRLAGNCKGTZ

SEQ ID NO: 2354 - protein, 444 aa, Photorhabdus luminescens
IFLIINEHYLIWGRYMSKNDFKAFSTSNNANVVSQERYEESRDLLSGFPPNDVPTHLLNKVLRQSSTIASVVANFIAAQSGDDVLDDGDIAKLTAQLNRALEQKITAKIPSASLTQKGIVQLTNEMGNNDTLAVTQKLVQEIINSLRENINAKVPNSRKINGKALTGDINLTAGDVGAVLANDAMYSMNIDRLDGRENLYNGCAGFKPNAPFLTRYGLPSDRFGVQLRFSNINGPSSEGIDQVWSHRLIFVHGSDTYRTDHINLDYKITRKFWDDINAKPDANGNLKVASPVIEIYPDGTFSTNDESEGAEVIKQGTGIYRISNILGYNADGGWGVNGGISVPRDNNNLELIFVDDQVQSDGSIIIETFHRQHTHLPERFQNWRLKSIDDSGNKIFYQDGEPCDIPDSCRLDIRVQMPEDSLWNLNRKRLQEEMESTSASANKZ

SEQ ID NO: 2355 - protein, 216 aa, Photorhabdus luminescens
YRKGRIIMTQENILDTETAVLGEDGLAIQAGWIKVYHANSYTREFSGSDFEYVAEGVGLSAHSYLDAPNLSDSDDMAVRRSEDGSYWEIVPDHRGKIAYNTQAGVQEEVTVLGELPEILTFEQPSTDFDQWDGEKWVTDFEAQKVSQIEQAEQQRAIFRRQADEAITVLQYAVETEMASEEEKTLLLDWKKYLVLLRRVDVSSAPDINWPEQPQEZ

SEQ ID NO: 2356 - protein, 245 aa, Photorhabdus luminescens
IKEEYMSQKNDFKAFSISDNANIVSQEKYEESQNLKTGFPPENVSTHVLNKVLRQSSTISSVVANFIATQSGEDVLDDGDIAKLTVRFNRALDKALEQKISGISSIPVGSPIPWPLSHPPSGYFTCNGSAFSRSQYPKLAEAYPDGRIPDLRGEFIRGWDDGRGVDSGRVILSAQTDNTKRIQLTKGLPDGQFLSSYQGPVDRYQFPLGRDVLESATVTSIANNTGGHETRPRNIAFNYIVKAEZ

SEQ ID NO: 2357 - protein, 232 aa, Photorhabdus luminescens
MLRKLAAELLGTFVLVFGGCGSVVFAAAFPELGIGFVGVSLAFGLTVLTMIYAVGHISGGHFNPAVTIGLWAGGRFRAVEVIPYIISQVIGGILAAAVLYVIASGQVGFDATTSGFASNGFGEHSPGGFSLQSAIVAEIVLTAIFLIVIIGATDRRAPPGFAPLAIGLALVLINLISIPITNTSVNPARSTAVAIFQNTWALEQLWFFWVMPIIGGIVGGGIYRLLFAEKQZ

SEQ ID NO: 2358 - protein, 222 aa, Photorhabdus luminescens
LINVLLVDDHELIRVGVKRILDDVKGITVVGEANCGEDAIKWCRANKVDIVLMDMNMPGIGGLEATKRILRYCPDVRVIMLTIYTENPLPMKVMQAGARGYLSKASTPQDMVNAIRAVNAGQRYIAPDIAQQMALSQISPQQDNPLSCLSDRELQIMLMITKGQKVSDISEQLNLSPKTVNSYRYRMFSKLNINGDVELTHMAIRYGLFDTESLLNSDGTIZ

SEQ ID NO: 2359 - protein, 611 aa, Photorhabdus luminescens
VTEQFDSKTFLKTVTSQPGVYRMYDTSGTVIYVGKAKDLKKRLASYFRAQVTSRKTESLVKNIVQIDVTVTHTETEALLLEHNYIKLYQPRYNVLLRDDKSYPYIFLSADKHPRLAMYRGAKHFKGEYFGPFPNTHAVRESLILLQKLFPIRQCEDSVYRNRSRPCLQYQIGRCLGPCVKGLVSEDEYQQQVDYIRLFLSGKDQQVLTRLIERMEQASQQLKFEDAARYRDQIQAVRQVTERQFVSGTDDDLDVISVAFDAGMACLHVLFIRQGKVLGSRSYYPKIPTGTTLDEIVQTFLGQFYLQGSQNRTLPSEILLDFTLPEKDILSDSLSEISGRKIHIQTRPRGDKARYLKLARTNATIALSTRLSQQSTIHQRLDSLTKLVKLAKIQRMECFDISHTMGEQTVASCVVFDSNGPLRSEYRRYNISGITPGDDYAAMNQVLRRRYGKALDESKIPDIIFIDGGKGQLAQAIDVFQSLDVEWDKTRPQLIGVAKGSDRKAGLETLFFATEDKSIALPPDSPALHVIQHIRDESHNHAITGHRQRRSKVRNTSTLESIEGVGPKRRQMLLKYMGGLQPLRNASVEEIAKVPTISYALAEKIYNALKHZ

SEQ ID NO: 2360 - protein, 258 aa, Photorhabdus luminescens
CYLIQGGHMSPKNDFKALSVINNKNIVSQEKYKISSDLQTEFPSNDVHSHLLNKALDQSSTISAVIANFIAEQSGEDVLDNGDITKLTAQLNKALEQKISDTSNIPVGIPVPWPTAVPPAGWLQCNGAVFDKSKFPKLAEAYPDGNLPDLRGEFIRGWDDRRGIDSGRRILTHQGDAIRNIQGSFAGMIALNYHLATRGAFYASQVLGIATDGSFKSINISDTDTPYGFGFEASRVVPVASENRPRNIAFNYIVRAAZ

SEQ ID NO: 2361 - protein, 504 aa, Photorhabdus luminescens
KILFCLRSKDMSQKNDFKAFSISDNANVISQEKYEENQNLQTGFPQDGITTDMLNKALRQSSTISSVVANFIATQSGNDVLDDGNIEKLTSQLNRALEQKMTIKVPDASLTQKGIVQLTNVVGNSNTLAVTQKLAQEIINSLREEINIPVGSPIPWPLPYPPVNYLVCNGAFFNKLQYPKLAEAYPDGRLPDLRGEFIRGWDSGRNVDPSRSILSWQEGAYLVQNVDRANNFMITLSRNEFAKLQWDIPQNKNTSVKAVYYKAQADWIANSAFIGVSRPRNIAFNYIVRAAACSIMTEQKYALEHETAVLGEDGLAIQPGWIKVYHTNQITREFINAGIEYVMLGVSLSAHSYLDAPDFPDSDDVAVCRSEDGKCWEIVPDYRGKIAYDTLTLTQQKITELGELPETLTFKQPTTGFDKWDGTKWVTDNVALKANQIEQAEQQRVTLLRHASESIALLQDAVDLNIATEVEKSALLTWRKYRVMLNRVNISLSPDIEWPEQPRZ

SEQ ID NO: 2362 - protein, 259 aa, Photorhabdus luminescens
MKYAFITGATGDIGFAITERLSDDGFEPILLSRTPERLDSAIDKLRNKYGSQFAKKIVCDVSNHENVKKAFDQLELEDNKLAVLVNCAGISGGGITAEISPRTWQNVINVNLNGTYFVIYEVLKRKLMSSGGRIINIASTGGKQGVIHGTPYSASKHGVVGLTKSLGLELARNGSGVTVNAVCPGFVESEMAERVREHYAKIWGTDIAEAKRRVEERVPIGRYVEPNEVAEMVAYLASPLAGAVTAQALNVCGGLGNYZ

SEQ ID NO: 2363 - protein, 306 aa, Photorhabdus luminescens
MSYKNDFKAFSTSDNANVISQDKYEVNQSLQTGFSPDNVPTHLLNKVLRQASAVSSAVTDFIATRSGNDVLDDGNIAKLTAQLNKALEQKMTTDIPSASLTQKGVVQLTNVVGNSDTLAVTQKLVQEVINSLREYTREEIDNRMKTANEIPVGSPIPWPLPHPPFGYFTCNGSAFNKLQYPKLAEAYPDGRLPDLRGEFIRGWDDGRGIDSGRGILTHQGDAIRNIVGSFPGAIALHFELAAKGVFYGNATFGVATDGNPKSVDHFTRDAVYTTYGFGFDTSRVVPVASENRPRNIAFNYIVRAAZ

SEQ ID NO: 2364 - protein, 305 aa, Photorhabdus luminescens
HNMFLKYKYLLKLGMLCKQNITKSIYRNVSSKKMKHNMNFWPHIKISRNINGKIDAVSFNKKSININEFPKKSEKPLIIIASGPSVSTIKTDFFDDTKFDIMGVNGSYELSPEVKFKYHVIIDRTFILNRKNIVLNILKDNELILFTTMDCLNDILIHYGYLELKCKVIIIENIDQPVYQQEKELFEIKSDEIIIQNSVAFSLNLNLGFYNGTTVAYSALQIAFFLGYKEIYFAGLDMNNFSKPRFYETQNDKLDTKLNNNLHDFIIPCFNLAHEIAIRKGVKIYNLSKNSAINSFEKLDYRKIZ

SEQ ID NO: 2365 - protein, 228 aa, Photorhabdus luminescens
ALIMKKINGTYISSQIINTMEASNEPWGIKDKNSRFIYGNPALKSIQNIPTSFDYEGLFDDELPWGGAAFAKEFIDHDKIVMTKGKRICSLETYTYGKENILSSYFQEKLPLYNDAKECIGILFHGWKAKDFSLINLYQYYNVLPTSIIFQPPTDTFTQREWDIIFFFLQKYTRKQIGKILNISYRTIESHMANIYHKIGVDSNQQLEEYCLINNFKRYVPEKFLLFZ

SEQ ID NO: 2366 - protein, 209 aa, Photorhabdus luminescens
LAVSNEPWGIKDKNSCFIYGNLALKSLQNFSNSFEFEGAYENELPWDSAKFAEQFINHDKKVMEKQQRICSIETHIFGREQILSSYFFEKSPFYHKDGDCIGVIYHGWKAKNYSLAYLHQYHDKLPASIMLQPPTDLFTHREWDIIFLFLQKNTRKQIGRILNLAYRTIEYYMTRIYRKIGINSSQQLEAYCRANNFNYYIPEKFLLSZ

SEQ ID NO: 2367 - protein, 224 aa, Photorhabdus luminescens
QTCQITTEIIIQESLMQHIKNRPNNITPQLIHMWENSDEPWGAKDLQSRFIYANSAFYQLHNLPDDFEITGLTTGELPSPIAEYEKEFHRQDQKVLQTMQRVSSLETHPFEEHKIKQIYLCNKYPLCDEDGNCIGLTFHMCKTKNFSTAYYYDKTPPATLEFIAPNDKLTQTEWEVLFLTLRSLDEEKIGEALMISAEDVVNHIQSIYPKIQFIITRRIKRFLZ

SEQ ID NO: 2368 - protein, 237 aa, Photorhabdus luminescens
ANFKARKRNDTMSNKIISSQIINTMKQCNDPWGIKDKNSCFIYANQSFKTLQNLSNSFDYEGVFDDEIPWDGAEFAKEFITHDKTVMTKEQRVCSLETHVYGKNQILSSYFFEKLPIYHEDGSCMGILFHGWQAQDFSFTRLFYGKLPASIMFQPPTDLFTQREWDVIFLMLHKYTSKQIGRMLNISYRTVETHISRIYKRIGLHSTRQLEDYCRTNDYDLYVPERFVHPESRMFPZ

SEQ ID NO: 2369 - protein, 786 aa, Photorhabdus luminescens
ILTHFTGVEAMTRVPDTDLARLKQTVSLLGLARKQGRPMKKRGEDYVLRCPFHNEKTPSMVISPAKNLYHCFGCGAAGSVLDWVIQTEGVTLKIAIRRLRELAGLPDMDNAVVAASSLAALPESQAAPLPRPKLADLDDDGQALLHQVIDFYHQHLLASPEAKAWLARRGLNHPELVNHFKLGYAGHHGIGGSAGLLPSKSSQEGQHLRDKLSGLGVLRTTTRQDHFRGCVVVPVIGWAESASVASRGRVLQLYGRRTQPDYKVLKDSPKHLYLPSPLAGVWNEAAMKAAAEIILCEALIDAMTFWCAGFRNVIAAFGVNGFNREHLDALQYHGVKRVLIAFDRDEAGDRGVANVAADLLEAGIEAWRVQFPPGMDANDYAVKSGNAEHALGLALQQAVWLGQGTAPGAVFSHERPVSPGVTEKPHNADVAKPAALAAPPELTVAPVPCERTACGELLMKSGPRIWRIRGMKKSPVPDVMKVNVQVRDETSGLFHVDTLDMYHARHRQNYISTAAQELECELSVIKREAGRVLLMLEQQQDAQQQADAEASGTTAVTVSAEDEAAALALLTSPNLTEQIINDMAACGVVGESTNLLTGYLAAVSRKLDKPLAVLIQSSSAAGKSSLMDAVLNLMPEEERIQYSAMTGQSLYYLGETSLQHKILAIAEEEGVRQAAYALKLLQSDGELKIASTGKNEQSGELVTREYRVQGPVMLMLTTTAIDVDEELLNRCLVLTVNESREQTQAIHAMQRHRQTLAGLLADSEKGYLTQLHQNAQRLLRPLKVVN

SEQ ID NO: 2370 - protein, 317 aa, Photorhabdus luminescens
GHWENRCLAVNFAMEWVVIENNYLSVNELDSFAHQARTCEGESCKQVIKDMVDTNIRNQQEMMDFCNSNPTQCAQKYGYLVDQWPVFERTLKNMDRDGTLPVEFRNYLSAVNTLGQAATGKVGELGWTKRFEAMGMSKETAAAMAMTLPIVMEGAKGPKSSPTTKGSTGAAVNTEKTALEKIGKNSQGTTNLGDKSDNTVYHQQLIKNAEKISTAKPGQQVAAPRDLNEQTFWKQVESNPSQGSKLLGMNKDPRFPTAAGFQKMEAKHRLPNGQTITIHYQYNSNTGKAYDMKITTPQRIQQDPKKVIDSIKDNVKZ

SEQ ID NO: 2371 - protein, 268 aa, Photorhabdus luminescens
RIHRRQVISELNRQCAIPVHIFEGTFKHRPLINQITILLCTLGRVAVAEIHHFLLIADISVYHILDHLFAAFAFTGAGLMRKTVQLIHAQIVILNNNPFHCEVDRQTPIFPMPSASYHPFFPMGVHRRTQNPLTRFSPPKAGFSRRTLVSVAPSSATGERRPTRLGGGCPFCGRGRHRARKRRPCDALRHCGFGLRMTLHDHAVLFCSGKPPGAARGGDGEHGNEQGACDCEPGAASAAGLGRGEVNERRPQADLPSGLLAGRWHGSZ

SEQ ID NO: 2372 - protein, 445 aa, Photorhabdus luminescens
RMTLLRARRSGRGQRVFSRVQVGPRSVHSRTDKIRAGPERKRLTDIKRKRPHRPLPQPPIPNPKRRLIMANRKPRKGSLLTVNDVYRQPVGPAHDPKSLYALLLRFVAWRQERNWSETTLKVQTHHTYHFILWATDRGLYYAADITRPILERYQRYLYQYRKTNGEPLSIRTQRTQLQPLQVWFKWLTKQNLILANPAADIELPREEKRLPRYILSIDEIEHILSLPDPNTLQGARDRALMELLWSTGIRRSEAARLDIYSIDGSRKTVTIRQGKGNKDRVLPLGERALNWLQFYQQQVRPQLLVTPDIQSLFVAMDGLDGLQPNGITNAVSGYIRAAGIEKKGACHLFRHAMATQMLENGADLRWIQAMLGHASVESTQVYTQVSIRALQAVHASTHPAEQMADEKVRDADEVGLLADLYADDNADTDTPPDSSEPTSTADSRZ

SEQ ID NO: 2373 - protein, 468 aa, Photorhabdus luminescens
NSLIRITVMTTISSGNTIHTGDDPRALPEFSALKEEIGKLNHPARPDVNWARVEQLCLSLFRLNGVELQSAAWYTLARAQRTGLAGIDEGFALIDGLVSHQWAQFWPQPTHARIEIFAWLVARLQQVLRTCVFSYIDLPLIYRVEKVLEQLCEVLQRLELKHVSKLDSLRVQLHNSARRLECLEQEKGAVPVSLASAQSVGGNAILLPEEPPPPQLIYVVQETISSVQPQVKVAQVLTTSRWKVWRGFVAGIVFCALVVTGGWLVDKMRQPSPLAEALLATTYPLPQTLLPAQLAELHQSDNATLLSQLQDKTLDASRAQLTNLTTLPAFWPLSYGSQLLQQLRTLWPASQAVQDMQNQWLHQREAAALPMQSLENYHLAQLRLQHLTERLDALDEKRGRYLTGSELKSMVFGIRQPLANTPPLEELLRQLAEQKKSGTVSLALLMQINTRFNQLLNRYYLLLKVGEZ

SEQ ID NO: 2374 - protein, 433 aa, Photorhabdus luminescens
VRQAAYALKLLQSDGELKIASTGKNEQSGELVTREYKVQGPVMLMLTTTAIDVDEELLNRCLVLTVNESREQTQAIHAMQRHRQTLAGLLADSEKGYLTQLHQNAQSLLRPLKVVNPYAHQLTFLSDKTRMRRDHMKYLTLIQAIALLHQYQREVKKTTHRGQVIEYIEVTQDDIALANRLAHEVLGRTLDEMPPQTRKLLLLIQDWVRETAGQQAVRVDELHFTRRDIRTALHWGDTQLKVHLARLLEMEYLLLHRRGLTYEYTLLWDGEDTGQPHLCGLLEMTESRSETAGNVFQSGSEDVQSGTGRGRVGSQSVNQNPASRQATSDLSAEVAGVKQKAVIKTEKKPASIPLPEETEMTNDAVAGKAFRSGSEGVQSGTGRPQVGTQPDRQNPGGAGKKTVNRHKTQKAPPPAASAAHPQSETEVNHGKPZ

SEQ ID NO: 2375 - protein, 369 aa, Photorhabdus luminescens
MKKIAIAVAVAVAAFTTATQAAPKDNTWYTGGKLGWSQYHDVNFYGNGYTSAIGNGPTHKNQLGAGAFLGYQANPYLGFEIGYDWLGRMPYKGSVNNGAFKAHGFQMATKLSYPIMDDLDIYTRLGGMVWRADSKATYSATNTHLKNHDTGVSPLAAIGVEYAITKDWATRLDYQWVNNIGDAGSVGARPDNGLLSVGVSYRFGQDEAAAPIVAPAPVVAPTPAPAPVVENKRFTLRSDVLFEFASSELKAEGKHNLDQLYTELANIDPNQGKVLVLGYTDRIGKDVYNQKLSQKRAQSVVDYLVSKGIPSGSISAEGHGKANPVTGSTCDKVHKPNLINCLAPDRRVEIEIQGTKEVVTQAQSQSAQZ

SEQ ID NO: 2376 - protein, 577 aa, Photorhabdus luminescens
LTTNKLDWQALLPNCVPYDALFHSASQQASASMEAVQSRLHSGLQLFCRMDSRQPFMLLKAEECDIYLSALAESIRPLLTKELPQIGGNYHIQQQKISWQPSTAGHFTPELRVAYREWIEAEQLFGRFHSHNGEIHLQPGLIHQVNGGVLILPLRTLLSQPLMWVRLKQMIIQQRFEWLSPDSNKPLPLPIPSMPLKLRLILVGDRLSLEEFQATEPELAKSALYGEFELDMPFHNEQDLSLWCNYINGLIQQWQLPPLHHNAWPELVQQATRHVEDQHHLPLDMLWLQRQLTTAALYQQENQITAQSIKQAEENRRWRHNYLPERGLEEIHKGQILIHTQGMVIGQINGLSVLEYPGHPDPVGEPSRITCVAHMGDGEFVDVERKVELGGNIHAKGMMIMQAFLISELKLDQPQPFSASIVFEQSYGEVDGDSASLAELCALISALSLQPIDQQLAVTGAVDQFGYVQPIGGINEKIEGFFEVCHRRGLTGQQGVILPAANIHHLCLNQPIVDAVKAQKFHLWSVKHVSEALPLLTGIPYYDQQETHLLAMIQDRITQANNQERPKFPWFLRWLGZ

SEQ ID NO: 2377 - protein, 550 aa, Photorhabdus luminescens
VTDKVEDQSQAKIDKIKSWSPVWIVPIVTVLIGAWILFYHFNHQGPEVMLITSNAEGIEAGKTKIKSRSVDVGVVERVMLSDNLSQVIIKARLNDGMENLLRSDSAFWVVKPQIGRDGVSGLGTLLSGAFIELQPGTNGDEEDKFNLLDSPPLASPDAKGIRVILISDKAGQLNPGDPVLFRGYRVGSVETSEFEPKSHLMRYQLFINAPYDGLLTSNVRFWKESGITFDMSSQGVRVEMASLSTLFGGGVSFDVPKGWELGEPIKEKAIYKLFDNQRSIQDSLYTEHKDYLLLFSDSVRGLQPGAPVEFRGIRMGTVAKVPFYSEGMRQRLDNDFRIPVLISIEPERFEKELGEGFDVEKELNSITKRGLRASLKSGNLLTGALFIDLDFYPNEKGWAGPYEIAGYPLLPTISGGLAQIQHKVIAALDKINNMPVEPMFNQAIRTLEESQKAIRKAQQTLDELNKVLANPETKDLPKDIQKTLQEFSRSMQGFQPGSPAYNKMLDNMQRLDQVLSELRPVLRTLNNKSNALVFESKPIEDPEPKKAKKZ

SEQ ID NO: 2378 - protein, 416 aa, Photorhabdus luminescens
LCSANHHHEMVLCPQCDLLVTLPEWVQGTKAICPRCKTTLVTWWKEPKHQPTGYAVSALFMLLMACLFPFISMSVAGISSEITLSQIPQVMFNENYVSVGTFFLLCVQLVPAFCMVAIILLCQSVVISQKIKVWLARMLFQMKSWCMVEIFLAGVLVSFVKLMAYGDIGLGLSFLPYCLFCLLQVRAFQCLDRHWLWNQITLAPKVNIPLQAGRSGLVQGVRLCQCCTAILPADQLVCSRCYTRGHARRRNSLQWTMALIVTALMLYIPANIMPMMVTESLGNQSDSTIMAGVILLWSVGSYPVALVIFIASIMVPSLKMLAIGWLCWDTKGHGKRDSSRMHFIYEVVEFVGRWSMIDVFVIAILSSLVRMGKLMSVYPAMGAVIFALVVILTMFAAMTFDPRLIWDRANVKHSLZ

SEQ ID NO: 2379 - protein, 637 aa, Photorhabdus luminescens
MSLINLSGAWLSFSDAPLLDNAELHIEENERVCLVGRNGAGKSTLLRVLAKEQPLDDGQVIYQQDLVVARLQQDPPRNVEGTVFDFVAEGVQEQAEYIKSFHLVSRLVEQEPNEKNLNRLAELQEVLDIRGLWSLDSRINDVLKQLSLPAEAKLSSLSGGWLRKAALGRALVSSPKILLLDEPTNHLDIDTIEWLENFLKDFQGSLVFISHDRSFIHNMATRIVDLDRGKLVSWPGNYDKFLESKEDALRVEEMQNAEFDRKLAQEEVWIRQGIKARRTRNEGRVRALKALRIERLQRREVMGTAKMQMGEASRSGKIVFELENVNYQIGERKLVNNFSAQIQRGDKIALVGPNGCGKTTLLKLMLGELQSDSGRVHCGTKLEIAYFDQHRIALDPERTVVDNLAEGKQEVMVNGRPRHVLGYLQDFLFHPKRAMTPVKALSGGERNRLLLARLFLKPSNLLVLDEPTNDLDVETLELLEELVENYTGTVLLVSHDRQFVDNSVTECWIFEGNGAINNYVGGYYDAQQQREQVVSLRQKNAKKLQTEVKVEKIQEPPKNSRNKMSYHLLRELEQLPSLLEKLEEELDQLQSQVSAPEFFNQPHVITQKILTELSQKEQVLEAAFDRWQELETLKNSZ

SEQ ID NO: 2380 - protein, 711 aa, Photorhabdus luminescens
LVICHMNSLFASTARGLEELLKNELEMLGAQSCKIVQGGVHFQGDGRVMYKSLMWSRLASRILLPLNEFNVYSDLDLYLGVQSIDWSQVFSVHSTFSVHFSGTNEEIRNTQYGALKVKDAIVDSFTRKLDQRPNVAKQQPDVRINVFLNKEKASVALDLSGDGLHIRGYRDLAGQAPLKENLAAAIVQRSGWQIGTPMVDPMCGSGTLLIEAAMMAADRAPGLHRDHWGFTAWLKHDEAIWREVITEAQIRFRKGLQETTCRFVGSDIDRRVLDMARSNARRAGVAQLITFQQGDASRLENPLPEGPAGTVLSNPPYGERLESEPALIALHSLFGRIMKSRFPSWRLSLFSASPELLSCLQLRAEREFKAKNGPLDCVQKNYLLSDKPHSSEVNVAEDYANRLRKNEKKLAHWAKQQGIDCYRLYDADLPEYNVAVDRYADKVVIQEYAPPKSVDANKARQRLFDVISATMQVLGLSSNQLVLKTRQRQKGKSQYERMAEKQEFFLVNEYDAKFWVNLTDYLDTGLFLDHRIARKMLGEMSEGKDFLNLFAYTGAATVHAGLGGARSTTTVDMSRTYLEWAERNLQANELTGRQHRLIQADCLAWLARANEQFDLIFIDPPTFSNSKRMEDTFDVQRDHIMLMRQLKRLLRRGGTLMFSNNKRGFKMDFAELEKVGLVAEEITSKTQSQDFARNRQIHNCWLLRHAGEEKZ

SEQ ID NO: 2381 - protein, 372 aa, Photorhabdus luminescens
MITLSRLYTHPVKSMRGLQLSHALVSESGLIFDRNFMVTTTDGTFITARKYPQMLLFTPAMLNNGIYLRAPNGENATVLYRDFLPEQQPTEVWGNHFTALIAPETVNQWLSSFFDIPVQLRWLSHELTRRVKKHPEIPLSFADGYPFLLINEVSFHLLQQRCPASIKLEQFRPNIVITGAEAFAEDSWQSIQIGDVIFDLPKPCSRCILTTVSIDKGIKNPNGEPLTTLQSFRTAENGDIDFGQNLIARSSGIIRIGDNVTVLAKKDPRQYGSSEKAENIDVPKTNEQSVIIEYNRQTFTGNNQQTILEQLEQQGIRVPYSCRAGICGCCKIALIKGDVFPLKATAIKENGHILACCCIPKNNLILNNMTRZ

SEQ ID NO: 2382 - protein, 338 aa, Photorhabdus luminescens
VMARIIIAALATPGHVYPMLKIAQSLIAQGHQVTVFTGALFRQQVEALNAQFVPFDEQVDFDYRHLEQHFPDRAQLPPGNVQMALAFKNFFSAPIPFLDHQLRQIIREQQAELLIAENCFYGILPLLQEEKTHRLPVIVIGITPLAYSSKDSIFWGPRIPPAVLPPELTHEQLVDKADQQLIAEVQDSFNNSLVQSGGSALTRLFNDEVIFGADRFLQLSTLAFEYPREGLPDTVHFIGPLPNPVPTTTSPQLWEEDDPRPLVIVTQGTISNADLNQLIFPTLRALATLPVRILATTGGRSVETLSKDLPENARVEEFISFEHWLPKASLLISNGGYZ

SEQ ID NO: 2383 - protein, 295 aa, Photorhabdus luminescens; identical to SEQ ID NO: 1209

SEQ ID NO: 2384 - protein, 373 aa, Photorhabdus luminescens
PIDTDPSTFWEMFAMARKSQSAYSRLMQQLAPNIYDFNFYRFCQLLESMRDGCPPLGSTMSPGDDPIRFRPDPGMGFPAGELKNVEWDEQQPEQPPTVRTTFLGLYGVDSPLPTAYLNDIVQLSEGYEGVADFLDIFNHRMMTQYYRIWRKYSYPATYEPSGQDQTSQCLLGLIGLGIAGSQQHIATPASRFLALLSIMRLPTRIAEGVMALVKLLAPLTQVQVVPHDCRRVRLTQPARLTRHHPVQLSQRPVLGKVGTDVNSQMVLDLYTEDTDEAQGWLPQGELHTDLLVLLRVYLGWRCSVRLQLTLPKWVLPSAQLGKQRVRLGRTGILGLKPGSQTVSGMVKINLGHYQGLLPSYQYREAENGSYQCZ

SEQ ID NO: 2385 - protein, 432 aa, Photorhabdus luminescens
MARIVIAAVATPGHVYPMLKVTQSLITQGHQVTVFTGALFRQQVEALNAQFIPFDEQIDFDYRHLKQRFPDRAHLPPGNLQMALAFKDFFCSPIPFLDRQLQQIIHEQQAELLIAENCFYGILPLLQKEKAHRLPVIIIGITPLAYSSKDSIFWGPRIPPALLPSELTHEQLVDEETRQLITEVQDSFNDALAQSGCTTLTRFFNDEVILGSDRFLQLSTLAFEYPREELPDTVHFIGPLPNPAPITESPQLWEEDDPRPLVIVTQGTMSNTDLNQLIFPTLRALAKLPVRVLATTGGSSIEIQPENIPDNARIEEFISFEHWLPKASLLISNGGYGTINYALNHGTPVLIADTGEGKQETAFRVVWAGCGINLDTAQPTESQLKQTVENMLRTNLFKQRAQIVQDDYSSHDALAAISHHAEQLIFENRANZ

SEQ ID NO: 2386 - protein, 337 aa, Photorhabdus luminescens
MCYPLARKALFQLDPEHAHELTFRQLKRITGTPFEFFIRQSIATKPVTCMGLSFKNPLGLAAGLDKDGDCIDAFGAMGFGFIEIGTVTPRAQAGNDKPRLFRIVEAEGLINRMGFNNLGVDNLVENVKKAKYGGVIGINIGKNKDTPVEHGKDDYLICMDKIYPHAGYITINISSPNTPGLRTLQYGEALDDLLSAIKNKQGELQQKYQKYVPVAVKIAPDLSEEELIQIADSLIRHNIDGAIATNTTLDKRLVEGLNYCQQAGGLSGRPVQLRSTEVIRQLSQELRDKIPIIGVGGIDSLTAAREKIAAGASLIQIFSGFIYHGPKLIKDIVNHIZ

SEQ ID NO: 2387 - protein, 871 aa, Photorhabdus luminescens
MTQQRQAKYRRDYRAPDYTISDIELDVNLDADNTEITAISQIKRLSHEITPLVLDGEDLTLKSLHVNGQPWVHYHEQERALIIEQLPVQFTLKIVNEIHPSKNTALEGLYVSGDALCTQCEAEGFRHITYYLDRPDILARFTTRITADRAKYPYLLSNGNRVEQGETDDGRHWVKWQDPFPKPCYLFALVAGDFDVLRDTFTTRSGREVALELFVDRGNLDRADWAMTSLKNAMKWDESRFGLEYDLDIYMIVAVDFFNMGAMENKGLNVFNSKYVLAKSETATDKDYLNIEAVIGHEYFHNWTGNRITCRDWFQLSLKEGLTVFRDQEFSSDLGFRSVNRINNVRVMRSAQFAEDASPMAHPIRPDKVIEMNNFYTLTVYEKGAEVIRMIHTLLGEEQFQAGMQLYIHRHDGSAATCDDFVQAMEDASNVDLSLFRRWYSQSGTPVLTVRDEYDAEKQQYKLHVSQMTPSTADQKEKQPLHIPLDIELYDSKGHVVPLRYDGQPVHNVLNVTNAEQTFVFDDVPSLPVPSLLREFSAPVKLDYTFSDQQLAFLMKHARNAFSRWDAAQSLMANYIKLNIIRYQQKQPIELPMHVVDAFRAVLLDKEIDPALAAHILALPSESEIAELFTIIDPKAIHEVLDTITRTLAQEMADEFAVVYNAINIGAYRVAHQDIAQRSLRNICLYYLAFGHQEQADKVVSNQYHQSDNMTDALAALSGAVLAELPCCDQLMAEFDGRWHQDGLVMDKWFSLQASSPAVDVLANVRHLLNHRSFSMSNPNRVRALIGAFVNNPVAFHVEDGSGYQFLVEILTDLNSRNPQVASRLIEPLIRLKRYDEKRQNMMRSALEQLKALENLSGDLFEKITKALESZ

SEQ ID NO: 2388 - protein, 405 aa, Photorhabdus luminescens
MTLDATPIIKSLLDTDAYKLHMQQAVYHRYSHMPVVAEFRCRGDELLGEYATELRHQVNMMADLALTDAEFNYLSSLPFFKADYLDWLKTFRFNPQQVNISVTNGGQLAIHISGLWYEVIMWEVPLLALISELIHRHHSPDNTVENAVNQLRKLIKLFYQHAENEGIDLSSFKLMDFGTRRRFSHRVQHAVVSELQQHFPYLIGTSNYQLAQQLGLPPVGTQAHEWFQAHQQISPDLASSQREALQSWLKEYPNQLGIALTDCITMDAFLRDFDAQFAKNYQGLRHDSGDPVQWGEKAIAHYQKLGIDPMTKTLVFSDSLDFQKALALYRHFHNRINLIFGIGTQLTCNIPGVKPLNIVIKLVECNGKPVAKLSDSPGKTICEDNEFVNRLRAAFDIPQVKQACZ

SEQ ID NO: 2389 - protein, 467 aa, Photorhabdus luminescens
MSVAPVVDVLQGRVAVDSEVTVRGWIRTRRDSKAGISFLAVYDGSCFNPLQAVVNNNLPNYQDEVLHLTTGCSVEVTGTVVASLGQGQNFELQATKIVVIGLVEDPDTYPMAAKRHSIEYLREVAHLRPRTNLIGAVARMRHTLAQALHRFFHENGYFWVSTPLITAADTEGAGEMFRVSTLDLQNLPLTDKGEVDFNQDFFGREAFLTVSGQLNGEAYACALSKVYTFGPTFRAENSNTSRHLAEFWMLEPEIAFANLNDAATLAENMLKYVFKAALAERADDLQFFAERVDKDVITRLEKFINSDFAQIDYTSAIEILQNCGQKFENPVFWGVDLSSEHERYLAEKHFQAPVVVKNYPKDIKAFYMRMNDDGKTVAALDVLAPGIGEIIGGSQREERLDMLDKRLEEMGLNKEDYWWYRDLRRYGTVPHSGFGLGFERLVAYVTGVPNVRDVIPFPRTPRSANFZ

SEQ ID NO: 2390 - protein, 382 aa, Photorhabdus luminescens
  misc_feature (224)..(224): Xaa can be any naturally occurring amino acid
MKGSIFSAVIPVLLTAGVANAAEIYNKNGNKLDFYGKVDVRHQFAKITQKSDIYPIYSEDGDASYVRLGFRGETQINNQLTGYGRWEYNIQANQVEANDSEGNQTRLGFAGLKLAKYGSLDYGRNYGVLYDVNAWTDVLPVFGADSMSQADTYMTNRATGVLTYRNTDFFGLVDGLNFALQYQGKNDEDSKNSRNSHSKYGSRSKPNGGSNGDGFGLSVTYDIXNGISVGGAYSNADRPITHERLVTSVARGEKAEAWNVGAKYDANNLYLAAMYGETHNMTSFGYQDIVSAKTRNIELTAQYQLDSGLRPSLAYVQSRGTTFFTHQDWVKYISIGSYYNFNKNLSAYVDYKINLVHDTPFTKYLDVNTNNAVGIGLVYQFZ

SEQ ID NO: 2391 - protein, 484 aa, Photorhabdus luminescens
MHFRAITRIVGLLVILFSVTMIIPGLVALIYRDGAGRAFSQTFIFALIIGLMLWIPNREQKHELKPREGFLIVALFWTVLGSVGALPFIFSEQPNLSITDAFFESFSGLTTTGATTLIGLDSLPKAILFYRQMLQWLGGMGIIVLAVAILPLLGVGGMQLYRAEMPGPLKDNKMRPRIAETAKTLWLIYVLLTIACALALWAAGMSVFDAISHSFSTIAIGGFSTHDASIGYFNSPAINTIIAIFLLISGCNFGLHFAVLTGRSLTVYWRDPEFRMFISIQLVLVIICTLILWHHAVYKSGIETLNQAFFQVVSMATTAGFSTDSFARWPSFLPILLLCSAFIGGCAGSTGGGLKVIRILLLFLQGSRELKRLVHPNAVYTLKLGRRALPERIIEAVWGFFSAYALVFIISLLLLIATGVDELSAFSAIAATLNNLGPGLGVVADNFTAMNPAAKWILVITMLFGRLEVFTLLVLFTPTFWREZ

SEQ ID NO: 2392 - protein, 204 aa, Photorhabdus luminescens
MKPYLIPAASVSFTEEIKKSRFITLLEHTDGVDEAKAFIQQIKAQYPDARHHCWAFVAGAPDDSQQLGFSDDGEPSGTAGKPILSQLMGNNIGEITVVVVRYFGGIKLGTGGLVRAYGSGAQQALKLLETKYKVPQKLCSLQCEYAHISMIEQLLQKSSGQIISSEYAENVTLRISLPATLVGEVGDKLRDLSRGVLYLTPDLZ

SEQ ID NO: 2393 - protein, 445 aa, Photorhabdus luminescens
MEKLASLYHEHISTLQQRTCEALARNQFDALLIHSGELQHIFLDDRDYPFKVNACFKAWVPVTKVPNCWLWVDGINKPKLWFYSPVDYWHSVEPLPTSYWTKEVEMIHLANAGDINSALSTYVKQNVAYIGCSPQRAKEIGFSERNINPKSVLDYLHFHRSYKTDYELVCMREAQKTAIVGHLAAYEAFQAGMSEFDINISYLMATGHRDTDVPYNNIIAMNENAAVLHYTALQHNAPSDIRSFLIDAGAEYNGYAADITRTYSAKSNNEFASLIKDMDAEQKALISTIKVGTRYTEYHIQMHHRIAKLLKKYGIVKDVSEEVMVEEGLTTPFFPHGIGHPLGLQVHDVAGFMQDDTGTHLAAPDMYPYLRCTRILEPRMVLTIEPGLYFIESLLAPWRESEFSKHFDWNKIGTLKLFGGIRIEDNIVIHENKVENMTRDLQLPZ

SEQ ID NO: 2394 - protein, 729 aa, Photorhabdus luminescens
MLYQSETIQVSWLKDGIAELVFNAPAAINKLDTKTVASLDKAIASLEQQTGLKGVLLRSEKTAFIVGADITEFLSLFDSSVEKLQEWLNFSNSIFNRIEDLPVPTISAINGYALGGGCECVLSTDFRVASPDIRIGLPETKLGIMPGFGGSVRLPRLIGTDNALDIIAAGKDIGAEEALKNGLIDAVVPKEKLVDSAVSMLEQAIAGNLDWKAARQPKLEPLKLNETERGMSFSVAKGMVMKVAGPHYPAPITAVKSIEKAATFGRDEALKQETASFIPLAQTNVARALVGIFLNDQYVKGLAKKHLKEVTIPEYAAVLGAGIMGGGIAYQSARKGIPVMMKDISQQSLELGMNEAAKLLNKQFERGRLDAIKMARTLSSIQPTLNYAGIEQAQIVVEAVVENPKIKAAVLSETETLVNEDCVLASNTSTIPISELAKSLKRPENFCGMHFFNPVHRMPLVEVIRGEKTSEKTISTVVAYASKMGKTPIVVNDCPGFFVNRVLLPYLLGFGLLLRDGGDFRQIDKIMEKEFGWPMGPAYLIDVIGLDTAHHSQSVMAQGFPDRMHRDYKDAIHVLYDNQRYGQKNGLGFYKYTQDKKGKPKKEQDEQTDQLLATICQQKSNFSGEEIIARTMIPMINEVVRCLEEGVIASPAEADMALVYGLGFPPFHGGVFRYLETMGTAAYVKMAENYAHLGALYQVPPGLKAKAERNESYYSTAATIAVSTGKTAZ

SEQ ID NO: 2395 - protein, 589 aa, Photorhabdus luminescens
MDDLILRYYEAEMQYLREAGKEFAQAHPDRAAMLNLSDDRDLDPYVERLLEGFAFLIGRMRQKLDDDLPELTEGLVSLLWPHYLRTIPSLSIVELAPDYQTLPKSEVIAKGFEVISQPVGPSQTRCYYRTTRDIQITPLHITSATLQNEADGRSVIRLRFDCGQLTEWDKVDLARLPLYLKAGRPVSSALHLALTRQTQQIYARLSSQEERSRLKNGCFSPMGFDNDDVLWPKQESAFSGYQLLLEYFTFREKFMFVALNGLDSLEIPTGTPWFELDIVLSELWPYELKFSAENIRLHCVPVINLFRVEADPMHISRLQNEYLLRPMRIQDGHTEIYSVDEVSSSRRGDAQRFVPFSSFRHRGGIMRSSAPERYFHTRVCRGPSGLHDTWLILGGESFETDPELDDETLSLRITGTNGQLPRQALRNTQLEQTLHSAAGTLRVSNLCSPTLPCYPPANDRFHWRILSHLGSNFLSMMDNPEVLRGTLGLYNWTNDEMNCRCLDAIVGVKHALIERFEKGFLLRGVDIEITLNSNGFAGEGDIFLFGELLNRFFSLYTDIHLFNQLTLILQPSGRCLRWQENHNQRIPGZ

SEQ ID NO: 2396 - protein, 507 aa, Photorhabdus luminescens
GNMMTDKEMSTVDSLKASFKSGIRLMSDAFSHLIDEAYKAYETIDGAPCDSPTAGLKRDGKGKLALNTHHSGGLNLEQGALALSLKLEGGLSFDGGGYLKLDADRQVQFADFFSLSRRERMEITQVLGLKRTMITRIVSPFPKRNGSLGDYVSMNAAGDCLAVGMINKVYVYTRRKSGEWNTSTPTVLEPFQNDYLGSSWDVSLDAAGNCLALGNRGPADASMMVGVYTRTNGVWDARNPVWFPALGAREYFGINVSLSAAGDCLVAGGIYSSTFHMFTRTNGIWDRENPIKFPIPSGSYEFGWAAHLSAAGNCLAVFGEDPSSGYIRGTIYVYTRTNGIWDSENPIKLKLPEGSSSLFGKVFSLNAEGDRLAVGEVRDYFPIINGKVYLYTRTNGIWDSENPIKFSVPASDVIDFGRSLELNAAGDRLAVGAAARVYVYTCLNNKWNIETPTEILDPSGNSDNLNGFGKAVCLNKAGTSLAVGADSESVDSQPRAGAVYVFEDVNZ

SEQ ID NO: 2397 - protein, 501 aa, Photorhabdus luminescens
GHIMTDKEMSSVDSLKASFKSGVPPMPEAFSHLIDEAYRAYEIIDGDKRDGPTAGLGRDDKGKLALNTHHSGGLNLDQRALALSLKLEGGLSFDGGRRLKLDADRQVQFADFFSLSRWERMEIAQLLGLKRSTTMMRIVSPSPKENERFGTSVSLNAAGDCLVVGMGKELYLYMSRKGEWNTSAPIVFEADGDKYRSASWSVSLDAEGDNLAVGYSTPTDTQTMEVCLYMRTHGVWDTKNPIVFPIKRSYGDYDVNVSLSAAGDCLVVAGDTYPFYVYTRTNGIWDRENPIQLRFSNVGATICLSASGNCLAVHGSYYSDRTTINMVYVCTRTNGTWDESYIRFNPPEDSSPGFGKVFSLNAEGDRLAVGADDDSPIINGKVYLYTRTNGIWDTQNPIKFSVPASGVTYFGCAIKLNDAGDRLAVGAASRVYVYTYLNGKWNMETPTEILDPSGNLDNLNGFGKAVSLNKLGTSLAVGAVLAKVGSAPEAGAVYTFEKVKZ

SEQ ID NO: 2398 - protein, 534 aa, Photorhabdus luminescens
LICHSELEVLMAHNKTSTTSSENSLLDKEEVKSWFKLYSLPKSENYAQLVQIAAEGRRLAGLDPAQLDNNPGAGLNRDLDEVNLLLVNPGDGVHIGEDREIAVNIDKSSGLQFINGELGLRPDFKLSLELFESFTEEQKRELYRWLIHAEEMAASKAQLPAFDLPANGNNKNLGAVVSVSGDGKTIALSGAEGKDPVYLFSYTDNGWRQQFADYVSGYSGRALSLNRNGNVLAVGIDNRNSDGGHGSVFVYRRLANGAWEKSAKLWLSEANVQQHFGCAVGLSADGTLLAVGSYGWRSGLLANCGAVYLYQYDGKKWSQLGERLTLSSPAQGDMFGGKLSLSADGSTLAVAATGRNGNGEVTIFHRHGEYWQPQLPLNSLTSPLTISKDDFGASLSLSDSGNILAVGCPGEKNNIGAVYLYQRHRNVWQVIGILREAVTAGERFGSELSLSSDGQMLVVSTPVGKNDTGVQTGAVWWFSYQNEQWIMQSKLLELDGESNHKFGAGVCFSGDANTLAIGASGWKSGEGKVYLYDZ

SEQ ID NO: 2399 - protein, 338 aa, Photorhabdus luminescens
MPIIAPIPRNERRQMKKIIQNTRDKDYARRLMAILMLHRGESVSLVAKTLCASRSSVYRWINWLTLYGLEGLKSLPVGRPAVWNLIPLYPLLSFLLQYSPQQLGCLRSRWSLEFFIIKINELLNIKLSISTFYRYLHKMGIVWRRAAPTLKLPDPEYHEKMAKITEALSTCSEKHPVFYEDEVDIELNPKIGADWYLKGQQKRIVTPGKNQKHYFAGCLNVQTGKVTYADGLNKNSHLFINVLEELERQYCHAETLTLILDNYSIHKSRRVRDWLACHPKFNLLFLPVYSPWLNKIERLWQSLHETVTRNHGCQYMWQLLEKVKTFLNSCPYRNSREZ

SEQ ID NO: 2400 - protein, 694 aa, Photorhabdus luminescens
MANLASILRLPGNMKGSQWQMLAGPVLILLILSMMVLPLPPFMLDLLFTFNIALSIMVLLVAMFTRRTLDFAAFPTILLFSTLLRLSLNVASTRIILLEGHTGSAAAGHVVEAFGHFLVGGNFAIGIVVFIILVLINFMVITKGAGRIAEVGARFVLDGMPGKQMAIDADLNAGLIGEEEAKKRRAEVTQESDFYGSMDGASKFVRGDAIAGLMILVINVVGGLIVGVAQHGMSLGDAGEAYTLLTIGDGLVAQLPALIISTAAGVIVTRVATDQDVGQQMVTQLFNNPRVMMLSAGVLGLLGMVPGMPNFVFLLFTAALAGLGWYLYRRTDAPAINTEKPKIEEQQQTSEASWSDVQLEDPLGMEVGYRLIPMVDFRQNGELLGRISGIRKKFAQEMGYLPPVVHIRDNLELAPAGYRILMKGVEIGRGEAHPGRWLAINPGGAVGELPGDITKDPAFGLSAVWIDDSLREQAQVQGYTVVAASTVVATHMNHLLTQYANELFGRQEAQQLFERVSQEMPKLTEDFIPDVVNLTTLHKVLQNLLSEQVPIRDMRTIIETLAEHAPGQTDPYELTSLVRIALGRAIAQQWFPGAQEIQVIGLDAGLERLLIQALQNGGGLEPGLADNLQRQATEALQRQEMLGAPPVLLVNHALRPLLSRFLRRTLPQLVVLSNLEISDNRQIRMTATIGGNGZ

SEQ ID NO: 2401 - protein, 264 aa, Photorhabdus luminescens
KSDSCVTSARRFFASSSPINPAFKSASIAICLPGMPSNTKRAPTSAIRPAPLVMTIKLINTKMINTTIPIAKLPPTRKWPNASTTCPAAAEPVCPSNKMIRVEATLRDKRNNVENSKMVGNAAKSSVRRVNIATSNTMIDSAMLNVNSKSSMNGGNGNTIIDKIKRINTGPASICHCEPFILPGKRSIEARLAMTIIFSSKIQCWRHWQIFRFLRLQAAFPFPTFQLVDPSKHFRDCRIQCRGDLPANFTMAIKRPGKWRHLKZ

SEQ ID NO: 2402 - protein, 384 aa, Photorhabdus luminescens
VAEDSDLEKTEEPTPHKREKARKEGQIVRSRELSSILMLTSGLSLLWMSGQSMTHELSLMVFEGFSFDHSMVSNDKQMVQQIGRLLQQAVLALLPVFAGLVLVALSAPALLGGLVFSTKSIKFDPKKLNPISGLKRIFSMNALAELFKALLKAGFVGIGAALFLWMNWPAMLRLIAQPPLLALDDAMQMLIFAGYVVVFMLIPMVAFDVVYQIYSHLKKLRMTRQEIKDEFKEQEGDPHVKARIRQQQRAAARQRMMADVPKADVIVTNPTHYAVALKYDEKAMSAPKILAKGAGIIALRIKEIGTENRIPLLEVPPLARALYRHGEIGGQIPATLYAAVAEVLAWVYQLKRWKREGGLKPKKPENLPVPPALDFAGENNRHGZ

SEQ ID NO: 2403 - protein, 563 aa, Photorhabdus luminescens
MAIGYYLLVGDKTTCGGQIITGDHTMTFNGRATAREGDKVTCGKHPGTYMIVGGISDMFDMGQRLAGTLDSVSTCPCRARFINSVMDSYEKQEQPRQQAVTPAYTATQNFSSPMKEATTVQSNPPPVTQVPPPPIPVFAKSRQRGKGCTDAGTETEPANNFGRMGIYQVLSSPAPVTESKPEQPPQGKKHPPEPDKPQDKKLPWYKRWFSNSKDKAEAAATAVAATTRSAVADGEALVMRFIGGGVTSAGRWLAAPNPLTVGLMGLFYSSGLNESEEDYLNQYHLSEIASQYGKAPTRVRFRWIRDEKSGRMTVQGYHVSPESGLDKVPVRMMKRNPVTGNYEFWEPGEYRPTILWTPNDQEFKVPPHTGNEEQPFIPSQITVLPIPDKVGSDIESLPMPEEKDFRDYILVFPAGSGMKPVYVMFNTPRNQPGVVTGQGQRVEGNWLSLAGQDMGAPIPSQIADKLRGRRFNNFDDFRRAFWKEVGNDPELSQQFNSHNKEFLKKSYSPYSPRQEHIGNREKYEIHHVKFIKDGGEVYNLDNLRVTTPKRHIEIHSSKGGIKZ

SEQ ID NO: 2404 - protein, 414 aa, Photorhabdus luminescens
QQNRAGPERKRLTDIKRKRPHRPLPQPPIPNPKRRLIMANRKPRKGSLLTVNDVYRQPVGPAHDPKSLYALLLRFVAWRQERNWSETTLKVQTHHTYHFILWATDRGLYYAADITRPILERYQRYLYQYRKTNGEPLSIRTQRTQLQPLQVWFKWLTKQNLILANPAADIELPREEKRLPRYILSIDEIEHILSLPDPNTLQGARDRALMELLWSTGIRRSEAARLDIYSIDGSRKTVTIRQGKGNKDRVLPLGERALNWLQFYQQQVRPQLLVTPDIQSLFVAMDGLDGLQPNGITNAVSGYIRAAGIEKKGACHLFRHAMATQMLENGADLRWIQAMLGHASVESTQVYTQVSIRALQAVHASTHPAEQMADEKVRDADEVGLLADLYADDNADTDTPPDSSEPTSTADSRZ

SEQ ID NO: 2405 - protein, 1116 aa, Photorhabdus luminescens
ILTHFTGVEAMTRVPDTDLARLKQTVSLLGLARKQGRPMKKRGEDYVLRCPFHNEKTPSMVISPAKNLYHCFGCGAAGSVLDWVIQTEGVTLKIAIRRLRELAGLPDMDNAVVAASSLAAPPESQAAPLPRPKLADLDDDGQALLHQVIDFYHQHLLASPEAKAWLARRGLNHPELVSHFRLGYAGHHGISGSAGLLPSKDSQEGQQLRGKLSGLGVLRTTTRQDHFRGCVVVPIIGWAESASVASRGRVLQLYGRRTQPDYKVLKDSPKHLYLSSPLAGVWNEAAMKAAAEIILCEALIDAMTFWCAGFRNVIAAFGVNGFNREHLEALQYHGVKRVLIAFDRDEAGDRGAANVAADLLEAGIEAWRVQFPPGMDANDYAVKSGNAEHALGLALQQAVWLGQGTAPGAVFSHERPVSPGVTEKPHNADVAKPAALAAPPALTVAPVPCERTASGELLMKSGPRVWRIRGMKKSPVPDVMKVNVQVRDETSGLFHVDTLDMYHARHRQNYISTAAQELECELSVIKREAGRVLLMLEQQQDAQQQADAEASGTTAVTVSAEDEAAALALLTSPNLTEQIINDMAACGVVGESTNLLTGYLAAVSRKLDKPLAVLIQSSSAAGKSSLMDAVLNLMPEEERIQYSAMTGQSLYYLGETSLQHKILAIAEEEGVRQAAYALKLLQSDGELKIASTGKNEQSGELVTREYKVQGPVMLMLTTTAIDVDEELLNRCLVLTVNESREQTQAIHAMQRHRQTLAGLLADSEKGYLTQLHQNAQRLLRPLKVVNPYAHQLTFLSDKTRMRRDHMKYLTLIQAIALLHQYQREVKKTTHRGQVIEYIEVTQDDIALANRLAHEVLGRTLDEMPPQTRKLLLLIQDWVRETAGQQAVRVDELHFTRRDIRTALHWGDTQLKVHLARLLEMEYLLLHRRGLTYEYTLLWDGEDTGQPHLCGLLEMTESRSETAGNVFQSGSEDVQSGTGRGRVGSQSVNQNPASRQATSDLSAEVAGVKQKAVIKTEKKPASIPLPEETEMTNDAVAGKAFRSGSEGVQSGTGRPQVGTQPDRQNPASAQTAQGLTTEPGGAGKKTVNRHKTQKAPPPAASAAHPQSETEVNHGKPZ

SEQ ID NO: 2406 - protein, 220 aa, Photorhabdus luminescens
CPPNLRKGSPIGLMPDRGTIANPAKNDSPLRQTCARPVPITHASSVAGRAALTEREIQCGEAPDGYAHQHPVVVVDGRYPNGYYVSAGRKRASPEVDHADNAPVHAPDPADHAQIAPDAIPVTYPMLMPCSVPPMAVPERQFVALPHSRHRTELIGSPVFLPARPSLDEILHPKRKMTVPVTPTRPECGQNRSDLPLDSVINCPAFLHLSATPAPLSGCZ

SEQ ID NO: 2407 - protein, 993 aa, Photorhabdus luminescens
SRDRPESQAAPLPRPKLADLDDDGQALLHQVIDFYHQNLLASPEAKAWLEKRGLHHPELVSHFRLGYAGHHGISGSAGLLPSKDSQEGQQLRGKLSGLGVLRTTTRQDHFRGCVVVPIIGWAESTSVASRGRVLQLYGRRTQPDYKVLKDSPKHLYLSSPLAGVWNEAAMKAAAEIILCEALIDAMTFWCAGFRNVIAAFGVNGFNREHLEALQYHGVKRVLIAFDRDEAGDRGAANVAADLLEAGIEAWRVQFPPGMDANDYALKSGNAEHALGLALQQAVWLGQGTAPGAVFSHERPVSPSVTEKPQSAGVAKSSSLAAPPALTVAPVPCERTASGELLMKSGPRVWRIRGMKKSPVPDVMKVNVQVRDETSGLFHVDTLDMYHARHRQNYISTAAQELECELSVIKREAGRVLLMLEQQQDAQQQADAEASGTTAVTVSAEDEAAALALLTSPNLTEQIINDMAACGVVGESTNLLTGYLAAVSRKLDKPLAVLIQSSSAAGKSSLMEAVLNLMPEEERIQYSAMTGQSLYYLGETSLQHKILAIAEEEGVRQAAYALKLLQSDGELKIASTGKNEQSGELVTREYKVQGPVMLMLTTTAIDVDEELLNRCLVLTVNESREQTQAIHAMQRHRQTLAGLLADSEKGYLTQLHQNAQSLLRPLKVVNPYAHQLTFLSDKTRMRRDHMKYLTLIQAIALLHQYQREVKKTTHRGQVIEYIEVTQDDIALANRLAHEVLGRTLDEMPPQTRKLLLLIQDWVRETAGQQAVKVDELHFTRRDIRTALHWGDTQLKVHLARLLEMEYLLLHRRGLTYEYTLLWDGEDTGQPHLCGLLEMTESRSETAGNVFQSGSEDVQSGTGRGRVGSQSVNQNPASRQATSDLSAEVAGVKQKAVIKTEKKPASIPLPEETEMTNDAVAGKAFRSGSEGVQSGTGRPQVGTQPDRQNPASAQTAQGLTTEPGGAGKKTVNRHKTQKAPPPAASAAHPQSETEV

SEQ ID NO: 2408 - protein, 461 aa, Photorhabdus luminescens; identical to SEQ ID NO: 1083

SEQ ID NO: 2409 - protein, 475 aa, Photorhabdus luminescens
GLYMSAKNDFKAFSISDNANVVSQVKYEENQSLQIGFPPDNIPVNLLNKVLRQSSTISSVVANFIATQSGNDILDDGNIAKLTDQLNRALEQKIAAEVPNASLTRKGIVQLTDVVGNSDTLAVTQKLVQEIINSLRESINTRIPNTRKVNGKVLTEDINITSQDILAGQAHSLGDNANLDNYKIPGIYHQEYNAHAKNGNNYPESFAGSLVVLKAAGVIQRYFVYNSSRVYTRSQFHESPWTPWTQEYNTLNRPTAGEVGAYAKAESDARYITGLRKINGKALAADINITSQDIFAGQSINLGDNADLNSYKIPGIYYQEYNAHAKNGANYPEPFAGSLIVLKAAGVIQRYFVYNSSRVYTRSQFHDSPWTPWAQEYNSLNKPSDKAVGENMEAESDNIYAATKEELIQQAEHEKSQLLTKVNNLVAPLQDAVDLGVASEAEKAALLEWKKYRIILSKVDISLAPDVEWPEQPKZ

SEQ ID NO: 2410 - protein, 258 aa, Photorhabdus luminescens
GGYMSVKNDFKAFSTSNNSNVVSQQLYEETPELSTGFPPYSVPTHVLNKVLRQTSIMASVLANFIAEQSGEDILDDGDIAKLTAQLSKVFYVGAKRPGDIYLSAHPASDLAKGEYIANGDVHLIDSVVGRALNNLSDAYKAAWGIKQTGDKINLPNLFVDGRGIFVRAGLQPGVMQEDAIRNITGNLGWQGHGLFTRTSGVFYGVRSTATVIAAGTKVHSNHGYSAYATFDASKVVPTADENRPLNISMIPVIYLGVZ

SEQ ID NO: 2411 - protein, 201 aa, Photorhabdus luminescens
FKEMYMSAKNDFKAFAISDKANVPSQQEYEAYARLPVGFEDGQYIPNHMLNKALRQASTISSAIADFIVTESGTDVLDDGNVTKISAQFKSVLDKKIAKCCNLNVNTANKVVNGWWKCGDTGIIIQWGQANGCGAINDYRYFPIPFPNACFQIVATYSEFENSGTGVAALPISASQFIVTCRNGASQLAGNFVRYLAIGYZ

SEQ ID NO: 2412 - protein, 307 aa, Photorhabdus luminescens
FKEMYMSAKNDFKAFAIVSNANVPSQPFYEASTDLLKGFPDKQVIDNYILNKALRQASTISSVVADFIATESNSDVLDDGNVAKLTTQLNKALEQKIKVESDNRFIRLNTNTKTSGCILSKTANVFDDQSLRDLSLSGFLRPNGWADLGGLAIHVAHPSAGIQHSRGISFEYGSTSGGQEGFGIHTYAFDKDGKFKGKKRILTEDDRNKAILSVNGWWRCGDTGMIYQWGNVPIGDNQGKIVNLPILFPNELLSLHVTAISSAPNNNTDVTSAYGKPLNKSQIHISVSSNYNNNGISGVYFFVIGYZ

SEQ ID NO: 2413 - protein, 356 aa, Photorhabdus luminescens; identical to SEQ ID NO: 440

SEQ ID NO: 2414 - protein, 276 aa, Photorhabdus luminescens
RGGHMNALAKIKAESNFTIFKFGSHEIRVINKDGEPWFVAHDVCSALEIQNITQAIERLDDDERSMFNIGHQDDINVVSESGMYTLVLRCRDAIKQGSIPHRFRKWVTNEVLPSIRKVGNYHSPKIITDEHTLLRDAVNMLVGKRGMMCSEAYSFIHQRFNISHIDQLPMDKITEAIEYVHKLVPEDESIGKAELPALEIKQYKQQFTDDELCSLCWLWRDAVEMISSISDVYPILRAAEHRLEGKYYSMSHEYPRNMNIVRRVLNSLRFGNLPFZ

SEQ ID NO: 2415 - protein, 398 aa, Photorhabdus luminescens
SGIHKMASRPRKKEFRHLPDFLYYDKSVNEYRLTLVNGKRKCVGSDKAVAIAIAREYNNIMRPESSVSVSSLVKESGGKYGESLPFHHHIDNLFSRIIKDENPSDNTLADWRNDIERMKTFFTDTLACDISLEHVNNYIKHYHNDASANVQNRKVSFLKKVFSYAMDESLMLDNPAERKKMKRTDKKKRRRLSFDDFMLIRNAAEPWLRTAMDLALQTTQARLEVSRIRYNIKSPKEGVCGCVWYTEPKNGIHGMLYIHRQKVQHKEASHIAIPIGSTIKAIIDASRDNIASPYVVHRVPERLPTKISKEVNHPTQIAPDYLSRAFSSLRDKVGVASCLPLDERPTFHEIRALAAHIFKEQGIDPQARMAHSDAKSTKIYTQNHVDWVEVPHAEIAIZ

SEQ ID NO: 2416 - protein, 215 aa, Photorhabdus luminescens
VRFSLMKYELIYADPPWQYNNASSRGAANNHYKTTSFFDLTKLPIHSIAADNSVLAMWYTGNFAMEAIKLAEAWGFKVKTMKLFTWVKLNKLTGDRIDKNGVQDFFDFMEILNKETVIGMGNYTRANTEDALLAVRGNGIERISAAVKQVVFSCVGEHSEKPWEVRNRLEQLYGNVPRIELFARRKIHGWHAWGNESPINNIEFIQEIKSHEINZ

SEQ ID NO: 2417 - protein, 544 aa, Photorhabdus luminescens
QRYSASKENIKMLQQLIESCFVERDVLAEARQNAARWENWLLPISTDAPTGNDPVYEDDFQCMREEVNKISGVDTSLICQLAEKLLTTKCKDVRVATYYVWARLHCEGEHGLAEGLALLAGLADRFGEALLPSRASSRKAALEWLTGAKMRDSLSRYPEVNRTDFDHILAALVLLEQSFSSWDEESRPSLVGLARTLENRLAQSGGVSAVVPQTAAPVLPSAGQSKASASGKSPVWRQVQSGRDLLDQARELVRYLRDQPQGWLSSARLIRSIRWDTVHQLPPQDADERTRLVPPRTESRAQLKRLYRQQNWHELLEQAERMFAEGVNHFWLDLQWYLCQALSRLGCPYEGWADIMKHDLRILLERLPGLESMAYNDGTPFADEVTTSWIAQQVHDNQSDWQFEHLPAQPRHDDDVLALEAEALQLADSEGIDAALRWLGQLPGINGARHRWLQRLLMARVAEQYGKNEMALHLLTELDADEQFNLGEWEPELMFEVKACLLKLLRMKAQRSEHDKARMAQRMETLLAGLVAIDPVRASVLCGZ

SEQ ID NO: 2418 - protein, 224 aa, Photorhabdus luminescens
KEVIIMTKNTETLISACHELARVASCDDYLILNEIADKLKFLRKERDSYKEMFYDSCKGLAAIANAAGIKAEDDSGSPGQVIEKIESMLNIDWNFSNQPKINIGEEKKYWAYVKKSVKKDYYLFNEETNKCELVCDPVKHHFYVTTLIYVNKPTPTGKHEYQWNDDLPDWAISDDEYDWINFVGWAIQYSHPDYCNWIDSLEKNEEVIAWAEFIHPSAPEISQZ

SEQ ID NO: 2419 - protein, 228 aa, Photorhabdus luminescens
MISNELILSKTGVDLLTVEQGSHDWQRLRLGVITASEAGKVISKPRSGTKWTDMKLTYFYTLLGEVCTGSTPEVNAKTLAWGKNYEESARATFEFVADVNVTETSILFKDESLRTACSPDGICSDGLGLELKCPFTTAVFMKFRLGGFDAIKSEYMAQVQYSMWVTGKNEWYFANYDPRMTREGIHYVVVERDNEYMSQFNDMVPDFIEKMDESLNEIGFKFGDQWKZ

SEQ ID NO: 2420 - protein, 318 aa, Photorhabdus luminescens
TKLNESKNGGYMSTAVQKVYEIINPLKTEFEQICSEPGIVFKRESEFAMQIFANNDFLATTALNNPVSARSAVMNIAAIGISLNPAQKLAYLVPRNKSVCLDISYMGLMHIAQQSGAIKWCQSAVVRKNDIFKRTSIDTAPIHEYNEFDTAQSRGDIVGAYTVIKTDDCDYITHTMRASAIFDIRDRSSAWIAYKTKGKSCPWVTDEEQMILKTVVKQAAKYWPRRERLDKAIDYVNTEAGEGIDFSKGQNSYIDVTPAADSTIESITNLLTTMNKTWDDDLLPLCSKIFRRQILSPAELTESEAIKASDFLRKKASZ

SEQ ID NO: 2421 - protein, 301 aa, Photorhabdus luminescens
MSDKNELVVIDIKPEQAPALYISNGLDGFLNKIRESVNEVPDTTTKKGRDRIASLAAQVSRSKTAIEKPGREYLKRLKEAVRPAEQEIKRFVDACNELRDEVRKPLTDWEAEQEHIKREEKARKAAAELAKQVEVDHEIALLMNEKFDRDFAEKKAELERQRVAYEEEIKQQAAEQARIDAERKASAEIEAAEQREAEAKAAAERAEREKLEALKRAELEKQAAIEAERRKAATDEHARLAEIQHQKDEEKRRRADIDHRKRINNESLQELIKTGISEECAMNCIKAIASGKTSHLKIIYZ

SEQ ID NO: 2422 - protein, 279 aa, Photorhabdus luminescens
MNNAYFVTPQWLKDHLDDKNLVILDATAPPPPQQIDCHKLWLNTHIPGAQFLDLDKIANHQSGLPHMLPDPQTFSQAVGAMGISENHLVVIYDQGNMFSAPRAWWTFKIFGSHNVRILDGGLQGWQQAGFPTASGEVKRNPQIFNTDFNADKVKSLEQILGALNDQQIQIVDARATDRFQAKAPEPRPGLRMGHIPGSKNIPWTMLVENGHFKSETEITDIFHKQGVDLNKPVITSCGSGMTAAVLVLGLDIIGKKDVYLYDGSWAEWGADEALPLEKZ

SEQ ID NO: 2423 - protein, 716 aa, Photorhabdus luminescens
MALSNSIKNQISQWYKILPQHINGFISRAPQRQMIAEVAKTLADQEGRHLVIEAPTGIGKTLSYLLPGIAISRAESKPLVVSTANVALQDQIYSKDLPLLRKIIPDLKFTGAFGRGRYVCPRNLDAICATDSEQIDLMFLVEDKTELASSEERELCRRLRSDYTTFAWDGLRDHHKLALSDALWGKVSTDKANCLGRNCQYYHRCPFFIARREIENVDVVVVNHALVMAALESESVLPDAKNLLLVLDEGHHIPDVARDSLEVEGEITLFQLNGQLDTFVRHVEQYLVQFHPAKPPRLANASRLNEHSEKLRECFRELAIITQAFLPEKNEVDEYLFERGKLPDNLLLCCQQLFKLTDGLRGLAEAILNDLTERTAKQDIVRLHRSILHTSRALGYFENMTKLWRLAALEESSSAPISKWLRRRDEKNQSHLYFHCAGIRVSEQLNQLLWRSIPHVVVTSATLRSLNSFSRIQELTGLTEKAGDRFVALSSPFDHVRQGKLVIPKMSWEPTLHNEAAHLQEMAGYFRAQLLSQQHKGMLVLFSSQRAMDIFLSYVTDLRLMLLVQGDQPRYRLVETHCQRINEGQCSVLIGLQSFAEGLDLKGDYLSQVHIQKISFPPVNNPVIITESEWLKSLKRYPFEVQSLPSASFSLIQQVGRLIRSHECYGDVVIYDRRLLSKRYGPRLLQALPVFPIEQPEVLSEAEIGDMNTLLQGRQZ

SEQ ID NO: 2424 - protein, 303 aa, Photorhabdus luminescens
MKANSEELTIFVSVVENGSFSRAAEHLQLANSAVSRSIKKLEKKLGVSLLNRTTRQLSLTEEGERYFRRVQHVLQEMAAAETEIMESKHTPSGLLRIDAATPVVLHLLIPLIKPFRERYPEITLSLISSETYINLIERKVDIAIRVGNLTDSSLRARPLFSSYRKIVASPEYLKKYGIPQCIEELKNHICLGFTEPVSLNTWPIACQDGQLHEITVGLSSNSGETLKQLCVTGNGIACLSDYMIDKEITSGELVELLVEKRLPVGMPFNAVYYSDQAVSTRIRAFIDFLSEYVNDSRKYFGRZ

SEQ ID NO: 2425 - protein, 371 aa, Photorhabdus luminescens
VRNIMLFERYSLNGLSLSNRIVMPPMTRSRAGTNGIATDLMAEYYAQRASAGLIISEGTQISQQGQGYAWTPGIYKPEQIIGWKKVTDAVHMAGGKIFAQLWHVGRVSHTILQPNNSEPVSPSALQAKGVKVFLDVAGRGPEHGIGEMVQHSQPRALTLDEIPDIVNDYVQAANNAIAAGFDGVELHAANGYLINQFIDSQTNLRDDEYGGTLQNRLRFLREVATSVASAIGKDKLGVRLAPLTTLMGSKDDTPEATYLAAASVLNDIGIAYIHIAEADWEDAPVMPVTFKEAFRLLYHGTLIYSGKYTLERAEEALTKGWADLIGFGRPFIANPDLPYRLANKLELNPPIKEKFFGGNMEGYTDYLAINZ

SEQ ID NO: 2426 - protein, 269 aa, Photorhabdus luminescens
MSVPAFGLGTFRLKDDVVITSVKNALELGYRAIDTAQIYENEAAVGQAIEESGVAREDIYITTKIWTENLSKEKLIPSLKESIAKLRTDYVDLTLIHWPSPHNVVSVDETMNALLDAKNMGLTREIGVSNFTIDLMQQAIDAVGAEHITTNQIELSPYLQNCHVTAWAKDHGIHITSYMTLAYSKALQDEVIRRIATKHQATPAQVILSWAMALGYSVIPSSTKRENLQSNLRASVLKLDADDMAAIATLDHNERLVNPEGLAPQWDNZ

SEQ ID NO: 2427 - protein, 298 aa, Photorhabdus luminescens
MFTGLSAFPLTPLYGNKVDEKTFISLIENLVEAGVDSIGALGSTGSYAYLTLSERAHVARLAVEHANSIPVMVSIGALRVADILSLAEDAQHAGVSAVMLAPVSYQRPTPDEVYSLYEEVSRYLSVPLCVYDNPATTGFEFSDELLINIANLPSVSSLKLARLPQALSLATQQVNALRSRLPSHVSLGISGDWQAATGLCAGCDVWFSVMGGLFPRTALAITRAAKDNDTKTVQMLSATLEPVWRLFKTYGSLRVTAAAAELLGKVTAPCLPFPLKSLSGQPRDQLGTILEDLKNLIZ

SEQ ID NO: 2428 - protein, 257 aa, Photorhabdus luminescens
GFFVNKIYKMVWVGLAINVLTYFVSLAAIKVASAGYFALSYQEQYFVAKLPIFNALMLIFILLEVVNLFVILNAPKYAKISSFIASCLFPFGAVYFIGCLLSIQRVALSPFAEYQDDDTVPNSAVYFVRDRYWKRMCIFGCITLVMSFKGTSNICMMMTAMHCLSYRKTEGRYFFAETEGGFLLTPTALSKTIFLPYCCINRVEEREESVLLAVNLNKKINIVFSKKFVERGDLIQVIKRLSQAALNNPKHNIITFZ

SEQ ID NO: 2429 - protein, 314 aa, Photorhabdus luminescens
NMLTYNKALEFFGRDFKFPHTIKELPEKLSDLKDLEIGFFKTSDEVSLSFWKAGKGETLIFIPGWSSHGAEYINIIYLLSKKYEVYVLDQRNHGLSQKVNYGNRISRFSADLHEFIVAVNIKKAYFCGWSMGCSVLWSYIDLFGLEVIKKIALIDEPPSIYCHADWSEEERIKAGAFTNSPEALIDVYSGKIPGNKMFFNSDILKYYTTEGAPAFFNSQTFANEFVPQSIDDLKSVLFEHILNDWRDVISHKITVPTLIFSGENSDWIESQQWISSTVPKGEIIIYGREEHGDHFLALKDPLRFSKDLSAFFYZ

SEQ ID NO: 2430 - protein, 243 aa, Photorhabdus luminescens
KNSNINARKSNMEPTIIIPGHLCTSELFAYQIPNLWKHSSVTIPSILEGSSLTEMAKDIIQKAPSYFSLAGMSMGGFICLEIMKLAPERVSRLALLNSSARPETEEQKKMRENLLNKTTLENFEEILKNMATTGVHKSRQHDKNLINTIIRMGKETGFDAYVRQSKALGDRTDNRNILTHISVPTLVLVGDSDTITPPEYSEEMAEKIPNAKLIKLYRCGHATTLEQPEEVNKALIEWLNMSZ

SEQ ID NO: 2431 - protein, 302 aa, Photorhabdus luminescens
GFARMSPSKLQKSAFPLIPVILLLLAMTSIQGGASLAKTLFPVIGAPGVTALRLGLGTLILFIIFKPWRLRFSRKSIMPLLTYGIALGAMNYTFYMALTTIPLGIAVALEFTGPLAVAMFSSRRPIDFLWVALVIAGLAFLLPIGNNNINSLDPIGIIYALSAGVCWALYIIFGQRAGAGHGAATVSIGSFIAAMIFFPVGLIQTGPELLFDMSILPLALAIAILSTAFPYTLEMIALTRLPAQTFGTLMSLEPALGALSGIVFLNEHLTITQWLALFCIIFASIGSTSTIKRKPKITEVDZ

SEQ ID NO: 2432 - protein, 188 aa, Photorhabdus luminescens
MKSIAVYCGSSLGISEIYKENVIIFAKELVKRNLTLIYGGASVGIMGTVANTVLAEGGKVIGVIPTLLESREISHKNLTELYVVETMHQRKNKMIELADGFVALPGGFGTLEEFSEVFTWSQIGLHTKPCGILNINNFYDPLIAMINKMADEQFLHEKYRHMAIIEQDPAILLDRFNTYRSPSIKTYZ

SEQ ID NO: 2433 - protein, 283 aa, Photorhabdus luminescens
LEIYVDTELLKTFLEVSKTRHFGRAAESLYLTQSAVSFRIRQLENQLGTHLFTRHRNNIRLTAAGERLIPYAESLMSTWQLAKKEIMHASQHTELTIGATASLWESYLTSWLQDFYKKHQELRLESRVSTRQSLVKQLHSRELDLLITTEPPKMDEFQSLLLGNIRLKLLTTEENLKYQIKNYIKLEWGADFHHQEQRILKSDQLPTITTTSAHIARQLLNSVRGAAFLPIHWQNEYPELVSYPNTELIERPLYAIWLQKNDQQAFIQQLLKIPIIHTSTRGZ

SEQ ID NO: 2434 - protein, 508 aa, Photorhabdus luminescens
MALAVIYTRATIGIHAPIVTVEAHISNGLPGLTLVGLPETAVKEARDRVRSALINSGFTYPPKRITVNLAPADLPKEGGRYDLPIAIAILAASEQIPTNKLSHYEFLGELALSGGLRKVNGAIPAALSAGKAGRQLILPTENAMELAILSQNETLMTEHLLHICHFLQGEQQLLTAPIQHESLTEPSQPDLQDIIGQEQAKRALEITAAGGHNLLLLGPPGTGKTMLASRLCSLLPPLTNKEALEVAAINSLMDTYLSPQQWHTRPFRAPHHSSSMAALVGGGGLPKPGEISLAHNGVLFLDELPEFERRVLDALREPLESGEIIISRARAKVCFPAQVQLIAAMNPSPTGYHQGINNRSSPQQILRYLAKLSGPFLDRFDLSIEVPLLPIGTLSSSVRPSESSKDVRLRVLAAREIQLKRCGKINAHLNSKETEAFCKLKPNDAVFLEQTLIKLGLSIRAWHRILKTSRTLADLEEKKEIEKPHIMEALSYRSMDRLLIQLQKQSGZ

SEQ ID NO: 2435 - protein, 343 aa, Photorhabdus luminescens
GHWENRCLAVNFAMEWVVADNNALSMGSLFGAEGAKHFEGAGSLAQKMAQSGATSEEINAALTHYLKGQVPDGQDPAKGLIIAWGNFFGVPLDVVLSNEQMTPQKAAEIVAGGIPTSEAKLIQFAAAKAYLSLSKYQSIEAVDRKNSSTIDNLMKEKAQTAKIGEIALGADKNISHTNVNSKASLGTKIDKSIVIVDKEHLPTSVSSTFKAGKYETVITQEPVTLFRKFGGVNDQAKLDGGYATTTQNAGRNETAVYKNWSTTRFEAEIEVPKNTKLNIGSVGEQPPLSNNPKYIGGADQILLPRNYPMDWIKSIRDGKTGNVYTYEEFKKTFPDQITNKGKZ

SEQ ID NO: 2436 - protein, 237 aa, Photorhabdus luminescens
CVVIENNYLSVNELDSFAHQARTCEGESCKQVIKDMVDTNIRNQQEMMDFCNSNPTQCAQKYGYLVDQWPVFERTLKNMDRDGTLPVEFRNYLSAVNTLGQAATGKVGELGWTKRFEAMGMSKETAAAMAMTLPIVMEGAKGPKSSPTTKGSTGAAVNTEKTALEKIGKNSQGTTNLGDKSDNTVYHQQLIKNAEKISTAKPGQQVAAPRDLNEQTFWKQVESNPSQGSKLLGMNKD

SEQ ID NO: 2437 - protein, 229 aa, Photorhabdus luminescens
ENLRSAVNVAMECVVTDNNALSLPKGMADYGRSASSLGTAMLNEGKSPQEISAALSKHAKGDHPEGQDPVRGLLVAWGAGMSTVVAPVLLPSGATVGSIFAGGLISGTANVSNQLTNGPVNITDALIATGTGALTQGKGFWFTEVASITGAYVGAKLQDKNPLAPVVGAAVGNVVGTAGGKVIDVGNKYFPIVSNKTSSTIGAIGGAIASEVTGSKVEDKLDKSGGAKZ

SEQ ID NO: 2438 - protein, 254 aa, Photorhabdus luminescens
SNNGDNNSLLKRCVGYLVYIRTRETYGTRRLQTELADNGIIVGRDRLARLRKELRLHCKQKRKFRATTNSDHNLPVTPNLLNQNFTPTAPNQVWVADITYVATREGWLYLAGVKDVYTCEIVGYAMGERMMKELTGKALFMALRSQRLPAGLIHHTDRGSQYCAYDYRVIQEQSGLKTSMSRKGNCYDNAPMESFWGTLKNESLSHYRFKSRDEAISVIREYIEIFYNRQRRHSRLGNISPAAFRIKYYQMTAZ

SEQ ID NO: 2439 - protein, 337 aa, Photorhabdus luminescens
GRHMSTYRSYKEAIDFDEIKSQRSSLDTWIEVKQERIQRRPEDREEVEKAIEELQAKISELDAILAKKPPPPELPPGKPLIKVSGVLEEFETLCVIGYFTDREYDPVAFARQEELELYGRLLMSLAGNTSGSNASTNVRKRDVCDFVRGKINGIPFYGWLGFTVAKAGDYVELAVTEKEGHYVVYAIAHPGLRIVSMTPRCKQGIHSNAKYQIRGTWYGSLVLFFVFMIGGIFDGKVREDIIDYMKCISSFLGLMAIVLSPLIYFSCMRKPKPTFRLAEEIFTVLGFPNPTEINLEKFTKKRLKEIKVNSPDGQSGKESERVLPDKDCFISYYYYYZ

SEQ ID NO: 2440 - protein, 329 aa, Photorhabdus luminescens
DGYIEVGGNRYSVPESLCGQLVSIRISLDDELRIYSNEQQVASHRLCSAAYGWQTVPEHHAPLWQQASERMAERLGEIQKRVITVCDREADIWHYLYYKVSHGQRGACCTESPAGRGTRQALRTAGSPGNRRKPHAECDAKRRAGSPSGPDVHQLQRSQHKKSRQQRPGAPAHVCLLPGAGRGRCLLASADVRKSGECRRCTTYCQPLRATLADRGIPQGVEKWWYMESLRMQTRDNLERMVVIQAFIAVRVLGLRQGGVSEETQNDSCEKILTPTEWKLLWVKLEGKPLPVQAPTLKWAWGDGMTANAQVVPVGASCGMAGQTSGYGZ

SEQ ID NO: 2441 - protein, 399 aa, Photorhabdus luminescens
MTESSDCESVQVFIGVDVGKDTHHAVAINRSGKRLFDKALPNDENKLRSLISDLKQHGQILLVVDQPATIGALPVAVARSEGVLVGYLPGLAMRRIADLHAGEAKTDARDAAIIAEAARTLPHALRTLKLADEQIAELSMLCGFDDDLAAQTTQASNRIRGLLTQIHPAPERVLGPRLEHPAVLDLLQRYPSPEKLASLGEKKLAAQLCKLAPRLGKRLAADIAQALAEQTVVVPGTNAAAVVLPRLALQLITLRKQRDEVALEVEQRVLAHPLYPVLTSMPGVGVRTAARLLTEVACRAFASAAHLAAYAGLAPVTRRSGSSIRGEHPSRRGNKALKRALFLSAFAALRDPLSRAYYTRKMSQGKRHNQALIALARRRCDVLFAMMRDGTFYTPQGSZ

SEQ ID NO: 2442 - protein, 335 aa, Photorhabdus luminescens
MVTFETVMEIKILHKQGMSSRTIARELGLSRNTVKRYLQAKSEPPKYTPRPAVASLLDEYRDYIRQRIADAHPYKIPATVIAREIRDQGYRGGMTILRAFIRSLSVPQEQEPAVRFETEPGRQMQVDWGTMRNGRSPLHVFVAVPGYSRMLYIEFTDNMRYDTLETCHRNAFRFFGGVPREVLYDNMKTVVLQRDAYQTGQHRFHPSLWQFGKEMGFSPRLCRPFRAQTKGKVERMVQYTRNSFYIPLMTRLRPMGSTVDVETANRHGLRWLHDVANQRKHETIQARPCDRWLEEQQSMLALPPEKKEYDVHPGENLVSFDNPVTLFVPLIMGCZ

SEQ ID NO: 2443 - protein, 225 aa, Photorhabdus luminescens
VHWSNWCPAVNFAMEWVVIENNYLSVNELDSFAHQARTCEGESCKQVIKDMVDTNIRNQQEMMDFCNSNPTQCAQKYGYLVDQWPVFERTLKNMDRDGTLPVEFRNYLSAVNTLGQAATGKVGELGWTKRFEAMGMSKETAAAMAMTLPIVMEGAKGPKSSPTTKGSTGAAVNTEKTALEKIGKNSQGTTNLGDKSDNTVYHQQLIKNAEKISTAKPGQQVAAPR

SEQ ID NO: 2444 - protein, 224 aa, Photorhabdus luminescens
SQVWIQLVADNNALAIPMPPPPIAGSNTGEAVNEANQTIASALDKKLKEMGESIDKATQCSFGRVCSSDYVDNESQPNVGKNLTNEEKSQYGGVGSGSPSGWEPQDEENARTQQSDSKNFDDKFKKSDLVSSANKPINNQGLSAGARAWEKHAGRPGGIFEPLKGNVTQKNEAASRFVNEVLNNKNTVRTDLSKGGIEYRLPDGRGVRYNSDGSFSGFLDPKRZ

SEQ ID NO: 2445 - protein, 207 aa, Photorhabdus luminescens
MADYGRSASSLATAMLNEGKSPQEISAALSKHAKGDHPEGQDPARGLLVAWGAGASAVGGTIIAPVAGTAAVVGGALLGAISDTGKQLITMKPNESYSYTDTLIAAGVGALTQGKGLIYTEGVNIGGAWLGSKLKGEDATGAVIGAAVGTVAGAKGGKIITDKLAPVVISPVASEIGGAIGGTVVGTVIGTGIENQIKENGAKNGKZ

SEQ ID NO: 2446 - protein, 353 aa, Photorhabdus luminescens
PQIKTHIIGGGGMKIPEAVNHINVQNNIDLVDGKTNPNKATKALQKNVLRVTNSSSSGISEKHLDHCANTVKNFLRKSIAAQSYSKMFSQGTSFKSLNLSIEAPSGARSSFRSLEHLDKVSRHYISEIIQKVHPLSSDERHLLSIIINSNFNFRHQSNSNLSNNILNIKSFDKIQSENIQTHKNTYSEDIKEISNHDFVFFGVEISNHQEKLPLNKTHHTVDFGANAYIIDHDSPYGYMTLTDHFDNAIPPVFYHEHQSFFLDNFKEVVDEVSRYVHGNQGKTDVPIFNTKDMRLGIGLHLIDFIRKSKDQGFREFCYNKNIDPVSLDRIINFVFQLEYHIPRMLSTDNFKKZ

SEQ ID NO: 2447 - protein, 229 aa, Photorhabdus luminescens
WTRTMNSQTAKDIPCFRSYLPDALRLRFEDKLTIRAIAQRLGLSHSTIHTLFQRFLASGIAWPLPDSVSFAQLDAILYANRKKELTEPQIREGSWRKERRTSYSREFKVRLAKQALQPGAVVARIAREHDINDNLLFKWKSQYEDGLLSDDDIQECMPVPVALTDTPEPTRPVTNPFWRNKHDERPEGAPGNVPRCELHLKSGVVKLFDPLTPELLRALIREMKGGIRZ

SEQ ID NO: 2448 - protein, 383 aa, Photorhabdus luminescens
KKWGKQSQSNWISLIPPLKLSKPYVPNWPVAGVMSSAPLPPKPIERGYASAGLLARILVSKYMEHIPLYRQSEIYARQGVELSRNTMVRWVSEMADKLRPLYIALNDYVLEAGKVHADDTPVKVLAPGNGKTKTGRLWVYVRDDRNAGSSLPAAVWFAYSADRKGEHPQLHLAKYQGVLQADAYAGYNVLYETGRVKEAGCLAHARRKIHDEDVRRPTEMTQEALRRIAELYDIEAEIRGSPAEERLAVRKARSVQLMQSLYDWIQLQRKTLSKHAEMAKAFDYILNHWNALNEFCRDGWVEIDNNIGENALRSVAVGRKNYLFFGSDKGGESAAIIYSLLVTCKQNEVEPEDWLREVIEKLNDWPSNQVHELLPWNFSSVKZ

SEQ ID NO: 2449 - protein, 328 aa, Photorhabdus luminescens
WHLLNNTRGMIMQGSYLHSNKKLSIIVAAHNLEDLIGKCLESVKKCLYKVSSDDYEVLLIDDSSFDSTPSILKKFSEENESFIYIRKEFRNLGKVKKYAVEISSGEYITFVDGDDFLSDFSMREILDFLEYRQPDIFISKLNEVRKDADIIERSRLSSPIKLHRNTAIKEFLIHKKFQAHSIGKFFRKELFCGSNFPEVPCYEDALSFPSFLVKCNSIYYTNMKYYNYIKREGSLSNSINDVKVNIMAEVILIMDKTFGKNFRNLTACHAIELIYKYEDKLSKKYSDSIYQIVKNLSILGFMLDSNIRFSFKRKFMKIRKNMISTNGZ

SEQ ID NO: 2450 - protein, 398 aa, Photorhabdus luminescens
KGLRKMVQVSESKIPQPVVNSSPVGEILATTPSKSAEHVTPSQAGSSLSSDAAKSRGVSLPAPLTVVNTHPDQEQMARLKSVMQEAKQATGLIKELTAKLTATSWLTSLVLHSLEEIEINLGELTSKLDRIQTSLKIQDIQRARQQSLQKMEENQQKIKEAENSAKEAQKSGLFSKIFGWISAITSIVIGAIMVATGVGAVAGALLIVGGVMGVVSQGLQQAAQDGLISKETMKWLGPVITAIEITMAVAAAAVSFGGSAAGLIAKMGAKMGSKVAEMTAKMAVKAAEFSAKAAGTAANTTSRGLRVAMQVGDSGVDVTNGAAQTTNAAFQSKAANRQADVQLSRSELTAFQAVMDRLKEELSHLVESFQNVMEMIFQMLNARGDMINNLASRPQEIZ

SEQ ID NO: 2451 - protein, 461 aa, Photorhabdus luminescens; identical to SEQ ID NO: 1083

SEQ ID NO: 2452 - protein, 288 aa, Photorhabdus luminescens
LVSTLRVNGVVEIFGNVRNFIACFLFRASLLFTRKKMKIFIINLESDVERKYSMLQQASSLRLDVEIIKAVNGKQLSKDEVMKLSRDFYNNGMTLGELGCSLSHLLVYQRIVDENIPLALIMEDDAEINKNISDVLSALDKFNTKNPNKPNIILLNKTNEYIDTFKKNITGQYYLVNVIEAACTYGYVINNYAAQCLLDFLQPVWLEADKWRFLNERRIIKVKAVVPPVISTTPLYLQSNLALERKKQKQSRQEFFRIQRKRRSLYVKLYTMFWRIFIRLLVKRIKPZ

SEQ ID NO: 2453 - protein, 260 aa, Photorhabdus luminescens
VNIMLFSDSSDVTLVITSCGRFDLLKQTIESFDKYNSYPIKEVVVTEDSGDKSIHSVIPEHWLPYCEIILNNPKLGQIKSIDLAYSKVKTDYIFHCEDDWLFYRDRFIEDSFVALKSDKNILQVWLRDLKEDVMLHYPFHYPSNFRELEGVCFSTLESNDFRWRGFSFNPGLRRKSDYELFMPYNLAGDTEMTLSKKYAEIDKYAVILDKSAVRHIGWDDHIKTDEEIRQRKRENRRKIKYFTFGVITGCFLMYFIKGFZ

SEQ ID NO: 2454 - protein, 216 aa, Photorhabdus luminescens
LHSESSIMNTQKYSLEYEIATLGKDGLAEKAGWLTIYHAAPNSREFIGTTPEYLMKGVGIPASSYTDTPTLPESDFMAVRRTADGNHWEIVPDYRGKTAYNTQTRLPQEITDLGELPKTLTFEQPATHFDKWDGSKWVADKAAIKNSEIEQAEQLRGTLCTQANETITLLQYAVDTELASEEEQALLLEWKKYLVLLNRVDTSLVPDIKWPEMPEZ

SEQ ID NO: 2455 - protein, 228 aa, Photorhabdus luminescens
YMDNKLIISSQVINTLEQSNDPWGIKDKNSCFIYGNLALKSIKNISSSFEFEGFYDDEIPWDGAEFAKEYIAHDQKVMEKEERVCSLETHVFGKEQILSSYFCAKYPFYHEDGSCMGTIYHAWQAQDFSFTRLFRGKLPASILFQPPTDLFTQREWDVIFLMLQKYTNKQIGIMLNISYRTVENHISRICKRIGLHSSRQLEEYCRTNDYDLYVPKRFVQSGSRMLPZ

SEQ ID NO: 2456 - protein, 254 aa, Photorhabdus luminescens
SLCAKKICTSRKQNVSLTLRLKRNLTNMKKNHAISPQVINTMAQSNEPWGIKDENSCFIYANQACNRVQNISRSFDYEGLYDYDLPWDGAEFSEEYMANDKIVMEKEERICSLVTHKFFKEQILSSYFFEKYPLYHEDGSCMGTIYHGWQVQDFSFTRLFRGKLPANIMFQPPTDRFTQREWDVIFLMLHKYSNKQIGIMLNISYRTVENHISRICKRIGLHSSRQLEEYCRTNDYDLYVPKRFVQSGSRMLPZ

SEQ ID NO: 2457 - protein, 233 aa, Photorhabdus luminescens
KGVVTNMNKNYVISPQIINTMEQSNEPWGIKDKNSCFIYVNQACKHLQNISSSFDYEGLYEYELPWDGAEFAKEYMLHDQKVMEQEKRICSLETHLFGKEQILSSYFLAKYPLYHENGSCMGVIYHGWQAQDFSFTRLFRGKLPANIMFQPPTDRFTQREWDVIFLILHKYTNKQIGIMLNISYRTVENHISRICKRIGLHSSRQLEEYCRTNDYDLYVPKRFVHPESKMFLZ

SEQ ID NO: 2458 - protein, 254 aa, Photorhabdus luminescens
SLCARKVCASRKQNVSLTIRLKGVLTNMKKNYVISPQIINTMAQSNEPWGIKDKNSCFIYANQACKRVQNISSSFDYEGLYDYDLPWDGAEFAEEYMTHDRMVMEKEERMRSLITHVHGKEQILSSYFFEKHPFYHEDGSCIGTIYHGWQAQDFSFTRLFRGKLPANIMFQPPTDRFTQREWDVIFLILHKYTSKQIGIILNISYRTVENHISRICKRIGLHSSRQLEEYCRTNDYDLYVPERFVHPESRIFPZ

SEQ ID NO: 2459 - protein, 233 aa, Photorhabdus luminescens
KGVVTNMKKNYVISPQIINTMEQSNAPWAIKDKNSCHIYVNQACKRLLNISRSFDFEGLYDNELPWNGAEFAKEYIAHDQKVMEKEEGVCLLVTHTFGKEQILSSYFFEKHPLYHEDGSCMGTIYHGWQAQDFSFTRLFHGKLPANIMFQPPTDLFTQREWDVIFLLLHKYTSKQIGRMLNISYRTVENHISRICKRIGLHSSRQLEEYCRTNDYDLYVPERFVHPESKMFPZ

SEQ ID NO: 2460 - protein, 243 aa, Photorhabdus luminescens
VKYQISNFKARKRNDNMENELIISPQVINTMQQSNEPWAIKDKNSCWVFGNLAFRQIQNLPDLFDYEGKNDSELPWNGAEFAKEFVIHDKNVMKQEKRICSLETHTYGKDKFLSSYFSEKYPIYNDENECIGLFLHAWKAQDFSLTRLFYGKLPASILFQPPTDLFTQREWDVIFLLLHKYTSKQIGRMLNISYRTVETHISRIYKRIGLHSTRQLEDYCRTNDYDLYVPERFVHPESKMFPZ

SEQ ID NO: 2461 - protein, 242 aa, Photorhabdus luminescens
DQISNFKARKRNDNMENELIISSQVINTMDQSNDPWGIKDKNSCFIYGNSATKQFIHDFKKSFNYEGLYDDDLNWDGAEFAKEFIAHDKSVMERGGRVCSLETHLFGKDKFLSSYFCEKTPIYHDNGDCIGTIYHMWKAQDFSFTRLFYGKLPASILFQPPTDLFTQREWDVIFLLLHKYTSKQIGRMLNISYRTVETHISRIYKRIGLHSTRQLEDYCRTNDYDLYVPKRFVQPRSKMFPZ

SEQ ID NO: 2462 - protein, 206 aa, Photorhabdus luminescens
GRHMSTCRSFKEAIDFDEIKRQRSSLDTWIEVNLDWIISHPESKEESEKEIEKTKEKIPELDAILAKEPPPPELPPGKPLIKVSGVLEEFETLCVKGYFTEREYDPVAFARQEERELYGGLLMSLAGNTSGSNSQTNVRWGDVCDFVRGKINGVPFHGWFGFTSAKVGDYVELAAIEQEGNYVVYAIAHPELRVVSMTPRCDPVSZ

SEQ ID NO: 2463 - protein, 264 aa, Photorhabdus luminescens
LCHLLTTETGEERSPVQATGDVCSRVHHFPDGYHTARIMGAVIRDTFLTIFLATLLKLVVNRLLVCASLFCFQQFLFQFVDIFGRQEIILHNNPFHCDVDRQTPIFPMPSASYHPFFPMGVHRRPQNPLTRFSPPKAGFSRRALVSVAPFSATGERRPTRLGGGCPFCGRGRHRARKRRPCDALRHCGFGLRMTLHDHAVLFCSGKPPGAARGGDGEHGNEQGACDCEPGAASAAGLGRGEVNERRPQADLPSGLLAGRWHGSZ

SEQ ID NO: 2464 - protein, 313 aa, Photorhabdus luminescens
GHWENRCLAVNVAMEWVVVENNFLTAKDVHELKEELLEAEKTGANKQTIYDKFKERSEKNRQEGVADNCSHNPGCVVSVWEMMNSGTDVASGLNRTSFFSSLSSEEMAQLNRFVQAENAESAQAIYQSLPDVVKKVVEGKEFAEQFGVMPKVGGSSGIIGLGIAGKKPATKDTGNTGTKGTNAAHNQQVNKSNLATAEKDIVLIEQGKKGGWSKVLNKPEPNKIYHVRHASGEKIYHTDGLSWNDRNTYQQCKAGKCGNPGDEGGHLIASIFGGPGERLNVVPMDGNLNKGAWKQMENSWAKELKAGKKVDVK

SEQ ID NO: 2465 - protein, 581 aa, Photorhabdus luminescens
MHNVSTTTTGFPLAKILTSTELGDNTIQAANDAANKLFSLTIADLTANQNINTTNAHSTSNILIPELKAPKSLNASSQLTLLIGNLIQILGEKSLTALTNKITAWKSQQQARQQKNLEFSDKINTLLSETEGLTRDYEKQINKLKNADSKIKDLENKINQIQTRLSELDPESPEKKKLSREEIQLTIKKDAAVKDRTLIEQKTLSIHSKLTDKSMQLEKEIDSFSAFSNTASAEQLSTQQKSLTGLASVTQLMATFIQLVGKNNEESLKNDLALFQSLQESRKIEMERKSDEYAAEVRKAEELNRVMGCVGKILGALLTIVSVVAAAFSGGASLALAAVGLALMVTDAIVQAATGNSFMEQALNPIMKAVIEPLIKLLSDAFTKMLEGLGVDSKKAKMIGSILGAIAGALVLVAAVVLVATVGKQAAAKLAENIGKIIGKTLTDLIPKFLKNFSSQLDDLITNAVARLNKFLGAAGDEVISKQIISTHLNQAVLLGESVNSATQAGGSVASAVFQNSASTNLADLTLSKYQVEQLSKYISEAIEKFGQLQEVIADLLASMSNSQANRTDVAKAILQQTTAZ

SEQ ID NO: 2466 - protein, 557 aa, Photorhabdus luminescens
KKISNGTIMAIDIKNGVFAALSQNYDVIIGEILSEKIKINGVFSGLNNIVEDGHEVSRGESQGISLNSDSTKVAFRSPNSTCMIADLSDMKNIISNFRFDVLYDIVTLCWTEDDNILVGFGNGMVGKIDIKDNSTRTIKLDNINESVHWFEKVNDSEYIVATDARCVVRLDEHNLNYKIGPKFANDDFEHITYDYINKVAYGTSFDRKVYKIDVKSLEKIEVIYEARFKIRWSDIIYKDNIPYLILQIRDGSIVKFNLSTKKVEKLRKETPPAFWTYVNYLDKDLFFGEDGGYLFSSNNQKEPFDYRIKKEYEGYYIKRAISNENLLVLGGTNGKIMIKNHDDDFKIINIKSPVRDLCFGFNSIYIASESGCVCKIEGDNVRVIYKSKSEPVWSISFNFDLCMLAIGERVGSVKILDSLNEYHAVAYTDSKIPKRMKWIDKNKLAVVNSSNIDLITYDAKNKSWEHISEFYKGGLNTIEDFITYNDSIIIGISYSRYILSWHLETGEVLGKLFWDQDYAKGIMNIDKEKFIVYGRNSKVKEYIMHDNDILLTKIVNZ

SEQ ID NO: 2467 - protein, 217 aa, Photorhabdus luminescens
MKKFNIKSLTLLIVLLPLIVNANNIDSHLLEQNDIAKYVAQSDTVGSFFERFSALLNYPIVVSKQAAKKRISGEFDLSNPEEMLEKLTLLVGLIWYKDGNALYIYDSGELISKVILLENISLNYLIQYLKDANLYDHRYPIRGNISDKTFYISGPPALVELVANTATLLDKQVSSIGTDKVNFGVIKLKNTFVSDRTYNMRGEDIVIPGVATVVERL

SEQ ID NO: 2468 - protein, 215 aa, Photorhabdus luminescens
MSFNKKAFLIATLLVVSHFSMACNTDPMVEHIIKSYGLQETKVMSMYKNCELDVVNTGNRIILTNNKSKNRNERAEIAMYWYRGMGIEEFKLFDSNKFKSIPCVNVPNRFCGISPEYTYAKSYPMREDKKFVIEFSTVEPGWLYNEFTTKHNCEIDVESRGESYGLGGIGALKKDKSNCQPKGYKVGDEFNKWLSEKPVKIEAIIAYIQLPISDZ

SEQ ID NO: 2469 - protein, 338 aa, Photorhabdus luminescens; identical to SEQ ID NO: 778

SEQ ID NO: 2470 - protein, 196 aa, Photorhabdus luminescens
MSAEHIMIHPSAIVDEGAQIGKNSRIWHFTHVCSGAQIGEGCSLGQNVFIGNQVTIGNHCKIQNNVSVYDNVHLEDGVFCGPSMVFTNVYNPRSLIERKSEYQNTWVKKGATLGANCTIVCGTTIGAYAFIGAGAVVNKDVPDYALMVGVPAKHIGWMSEFGEQLDLPLHGQATATCPHTQHIYQLNNHIVVRIKZ

SEQ ID NO: 2471 - protein, 165 aa, Photorhabdus luminescens
MRNIAALVLASMFVLSSTASLAGTASTMHAATVPGNCAPCEYKNVGSYHYRNNNDIGDNDHMFNGITLTEQQRQQMRDLVGQKHQPRSSMSMSPTEREEMRKLVTAKDFDGVAVKALIERMIRCNVEHQVEMARIHHQMYQLLTPEQQAQLEQHYRQRMSQLPNZ

SEQ ID NO: 2472 - protein, 153 aa, Photorhabdus luminescens
FVNQGLARVSQYENGTHQPTFETMCAFSKILKGRVIFLNTKNGDQRIVPISDKLEKEIRGKKKMGKLFNVDYINFCKILHVVKPDLPKGQATHVLRHTFASHFMMNGGNIIALQQILGHASIIQTMVYAHLAPDYLQHAITLNPLKGGIEVEZ

SEQ ID NO: 2473 - protein, 883 aa, Photorhabdus luminescens
LRCLSSLGRTGDVVMNRSLCWMCESTGPALLPVRYTVVPDNVSETLPAWVETPEPSAPGYHYALRALRQGFLYVYYVNAGLGERESWDTWSVSEDGALWRNLNAPFGIFPKKTADCHAPTHQSANMEFITLRDIALRQETWLAFSPSMWSQETIEYYHNNREARERRMQCVKPWQWRGVPEGVGIAQATIENLNIVIDYGLGDNDSGKYVLPCNRKVSRISRTLEEAPYYEVYHGALRPKSTLYPWSSKRAGCADITVRAMQKRGLAADGTPVSPVLIALHDPIGIAHELAGWGDDIAGVHKTFLDELSIEFMTDSSLNGVENQLHKLKAADVQGQVDKALEVTKQKEYGVFSDQDKAKLKEYVTRDMAAAGKKAVARDWKKYTAELNLAKRQAFNQCYADLCTDVAKALEQLAQLRVSWLKQSGFITCCQDFHSTRLEDNLNYREAVDYAIASLNVTETGCAYLDALIDEYSALSPENIVWRSLLLNNPEVMKEMDGFLQKMKLNKDNHQPAAPSDFMKAVSDLSGKLIEAYDKANEALEKPPKSNSTFARAMLHCDRRLVTLGDRFLNFTRLGKVLNSMNEMLSKTLLSVISGVPLDQMVELSVSQLKDGNAFRQQVLEQLKKPGSEARLKKSNKYQSDFKKFADSAEGEPVLKKSRIKWLVLASNVLEFSNQLQESKGDAKSQAQVTSAFLSTLSTAMEIVEPIVKHGMENVIAANTIKFIGTNAGVASSALNLGVDIGDLSSEWRGRGRWQFIGLYGLKSAYDFMQVVKALNGLLEVLIDRALLYSKNLFVEGVAKLLAWETLAWLCTWEAMLLIFVVEALVTYFSDNDLQKWCRGCVFGLEPVKNLQSTQWIDPESQRNKLCEEQRNSFANAIKGGIZ

SEQ ID NO: 2474 - protein, 136 aa, Photorhabdus luminescens
MAQDYHHGVCVQEINEGTRTITTVSTAIVGLVCTADDADTKPFSLNMPVLLTDVLTASSKAGKTGTLFHALRAIADQSKPVTVVVRVAQGKTEAETTSNIIGGVTDEGKKTGMQALLAAQGQLGIRPRILYDYSPZ

SEQ ID NO: 2475 - protein, 163 aa, Photorhabdus luminescens
TGMKIENTPYHSIPTAMYCNGMKIKKHQNIASWSLRRVGVKVKNSRKAKNDILANNNTEPIGPIITDNTQIIHIPHQPRMRAFRLSIVALLLSIEYLEESIAPTILAIINGTNIPPNNRISLLLSIVIILTPPMPDELSVKSQLFPLLHLTFPKVAQMLPSKZ

SEQ ID NO: 2476 - protein, 170 aa, Photorhabdus luminescens
MKYDTSELCDIYQEEVNVVEPMFSNFGGRTSFGGQIITVKCFEDNGLLYDLLEDNGHGRILLVDGGGSVRQALINAELAQLAVQNGWEGIVVYGAVRQVDQLAEFDLGIQAIAAIPAGCRDEGTGASDIRVNFGGVTFFSGDYLYADNTGIILSEEPLELDDNEEDEIIZ

SEQ ID NO: 2477 - protein, 177 aa, Photorhabdus luminescens
VTTIVSVRRNGQVVIGGDGQATMGNTVMKGNVRKVRRLYNDKVIAGFAGGTADAFTLFELFERKLEMHQGHLTKAAVELAKDWRTDRMLRKLEALLAVADENTSLIITGNGDVIQPENDLIAIGSGGPFAQSAARAMLENTDLGARQIAEKALTIAGDICIYTNHNHNFEELPSKAZ

SEQ ID NO: 2478 - protein, 194 aa, Photorhabdus luminescens
VKKNKLAILLSLASLFGVNAYAQTEQPKEVPTAQNALAAQPQLLPNPESPIRAEEDKKLDIKSGVAYAPAPPLTNMWVYAVGSTNCGWEYTSNLPVTNCNHGGQQLRAAVLEVGYGYNSFAWMNGGALPYSLYSSTPVCITNGYYNWPCAAGQIVVGFLKEYSLDGYQNGIFSYQNTSANWPRNTMSTQISILZ

SEQ ID NO: 2479 - protein, 183 aa, Photorhabdus luminescens
VSNIIGIRAKQKEKTRRSLIEAAFSQLSAERSFTSLSLREVAREAGIAPTSFYRHFRDVDELGLTMVDESGLMLRQLMRQARQRIAKGGSVIRTSVSTFMEFIGNNPNAFRLLLRERSGTSAEFRAAVAREIQHFIAELADYLEQESCMPRHFTEVQAEAMVTIVFSAGAEALDIDLEKRQRZ

SEQ ID NO: 2480 - protein, 192 aa, Photorhabdus luminescens
VSSLLNAKRPPRRVAFLFQNKVWQFPTLTWGDPTLPSALRRFTAEFGMGSGGTTALSPPDKFFIRYHGADTQIRTGDLTLTKGVLYQLSHISNSCPNSLLAQKIKAWQCPTLTWGDPTLPSALRRFTAEFGMGSGGTTALSPPGIFGFLPAVVALLPQPPESISEQAEKSSLCCQPASAGCPLNTKTPSVLZ

SEQ ID NO: 2481 - protein, 159 aa, Photorhabdus luminescens
MKGDKKMIAHLNKLLGNELVAINQYFLHARMFKNWGLTRLNDKEYHESIDEMKHADRYIERILFLEGIPNLQDLGKLNIGEDIEEMLKSDLQLELQGAKDLKEAIAYADSIHDYVSRDLMIDILDEEEKHIDWLETQFELIERMGIQNYTQSQILEGEZ

SEQ ID NO: 2482 - protein, 231 aa, Photorhabdus luminescens
TAPASAERPHFAPPRMDNGRQSRSASPPLPPTAIAHSDWPPPAVTPSATPRLTVAQTPPDQTRSIPLPDSPLSGCHRSACPSVPRFSPEIHSVPALPSPPGGHRYSPVVAAPDAPVSPASGRFADSVTGPPSARFPLCFCPSAPITGQTRYPVAPVEGGSGQSLTVYCSGTGFVPISPANPPTPCPVARLLPDKPAYPSGQSTGTGVHPPSGLTGRWCRTGYGFYASAGYZ

SEQ ID NO: 2483 - protein, 161 aa, Photorhabdus luminescens
IVHAANSAAQFSALQRFFRAALVLSLHHRLSYKGGLDRQFRCCQLECFTSQLFRHTVHFIKDFTRLDQGNPIFYVTFTFTHTHFEWLFSYRFVWEYTYPDFTLTFNCTGHSTTCRFNLTCRQTATAHSFQTESAEANIRTCCQATVTAFVHFTEFRTLWLZ

SEQ ID NO: 2484 - protein, 180 aa, Photorhabdus luminescens
MAKLHDYYKDEVVQKLMTQFGYNSVMQVPRVEKITLNMGVGEAIADKKLLDNAAADLAAISGQKPLITKARKSVAGFKIRQGYPIGCKVTLRGERMWEFLERLISIAVPRIRDFRGLSAKSFDGRGNYSMGVREQIIFPEIDYDKVDRVRGLDITITTTAKSDDEGRALLAAFNFPFRKZ

SEQ ID NO: 2485 - protein, 167 aa, Photorhabdus luminescens
MAHIEKQAGELQEKLIAVNRVSKTVKGGRIFSFTALTVVGDGNGRVGFGYGKAREVPAAIQKAMEKARRNMKTVALNSGTLYHPVKGAHTGSRVFMQPAHEGTGIIAGGAMRAVLEVAGVRNVLAKTYGSTNPINVVRATLDALDSMKSPEMVAAKRGKSVEEILGZ

SEQ ID NO: 2486 - protein, 186 aa, Photorhabdus luminescens
KNRDKPGSFICPYRLLRSRNFCLRLSSTVNKLDVCHRSIVTSTEATLKNTSVATCAARKTRAQLIKQFCHDFVVTSTGECQTTISYAVDLGKSNQRLNDATQFFRFRQSRLDDFMTDQRTCHITEHSLAMAAVAVQLTTTLTMAHDLILLSKTLTCDLVIHQQYLLVASFLSACPEISHVKPVRLZ

SEQ ID NO: 2487 - protein, 139 aa, Photorhabdus luminescens
MYRIGQLAKLANVTPDTVRFYEKQGMMEHQNRTEGGYRLYTEQDLQRLRFIRYAKQLGFTLEAITELLSIRVDPAHHTCEESKQIVDSRLMEVEEKLLEMRKMRDSLKMLSDACCGSSHISIYCSILETLEQGALNKKZ

SEQ ID NO: 2488 - protein, 171 aa, Photorhabdus luminescens
MSVLQVLHYPDERLRTIATPVETVDAEIRRIIDDMFETMYAEEGIGLAATQVDIHQRIVVIDVSETRNERLVLINPELLEKSGETGIEEGCLSIPEQRALVPRAEKVKIKALDYNGRPFELQADDLLAICIQHEMDHLIGKLFVDYLSPLKRQRIRQKVEKLDKQKARTKZ

SEQ ID NO: 2489 - protein, 190 aa, Photorhabdus luminescens
MSNEASPAFESVLTALKAEKVIAYPTEAVFGLGCDPDSEKAVNELLILKKRPWQKGLILIADNYEQLQPYLDDKLLTEEQKKAMFACWPGPVTWVIPAKFSAPKWLTGQFATLAVRVSDHPLVKQLCTFYGKPLVSTSANLNGLEPCRTAEEVRQQFGDKLPILNGDVGGRKNPSEIRDALTGELYRQGZ

SEQ ID NO: 2490 - protein, 182 aa, Photorhabdus luminescens
MSETLRSYLDIQPKVGQNVMLDSSSVIIGDVRLADDVSIWPLVVIRGDVNYVSIGARTNIQDGSILHVTHKTTDNPDGFPLIVGDDVTIGHKVILHGCTIGNQVLIGMGSILLDGSVIEDNVIIGAGSLVAPGKILESGYLYIGSPARQARKLKPEELKGLCYSASHYVSLKNNYLQEGNMZ

SEQ ID NO: 2491 - protein, 228 aa, Photorhabdus luminescens
TSRPTALSAAALTTASTARPDVLPPYPAKTAPVATENRDGFPLSPVPCPGSPAWVSGCAGSAPDSQAYTLLTENSPRSGLAGRAGPSCCDAHSTHTPGPASQAVVPVSPACATRSLSAFAGRVALRSSPTPRHPADDGDAIGATPVTALYPAVPANRRPTATGGARLLASAGRLTRGQWLLLVPVVPSPTKYIPADAKGGHNADEADIATVENKMALLKVQLALQAVZ

SEQ ID NO: 2492 - protein, 152 aa, Photorhabdus luminescens
PTELPHHRILFDLYRCYDIKLKYQAWQLTNGFPAVCSSGRRPSRRSNPFPTELSYSLPLGCCIAFLSPYNTKLKPGSVLLSHGETPHYHRRYGVSLLSSAWGQVGPPRYRRQAYSVFFRPLSLFCHNHPNQSLNKLKSHLSAVNRLLPAALZ

SEQ ID NO: 2493 - protein, 157 aa, Photorhabdus luminescens
MSTTLLTLEEARQVIGHAFVHNMPFNQLLGLELIRFEQDYVEIQFRNQSKLVGNIAQKILHGGVIASVLDVCGGLVCIGNALTRLVPASLEELEKRLSIMGTIDLRVDYLRPGRGELFTATSSIIRNGNKVSVARAELHNEQRAHIASVTATYLVGZ

SEQ ID NO: 2494 - protein, 154 aa, Photorhabdus luminescens
VFMGIKAQSSAHTKWLCKYHIVFSPKYRRKVIFTRIRSRIGEILRDLCQYKGVEIIEGHLMPDHVHILVSIPPKISVSSFMGYLKGKSALMIFDKHANLKYKFGNRKFWSEGYYVSTVGLNEATIRKYIREQEKSDLMQDKLSTREHEDPFKGZ

SEQ ID NO: 2495 - protein, 150 aa, Photorhabdus luminescens
MDIYQESIRFLGNGADFDENGLFQCELSFDTNDHGEALFLTIFKNETTINLHISLTSPVELPTPLPEAIAVAIGEHALEPFRGGFGIGLMPDSRRLTIYKIISLSNKPQNYVQNIFQQLLEKMEQWHHFIEQTNNAETIPEKLPVGIFIZ

SEQ ID NO: 2496 - protein, 202 aa, Photorhabdus luminescens
SPDCQCPQWTGATITDTGGKKLRDISRKNNRDEVLDFTCRRGRFEFRVIRRWFAQEKRFCFWLTNLPPSDFTADDIMALYRCRWQVELLFKELKSHTNRTGFATGQKAIAEGLIWASLLALIVRRSLARRFLPSVSFLKAAKNVDVWLLPILGAIIHHAGSEIEHHLDWALKYLSKNALKLPQRKSNKDNTLEGIVERLNAZ

SEQ ID NO: 2497 - protein, 146 aa, Photorhabdus luminescens
MKWYALVSGLQYERHFAEEIKYIVGTNNPLFRQYPDAKIAFAGPWLFDMAYAKSWEEKLSALEKVAPSVSWLHTTLSLDKLTRHLENYLNVELETGETALLRFYDPRILHQIRDIFSPEQLSAFTDGIHEWVYSFDNNDHFVKGAZ

SEQ ID NO: 2498 - protein, 182 aa, Photorhabdus luminescens
MSKSEHNLIWIDLEMTGLDPERDRIIEIATIVTDANLNILDEGPVIAVHQSDEQLALMDKWNVRTHTGSGLVERVKASKIDDREAEKATIEFLEKWVPAGASPICGNSVSQDRRFLFRYMPELEAYFHYRYLDVSTLKELARRWKPEILAGLKKQNTHQALDDIRESVAELAYYREHFIQLZ

SEQ ID NO: 2499 - protein, 155 aa, Photorhabdus luminescens
MKELVLSLKDEDATVSLGSAVAAACNSGSVIYLYGDLGAGKTTFSRGFLQSLGHKGHVKSPTYTLVEPYALTPRSVYHFDLYRLADPEELEFMGIRDYFHQDAICLVEWPQQGEGVLPDADIELHLSYQPEGRQAHFIALSKYGESLLDKLKYLZ

SEQ ID NO: 2500 - protein, 1129 aa, Photorhabdus luminescens
TMSLHQGTSMFKAFITRNLGVGLVTSLIALVLGGLLSFWGDRFGLSTQAIKIIVWIISMVGVIWLLNLFRDYKQRLPVQEVAVKPPVEQAVLSEAPFYFQRLQYQLRRRYGPLWRRRVCILLVMGQREQVEAIAPGLTAQHWQEGEHHLLLWGGGLQVQPDKAQLQALRQLRRRRPLDGVVWVMTEEQLGQRTQIETALRMLEKQGQQLGWQAPVYVWNVRHSNWDQRDRPTQTVGCFLSEECTPESLAQSLHSLIPTLANRGMEQAIAENRHDFLLRLAQSLRDKGVTRLVGQLTPLLERPPIRLSGVTFSLPLPVPSGMVEHGWLVDASWNGVLEQVRDSRGQAVGFPWEKSAQWGVIALAALWGIGSVTSFGVNRHQIAVSRERLSAAGDRQGDVSARLLSQHGLQREIDRLQSQSARGTPWYSRFGFNQNEALLKAMWPVYQRNNAELIRDAAARLLHQRLTELVNLPAGSAQRHQRITPAYNQLKVYLMMARPEKADAAVMSRVLMADWPHRAGVTDGLWQNSGEALLTFYAENLPRHPEWKISVDNELVSEVRQILLNQLGQRHGETMLYQKMLQQVAHSYRDLTLAQMTGATEASRLFSSRQVVPGMFTRQAWEGQVQKAIAQVVASRQEEIDWVLSDGRQPISKAASPAELKARLTARYFTDFAGAWLNFLNSLRWHKTHNLSDTIDQLTLMADVRQSPLIALMDTLAYQGEAGQPGTALADSLVKSAQNLFQNNKPSVIDPTRLPPGPLDNAFGPLLALMGKSTEENGLTADPSLSLQTFLTRVTRVRLALQQLANTDDPPAVMEALAQSVFQGKSVELTDTRTYGSLIAASLGAEWNGFGQAVFVQPLTEAWQTVLQPAAASLNAQWQSAVVADWQTDFDGRYPFVAAQNEVSLPMLGQFIRADSGRIEQFLHNQLGGVLHKEGKYWVVDKVNSQGLHVNPAFLTAINQLSQVADVLFANGSEGIRFELRAKPVGDVAETDLTIDSQQLRYFNQMERWQRLRWPGDGDNPGVALTWTGVNSGARLYGDYPGAWGFIRWLEAAQVQMVDESRYRLNFATPEGLALTWILRTEVGKGPLVLLKLRGFTLPKTIFEENTGNNLVESGINNNDDEEEYRQNRZ

SEQ ID NO: 2501 - protein, 151 aa, Photorhabdus luminescens
MQIILLDKVANLGSLGDQVNVKPGYARNYLVPQGKAVPATKKNIEFFEARRAELEANLANVLATAEARAEKINALGSVTIASKAGDEGKLFGSVGTRDIADAVTAAGVEVSKSEVRLPNGVLRTIGEHEVNFQVHSDVFAKLNVNIVAEAZ

SEQ ID NO: 2502 - protein, 204 aa, Photorhabdus luminescens
VNCSTNCKRELTEGNSIALMFLETKPSRLTYPAPLKKDKTHEREIMIYTMLLSEYINERIKRNKQTNDRRISLRNNITKVCILSPIQPEIGREITLNSRSSPKAKDESEALLVEVYTNTGTANITNASEKTEKNRASMILCIINITSTLLYPLSFKLPLCWLHSLTPVTSLSMLPGIHSLAVAIHLEIHKGYIYPIKLLYLSIZ

SEQ ID NO: 2503 - protein, 157 aa, Photorhabdus luminescens
MRTPSKQEDLVKAFKALLKEEKFSSQGEIVTALLEEGFENINQSKVSRMLTKFGAVRTRNAKMEMVYCLPAELGVPTATSPLKNLVLDVDYNHPIVVIRTSPGAAQLIARLLDSLGKSEGILGSIAGDDTIFVTLTRDSTTEQLRGAILGLFEQELZ

SEQ ID NO: 2504 - protein, 174 aa, Photorhabdus luminescens
LLVVIQVTHPRRLTPWPNTTLFSSRFSIFVTKFKKEVFKKKFGNTFRKIMLFYFSITGLSSLLLSCIPVIYTTNIASNLIKKGLKMISRKSDWHPADIIAALRKRGTTLAEVSRRAGLSSSTLANALSRPWPKGEWIIANYLEIHPSEIWPSRYFDPNTGELLERKVREQTNNZ

SEQ ID NO: 2505 - protein, 159 aa, Photorhabdus luminescens
MKQIPMTVRGADKLREELDYLKNVRRPKIISDIAEAREHGDLKENAEYHAAREQQGFCEGRIQEIEAKLSNAQVIDVTKMPKGGRVIFGTTVTVLNVNTDEEQTYRIVGDDEADIKENLISVNSPIARGLIGKEVDDVVIIKTPGGEVEYEILKVEYIZ

SEQ ID NO: 2506 - protein, 155 aa, Photorhabdus luminescens
LGVGLSTLEQKLTAMISAPVEALGFELVGLEFIRARVSTLRIYIDSENGITVDDCADVSHQVSAVLDVEDPISVLYNLEISSPGLERPLFTTEHYQRFIGEEVSLVLRIAMQNRRKWLGIIKTVDGEMITVTVDGKDEVFALSNIQKANLVPHFZ

SEQ ID NO: 2507 - protein, 159 aa, Photorhabdus luminescens
PLILILFSHTTSFLSNAFSFFLYLTTHLFFCFTLKIGSFCFTACFFTLNCFISLCWFLFMFGMLIGHFFTFRCLALSFFSCFTFGLFFCLTFSLLFNEFLRCCFGFALRFFFCFAPCLLFRFTLRLLFRFSLFNCITVHICTLFADLNGYRFAFTIGAZ

SEQ ID NO: 2508 - protein, 137 aa, Photorhabdus luminescens
MAREFSRTQRVAQEMQKEIAIILQREVKDPRIGMATVSGVEVSRDLAYAKVFVTFLNVLTEEHDSDVVKNGIKALNEASGFIRSLLGKAMRLRVVPELTFSYDNSLVEGMRMSNLVTNVVKNDEQRRASTDHKEEKZ

SEQ ID NO: 2509 - protein, 415 aa, Photorhabdus luminescens
SALPMRLLCHFQYDESRNRGIIIMAWDIPESYSVHRPEPPVWSLWWRLFSLACFAVVVAVGSFWYLVKDPASLLYALVALAGITALFGVIAGWRLFRYGVELEQAEVLIQENAWQEARWQAWASQAIRVVDYGAFFPPEVPSPADKAVLVNGDSALALPPFSNYLNLFENLLGAVRSSLAAHGVNHKVNVYFSLDSPEAVVWEQFCQVWKKLGLPLSQLQGPVKLKADYTHQISDWLTTETKGLLLVITWCWEGNKTPAATSEGAVVWLLAPSSSQLSAKCCLHRPMVTVAAEAEQSMAQFLRYQRPAITAGTLWYNDDDSPEKDRLLIGLNQRLKALPSSAQQSASATQDQQFVPHWLGKSGPYADWFALTLAMKMAEYQQAPQLFLLAHHATLQLGTVSPLNNVTSSGDFHVZ

SEQ ID NO: 2510 - protein, 171 aa, Photorhabdus luminescens
LCGGRQKKHPDVTENHGLGRSQGGYGSKIHLAVDGKGYPLNVVLSAGQCHESQYAVRLLDGLGIQRKNGFMKRRSKAVIADKGYASHALRNRLKSQGIKVIIPYKSNEKARSDGRVKFDHETYRRRNVVERCFGRLKEHRRIATRYEKTARNYIAMVKLGCIRLFLKAIIZ

SEQ ID NO: 2511 - protein, 168 aa, Photorhabdus luminescens
MLIRVEIPVDAAGIDQLLRKSFDTPAEAELVQQLREDGLLTLGVVATDDEGQVIGYVAFSPVDINGEDHQWVGLAPLAVAEEYRRQGIGEKLVYEGLDSLNEFGYGVVVVLGDPHYYCRFGFTLASEHQLHCQWSTCESYFQVYELADSSLADHKGLVTYSSHFDRFZ

SEQ ID NO: 2512 - protein, 144 aa, Photorhabdus luminescens
VNATENFQIIHRYLARQHVLTLCTATGDDVWCANCFYVFNADEIAFWFMTELHTRHGEMMQVNPQVAGTIAGQIRHIAQIKGIQFKGEVIRLEGEKDKVARARYCRRFPVSIAVKTPIWQLNLNEIKMTDNTLGFGKKICWQRZ

SEQ ID NO: 2513 - protein, 155 aa, Photorhabdus luminescens
VNYHQYYSVDVVNGPGTRCTLFVAGCEHQCPGCYNKSTWRVNSGQPFTQEMEDRVIFDLQDKRIKRQGLSLSGGDPLHPHNTSAILQLVKRVKTECPDKDIWLWTGYRLKELSEIQQEIVSYINVLVDGKFIQELYEPGLLWRGSYNQIIYRLRZ

SEQ ID NO: 2514 - protein, 155 aa, Photorhabdus luminescens
MTQDHKLQVEAIRCGTVIDHIPAQVGFKLLSLFKLTETDQRITIGLNLPSNRLGKKDLIKIENTFLTEQQANQLAMYAPNATVNCIENYEVVKKLPINLPKCIDNVLVCPNSNCISHNEPVESSFRVKVTVEDVVLTCKYCEKEFDRNVVILNDZ

SEQ ID NO: 2515 - protein, 136 aa, Photorhabdus luminescens
MANQRDLEEQREETRLIIEELLEDGSDPDALYAIEHHFSAEDFSLLEKAAVEAFKLGYEVTDAEELEVEDGTILMCCDVISECGLNAELIDAQVEQLVNLAEKIGINYDGWGTYFEDPDEQDEDDLPEQGESRLHZ

SEQ ID NO: 2516 - protein, 150 aa, Photorhabdus luminescens
MKSATFYLLEQPSPQADLQAHEWLACQFAADQWRAGKRVLIACENQQQAEKLDEALWQREPHQFVPHNLAGEGPRYGAPVELCWPQKRGNAPRDILINLLPQFADFATAFHEVIDFVPIDENLKQLARERYKSYRSVGFNLTMATPPTYZ

SEQ ID NO: 2517 - protein, 144 aa, Photorhabdus luminescens
MQRDIQKILLHWGGWVVHGRSGLGWSSVTAGFKGLVSRTSITKLSCCDEDGLIIDGCIAKLRNVQMEQECDFIECHYAKGMSKRSIGRKYKLNESEVRKRMAIAESFILGCLTASDETLELDLLYGFPCHQQPVPPQNVAAYRZ

SEQ ID NO: 2518 - protein, 158 aa, Photorhabdus luminescens
TSFGRKSSSFNEHGYIAPVTLNKSLSTAIGRCFSSCSNASQTGAPHTHHHYTTHMSAYTKHNSAITTRWGGFVAWMCSGCAGTGAGRGLQGRKTHVKPCTLCMHGFLGKIAGFSGILHRLLPDQFSLTECINQVLHGCIFFLIICQRSHVRPESDGCZ

SEQ ID NO: 2519 - protein, 231 aa, Photorhabdus luminescens
FCVNQGVFVTQIYKMVWIGFVINLSTCLLLLVVITGFDFNYLGLSYRERSFLDKILIFMLIFIFLEVANLLVILKMPRYAKISSFITSCFFPLNSAVYFIRERYRDSAWIWSFGAILLLIRGASGICIMMAAERYLSYRKTKDRYFFAEKPGGFLLTLTPLSKTIFLPYECVKRVEERENSVLITVDLNKKIDIVCSKKFIDSDDRKKVIKTLLQTALNNQGDNIMALKMZ

SEQ ID NO: 2520 - protein, 198 aa, Photorhabdus luminescens
ERHLIPVGVALFTNFRVDIYVAGVNRNVIQFGSKFGKIVTCLSFQPSVSGFSTCRNRIISLVGVVLIVEINQEQPHFRCQCAVVVASSDFPGSRLFRFYIAAFHRFANLAVLYGTERAFRIGVKIPAISKVIKHIECGQRRIITDFLAGTFYIVVLEGFDMFESYPRRDGPVADINAVINIPSMCLGAGAGITVIRAZ

SEQ ID NO: 2521 - protein, 174 aa, Photorhabdus luminescens
MSDRIVVSAELTFESLYGAHHGWLKNWLTRKLQSSFDADDVAQDTFLRVMAGDSLQAIRDQKSFLCTIAKRVMIDLFRRNALEKAYLELLAQRPEAFMPSPEIRQCQLETLQQIDQMIDGLSNKTRQAFLLCQLENLTYSDIASRLNVSVSSVKKYMAKATEHCLLFRLEHGLZ

SEQ ID NO: 2522 - protein, 130 aa, Photorhabdus luminescens
MRKITVDNDVVGHDTEINSVVSSTAEKIRQQFGVKVDPNSSQEKFYIATPIIPESRKNIVVTNEGLADVITAKYYWSHSFTSEYFEDNSVDVKVGESKVLVAPSNPLYYSKVVIFNNTKSVAFVTVREKZ

SEQ ID NO: 2523 - protein, 170 aa, Photorhabdus luminescens
MKRVMTVERRAGRQIERKRATMTVHSNDGLLWLTKLERIGEKSAGNKQLVFNNLGHLLNSDMLKGQFLRLDGNKAVGIDRMTKAAYGEHLDENIQNLILRIRRGTYHPKAARITEIPKEDDSKRPLAISCTEDKLVQLAVSDIPQCSRMSARFNPVAGTGQYLPASCNRZ

SEQ ID NO: 2524 - protein, 166 aa, Photorhabdus luminescens
VAYGRYRVKQPQKPHLPGRFAVVVVRIQPPVYRGSYRRVLVHHSVGKMTRCGRPPTESEHIKLHLFYRRLITVTPDELTQCRNDLIKSPVRFRHHPFKLLYQTAAQRYSEHCIAFTVCRPDAGDIGLNLRLCLLIFEDCISFIKMVQARNIGEPALIALIAQTRFZ

SEQ ID NO: 2525 - protein, 163 aa, Photorhabdus luminescens
MENWYLIYCKRGQISRAIENLERQDVACLTPTARIEKITRGKRTVNIEPLFPHYLFVQFDPEIIHTTTIHSTRGVSHFVRFGVHPAIVPETLIKEIVSATEQEYVSPDTPVAGDTVLITAGIFEGLQAIYNEPDGETRSILLLNILNKQLPKALDNKQFVKIZ

SEQ ID NO: 2526 - protein, 179 aa, Photorhabdus luminescens
MHCLLLYSSRDGQTKKIITRIAENLRRSGELCELRDLATVKTINLESYDKIMIGASIRYGHFNSALKKFAICHQQQLNKMPTAFFGVNLTARKPEKRTPETNVYVRNFLFNTPWKPDLCGVFAGALLYPRYHWLDRIMVKMIMKMTGGETDTTKEVEYTDWQQVDYFTDDFLKIVSEKZ

SEQ ID NO: 2527 - protein, 333 aa, Photorhabdus luminescens
GYLMNTCQMLRGAIDFEEIKSQRSSLDTWIEVNLDWIVSHPEDREEAEKEIAKTKEKIPELDAILAKEPPLPELPPRKPLIKVSGVLEEFETLCVKGYFTEREYAPEEFARKEENEQFGALLLAMMGNTSWSAVNSQTKIRLSSDYHFVQGKINGIPFHGWLGLTTVKRGDYVELVVMEQEEHYAVYALTKPELRTISIIPWCNKGIRSKAWDEVFYTCCIFFLIAAICLGTILFPDGSNFWDGADIFTLWLMFFTAVFSVYSYVVSIKKPWQSIKLAQDIFSVLGFPSPQDISLEKLTKKRLKEIGANPSPGNSEEVLPDKYCFISNYYYYZ

SEQ ID NO: 2528 - protein, 173 aa, Photorhabdus luminescens
MEKRMSTDSILTTVPIQWLSVDSPVLPDEVLDWLMELGSMTRRFEQYCNSVRIIPFRECFITEEQLSDENERLLTGQRYWLREIVLCGDNIPWLLGRTLIPETTLTGPDESLVDLGTVPLGRYLFSGNKLTRDYIHVGQQGNRWARRSLLRLSGKPLLLTEVFLPESPVYKRZ

SEQ ID NO: 2529 - protein, 171 aa, Photorhabdus luminescens
MKLINQKKLLEQAEVICQARGVRFTPQRLEVLRLISEQPGAISAYDLLDLLREAEPQAKPPTIYRALEFLLEQGFIHKIESTNSYVLCHHIEQPSHTSAMFICDRCGSVTERDGGTIESAIQQLAKTAGFSLRHTVIEAHGLCSPCEEIESCIKRDECQHDHRIEGSKKKZ

SEQ ID NO: 2530 - protein, 150 aa, Photorhabdus luminescens
LDSDRILIMYYYSAKTNAFYPVELKRNYIAAGSLPDDIIAVSNDIYQEYAANNAPEGKHRVANKNGLPEWADIPPPTKDELRQYAELQKQQLIAEATNQIVPLQDAVDLGIATEEEKIALLAWKEYRVILNRIDVSQAMDIDWPEQPRGZ

SEQ ID NO: 2531 - protein, 187 aa, Photorhabdus luminescens
PLCLQSRISQYFRHNLCTKTRWARVNATHTCFQLPQYPFFGLLIITNNRQATHSLTIHRKYLGERVAHQTRQTGCRHSTNGISIFFHPIRKPLISNIKEWQELSLFNNLNNLIPLIIGQIRSGWVMATRVHHNNAFCRQFPECFQHFTEFYPFGLCIKIRVIVHLNTCPRKNSCVVFPSWITAPHFZ

SEQ ID NO: 2532 - protein, 140 aa, Photorhabdus luminescens
LSKNMRYPVKFEHDETGWAVMFPDIPEALTGGDTREEALAMAQDALVTAFDFYFEDRREIPTPSTKGEAFVEVPASIAAKVLLLNTMLQTRTSNAELARLLGTRPQEIQRIVSLSHSTKIDTIANALNALGKHLELVAIZ

SEQ ID NO: 2533 - protein, 197 aa, Photorhabdus luminescens
LLKITESIFQMNSKNFSINNKFQELNSELGVEFFVLSVCIFDSAMINAFCYVTPTTSILKERWREISDNLNYEYLSKYEPSEFERWNNYLVFICQDAIPDNIKYEIENDKFYMRKVALELKGLEKTDIEKETKKILDEKLLLSNIRLSNNVVFDRSWEQFLGDHSKSILLAGLSGGRDGKSKSMRENWINKLLSDEZ

SEQ ID NO: 2534 - protein, 141 aa, Photorhabdus luminescens
MKKIDHTQRKNEHLDIIFRPPQTESQVSTGFAEWRFQHCALPELDLDSIDLKCSLFGKILQAPLLISSMTGGVHRAHAINHHLAEAAQVLGISMGVGSQRVALENEANDGLSRSLRQIAPDILLFANLGAAQIRGERGFNZ

SEQ ID NO: 2535 - protein, 131 aa, Photorhabdus luminescens
VNDDHPDLMKLLLVLPIVWHKVSRESIKKKKRTTPLIAVVQESLLIKSNLAQRVSEYAGASIQGLNLAVSSGLLMRLIEHGETRFATNFSKWPGGINKLLPKEMVQTITRLANWFSCVDTPSIYRLLLGNZ

SEQ ID NO: 2536 - protein, 153 aa, Photorhabdus luminescens
GLPVREERGDYPNGRHFPAVAEVCVDGSYPIAHRQNQPSVPSIRRLARHRYVASFGPRLRCLPIVLLSGKSSRLLKIRCHIAPRTSWWSGGGGWCDHAKTLWLRPTESRLPANKDIVAETLLHLTAIFVHAIQCCQLGSDLVVKTRQAESVDZ

SEQ ID NO: 2537 - protein, 123 aa, Photorhabdus luminescens
MIKSLLLNKSLPELLDIGSVSNLGATVLEGDPQASMALIFGEPTDNLTCGIFACTHGKFSMVYPFDEHATVTEGSVKLTDVKSGETVEYHPGDSWFAPKGTEVLWEITADRFVKHYLACNKGZ

SEQ ID NO: 2538 - protein, 340 aa, Photorhabdus luminescens
GRLMSTYRPYKEAIDFDEIKRQRKDIDISVKVKREIIIPRYPEDRKEEEKAIEELQAKIPELDAILAKEPPPPELPPGKPLIKVSGVLEELETLCVMGYFTDREYDPAAFARQEERELFGGLLMAVAGNTSAAAVSLQTKVRVRDVCDFVRGKINGVPFHGWLGFTIAKAGDYVELAVTEQEGHYVVYAIAHPELRVISMTPRCKQGIHSNAKYQIRGTWYGSLVLFFAFMVGGIFSEQTRENIILYIKYTSLFCGLMAIVFSPLIYFSCMRKPKPTFRLAEEIFTVLDFPNPTEINLYQFTMKKLKEMKANSPAGKSGKESERVLPDKSCYSSYYYYYZ

SEQ ID NO: 2539 - protein, 175 aa, Photorhabdus luminescens
MGLHFNTYRYYAPEIGRFITPDPIGLKGGLNLYQYAPNPVTWIDPLGWAGNPKTATHITYQGIDAETGKPYVGYASKQGRQAAQEILKYRYGNGFGRFGGKPPEVIYEGYSQAGKDTARGLEQRRFENLGGLEGTANKQNPVGPNNTRRTDYLAAADEHLGQTTKRNGKGGSRCZ

SEQ ID NO: 2540 - protein, 157 aa, Photorhabdus luminescens
CPYGREGSSPSFRTNLSVFLIELLSIYSAIKRQKQPSRYAPANKAHNTANPDGINRKWRDFWFSSINSVSNIANTTPILNCSIPGLMMTNSMPAKLDKPIPHKLVIPCQKSDLSLSLTLIITCTQTNDNDYQYHIQKSVKYKSVEIANLADQINILZ

SEQ ID NO: 2541 - protein, 138 aa, Photorhabdus luminescens
MVTRRDRLLAQLGITQWTLRNPTVLQGELAVHLPDTTRLLIITNDHIDLTNSLLIDIFTAMGLDKSSVYCITTNNVAMLPEQVKCPYWLLGVDITLSWPGISLRSPALNDLYCDGQAKRSLWQQISQHEQHFSINSRZ

SEQ ID NO: 2542 - protein, 149 aa, Photorhabdus luminescens
MNNISLLTPADLPSAFLVEKASHAFPWSEKTFFGNQGERYLNYKIAINEQLIGFAITQVILDEATLFNIAIDPDYQGKGYGKALLAYLMSILPGKGVNTLWLEVRQSNHSAIRLYEQAGFNQVSVRKHYYPTATGKEDAIIMALPLFAZ

SEQ ID NO: 2543 - protein, 152 aa, Photorhabdus luminescens
EKTKITNLGVLIMSIVFASIDPRSNPLQTSSQNYVDIPGLKLDVSKYSNSPCLTALITLNIPTPYASGNNFPGGNFAIVTDQGEQLAYGGFTYSSKIPENSGRMPFTLVARYSLASNVSTIKAQWSNIRGSTVHIDSYASISAVIQCNQLVZ

SEQ ID NO: 2544 - protein, 187 aa, Photorhabdus luminescens
VKTGLKQRFHMLIGLAAILIIIQLFDTLTGGALSHFGIIPRYAQGLIGIPLSPFLHGSWGHLFSNLPALLVLSALLMAHSIRYYVIASLFIIFVGGTLVWLFGRSAIHIGASGWIFGLWGLLLANAFFLRRVKDFFFAILVFVYYGGIVFGLLPWQTNISTEGHIFGAISGLVFSWLSKRWVITSHZ

SEQ ID NO: 2545 - protein, 307 aa, Photorhabdus luminescens
LKVEIRPYQNDPQLFLADLEKVSLAQLQGSGSSELDRLVNLIFDKGIKITSDSSVVTENKELLKKLIAYFLPADAVVEGGHLDSQIKNGINNLESFLNSSTLKTWTLKDFLAAVHFNLTPDRLDDDVIDIFVSVMSGHDKKRLELRDELATLTAELKIYSVIQSEINAKLAANGELKIDDNSFNLLDHKKYGFSDQPTFEKSAEYKLLRKISSGSEISIKTFLESSNKQSGAMAGLENSYEYDKENNRLANFSTSVNDRVSPLNNTVQEKTTRLNEASSRYNAAIEALNRFIQKYDSIIRNILGAIZ

SEQ ID NO: 2546 - protein, 885 aa, Photorhabdus luminescens
LLLCQSCHYSLKEPGDIVMNESLCWTCESIGPALLPVRYTVVPDNVSETLPTWAETLESAAPGYHYALRALRQGFLYVYYTNAGLDEPESWDAWSVSEDGALWQQFSAPFGVSPQKTSDCRAPNHLNANMEFIALRDIALRQETWLAFTPSAWSWETIEYYHNNRAAREKRMQCVKPWQWRGVPEGVGIAQATVENLNTVIDYGLGDNDSGKYVLPCNRKVSRISRTLEEAPYYEVYHGALRPKSTLYPWSSKRAGCADITVRAMQKRGLAKDGTPVSPVLIALHDPIGIAHELAGWGDDIAGAHKTFLDELSIEFMTDSSLNGAENQLRQMHTTHFKKPDKEKDAILAASTGLSIQEWEKRREDSIRHAIESDKKTFAHDWKKYTAELNLAKRQAFNQCYADLCTDVAKELEQLAQLRVSWLKQSGFITCCQDFHTTRLEDNLNYREAVDYAIASLNVTETGCAYLDALIDEYSALSPENIVWRSLLLNNPEVMKEMDGFLQKMQLNKGNEKPADISVFMKTVTTLSGKLVEAYDKANEALEKPPKSDSTFARAMLHSDRRLVTLGDRFFNFTRLGKVLNSTNEMLSKSLFSVISGVSFGRAVKLSVSQLQEGDLFRRQVLKQLKESGAKARLETKNGYNDRFKEFAQSAEGEPVLKKSRIKLLALFFNGLEYANQLKESKGGVKGQAQVTAAFLSTLSTAMEIVEPMVKHGIENIAAANTIKFIGTNAGTVSAALNFGVDISELGSELWNGRRWQFIGLYGLKVAYDFAQLTAALNGLLEILINRALISTESLLVRGVSRLLVWEYFVLLCNWRVMLVIFVVEVLVIYFSDNDLQKWCRSCVFGLEPAKNLQSTQWIYPESQKDKLCEEQRKSFFEAIKDGLZ

SEQ ID NO: 2547 - protein, 164 aa, Photorhabdus luminescens
MAIPAYLWLKDDGGADIKGSVDVHNREGSIEVVALEHALHIPTDNNTGKLTGTRVHAPLVFTKEVDASSPYLYKAVTTGQTLKSAEFKWYQIDDAGQEKVYFITHLNNVKVVKVAPLMHDIKDPTKEKHNHLERVELRYEKITWTYKDGNIIHSDAWNERSQAZ

SEQ ID NO: 2548 - protein, 179 aa, Photorhabdus luminescens
MAAINVKSVMMGGIVCLMLQGLVGCGLTQTVTDGTVAVTQSIFHKQVKTLRLDFSARSALNTTDAQTPLSTVVRVYQLKDNKAFKRASYADLLKGDSEALKADRLTQRDIRVAPKGSVSLDMPMEKAARFVGVVGLFHTPDATNNSWRLVIRRDELDADKPRTIELGSGTLTLNAVKEZ

SEQ ID NO: 2549 - protein, 135 aa, Photorhabdus luminescens
MTPANVARFMTSLFPPSTLRTCRLLDAGAGVGTLSCAFLDRWVTGGFDFESAAENPLLGITPIMNWVREFYNKEYAPNTREAFRRQTMHQFCHASIVLYNPDKPDCIRGIHCVIENILPVLCWGRIFQRRDGDLZ

SEQ ID NO: 2550 - protein, 160 aa, Photorhabdus luminescens
PRTGVIQMTVNIDALINSLGKSYQEIFDDGLIPYKSKPSGPLGVLSIGIDMVKEGIFLSFERSSKILNEITLRLLRDDKASFIFPNELPSPLKHSMDRVWVKENLGDPIKSIPPRQILRNQFGWKDLYRFTDEISMQISYDMMERVKSVTFLPTSEVRWZ

SEQ ID NO: 2551 - protein, 156 aa, Photorhabdus luminescens
MTINVEALINSLGETYQEIFDEGLIPYKTKPTGSSGDEVIFLDMVKEGVFLAFYRDGKRLKEITLTLLDEKKPLYQFPNKLPSPLVPLMSRQWVHEQFGEPKKSQQPQMVMKRQFGWKELYTLLDFHIPTSMKISYDMMERVKSVTFLLTSEVRWZ

SEQ ID NO: 2552 - protein, 156 aa, Photorhabdus luminescens
MTINVEALINSLGKTYQEIFDEGLIPYKTKPTGYPGAPDITLSMAKEGIHLAFKRDGKILFAVELFLLDQKRPSYQFPNELPSPLEPLMIRKWVHEQFGEPEKALPPRKFLKKDVGWTELYTLLDFRIPTSMQVDYDLFERVDSVMFLPTSEVRWZ

SEQ ID NO: 2553 - protein, 154 aa, Photorhabdus luminescens
MVINVEALINSLGKTYQEIFDEGLIPYKTKPSGYPGDSDISLDMAKEGTFLSFDRETKTFIEMTLTLLIPERPSFVFPNNMPYPLIKEMNRQWVDKNLGKPIKSAPPFEALTYRFGWTYLYYYQGKSEISMQVSHDVLDRVSRVTFLPTSEVRZ

SEQ ID NO: 2554 - protein, 348 aa, Photorhabdus luminescens
TMIETTIPLTVDYDFSPEAETRRQTGLLADLRMALTQHDGHGFLLVDPAVFLKNRQEERLPAAILNHQPAAIPTQIKHHHFESRYSPWLVPLDINRSEDAELLALSVTQALQEADPAELIAGRGRMVCGWLFSASPVSTIAHHIGMMAVQSVSFQPQVMLRFYDPAVNNAFWPVLDSWQRSRLLGPLTDWYLIDGDGQLLHRDNAESAQELYIFSLSLTAEQVEEMAWSGPMNRALRRYRQAHREQLRRTERESLHIMLALLRRVTARYAFDMAQDLESCALHGLLYHPEIDLHPRIQSLLSNEGGDSDEGYAERTVRLTVEAWSALARDCCYANPAIIPSKNQEILZ

SEQ ID NO: 2555 - protein, 156 aa, Photorhabdus luminescens
MIDVIEIINSLGKTADMLVENKLIPEEKFEFAFEGYSRFSVEPETGLTLVFDIISTVLISVQFTLINTVDDTGTYSGDMPAPFLHKMNKAIVRAFMGEPDYSSGPERIPVIGLVGGFDAYTRKLNDQYPNTEIRFLYQTDLRVDALLFEQSVNNDZ

SEQ ID NO: 2556 - protein, 156 aa, Photorhabdus luminescens
MTVNVDALINSLGKSYQEIFDEGLIPYKTKPTGYPGASFIALNMAKEGMHLAFKRDGKILFAVELFLLDQKRPLYQFPNELPSPLKPLMTRVWVHEQFGKPEKALPPRKFLKKDVGWTELYTLLDFRIPTSMQVDYDLLEQVKSVAFLSTSEVLWZ

SEQ ID NO: 2557 - protein, 156 aa, Photorhabdus luminescens
MAINIEALINSLGKTYQEIFDEGLIPYKTKPSGYPGDSDISLDMAKEGIFLSFLRENKVLTEITLTFINHKRPNFIFPNKLPSPLIPLMSRKLIHQHFGKPEKSLPPRKRLTKEIGWTELYTLLDFRIPTSMQVDYDLQERVRLVTFLPTSEIRWZ

SEQ ID NO: 2558 - protein, 143 aa, Photorhabdus luminescens
MDYRYGSHTVFQIEYHFVWVTKYRYKVLTGEVASRVRELIRQTCGSFEIRILKGVVSQDHVHILVSSPPTLAPSEIMRRLKGRTASKLFEEFSHLKKRYWGQHFWGRGYFCATVGQLTEEMIKSYLEHHFEPNPNDNFRMDNZ

SEQ ID NO: 2559 - protein, 797 aa, Photorhabdus luminescens
RGKPMMDRKMLRARQLKASQAVLPGHARYRLEVRRCHAELDVFSFTGEERLCAPYCYTIDFTSPTRDIDPAVMLNKSATFILQAPENPEQVRKVHGVITRFNRLTTSADETRYQVCLEPYLALLRHTRRCGIYQHQSVPEIVEKILRERHEFRGQDFLFTLVRDYPKRELVVQWQESDLDFIQRILAAVGIWYCFEMDSRLGIEVVRFGDNQRNYQYDVRLPLRDPAGMNHNDRDSVWDLHVEHQVVTQGVKVRDYNYREAGNDLQYQVARDRDSTVVGEVYRYGDNFLEKGEQIQPVPETAGFYARLHHERNLYQQHRISGKSSSPMLVPGLVLELDGERPAGVGKAGVLIVAMHSSARRDSNYLVSFSGVPYSEVLSYRPALRERPVIAGTVPARVTSNWSNGTYSHIDTTGRYRVKFDFDLDEWPLGGESLWVRLARPYAGKTHGFHWPLIQGTEVAIAFEQGDPDRPYIAYALHDSRHEDHVTLYNYKRNVLRTPANNKLRMDDERGKEHIKLSTEYGGKSQLNLGHLVDGQRPHPNKRGEGFELRTDDWGTIRAGKGLFISADQQIKASGEQLDMQRALAELDAAFQTAAGLRHAAEAAKAELADIETQAAFMNETLKALQQRALLLSAPSGIAQVTPGNLQFSAGENLITTVGCDADMSIMKKFRLAVGNGLSLFTRTLGLKLLAASGKVEIQAQTDAIEVLAQQALTLASQQDRVTVSAKTELRLECGGAYISLKDGHISFAGPKNARFQCDILQKNGPVSQSSDLTLPERCASTAERMMGNQDGVTKKZ

SEQ ID NO: 2560 - protein, 143 aa, Photorhabdus luminescens; identical to SEQ ID NO: 2558

SEQ ID NO: 2561 - protein, 104 aa, Photorhabdus luminescens
MSESAYQKLQALSAELGRDLYVHRSPLSLSILFLCPNNDIVEEFSLSTETKNGIEYAHLFVMEHVTDEMLNLLIDALRQPGAFDRTGALNNLSQLVNPGTGFRZ

SEQ ID NO: 2562 - protein, 168 aa, Photorhabdus luminescens
LIVLMQIKERSFQMDKIDRKILAELQADGRLSVTDLAERVGLSLSPCHRRVRSLEQAGIIRGYRAHLDPSSLGFNFSAIVFVTLREGDRLAIRSFEDAVTEIPQIILAQRLFGDPDYLMHVVTHDLPAFQKLYDERLSSMPGVQRLISTLVMKTVIQDRPLPLAYGIZ

SEQ ID NO: 2563 - protein, 163 aa, Photorhabdus luminescens
VRWLPFILIFLLVYIESALFVRVASELGVLLTLLLVLFTSCIGISLVRSQGIKNFIQIQQKLINGESPAAEMIKSVSLLLAGFLLLLPGFFTDFLGLLLLLPPVQKTLVMKLMPHINFYRPHNSGGFRRDSNTFEGEYERKQDDPSRTLKDHKPDDDEHKPHZ

SEQ ID NO: 2564 - protein, 189 aa, Photorhabdus luminescens
MATYSTNEFRSGLKIMLDGEPCAILESEFVKPGKGQAFARVRIRKLISGKLLEKTFKSTDSVESADVMDMNLTYLYNDGEFWHFMNNETFEQLAADEKAVGDNAKWLVEQAECILTLWNGQPISVTPPNFVELEITDTDPGLKGDTAGTGGKPATLNTGAVVKVPLFVQIGEVIKVDTRSGEYVSRVKZ

SEQ ID NO: 2565 - protein, 105 aa, Photorhabdus luminescens
MSWFVLVIAGLFEVVWAVGLKYTHGFTRLIPSLITASAVALSMGLLAYAMKGLPIGTAYAVWTGIGAVGTAIFGIIVFGESASFARILSFALIIAGIIGLKLSSZ

SEQ ID NO: 2566 - protein, 144 aa, Photorhabdus luminescens
MTTRYNSDFYGWTQEQASLLRSGDLSQLDRENLSEEIESMGNSQRNELESRLEVLFLHLLKWQFQSERQGRSWKLTIEEQRRKIARRLKKNPSLKSELSEISSDAYGDAIIAAERETNIRRSVFPETCPWTFEQIMDENFWPEZ

SEQ ID NO: 2567 - protein, 198 aa, Photorhabdus luminescens
RDYIMSHFFVKNKKYFLYSMFFFSFIVQSSDMNIQDTPSIVFNHSDDFLSEFSIPMPKNEDEYHALVKKANSGNVDANWMLAVIQQTEGYRQEASEKYKLSISRNDKYKLRSMVNLGFILEDENKYSDARALFELAGKSGYFEGYRTIGTNYLNGIGVNQDFNKAKEYFNKGSQIGCHECTFLINNWSDVIKLKKSEZ

SEQ ID NO: 2568 - protein, 161 aa, Photorhabdus luminescens
FLQQHGRLLRLHGRAKSLNRETQGNGDSFNMRVKSHFSSKSLIAQQAVTWIREGMIIALDASSTCWYLAKQLPDINITIFTNSIRICHQLSKKKNIQLISSGGVLHRKYACYINSSLITQLKNLEIDLFIFSCDGIDANGDLWDSNIDNAQFKEINPNSAZ

SEQ ID NO: 2569 - protein, 894 aa, Photorhabdus luminescens
MDTVCTALLCRLNSYCARALEAAAAFCQTRAHAEITVEHWLLKLLEGGEGDITVIARRYAWDMDALWQSLLTTINRLPHSINQRPRLSSDLCSLLQVAWCIASLEEGNESIRSVHLLQVLRGQPAWLRIHHSWPLLNLSVTQLQCLRPLLDQQSDERPEIQIAACLTADGSIAEIAGSDPDKYALNPQPLSSALQNVLDKFTLDITARAAEGGIDPVFGRDREIRQMIDILSRRRKNNPILVGEPGVGKTALVEGLALRIIEGNVPDSLKTVSVRMLDLGLLQAGAGVKGEFEQRLKNVIEAVQQSPAPILLFIDEAHTLIGTGNQAGGADAANLLKPALARGELRTIAATTWSEYKQYFERDAALERRFQTIKVDEPDDETACLMLRGLKARYARYHGVHIQEDAVKAAVTLSRRYLTGRQLPDKAVDLLDTASARVRMSLDTVPEALTQLQSQLTALEIEQQAILEDIALGQCHHSDRLTQIEMQRHELYRQQQQRDKQYQQEKQLTQQLLDARQDISRQGDIARLQQQLATRQQGQPLLSSDVDVRSVATVIADWTGVPLSSLLKDEQTGLLHLEQHLGERVVGQEAALREIAQRLRAAKTGLTPEQGPLGVFLLVGPSGVGKTETALALADNLFGGARSLITINLSEYQEPHTVSQLKGSPPGYVGYGQGGILTEAVRKRPYSVVLLDEVEKAHRDVINLFYQVFDRGFMRDGEGREIDFRHTVILMTSNLGSDQLMALLAQQPDAPNAVLHELLHPMLRDHFQPALLARFQTVIYRPLQAGALRRIVEIKLEQVTRRLHSHYGLTCTVESSLCDILVNACLLPDSGARNIDSLLNQQILPVLSQALLERLAHHNKPAGVTLGFDEEEGITLAFTDAEPVASLDSEENPZ

SEQ ID NO: 2570 - protein, 157 aa, Photorhabdus luminescens
MDIRKIKKLIELVEESGISELEISEGEESVRISRALAPQSFPAAQQYIPVQAQQPALANVVAPSQALPEAISSRSAAIDGHVVRSPMVGTFYRTPSPDAKPFIEIGQRVNVGDTLCIVEAMKMMNQIEADKAGVVKKILVESGQPVEFDEPLVVIEZ

SEQ ID NO: 2571 - protein, 151 aa, Photorhabdus luminescens
MAGKFHILLLNGPNLNMLGTREPDIYGSLTLDDIVSKLSEEAHQSGVKFSHLQSNAEFELINRIHSAQGNTDFILINPAAFTHTSVALRDALLTVKIPFIEIHLSNVHAREPFRHHSYLSDLAVGVICGLGVDGYSFALQAAVNRLSKFNZ

SEQ ID NO: 2572 - protein, 163 aa, Photorhabdus luminescens
MNQYRSHGRWIIWLSFLIAMVLQIMPWPEQIYMYRPTWSALLLIYWVMALPHRVSVGTGFILGIIVDLIQGATLGVNALAYSLVSYLVSFKFQLFRNMALWQQALVVVALSVLMDFSVFWAEFLLSNVAFHPEVFWNSLVNGILWPWLFLLMRKIRRQFNVHZ

SEQ ID NO: 2573 - protein, 196 aa, Photorhabdus luminescens
MKTLYLASGSPRRRELVELLDFKFEILSPQVKEQRQEGETPRQYVSRLAKDKSLAGVAIAPEDFLVLGADTVVVLNGKVLEKPRSEQHAVAMLSALSGQSHQVITAIAISDSQRTLSDIVITDVTFRQLSTQEILDYVATGEPMDKAGAYGIQGKAGCFVKTLNGSYHSVVGLPLVETHELITKFFALVDGKGNSZ

SEQ ID NO: 2574 - protein, 155 aa, Photorhabdus luminescens
MKKTWLAGVLLTVLAVTCGTFAKGVDKTLLQEPETGRSTSAIQRIEGLTEQNNVVAYLRQNNKLPDIYITKKQARDLGWNAKQGNLCQVLPGRAIGGDKFTNREKKLPMKPKRQWFEADVNYRCGHRGSDRLLYSSDGLIYLTLDHYRSFTLMEZ

SEQ ID NO: 2575 - protein, 185 aa, Photorhabdus luminescens
MIYRWLTWPLAQLDAETCSAELLPMLAYQRDIQRFNGEPLTLFRKRVKYAFINAREAGSVAGFIAIFERLGVGHVEVLERQPAIDWDVIILRVSDGQVAENPDLLMSIIRQYGRTCRRYRFEVMANNKLFMRVGSLGAEYCCYYAAMSSPPLLLKVGYMSGESVFDSASLKAITVPNMTYGASLZ

SEQ ID NO: 2576 - protein, 179 aa, Photorhabdus luminescens
MSQIITLALDGEAIPLKSLTVTPSVVFQDTDQSGQSSSTAVAEQGIKPKELRVTGIIPFTEQKTLSRLFALAEAKDKGSLKRYRVANLTAGAINFRIGTFTHTIDASKIDGKQAWQVTFTLREHLSVAEKRDARAADNIQARKQTGQGAAAAKEAPEKLSWFESKVLKPINDTIGPAKZ

SEQ ID NO: 2577 - protein, 137 aa, Photorhabdus luminescens
MTKPAIIINELDAERLDSLLEQPAFADTSIADALNEELDRAEIVPPAEIPSDVVTMNSRVRFIDLTSNEERVRTLVYPASLQDSSDQLSVMAPLGAALLGLRIGDEISWELPNGEETRVKVLELLYQPEAAGEYHRZ

SEQ ID NO: 2578 - protein, 583 aa, Photorhabdus luminescens
LWCGAVCVSTFSNICLLGKAKEDTLSCVLKRALWLLAGVLAALLCLFFFPLGNVSVALWLAVISMVAVMAWWWVRRTTLEISHQASVYRLLAALPAASWHQPVVLTCGDSVATLFAGELVRFTPQGCFICVPKQSEMSTLVEAIIAARPDWCRQISVLLTLFPEQQWDHAVMAAKIREFRYQVDRVAQLTACHTPVLIASYLDGDISPWFELQADSATMTVWGEKHAAVGMNIWLTEGDAQQRVARLQQTIVAAAWQRWMVENILNECRSQELVSRPCYPIAMALTFLPQTPQADSLWTKWLVDRTTLPRISHSIAEAVNVSPFPDAMLRLLPHHVGHTPHRRAVIWGIGLLSGFTCLALASCAWNNLRLFRQIRSDLQHYQVVGVKDSGAKVQAYHQLKRDATLLEKYQRDGEPVRLGLGLYLGDRLYTPLMTVINHAVLPVSSPPVLKSGKPLPQTLNLSSMSLFDVGQSRLKPEAAKVLVNALIEIKAKPEWMVVITGHTDSTGDAVKNRELSLARAKAVRDWILQTSDVSPTCFVVKGEGATQPIATNTTAVGRAVNRRVEISLMPPSVIACQRPENHZ

SEQ ID NO: 2579 - protein, 160 aa, Photorhabdus luminescens
VNRKMNNQADLLLSSVLSLACTRNNVHCSSKKRALEIISELASQQLKLPENVVFEAILTREKVGTTGIGSGIAIPHGKLDEESSDQAVGVFLNLEQPIAFDAIDNQPVDLLFALLVPNDQCQTHLHTLSLIAKRLADKNLCRRLRSAQSDEELYTIITEZ

SEQ ID NO: 2580 - protein, 182 aa, Photorhabdus luminescens
MKSNMKNRIRNAFIASAIFVVSLPAMALKDDTQKPISIDSAKQALDMTGNTATFTEDVIVKQGSIDIRADKVVVTRPDGDSKKMVIEAFGNPVTFYQLQDNGKPIKGRGAKMRYEMDKELVTLTGNAYLEQLDSNIKGDRITYLVPTQQMEAFSDKGKRVTTVLLPSQLQEEGPGANNKSKZ

SEQ ID NO: 2581 - protein, 193 aa, Photorhabdus luminescens
MDRIKSWLVITLVLIILALIGWNLSDSDEIKSSSATDNSQPTYQSQEAITFVYDPTGKLTYKLVADDVQNYAESKLTWFTKPVLITYDSNAIATWTVRANKAKLTNDKMLYLYGDVQVDSLTNTSQLQRITTENAIINLTTQDVSSDDQVTLIGVGLKSVGMKMRGNLRNKTAELIEKVNTYYEIQHEKQNPZ

SEQ ID NO: 2582 - protein, 188 aa, Photorhabdus luminescens
MSQLVYLDTCYGPVDKDVIEKARKIRLLICDVDGVMSDGRIYMGNNGEELKTFNVRDGYGIRCLITSGIEVAIITGRKAKLLEDRANTLGITHLYQGQSDKVLAYQKLLDTLGLRPEQVAYIGDDLIDWPVMEQVGLSVAVADAHPLLLPKAHYVTQIAGGHGAVRELCDLVLFAQNKLEEAKGLSIZ

SEQ ID NO: 2583 - protein, 169 aa, Photorhabdus luminescens
MQSKKSEIWVGFFVLIALAAIVFLCLKVADIKSVGNQPTYRLYATFDNIGGLKVRSPVKIGGVVIGRVASISLDEKTYTPQVALDIMKQYDRIPDTSSLSIRTSGLLGEQYIALNIGFEDPDMDTRILKEGDRVQDTKSAMVLEDLIGQFLYKSGDNVQSGAEHTPTPZ

SEQ ID NO: 2584 - protein, 182 aa, Photorhabdus luminescens
ISRCIATARERILGSIANYVTGVRECSQQRGNLKDDGYIRWSIYEKMGYDLNYVEQLVKKCRFIDLYRYNHKFESELVKKIVKNASNNVVDFGAGHSVIEDDLDFKYIRNQMKEKGTTIFLDKSSHIGVNYLHPEEVFLNNYFLASKCNQKLSDITITVDNKSKLQILDQALSALKSIEVIZ

SEQ ID NO: 2585 - protein, 191 aa, Photorhabdus luminescens
MLRPPPLQTFPPETLSLDELVPKNHLVRQVDAAIDFEFIRELVAPLYCHNNGRPAIDPVMLIKMMLLGYLFGVPSERRLVQEIQVNVAYRWFLRLGLTEKVPDASTLSQNRRRRFNHTAVFQQIFDHIVEQAIAKGFVGGHVLYTDSTHLKASANPHKSENVMRSVPPGAYVDALDKAVTQDRAAAGKKAZ

SEQ ID NO: 2586 - protein, 218 aa, Photorhabdus luminescens
GGSMNKEISIDDLMLDIGMLVIALKSGDKSMYGEALYQKGVELIDAARQQLSASGISEENMAHIIYALCALLDETVLRRPERDHGYETWSKTPLQTRFCNSNHAGERLFERIRHVLDQPQPSLLVLAGFQRVLALGFQGGDLEKISQERQSLLDVLTDRAGVMAVQPHQMIRVNADRHQGQYWRARSPWFWGCLAVAGITLVWCGLRLYLQQYLSVRZ

SEQ ID NO: 2587 - protein, 154 aa, Photorhabdus luminescens
VKNPPKRRVCTLNNCHKDKKLTFGELWTTTCFTQTNFLTFNFTSIAGNEASFTKIRTQSFVIRHQCAGDTVTDCTCLTRNTTTFNSDVQIQFTQHINQLQRLTNNHARCFTAEVNFKTAFVDDDITATWLNKDTCGRAFAATSAVVLIFSHCLZ

SEQ ID NO: 2588 - protein, 172 aa, Photorhabdus luminescens
MELSQMSPRRPYLLRAHYEWLLDNDMTPHLVIDVTLRGVNVPMEYARDGQILLNIAPRAVGNLELTNDEVRFNARFGGVPRRVNIPMAAVIAIYGRENRAGMMFEPEAAYKDEYLFKSASDQDKADTSAFATDNLVLVTDTLPDAEDNSGTSPDDEPPKPTRGHPALRVVKZ

SEQ ID NO: 2589 - protein, 125 aa, Photorhabdus luminescens
VAELGEIGAKQEITHNISTGDSKWIKLAFKLTQSIHLGFAKEVRYALSLALINNPAEVLANVDKENNISLADICTTPPELGTRENKIEFVDKVKKSLSAITDFKAKNRTGDCFWELEKAYNTEFZ

SEQ ID NO: 2590 - protein, 197 aa, Photorhabdus luminescens
VLDRIKVCFTESIQTQIAAAEALPDAISRAAIMMVQSLLNGNKILCCGNGGSAATAQRFAANMINRFETERPSLPALSLNADNVVITAISSNKQHDEIYAKQVRALGQPGDVLLAISTHGNSRDIVKAVEAAVTRDMTIVALTGYDGGELAGLLGPQDVEIRIPSHRSTRIQEVHMLTVNCLCDLIDNTLFPHQDDZ

SEQ ID NO: 2591 - protein, 178 aa, Photorhabdus luminescens
MDEILVLVDKHDNPIGSAGKADIHQKGMLHRAFSIFVFDNKGNLLLQKRAATKYHSAGLWTNSCCGHPRVGEALEAAAHRRLGEEMGFDCPLKKVSSFIYHAILPNNLIEYEYDHVFIGRFDKEPIINLDEVSDYKWVNLLKLRALINNAPDVYTVWFKKIINGLSYQDIEEWQRLIZ

SEQ ID NO: 2592 - protein, 138 aa, Photorhabdus luminescens
MDKNQYSEKWQMRFAFFEQNGAPKTPEHKAAMKVEPYMRRILLNMNFIAFFFGFIYFFVLGLWRKNLTLFGVGVGVGVVVIIILEIMESVLSIYIPPAVDMGIKFAFSAIWGTTANYAYYLKEKVNSQSWNPFEGLFZ

SEQ ID NO: 2593 - protein, 221 aa, Photorhabdus luminescens
ILTLFLHCSQLFIQCIYFSFHHFMTIFCQLTHLLFGIARSINGRQHFNNDGTIIPAIQLNTSISDRRNADRDNRHSRRDRSMESASFKWQQTTTTTTCPFRKHPNRKMTIFNLLHNLSNRAMCFSTVSTINQDITCQPIKLTKKWDQHQRFFTYCHCARLNRIGHSYHVIVVLVVANVDTRTIMLSFSRNTLNNFDAKYFRQPTKHIPKHHNMVRMTWPEZ

SEQ ID NO: 2594 - protein, 163 aa, Photorhabdus luminescens
MYDRVCVINGWALFAHPCFVEQLKQSIDKVEQLQQKYPNDYLKKNDTKRLAAIIKLVTEIIPNDPTNIAFRLGDTLGGKRKHWFRAKFFQQYRLFFRFHAESKIIIFGWVNDERTKRAYGDKHDAYKVFGEMLNAGHPPDDWNSLLKESIDSPHLTKLINEHZ

SEQ ID NO: 2595 - protein, 180 aa, Photorhabdus luminescens
MDRSTALKRFIDWDKKGRYVFTLADLRKIFPEDSPKTRQAGLNRLVKESMLSRPVRGVYLFNFAHNRDSYAIEHIAKALRRGEYNYVSLESALSEYGVISQILIDRLTVMTTGRKGLYHTPLGTIEFTHTKRQQEDILASITQANRPLRLAKLECALRDLKRVGRNTHLVNKQEITHGQZ

SEQ ID NO: 2596 - protein, 501 aa, Photorhabdus luminescens
LRILMTIRDSSESNCMRCRIFRWKGLTSIYLWFLRCRKRNRNYLLGVMMKILRPLWIEDAFLAPQQFQQQARWEALTNNCIAHLGLIHPWGVLDIRFDQEALRLNRLKVQHLKARLPDGTLIDTDHADNLPAVCDLQQVASADMRAVEVLLALPLEHANGGNCRQSSESVGPGQPPLRYQQEWVEIQDRYGNGRESIAVERHAISLRFQHDQNEAYLTCPLARLVRDGQSGWMLDDRFVPPLLSFAAHPPLLEQLDLLLTQLRAKRTRLMGMRRESHQRMADFAVADVSLFWLLNALNSYEPVLNNFNAAPALHPEIIYRELVKLAGALLTFSLESDLDAIPDYQHDQLSDVFPPLIRLISTLLEASLPSRVISIELEVVRENQWRASLHDRRLCEEADFYLSVRSSMPAHLLQTQFPQLCKVGAPDDVERLINLSLSGIPLHPLSHVPAAIPLRLENQYFAFDLNNPVAKAMLEAGSCAFYVPGTLSGVQLELFAVLRSZ

SEQ ID NO: 2597 - protein, 163 aa, Photorhabdus luminescens
MPLANKSVFVGGPIQFAICDNGFHEELRTTIQLAIKTVKALNGNVFSAHLTEKFGIDTPSYTPDMVSKRDFQWMQQCDFFMPILPVHQGDELLRTDGTHIELGWASALKRPVLLITQLPIVNGGSHLLKGLEHICNVSKLDIHDFRQNPGQIGEIFRNFAVEZ

SEQ ID NO: 2598 - protein, 150 aa, Photorhabdus luminescens
MHCPFCAAVDTKVIDSRLVGDGSQVRRRRQCLECHERFTTFEMAELVMPRVIKSDDIREPFDEEKLRRGMQKALEKRPVSSDDVEMAISYIKSQLRATGEREVPSKMIGNLVMDELKKLDKVAYIRFASVYRSFEDIREFGEEIARLQGZ

SEQ ID NO: 2599 - protein, 157 aa, Photorhabdus luminescens
MNVIKGVVAAPQARVAIAIARFNNFINDSLLGGAVDALERIGQVASENITVVWVPGAYELPLTVKTLVETQKYDAVVALGTVIRGGTAHFEYVAGECSSGLSSVAMASEIPVAFGVLTTESIEQAIERAGTKAGNKGAEAALTALEMVNVINAIKGZ

SEQ ID NO: 2600 - protein, 164 aa, Photorhabdus luminescens
MDKAKHRLRMSNPWHLLATGFGSGLSPVVPGTMGSAAAIPFWLLLVQFPEWICWLVIIVGMFFGIMICQRTSDDMKVHDHGSIVWDEFIGMWITLMAIPMVNWQWVLTGFIVFRILDMWKPWPIRWFDRYVHGGLGIMLDDVIAAGFSFVIVWLLAFYQIFIFZ

SEQ ID NO: 2601 - protein, 158 aa, Photorhabdus luminescens
LVNAENSSGEEQAKDKLVEIFCDVDDFCRFFIPQWTQFCLDNGYRLRHRQGRMSPSEIMTILILFHLSHYRDFKHFYLEHIWKYHHNDFPTLLSYTRFIRVAPSVLAPLCSYLTQLKGKPTGIAFIDSTSLGICHNIRIPRHQVFEGIAKRGKTSMGZ

SEQ ID NO: 2602 - protein, 175 aa, Photorhabdus luminescens
MMLPIWHEEPIGKHHDRGAFDCGDEALNQFLHRHARQSHEKGGAKTYLAVSKNNGTVLGYYSLSPASIAYERAPEVIKRGLARHEVPVFRLGRLAIDLSVQSQGLGGQLLLAAGRRCLLVAAQAGGVALLIDAKNERVAEWYASYGAIPLLDAHLSLLLPFKTIHAALVTAGKLZ

SEQ ID NO: 2603 - protein, 511 aa, Photorhabdus luminescens
MTIQEQATSSVATANHHTGGVYSSLFEKINLRPVERLSDIACFHDSDGLAGVTEDERVTAAVSVLLDLLKASAQKVEQLDKALLDFEIGKLDRKIGRQLDVVIHQPGFQQIESAWRGLKFLVDRTDLGQNVKIEVLDVAKDDLRQDFDDAPEIVQSGFYRHAYIQEYDIPGSEPIGAVIADYEFSAGSQDIALLRNVAKVAAAAHMPFITAVAPTFFGKKSMDEVVVMKDMGHYFERAEYTQWRSFRDSEDARYIGLTLPRVLGRLPYGPKSVPVRTFNYVEEARGPDSSKYLWTNAAFAFAANMVRSFVKNGWCVQIRGPQAGGAITDLPIHLYDLSTGYRAKIPSEVLIPETREFEFANLGFIPLSYYKNRDYACFFSAHSTQKPAVYDTGEATANSRINARLPYIFLLSRIAHYLKLIQRENIGTTKDRRLLEIELNNWLNTLVTEMNDPTDDMQASHPLREAYVVVEDIDDNPGFFRIKLYAVPHFQVEGIDVNLSLVSQMPKAKSZ

SEQ ID NO: 2604 - protein, 164 aa, Photorhabdus luminescens
MPSFDIVSEIDMHEVRNAVENAQRELTSRWDFRNVNASFELNEKSESIKIASESDFQVNQLVDIMREKLAKRGIDGAALNIPDDMLHSGKTYSVDATLKQGIDTPTAKKIVKLIKDSKLKVQAQIQGEQVRVTGKARDDLQSVMALVRGAELGQPFQFTNFRDZ

SEQ ID NO: 2605 - protein, 125 aa, Photorhabdus luminescens
MKKSGILSVLLAGLLYACGGQFAIAAEQVKDKVAKAASTTSHSSPEKQLQQQDALKVEEKGKVNINTASAEELARALNGIGVKKAQGIVEYREKHGAFTAVEQLQEVQGIGPVFIERNRSKLSYZ

SEQ ID NO: 2606 - protein, 154 aa, Photorhabdus luminescens
MLDKTDRKLLKLLQKDCSLSLNALAEAVNLTSTPCWKRLKRLEDEGYIVGKVALLDSEKLGLGLTVIVMIRTQQHSSDWYEQFVAFIKQMPEVLAFYRMAGECDYLMHVEVVDMKSYDLFYKRMVNGVPGLIDVTSSFAMEKIKYTTALPIPDZ

SEQ ID NO: 2607 - protein, 149 aa, Photorhabdus luminescens
MKLWQLPAGVLLAVALVGCNVKGAEVADTQVEQIENLMKRSFVEGNINILQRIALPADAVLTVALSDVSLADAPSVTLSQKVERLGGKQSPFHFVLPYQPNKIKPNARIVVRASVSLHSRLMFVTDTAYEVINNGKTKDVEITLKAVRZ

SEQ ID NO: 2608 - protein, 183 aa, Photorhabdus luminescens
MSTKDIVYIALFASLTVALGLFPPLTLPVVGVPITAQSMGAMLAGAIIGAKRGGLALLLFCVFVSVGLPVMSGGRGGLSVFLSPSGGFILAWPIAAFVIGYLYEKNLAKLNTFKEAVFLVFGGIMVVYVIGIPWIAVFANISTWQAAVGSIGFIPGDIIKIVLVILIAKTVRRAYPTLEPRSZ

SEQ ID NO: 2609 - protein, 172 aa, Photorhabdus luminescens
SVDGQYSSYSIGCIKMQHLITFRNATMTISLRGHHLLCIFTYAGNGYSTGFVENYNRIIPRIRDEDILIVAGPDDICIPLLGEDKPHCFGESVIVRDSRALDAVGSLMGRSIDIGHTLRLDETYLKQARWAFNRGIIRSACIGCEWESLCTRIAADDYSSTLLKRNSGKSEZ

SEQ ID NO: 2610 - protein, 181 aa, Photorhabdus luminescens
MNTQPLLNLLEKQVDILAEEIAPLADTPFSTARFDQALFNRHSDKLRGYLQEVRHNMEQLKECVQDHRTEQVAFLTERLVAQIEALRRELSTQSLRKKESRFEHKQQATDLYHKLAEHQDYERRLLAMINDRELKLNQQTTLSHQQKIQKEIAALAGRLARCRQSLMRIEKSIEYKENMDZ

SEQ ID NO: 2611 - protein, 184 aa, Photorhabdus luminescens
MTANAQQLQFIKDSIETIPDYPKPGVLFRDITTLLDNPLAYQATIDLLVERYQGKGITKIVGTEARGFLFGAPVALRLGVGFIPVRKAGKLPRETLSETYNLEYGTDTLEMHKDSVRENDKVLVIDDLLATGGTVEATVRLIRRLGGEVSEAAFIIGLLGLGGVERLQRQGVSSFTLLEFPDHZ

SEQ ID NO: 2612 - protein, 159 aa, Photorhabdus luminescens
MTPAIILLEKQKVSFALHAYEHDTNEHNFGDEAVRKLRLHARQVFKTLLVALNGEAKNLVVAVTPVSSELDLKKVAKVFKVKKAEMADPQIAQKVTGYLVGGISPLGQKKHLPTVIDNQAQQFSTIFVSGGKRGLDIELASADLCRLVKGNFADIAKTZ

SEQ ID NO: 2613 - protein, 152 aa, Photorhabdus luminescens
MIAQIAAQTPWLWFSFGGLLLIAELLGTGGYLLWTGIAAIVVAFVTWLLPGIDWEWQGILFATLTLLSAMLWRYWLRRRPSKGGDTLNQKEHQLIGIRAKLTTDTENGYSRVKLADGSWRVHCNSELPAHTEVEVIAVDGITLKVKPVSSQZ

SEQ ID NO: 2614 - protein, 414 aa, Photorhabdus luminescens
NLSQQELRFIMSKLIGNNQVVGTNNIVVIAMVVALVQFINALEYMMVTPLFVYMSKDFHMPVTMAGVIAGAYVFSSVFSGLTSFFFIDRFNKRKVLILNTLFLGLITFLTIFASEPYQLILLRIIAGLFGGVTLGVGIGILLNNSPESMRGRVLGIAFSSFSFVSILGIPLCLYLAESFNWQVSFLFIVILCIVSLPLILFFIPGTEKVKNSQKKIVLTKKIALAGMASGVSNFSPFMLIPILAPLLMNVFYIPENQVSLVFFYGGIASWLGTYLTGKLCDRYPPQRITIAAATLFIVNIFLGLTGKINGYVFFSLFMFATYVQVMAANVLASYASTPENRAGFGALQMAFSNLGAGVVFFFSSIFLDGKEIIAENVRPIFILTMVSALILPIYVMKLAQVMKRGTKNLMSNVZ

SEQ ID NO: 2615 - protein, 177 aa, Photorhabdus luminescens
MTAQPDLAGTAQHNAKIAIVMGSKSDWTTMQHAADILTSLNVPFHVEIVSAHRTPDKLFSFAEQAEQNGFDVIIAGAGGAAHLPGMLAAKTLVPVLGVPVQSAALNGIDSLYSIVQMPKGIPVGTLAIGKAGAANAALLAAQILARHNKDLLKRLSHWRETQTQDVLDNPDPREEAZ

SEQ ID NO: 2616 - protein, 165 aa, Photorhabdus luminescens
MVTFHTNFGDIVINTFADKAPVTVENFLNYCRNSFYDNTIFHRVINGFMIQGGGFEPGMKQKPTDAAIKNEANNGLKNNRGTLAMARTNDPHSATAQFFINVVDNDFLNFRSERPDGWGYCVFAEVIEGMDVVDKIKGVSTGRSGMHQDVPLEDVIIEKVTVSEZ

SEQ ID NO: 2617 - protein, 150 aa, Photorhabdus luminescens
MSEMNEMKVKIEKLESMLDASVRTVITAVKNDLSSSLKVTVGPLPQTPELIPSASEQSRYTIIPPVGPTTYQDKVLKFTTVVQSQALLKKIWVFQDSRDPLLTIKYWVGEQFNYDDANPVRVSAEGGGNKFMIINEDSDGIAGIAVTMYZ

SEQ ID NO: 2618 - protein, 141 aa, Photorhabdus luminescens
MQTLLNHLASRLGQKPFVSDRQGHYHLHIDNYNLFFRQQGTELVLSSPLSWRHNPKDPSGAELLKTLLQQVTRWGRHAPHALTLDESENLILEARLNLDSLDVQILEQMLTLHVDLLEQVMALLSETQSAPQWKQAIWQPZ

SEQ ID NO: 2619 - protein, 154 aa, Photorhabdus luminescens
MISRLQRIKALRVERAEKHFSLQQMKLQTARQHHQQALQTLQDYCQWRIEEEQRLFALCQGQPIDRKGLERWQQQVALLRENEAQLEKQVAEMTEKVELELRQLKECQRVLHHTRQQQEKFNELGRQQQEAIRAQGEYQEELEQEEFHRQERVZ

SEQ ID NO: 2620 - protein, 168 aa, Photorhabdus luminescens
MEHQETSTTSDQYAQELESFLHDGGTLAMLKDISSDTLEQLYSLAFNQYQSGKWQDAHKIFQALCMLDHYDSRFFLGLGACRQAMGQLEQAVQSYSYGAMLDINEPRFPFHAAECLLQLGELDGAESGFYSAQQLAAASPEQAALAASSSAMLEAITIKRTQENGSSZ

SEQ ID NO: 2621 - protein, 150 aa, Photorhabdus luminescens
MKFNSRGYTVIALALASLLAYHYYGKYTKQLDTTVKLQSELLEQQNEIVNQQERIRLLSKLDNQHTKELANAKSEIDVLRNDVAAGHRRLRIAATCHQGQAGSSGSVGHADTPRLNPATEQDYFDLRRMIVENEQQTKYLQEYIKTQCQZ

SEQ ID NO: 2622 - protein, 111 aa, Photorhabdus luminescens
MYRRGLGFILLEQFENHENFDGIILGHPNHLWHLEFTHHRGTTVGRSPTQDNLLAFYIPDHSEWLDQISLMENAGFIAVPSYNPYWDIEGKTFEDIDGYRVVLQNTVFLAZ

SEQ ID NO: 2623 - protein, 103 aa, Photorhabdus luminescens
LLGCVLAGCDSQPKMDASNEIALKASIEKVRDRLPDDKKVKFDESIQSAMFNSIDFNDLVKSGSNGDMEKSKQKFYKLLDGKTADQLITEVEKIESKRSKNEZ

SEQ ID NO: 2624 - protein, 332 aa, Photorhabdus luminescens
QLQGTYQRLETDNKLSGEIMANILKYGDTVKILNSFRNWDGGYLSVYGTSGISDGKHTVITTTEAGTFWRIESGTGKPIGSEVINNDTILLHNLYQCDGGYLAHYALSSQQVPEGEIYPIHTSDKNIRPETLEWIIYSDMPSIDGKIKEDESITLYNRWGTRGFLDTNGWVGVPNTVCHVYTAANNLRKPYTGLWKMTQVKDPCLPVTKPSNCAGECGTSDGGKYCFQLPQSIRFGLIAYTNTAIHQQTVKVYIDDLLVDTFTGKGIDTKAYTSGTGKVCIEIIGDGKPCKLRYSYNTLDGKPGTVTIGAENDANNNYNDSVVVLNWPLVNZ

SEQ ID NO: 2625 - protein, 189 aa, Photorhabdus luminescens
MNNKLIISPQVINTLAISNDPWGIKDKNSCFIYGNKALNSIKGFSDSFDFEGLYDDELPWDGAEFAKEYIHHDQKVMKEEKSYVSLETHIWGEIRTLSSYFCEKQPIYHENGDCLGIIYHLWKAQDYSLTRLYHGKLPASIIFQPPTHLFTQREWDVIFLSLHKYTSKQIDRILNISYRTVEHYTRNHZ

SEQ ID NO: 2626 - protein, 157 aa, Photorhabdus luminescens
VMSPRQPIDRQIIQDLTGGRLTKADARTLLFDSKVRLILNVLEAQRPGVQGVFGFVGLTRYHRPVQLGVVTDVNLIAAFASKQPGLLLHAVIVAVQFIAAGIEARGTIGEGTHGGTDARTGILLFAVIALAVLLAAEGQMTFHLGGNLFAADLSAFZ

SEQ ID NO: 2627 - protein, 132 aa, Photorhabdus luminescens
VISSSTTWFLDMQFPERLTTLRKERGLTQQALADMAGVAVLQIRRYEGGSAQPTLEVIRRLAISLGVSADMLVFDEQERGPSERLRYQFEAISRMPQYEQEVIKELLDAMIIKTQIAGTMACISTTAKEESZ

SEQ ID NO: 2628 - protein, 160 aa, Photorhabdus luminescens
YWRHRWCGGPAGQSVCRWQTPFSRLRQSPPGRGGRCTQFCPPDGPPAGLQRRHLATLRQSGPYSPRTARVPRPRMRPVRRQNRPPGRPPPRRLRPSPDRRLPQLTRRRPPPPARRATRRPALPISRRFCSGGQSHPRAGPGPGLRWRPYAGQKKPSRHAZ

SEQ ID NO: 2629 - protein, 160 aa, Photorhabdus luminescens
PAQSLAIHTKSRLIRFPFRLVALHKPDEQTLHCPAPVTHDDPTYRSVSMERHPDAQRLTAPYSQVKWHSGGYAGYSPTSHPLAPPHKPPSVCPALHPTPAPQIDLPQDVPPTGPQFHPVQPGNPEFSPDDHYAPRIPDCHPASSEPNPRFDTSVHLDYRZ

SEQ ID NO: 2630 - protein, 706 aa, Photorhabdus luminescens
MNRGFELLRLIGERKDIMLAILLLAVVFMMVLPLPPILLDILIAINMTISVVLMMMAVYINSPLQFSAFPAVLLVTTLFRLALSVSTTRMILLQADAGKIVYTFGNFVVGGNLIVGIVIFLIITIVQFIVITKGSERVAEVSARFSLDAMPGKQMSIDGDMRAGVIDVNEARERRSIIEKESQMFGSMDGAMKFVKGDAIASLLIIFVNILGGITIGVTQKGMSASDALQLYAILTVGDGMVSQVPALLIAITAGIIVTRVSSEDASDLGSEIGDQVVAQPKALLIGGVLLVVFGLIPGFPTLTFLILALVVAGGGYLLFQRQRQANASQQADLPSLLAQGAGAPAAKSKAKSGSKAKAGKLSEKEEFAMTVPLLIDVDAGLQAELEAISLNDELIRVRRALYLDLGVPFPGIHLRFNEGMKEGEYLIQLQEVPVARGRLRSAHLLVQEPVSQLELLAIPYEEGEPLLPNQPTLWVAEAHQERLVKSGLAALSMSQVITWHLSHVLREYAEDFIGVQETRYLLEQMEGSYGELVKEAMRIIPLQRMTEILQRLVGEDISIRNTRTILEAMVVWGQKEKDVVQLTEYIRSSLKRYICYKYANGNNILPAYLLDQQVEEQIRGGIRQTSAGSYLALDPAVTQSFLEQMKKTVGDLTQMQNKPVLIVSMDIRRYVRKLIEGDHHGLPVLSYQELTQQINIQPLGRVCLZ

SEQ ID NO: 2631 - protein, 348 aa, Photorhabdus luminescens
EINDKLKNHERYISMNSHVYLFLNADNARYNEISKKSDIAYPQPISNDWPDLPIEFQRHIDDVINLNGYLYFFKGSQYVKFDIAKAKVIDGPKFIADGWPGLKGTEFENGIDAATEFTTNIVCFFKGSDCIDYAVNSHTIKRKSISDRWEITKKHTEFSKNLDAVTWRINSAIALFKDNHYIAFNPQSNTIVIGPAPVTNYTNGAFKTAQAAVLIDTDLLGSDRGNNGGCSGTCGTNDTGKHCFQLPQSIRFGLIAYTNTTTHKQTVNVYIDDLLVDTFTGKGTDTKAYTSGAGNVCIEIIGDGKPCKLRYSYNTLDGKPGTVTIGAENDANNNYNDSVVVLNWPLTZ

SEQ ID NO: 2632 - protein, 143 aa, Photorhabdus luminescens; identical to SEQ ID NO: 2558

SEQ ID NO: 2633 - protein, 160 aa, Photorhabdus luminescens
LADLIYLTIKGKNQGLISAGCSSIDSIGNKYQVNHQDEILVYGLSHSMLRKKNVKHQPVIIRKPIDKSTPLLGVAISNNEVMDCFINHYRTSLNGGLELYFNLKLIGAQILEYSVLHPNSLENNDQQPQETLSLIYKSITWNHIIAGTGGYSIWEDTVYZ

SEQ ID NO: 2634 - protein, 175 aa, Photorhabdus luminescens
MVVCWYIYSHIILALTIMIQLDMVRIFFYFYILVFLLWIDPIVKKRKAEIMVKKMSDDVTLSYYNVFFVIIYYAMSILVLIVLFKLREYVRGHIRTVLFTVIFVIVNTVQHNIAVNGGVLVYIFPHYFSIYDYRSIRFGALFFAIAYSCLLTMNKSDSEEKEKEKEKEKEKENNZ

SEQ ID NO: 2635 - protein, 169 aa, Photorhabdus luminescens
MVWIDYAIIAIIGFSALVSLIRGFIREALSLVTWGCAFFVASHFYTYLAVYFTRFEDELVRNGIAIALLFIATLIVGSMVNYVIGSLVQRTGLSGTDRVLGVCFGALRGVLIVAAILFFLDTFTPLARSEDWKQSQLIPQFSHIIRWFFDYLQNASSFLPEKYTSPFGZ

SEQ ID NO: 2636 - protein, 184 aa, Photorhabdus luminescens
MITHNYQQIIDIFNRRFGDEYNTHLVKGDNEPIYLPADEEVPYNRIVFAHGFYASALHEIAHWCIAGKERRKLVDFGYWYCPDGRDAQRQSEFEKVETKPQALDWLFCTAAGFPFNVSCDNLEGDFEPDRLAFQRKVHAQIMDYLAQGIPARAECFIQGLHSFYNTPPLKAEYFPYPEDIFAEZ

SEQ ID NO: 2637 - protein, 483 aa, Photorhabdus luminescens
VNNHYDVLIIGAGIAGIGTACHLTRKCPDKKFIILERRQTIGGTWDLFRYPGIRSDSDMMSYGYTFRPWTDTSVFADGPSIQSYIHATAKEYDIDKKIEFGLKITHTDWSNATRQWTVTAIDEISGETRQFTCCFLIAATGYYNYDEPHLPKFPGIEDFKGPVIHPQLWPEGLDYKGKQVVVIGSGATAVTLLPAMANDTKHITMLQRSPSYIFSMPERDKIAEFCKGIIPQRWIYTLSRKRNLFLFRLIYKISRHLPTLLKSFLLALARRRVGPDFDMKHLTPKYMPWDERLCLIPSNNLFKVLKEGKASIVTDHIERITENNILLKSGKELPADIIITATGLKLHFIGGIELSIDGQKQQSHDRMLYKGTLIQNIPNFACLFGYINNAWTLKVDLSADYICRLLNEMERRDATVVTPHAQPGEMQEDEHIFGALRSGYVKRAQDLLPRQGYSPNWQIPHDYKKDKQVLGQPVDDAALKWTZ

SEQ ID NO: 2638 - protein, 179 aa, Photorhabdus luminescens
MMKNKYSLNEEEIHLFQQSVAGTKRINQDTVLHSPRRKKTSYIAPERIQQEQIDASYYFSDEFQPNLDSEGPTRYVRGDTNHYELKKLRRGDYSPELFLDLHGLTQMQAKQEIGALIAACRREHVYCACIMHGHGKHILKQQTPLWLAQHPDIIAFHQAPKEWGGNAALLILIELDEPZ

SEQ ID NO: 2639 - protein, 180 aa, Photorhabdus luminescens
MLTIPFYKMVPVMATIALLLTGCGLTQTVTDGTAAATRSFFHKRVKTLHLDFIPRAAVNTDTGESVALSVPALVRVYQLRDNNAIKKVDYADLLDDGDRILGADCLASEEVVVKPGSHASLDMPMAAQAKYVAVVGLFRNPDVAKGTWRRIIKRNELLPDSPRIIALNAGGLTLLPEKGZ

SEQ ID NO: 2640 - protein, 171 aa, Photorhabdus luminescens
MKKQQLRLAVLCLLLVACSQFPAQAGIIIAINHTKWAINRFTVDDQPGIDSIGPYQGGGGGCCYRAPDKWRPGMTVKVDWETGVAFSDDFPGYENDEKYLAWRDKINAQKRQHSQVVPLPDYTGQRTCGITVHFLPCDQVKITTSCNTYGSPNYPIKEPLEMKEPKVCPKZ

SEQ ID NO: 2641 - protein, 171 aa, Photorhabdus luminescens
MKKQQLRLAVLCLLLAACSQFSAQAGIIEAINHTKWAINRFSVDGEPGIDIIGPYQGGGGGCCYRAPEKWRPGMTVKVDWETGVAFSDDFPGYENREKYLEWDRKIRAQKRQHSQVVPVPDYTGQRTCGITVHFLPCDQVKVTTSCNTYGSPNYPIKEPLEMKGPKVCPKZ

SEQ ID NO: 2642 - protein, 337 aa, Photorhabdus luminescens
VAKKEKRPHHDGLFKYFLTQPETAREFLSLYLPEEIQSLCDLATLKLEPGSFVDWHLRQLHSDVLYSVETARGQGYIYCLIEHQSTPDPLMAWRLMHYAMLAMEAHLKKGHTELPLVAPLLFYHGEIRPYPYSNRWLDCFTLPEQAARLYRQAFPLVDVSVLSDEEILTHKGVALMELVQKHIRCRDMQEWLLQLVELLNAGYNTTEQLNVVLRYILLNGHTLDLSHFVHQLIEQSPEHETMLMTIAEQLEQKGLERGIKQGIELGREEGREEGREEGREEGREEGREEGREEGREEGREEGKLETARALLRHGVSLDIIVTSTGLSRDKIEMLKHZ

SEQ ID NO: 2643 - protein, 171 aa, Photorhabdus luminescens
MKKQQLRLAVLSLLLVACSQFPAQAGIIIAINHTKWAINRFTVDDQPGIDIIGPYQGGGGGCCYRAPDKWRPGMTVKVDWETGVGDMGGFPGFADRKKYLAWRDKINAQKRQHSQVVPLPDYTGQRTCGITVHFLPCDQVKVTTSCNTYGSPNYPIKEPLEMKEPKICPKZ

SEQ ID NO: 2644 - protein, 171 aa, Photorhabdus luminescens
MKKQQLRLAVLCLLLVACSQFSAQAGIIEAINHTKWAINRFSVDGEPGIDIIGPYQGGGGGCCYRAPEKWRPGMTVKVDWETGEASTKGFPGFADEEKYLSWRNKLRANDRQHSKVVPVPDYTGQRTCGITVHFLPCDQVKITTSCNTYGSPNYPIKEPLEMKEPKVCPKZ

SEQ ID NO: 2645 - protein, 172 aa, Photorhabdus luminescens
MKKQQLRLAVLFLLLVACSQFPAQAGIIIAINRTKWAINRFTVDDQPGIDSIGPYQGGGGGCCYRAPDKWRPGMTVKVDWETGVAFSDDFPGYENDEKYLAWRDKINAQKRQHSQVVPVPYYQNGGDTCGITVHFLPCDQIKVTTSCYAYGSPNYPIKEPLEMKEPKVCPKZ

SEQ ID NO: 2646 - protein, 124 aa, Photorhabdus luminescens
MKNFLMPELGGTYPLIDPQSYRYNLCRFPLQTMQVMQSSQLFDGHSLVNSSKQTPATIPALFPNTFYTPIQAGQAKESPVSPVTPFCAALSGLTGPAREFQFLLPEKDGCTRLHTPMSGHFSPZ

SEQ ID NO: 2647 - protein, 164 aa, Photorhabdus luminescens
MAIPAYLWLKDDGGADIKGSVEVRGREGSIEIVALEHMLHIPTDNNTGKLTGTRVHAPLVFTKEVDASSPYLYKAVTTGQTLKSAEIKWYNIDDAGQEKEYFITQLDNVKVVKVAPLMHDIKDPTKEKHNHLERIELRYEKITWTYKDGNIIHADAWNERTTAZ

SEQ ID NO: 2648 - protein, 322 aa, Photorhabdus luminescens
IMADILKYGDTVRILNGYNNWQGGYLSTHGSNDIPGAKHNVLTVAPSFSDLGVIWRIQSGTGKAIGSEIINDDIILLHNLAFCDGGYLGYYDGPNQPVPSGEIHPIVTSDINTYSPKTLEWIIYCETPYSIKGNIIEGAIISLHNRWGNKGFLNSYGNANKPNTLYGVSLSGNSARKVHKVDQWKMEKINDPCPPTKPSNCGGECGTSDTGKHCFQLPQSIRFGLTAYNNTNIQQTVKVYIDDLLVDTLTGKGTNNPMATKTYTSGTGKVCIEIEGDGKPSKLRYFDNTLDGKPGTAIIGAENGTNNNYNDCVVILNWPLVZ

SEQ ID NO: 2649 - protein, 166 aa, Photorhabdus luminescens
MTHSFQNEIPKSRINIKLDLHTGGAQKKVELPLKLLVMGDYSNGQEHLPLGERKKVAINKNNFDSVLAEFSPAINLTVKNTLAGDGSEENIALIFRQIKDFEPEQIARQIPQLRALLSMRHLLRDLRSNLLDNTTFRRELEHILQDQALSDELRAELAALAPKTIZ

SEQ ID NO: 2650 - protein, 161 aa, Photorhabdus luminescens
LEEVSGSAKANEVLTWLQAYIPGKDPNIVVGHEPSKDAAKELIRSDYRWGHQSNDKSETFQLTYNFLENEPDNMPWIISGFSAFNEEQEAAAKLSIQSWADVANIKFTETYDVKEANITFGFFDFSLTGDYAFAEMPNPGLKQVGTWYIPKKLQDAVFSTZ

SEQ ID NO: 2651 - protein, 174 aa, Photorhabdus luminescens
MDYFTLFGLPARYTVDREQLASCYQELQRQFHPDRFASQPEREKTLALQQAVTINDGYQTLKHPLKRAEYMLSLHGFDLANEQHTMNDNAFLMEQLMLREELECIADKANPEVALADFAARLNGMIKTRSQLMVQQLDEQQWEQAADTVRKLRFLDKLQQQVEQLEERLLDDFZ

SEQ ID NO: 2652 - protein, 165 aa, Photorhabdus luminescens
MRLTSKGRYAVTAMLDVALHSQEGPVPLADISERQGISLSYLEQLFSRLRKNGLVSSVRGPGGGYLLGKDASEIVVAEVIFAVDESVDATRCQGREGCQGGDRCLTHALWRDLSDRITGFLSSISLEELVNNQEVLDVAGRQDNDKRRAPNGRAQETINVNLRPZ

SEQ ID NO: 2653 - protein, 174 aa, Photorhabdus luminescens
VIEIYSDEYWMQQAIERAIKAWEQGEIPVGAILVADNKIISEGWNQSIIAHDPTAHAEIIVLRKGGERLRNYRLINTTLYVTLEPCTMCAGAMIHSRIQRLVYGASDMKTGAVGSLVDILRHPGMNHQIDITSGVLAEECSTMLSAFFKQRRQQHKALKAARKQQEENQDSLFZ

SEQ ID NO: 2654 - protein, 149 aa, Photorhabdus luminescens
MARYDLPDEAWELLLPLLPPEHSQRAGHPYVEHRRVINGMFWILCSGAPWRDLPERYGSWKTVYNRFNRWAKSGLINLIFNKLLSILDEQGLVDWSAISLDGSNIRAAHCAAGAKKNIPMSPKIMAWVALRVVMAPKSIWRSMEKAIHZ

SEQ ID NO: 2655 - protein, 171 aa, Photorhabdus luminescens; identical to SEQ ID NO: 2510

SEQ ID NO: 2656 - protein, 265 aa, Photorhabdus luminescens
RSMWVDATTQRAGVLFKDSGYGTSAWDIISVGGRKAFKAQTLSKFGNIGSHCLGIATDTPVDARHCYCELDLFCNPYPDISVSVLSKKTSASGTYQNIGYGYMAIHLTGGYQGKPQWMPSNISLGTSIDTATPYIMVWNLQANLIQAVNFVGKQTDGIYKGQPTLGDAHGVPLSYEWPKNTWSRWRIGLLAANNGTLIVEWYNVVADKWKVELCQYNMNTLMTGNLAAGQIGIISGMSSQATTIDQQNSLYRTPFDRAIFFQDFZ

SEQ ID NO: 2657 - protein, 157 aa, Photorhabdus luminescens
AFPDKPLPAAPVRSGLALSACFTLFAFFCACIVLFSAAVLSLSPRCFALSYAVLASLTALSARCFCNNASSFLCSAFFSASTISSSALSRFSALFVKPTSDFLMAVITVSRLSIKCCCASANFFCAVSLASFNLFWILSRYPPANRLRHSSPDLPSZ

SEQ ID NO: 2658 - protein, 167 aa, Photorhabdus luminescens
MSTLVLEEIPVGIPLPWPTDIPPNGWVKCNGAIFDQTLYPQLAQAYPTGRLPDLRGEFIRGWDDGRGVDIGRYLLSGQLADIAPHSHRVVRMWSNSNGGTDGVGSAGRILNSVYQNINYGIDPRGIGIAIGMGSGGYGYMDNAIAASTGTETRPRNVAFNYIVRIAZ

SEQ ID NO: 2659 - protein, 155 aa, Photorhabdus luminescens
MVKEWATVIHWQQGRALLRYGSSSGCGSCQARATCGSYLLNKLGSDGIHQLELEILQPLQPGQKVEVGIPEGSLLRSALLVYLTPLIGLFLGGALLQLWITNQLWVFCGGVLGGALGFFFARGVATYWDNRQEYQPVVLQIGLPPDAIHIQQREZ

SEQ ID NO: 2660 - protein, 190 aa, Photorhabdus luminescens
MSEQLTDQMLVEQVQKGDQKAFNLLVVRYQHKVASLLSRYVPQGDVPDVAQETFIKAYRALASFRGDSAFYTWLYRIAVNTAKNYLTAQGRRPPSSDLDASDAENYEISSALKEISNPENLMLSEELRQVVFRTIESLPEDLRIAIMLRELDGLSYEEIATIMNCPVGTVRSRIFRAREAIDDNIQPLIZ

SEQ ID NO: 2661 - protein, 158 aa, Photorhabdus luminescens
RYFLGRNVKSFYSLVQKQDQEHLQIAFMKPNSVIAKTRDGKIADELFKEIKKRLLGAYLLTEESYYVKLHIVINGPIGPFKDLRIATDWRFWFWITRRFTAFTDIFTISMTYFGFFLRFFRFLFLFTFSQYFFRWLIAGFVTWCFSGWAKFINHSRRZ

SEQ ID NO: 2662 - protein, 173 aa, Photorhabdus luminescens
MSLTTIIKDTPIWVWILFAFLIRRGISALYDREMRIDRLFLLPIVFLVWGVYSVIYETTFSDLALITMTAGLFVGIVIGWGLWRSQPRLREKAGSDLIIRPGTWLTLTLIVITFIVKFIITAMLSIHPALLHSLHFNLFFGFSNGVLDGIFWGGTLNLFIPWCRNRTKSIYKZ

SEQ ID NO: 2663 - protein, 198 aa, Photorhabdus luminescens
SFLGIYKIIGQNGIGKTTLCKTLIGLIPPVNGSVNFYVSDKTIKPEIHINQCSAYFPQDILFTTSIIENITLGRDVDRNKVESMLKKLNLWQTIDSLPEKLDTVISDKVNPFSEGQRQVLLFLRGYLSDKSVLIFDEIFRGIDNENAKVVSKLISEKEGCIIFYVAHDFTIDCENHEVLELKSEKDYDFFKLEAFNEZ

SEQ ID NO: 2664 - protein, 178 aa, Photorhabdus luminescens
VPSKCSTILKSYLDCLYNLMNKNSHIDILGTSYIDFYQNFHTVNSFRIKKFYRIPYIAHQLGKKYLSFQPTQLIRFSIFRTLGGFDGTTRIAADDDFLLRAIHCVKVRNINRPLYVKIERESSLTTSSITGFQSETRLNYIKKLDQLRNTIKSNLPLSEYMNKPNDVRFHLNEIELKZ

SEQ ID NO: 2665 - protein, 306 aa, Photorhabdus luminescens
CVIVFFIGDILVMKLEQHERQISIESSSNSTAVPITVWEPNLYPEGRWVDATTQRAGVLFKDSGYGTSAWDIISVGGRKAFKAQTLSKFGHCLGIATDTPVDARHCYCELDLFCNPYPDISVSVLSKKTSASGTYQNIGYGYMAIHLTGGYQGKPQWMPSNISLGTSIDTATPYVMVWNLQANLIQSVNFVGKQTDGIYKGQPTLGSANSGVALSYEWPKNSWSRWRIGLLAANNGTLIIEWYNSVADKWKVELCQYNMNTLMTGNLAAGQIGIISGMSSQATTIDQQNSLYRTPFDRAIFFQDFZ

SEQ ID NO: 2666 - protein, 177 aa, Photorhabdus luminescens
MENVVLVDENDNRVGCINKIDAHLNGDHLHRAFSCFIINSKNEVYIQQRAQSKLLWPGYWSNSYCSHPRPDEEISHAVMRRAEEELGIVINEEPKFLYKFQYKEKYKDVGYEHELCHVFVVFTDTPPTENPKEVSAGFFINIKDVQEYIHNNEEFCTPWFKKEWADILQNHFDKLCZ

SEQ ID NO: 2667 - protein, 197 aa, Photorhabdus luminescens
VMKINEVIEPESELDYQRGKENITPLQWAIFNQQMDDINNLLKEGADPTQPGLQQESALHTAAKINNPDYLKSLLSVAPDVNIMHPATLATPLHVAVQVGRKMQVELLLVAGANPNQANRIGDTPLHIAAKINSPELALILLKSGADPKLQNKQQSTFQMYFNLTPLKARSYEMQAEYDEVNHWLKAQQVSRYYLKZ

SEQ ID NO: 2668 - protein, 188 aa, Photorhabdus luminescens
ISGLKGTFVSPTTSIPNLPTAPRKDFNVSSMPSTIGAISVLVRSATSKARSRLSITGNSSLANLSNANLWAFSTSCSVRRRIFSTSALARKMASRSRCCACLSCSSSSATRGSTTLSVSDASALSALFCCSDTTSISSETCSSGIFCSLLLMNISAYLALISLLSLLWGSKLGIQGNPPYCEDKTSCZ

SEQ ID NO: 2669 - protein, 145 aa, Photorhabdus luminescens
MPQISRSALVPYSVEQMYKLVNDVGSYPDFLPGCVGSRVLSVSNNEMTASVDVSKAGISKTFVTRNILTDNQSINMQLVDGPFRKLMGGWQFIPLSEDACKVELHLDFEFTNKLIELAFGKIFKELAGSMVQAFTLRAREVYRVZ

SEQ ID NO: 2670 - protein, 161 aa, Photorhabdus luminescens
MTKKKAHKPGSATIAMNRRARHEYFIEEEFEAGLSLQGWEVKSLRAGKANISDSYVLLKDGDAYLFGATITPLNVASSHVVCDPMRSRKLLLNQRELDSLYGRVNREGYTVVALSLYWKNAWCKVRIGVAKGKKAHDKRSDIKEREWKLDKARIMKNAGRZ

SEQ ID NO: 2671 - protein, 127 aa, Photorhabdus luminescens
LSRVGNREDKFEFCLKLVECGNVQGPPSGLALCTYSIDEESFEIHMIENFYRDDAKHPLNGKMFQLTLMAAYMFCKSAQGKYIRIIEPVEEVISYYSSYGFNMMKCGYIMEADIDTFETIFKTIKDZ

SEQ ID NO: 2672 - protein, 206 aa, Photorhabdus luminescens
KQRIKTMTKLTTKPTDINSEANAFDFVMRQFLSQHVFITLGLVIKSSGKTVDVKPMVHNMTGAGRKIENGIIYNVPVFRLQRGNSAVIMNPVVGDIGLIAICDRDISSIRATKAPALPGSKRTHNYSDAIYLGGVLNAEPQQYVEFVDNQINIVSPNKINVVAPTTEMTSSNSITMNSPSIILNGAVIQGGGGNGGNAIFDGTVRZ

SEQ ID NO: 2673 - protein, 155 aa, Photorhabdus luminescens
LLIQGHSELLSLSRPDRYFNHVNFLDNSSTASLRWLVALNTESFNGPVIVSVARLKPDETLSATCVAALETDFFNPVRAFLTSDSVACFVEPVDCSVFLLGPFAVSFFVVFDLLATLLLIFTSAMSCTAWKTAVTISKVTPLSCLIRKSYLIKSZ

SEQ ID NO: 2674 - protein, 146 aa, Photorhabdus luminescens
MSDTITSADAVITLTVTNLYPSGVQLQGFAADNIFETEALDLAETVRGADGKLSAGFIYGNINQTIHIMPDSESRTIFDTWATTSRTSVSVFRCNATVILPAIGRKYTLVNGVLKQWKTMPDAGKVLQAAQAVIEWESITGEAYSZ

SEQ ID NO: 2675 - protein, 153 aa, Photorhabdus luminescens
MSNSIKGGDAAKRYLKQLAKRVGEGQKLRVGFFKDATYPDGTSVAMVAISNEIGDPRRNRRPRPFFRNTINEHANEWGDVLAQGLSANDMNGDAALRMTGEVIKGQIQQSIRSFTSPANKKSTIAKKGFDAPLRHTKHMLNSVDYVIDEGNEZ

SEQ ID NO: 2676 - protein, 565 aa, Photorhabdus luminescens
MNTSSYLFLGSENIRHNQKSYESDIGYPQPINNDWPDLPIEFQRHIDDVINLNGFLYFFKGSQYLKFDIAKAKVIDGPKPIIAGWPGLAGTEFENGIDVAIEWPYVAKMGMTDVVCFFKGSDCIDYTVSSHTVSKKTIADRWGITEQYSEFSENLDTAILWINIGSPFLFLFKDNSNIRINLKSNTIDGQAPIGANWRGVTFKRVQAAVPIDMDLLGSEMGNDSNTNTYFFLNSENIKYNDPLNNIDTGYPQPIRNNWPNLPIEFQRHIDDVINLNGSLYFFKGSQYLKFDIAKAQVIDGPKPIIEGWPGLAGTEFENGIDAATEWIDVKEDIVCFFKGKECINYTVSSHTIDKKNIAERWRITGEYAKFSANLDAAILWRNSGYFIYLFKGNEYLRLHLMLNSMYGEPELIQTKWKGVTFNKIQAAVSVDPNVLGSNINIKCGGTCGINNTGKHCFQLPQSIRFGLTAYVNSDVHQQSINVYIDDRLVDTLTGKGISHITDVRTYTSGTGKVCIEMIGEGKPGKLRYAYNTLEAKPGTAIIGANNGSNDNYDDSVVVLNWPLSZ

SEQ ID NO: 2677 - protein, 159 aa, Photorhabdus luminescens
MGFPNKINHYPAPGIEGAFASTNPSATLLARDGTLIAGNDGVTVGRFAWVIDGVVSNKGAGAPSGFVGRDGQASITLWLGEASMLIQPGREVTLFTAGDFTVRTSTPAKVGDKIYASLKTGEVQAAAAGKTITDFIETKFVAGTAAGESELVKMGTWSZ

SEQ ID NO: 2678 - protein, 171 aa, Photorhabdus luminescens; identical to SEQ ID NO: 2510

SEQ ID NO: 2679 - protein, 191 aa, Photorhabdus luminescens
VKLMYTVFLYSYGEGRWKMFLSKLARFALTATSVAPVCITLAYLAFIQKNYIMLGVYITIGVISVFLCIIILKYSIHHSGRTKKNIKTATPANKEVTNYFLTYLFPLLSASGTFFDWKIAAFFYISLLAYVSFSEGYSFNPLLSFFGYKFYEAEGETGISFVLITKRDLFLVNNDRLDVIKLTAHTYIVVZ

SEQ ID NO: 2680 - protein, 150 aa, Photorhabdus luminescens
MKFSFHYYTILALILISLTAYYYHFELQKEQHITKQRQSEIQQLTDALDYQNSHITMLRELDVKHTQELANAKSEIDALRSDVAAGRRKLRIAATCSQSEAGSPSGMVNAASSRLEDPAIRDYFTLTERVTMMQAQLEGLQDYVRTQCRZ

SEQ ID NO: 2681 - protein, 182 aa, Photorhabdus luminescens
WSDHLVNLITWADLPCIDLKDSISIRLHCIKRRTYTCNKFELPDIHIFMSLIYIRLYINKIVVRNVSTGKEVSGTPDTPFTTSRLLLGQMIPAMFLLKKLIKKVRKNTWYNFFLSNHHVIIQPMEMNEGGHSQVEFRAYIDLAKSITSSQKVNLCSPRSQPLSDNEIRQILSSNSLFRHNNZ

SEQ ID NO: 2682 - protein, 186 aa, Photorhabdus luminescens
VDYFRNARKVLGVTAKEINAATGKQMASHWFSDSQWQLPNEVDYQKLRILFARIAREKHQNGELNRPYHELVESHLTLSRQYEELSLEYGLLRRPFSVTVDVPYTDVWSFPPVQYYPGKHPCEKPADLMAHIIRSSSREGDLVADFFMGSGSTLKAALKLNRRVLGVELEEEYFNQTKREIGVMIZ

SEQ ID NO: 2683 - protein, 175 aa, Photorhabdus luminescens
MAGKIEINRITNANIYIDGNNLLGRAEEVKLPDVSMTMQEHKALGMVGKVELPAGFDKLEGEIKWNSFYRDAMLSAANPYKSLALQCRSSVQKFSSQGRIDEVPLVTYLTILFKKNPLGTFKQHENADFSSSFTSTYIKQVLDGEELLELDYLANIFRVGGIDQLTDYRINIGGZ

SEQ ID NO: 2684 - protein, 156 aa, Photorhabdus luminescens
MDVSPIIDAIIMRLREKLPGLQVEYFPERPTEFRLNHPVGAILISYPGSRFDKPEDVGAVLQTQTVMLNATIVFRQLNGRHGAVATLDDVRRVLGGFQPPNCQRKCWLVRDTFLGEIAGLWQYTLDFATESVFIEDCELPNGSPLAQINYEGTEQZ

SEQ ID NO: 2685 - protein, 150 aa, Photorhabdus luminescens
VAYDMYCSLKDLQEQIPTQSLIWLSNEEPNAQTINEPVVNSAIRYADELIDAHLRGRYILPLAEVPTVLRDAAITLTRYRLYARRPEGSIPEAVIDDYKIVLRQLADIRDAKLTLGLLSTGKDAPEPGEFRVRARRPTFGGSKGMLEKYZ

SEQ ID NO: 2686 - protein, 150 aa, Photorhabdus luminescens
MSNITITINDGDLRRGLRALELATNDLTLAMRKIAGTLSAETAFNFEAEGRPAWIPSVAAKERGGQTLQKTARLMRSVSTRYDAHTAIVGTNLVYGRIHQLGGKTGRDQSVLLPARPYLPVTEQGELSPEAVRAVLSTIQRHLESAAHRZ

SEQ ID NO: 2687 - protein, 342 aa, Photorhabdus luminescens
KMNSNTYLFLNSENIRYNDSEDKADTSYPQTISNDWPSLPIEFQKDIDDVINLNGSLYFFKGSQYLKFDIAKALVIDGPKPIIEGWPGLKGTGFENGIDAATEWVDTKQDVVCFFKGRDCIDYTVSSHSINKKTISDRWGTIGKYAGFSEDLNAVILWKNTAGATIYFFKDSYYIQYNTKSHAIDGEPSFIQAYWNGVTFKKVQAAVSVDIDSLGSEYRNCGGICGSTNTGKHCFQLPHNIKLSLSAYGNTAHQQTIKVYIDDQLVDTLISQGANSVLGFKNYSSSTGKVCIEMIGDGKPCKLRYAYNTLDEKPGTAIIGASNGGNNNYNDSIVVLIWSQSZ

SEQ ID NO: 2688 - protein, 182 aa, Photorhabdus luminescens
MARRSTIDKLPEDVRRWLERALTESGFSGYQELETLLRDQGYVISKSAIHRYGQKIEKRYGAIRAATEAARMLTEGAVDDQDARSEAVIALIQTELFESIIQLQEAENGEIAPKERVTLLSTVAKNVATLSRASVNLKKFQSEVRARTEAAASNAEKIARKGGLSAEAVAALRREILGIATZ

SEQ ID NO: 2689 - protein, 175 aa, Photorhabdus luminescens
ISLPICLFRSTECTWWNIEIETLETNRIFMSTTNIEKFNEIVGIIFGKLYESFPLKIDLLSIEVIGEPLQYSDGTYSDELCTTVEDHRFFLDTVDWLITNGYLAGTMSSEGCHRAVLTAEGLEVLKVIPDSLETPLGDRIKETLKTESKEALRSLISQTLGIGLQFVSRSIGLGZ

SEQ ID NO: 2690 - protein, 158 aa, Photorhabdus luminescens
MENIVNLSGITLINDDSLRFIKTLPDNCIDLIATDPPYFRVKECGWDRQWEDVTAYLAWLDEVLTEFWRVLKPNGSLYIFCGSRLASDTEILVRERFNVLNHIIWAKPSGPWRRQNKESLRAYFPSTERIIFAEHYQGPYQPKGDGYFHKCRELKQYZ

SEQ ID NO: 2691 - protein, 198 aa, Photorhabdus luminescens
MTQHSFIKISNDTLRPATPAAREYLHSKVKWGDVLYADFKKARNPRFHRKYFALLNLGYEYWEPAGGTISPEEKALVRGYVQFLAHFAGSEDVLQSAADEYLAGISKNRAQNITATKSFDAFRRWATVESGHYDIYEMPNGSLYREPRSVSFAKMEEMEFQELYKDTLNVLWNFILYRNFPTRNAAEHAASQLSDFMZ

SEQ ID NO: 2692 - protein, 191 aa, Photorhabdus luminescens
VCCSTGSNCSNILKLGESEQRRFRPQARHYGLNSALREAASRSGYLCYDADTSPKGEHYIIIDSEGVKISRIGLNHDERHIRGAKHRSLIAQLNEKFEGYTPDLFREEDSKHHNDIDTLGVLLININPPYHESQASMMDLRIVVPFTNMKGFHYNKSVTELLALYTGEKKIVIPDMVLPKLKKRLKDQEKZ

SEQ ID NO: 2693 - protein, 195 aa, Photorhabdus luminescens
MNSNSLLDSINIAPRFEHASFENYQPINKAAQHNLKICQSYVQTWKERKVAGEGIIMCGRLGTGKTHLAVATCREIVTQNGISAFITTASRIIRAFRRSWSNDADTNEFETLRFYSELDLLIIDEIGVQYGTESERNILFEVINNRYEDLLPTILISNLPMNDLPVFLGDRVLDRVLQGGVVLAFDWDSYRRGQZ

SEQ ID NO: 2694 - protein, 166 aa, Photorhabdus luminescens
MTTTAIALAADYEKLQQLVETGEFSPEDIADTLESIECTIGDKLDAIMIHVRNIEGQAKILADESKRLTDRKKSFERQVKNLKKYALDCLLKAGMDSLRTTRNTFTARKGIMNVIIDDESKLPDELVDVQTITAPDKKAIKEAIENGINVPGAHIEIGQRSLQVRZ

SEQ ID NO: 2695 - protein, 137 aa, Photorhabdus luminescens
MRYPVTLEPVEEGGYFVSFPDIPEALTQGDTREEALEMALDALITAFEFYFEDNEKIPLPGPVGQDYVDVPLSVASKVLMLNAFLDSKLTQIELANRMGVKKQEVTRIFDLRHSTKIDTVGKVASAIGHQLTLSIEZ

SEQ ID NO: 2696 - protein, 233 aa, Photorhabdus luminescens
HNRRGSHFRVSISCLKGNNIFSEEMMDMDNVLKYGDTVTILNSYKNWSGGYLSVFGNGNKPGTKYGVVTVDASLAIYGGAWRIESATGKSVGSEIINNDIILLHNLYYCDGGYLRYYDVVEQNEQLTEIHQVYTSDIRKKAALEWVIYCETTPPNANIREGDSISLYNRWGNKGFLDTHNHAGDTGSLYQVFMSNNAARKSHTGLWKMAKVNDPCPPPDVLTNIMPLWRKMRZ

SEQ ID NO: 2697 - protein, 179 aa, Photorhabdus luminescens; identical to SEQ ID NO: 2576

SEQ ID NO: 2698 - protein, 171 aa, Photorhabdus luminescens
NMYTDVIFRILITGIGAIICMDIWTLIQRRLLGIPSLDYALVGRWFLWMRKQRFFHQTIANRIVCWLDKFICPISDYAASIRIRSGCVKNSAPHEITSNEPIDSHFLWTRALFHSKNYEPGNIIAIPDVFTFFMCIKDISVEIIIESIINHLIPLTTSKRINGIVRRLILZ

SEQ ID NO: 2699 - protein, 161 aa, Photorhabdus luminescens
MKYELAVMAALTKLDHPNTRSIVEATGISERKVQQVLQILQQDLEVKINRIRNGKISYFEVISWGIFESGQAINCKLIDLDLAKFKYSRQQEKDIRNQKNRKTIMTTYSEKKHYFDRVKLKNYRDSMRLEGMNIVMNSLPETSKEQKNLKDKLIRKYSLQZ

SEQ ID NO: 2700 - protein, 177 aa, Photorhabdus luminescens
MVLETDRLIMRSWREEDRLPFYHLNSNSEVMEYFPATLTMEQSNTMVDRIIQRFEQQGGWGLWAVELKETGDFIGFVGLNIPVAELPFSPCIEIGWRLDKPFWGKGYASEAARKALDFAFTQLKLEEIVAFTTISNLRSQKVMKRLGMVKDENTFLHPSLPNGHPLHEHVLYRIRQZ

SEQ ID NO: 2701 - protein, 152 aa, Photorhabdus luminescens
MEKLHRWEKDGYVVTTDKNKLDIMIIQQFLTKSIWAEGIDKETVKLSIENSLNFGLYKNTQQIGFARIVTDFTTFGYLSDVFILDGYRGLGLGRWLMTCCLEHPQIAQLRHIMLVTSMAPWLYEKMGYSPVNEENFVWQIVRPDIYKQPKIZ

SEQ ID NO: 2702 - protein, 154 aa, Photorhabdus luminescens
MNMRIQQAIKADFNKLIEIWEASVRATHDFLSDEHINQLRPLILHTYLPMLTVYKAINDKHEIEGFISVDQHRVEMLFISLDSRGKGIGKTLLNFAISKLGINELDVNEQNVQGVGFYQHLGFEVFNRSEIDGQGNPFPLLHMRIERPNTEATZ

SEQ ID NO: 2703 - protein, 178 aa, Photorhabdus luminescens
MCSLQNRLSLSLIQFYTSRSRLPAWLGIFAILMLFIAPVISRSLEHARSISEAHSSKVVDCHRVMSSDDDIPRNMSHSDVSSASHVTKLYSTNSTNHHDGMQMGMHSVGMSMLEDIACGYCVFLIHIPMLDLANTPLFWSTSLTSRPPPIQTVASFLPHFIFSDSLPRAPPEPISSHZ

SEQ ID NO: 2704 - protein, 152 aa, Photorhabdus luminescens
MKVSLIDVDKDNYEDVMSLEVEPGQEGFVAPNSESIVESHFNEYCRPRVICFGEEIVGFAMYERCVNEGKPNEYNLYRMMIDKSYQNRGIGSSAMQLLLDEMKQQPDCYRITVCYDETSERHKSFYQRFGFVEVGYYEEYEEMLAEIIVRGZ

SEQ ID NO: 2705 - protein, 336 aa, Photorhabdus luminescens
VGKRIPITLGNIDLLSYKYKSSIKSGKVALVCEGGGQRGIFTAGVLDEFMRVEFNPFDLLLGTSAGAQNLSAYICGQRGYARRAISRYTTNPAFFNPLRFVRGGHLVDLDWFVQAASQELPLDIPTALRKFEAGCEFYMCACRSDNFEPTYFQPDENNWLEVIKASSAIPGFYRNGVTINDVVYYDGGISDAIPVEEAYRRGADTIVVIRTVPSQLYYTPDWMQRMERWLGDSGLQKMVRMLQQHAKSYHHTQKFIENPPDDVQIFEIYPPAPLTASALGSRLPALSRDYHLGRRCGRYFLATVGHLFVGNKFNLGDCSSSYREKLPTSKAAAGVZ

SEQ ID NO: 2706 - protein, 174 aa, Photorhabdus luminescens
MMKIGLFYGSSTCYTEMVAEKIRDILGEDLIDLHNIKETAPKLMETYSVLILGIPTWDFGELQEDWLVIWDQIPSLNLQGKIVAMYGMGDQIDYSDWFLDALGMLYHHLRPSGVHFIGFWPTESYEFTSPKPLTDNGSQFVGLALDDVNQYEQTDDRLSQWCMQILQEMEPLLZ

SEQ ID NO: 2707 - protein, 169 aa, Photorhabdus luminescens
VKLIYMLPLSPPLPPLPPSPPLPPSPPLPPYPALHLFVAAPPFPPFPPFPPLPPYPPFPPLPPIDAALTTPVKMSTLIITSFALPPLLPSIPGAPEEPPVASVPGVDLTEQPCLFSEPILPLLPLTPLLPCSPSKPSPPSEPLLIMLCFLSLLLFPTIVLASILPLVRZ

SEQ ID NO: 2708 - protein, 153 aa, Photorhabdus luminescens
ATGTIAMPITIAINLPRNQCKIGFILSTLVKPEWQKTKPTSKASPNKYSVIHNVNHLNISKTKICPHFPLFIVVQTRLIAAPLAIKFPIRFPFMTVDIYLAGVTVISKFSFKTIFTIVPLQTMYTEYSGTISRFTPYSSPTGLPTFPTKTINZ

SEQ ID NO: 2709 - protein, 153 aa, Photorhabdus luminescens
LNLIKNRRKKGFTGFTGFTGFTGFTGFTGFTGFTGFTGFTGFTGFTGFTGFTGFTGFTGFTGFTGFTGFTGFTGFTGFTGFTGFTGFTGFTGFTGFTGFTGFTGFTGFTGFTGFTGFTGFTGFTGFTGFTGFTGFTGFTGFTGFTGFTGFTGZ

SEQ ID NO: 2710 - protein, 201 aa, Photorhabdus luminescens
KTGEKRVLQVLQVLQVLQVLQVLQVLQVLQVLQVLQVLQVLQVLQVLQVLQVLQVLQVLQVLQVLQVLQVLQVLQVLQVLQVLQVLQVLQVLQVLQVLQVLQVLQVLQVLQVLQVLQVLQVLQVLQVLQVLQVLQVLQVLQVLQVLQVKTIVKTIVKTIVKTIVKTIVKTIVKTIVKTIVKTIVKTIVKTLYRLTQELRKZ

SEQ ID NO: 2711 - protein, 208 aa, Photorhabdus luminescens
AVIKNHFLNSWVNRYKVLTIVLTIVLTIVLTIVLTIVLTIVLTIVLTIVLTIVLTIVLTCKTCKTCKTCKTCKTCKTCKTCKTCKTCKTCKTCKTCKTCKTCKTCKTCKTCKTCKTCKTCKTCKTCKTCKTCKTCKTCKTCKTCKTCKTCKTCKTCKTCKTCKTCKTCKTCKTCKTCKTCKTCKTCKTCKTCKTCKTCKTLFSPVFYZ

SEQ ID NO: 2712 - protein, 168 aa, Photorhabdus luminescens
CREGYWEYWRLFTMSTIKSRVTPVSSDYPTCSECYAQLLIYPGMMHPDNVSRLLKLEPTQKNIVGTTVTNSRGKTREIKLSSWFLSSKSYVESKDLRDHIDWLLRKLNQSEIGLKQLQRTEGISITLSCVWRSKFGHSGPVLWPEQMRSISDLDLECSFDIYFDPDKZ

SEQ ID NO: 2713 - protein, 461 aa, Photorhabdus luminescens; identical to SEQ ID NO: 1083

SEQ ID NO: 2714 - protein, 291 aa, Photorhabdus luminescens
MDIIQNHLHSITLSELGAGVTAQQEQAKVGQFQGEKVVLVSASQSFADAAEEMTFAFSERKDMPLSKRKVSDGHARVREIEALVGEYLQKVPDLERQQKVKALISHLNSAQLTNIAQLQAYLESFSGEVSEQFYALSQARDALAGRPEAHAILTLVEQELSRLAQEQGIAIELGARITPDATAAARNGVGNLQALRNIYRDAVMDYQGLSAAWRDIQSNFKSSSLMEVTGFIMKALSADLDSQQRQLDPIKLERVMSDMHKLRLLNSLSVQVEQLWKSVVEGENHGIRAFZ

SEQ ID NO: 2715 - protein, 533 aa, Photorhabdus luminescens
LLLMSNSPFQQEVAKRRTFAIISHPDAGKTTITEKVLLFGQAIQKAGTVKGRGSNQHAKSDWMEMEKQRGISITTSVMQFPYQDCLVNLLDTPGHEDFSEDTYRTLTAVDCCLMVIDAAKGVEERTRKLMEVTRLRDTPILTFMNKLDRDIRDPMELMDEVENELNIACCPITWPIGCGKSFKGVYHLYLDETYLYQTGKGHTIQEVRAIKGLNNPELDAAIGEDLAEQLRQELELVQGASHEFDHQAFLQGELTPVFFGTALGNFGVNHMLDGLVKWAPAPMPRQTDVREVSAQEDKFTGFIFKIQANMDPKHRDRVAFLRVVSGQYEKGMKLHQVRIKKDVVIADALTFMAGDRSHVDHAYPGDIIGLHNHGTIQIGDTFTQGEDLKFTGIPNFAPELFRRIRLRDPLKQKQLLKGLVQLSEEGAVQVFRPLANNDLIVGAVGILQFDVVVARLKSEYNVEALYEPVNVSTARWVECHDAKKLEEFKRKSEQNLALDGGDNLTYIAPTMVNLNLTRERYPDINFRKTREHZ

SEQ ID NO: 2716 - protein, 192 aa, Photorhabdus luminescens
MSIQNSLPDYQSFDETLHQQSVALTAAEMHGLISGLLCGGNRDSSWQVLVHDLANDGLAFSHPLAQKLRELREITFESLDDSNFAFGLLLPDEEDNVFERADALAGWVNHFLLGLGVAQPKFADRKEISEIIGDLRNIGLLGYEEGDDQEELSQALEEVLEYVQVAAQLCYIAFTEPKTVLIAKNDKPTLHZ

SEQ ID NO: 2717 - protein, 185 aa, Photorhabdus luminescens
MLSLKHVAQLTYNTLQLYMDQRGIDLAVGPISDSDANMLTKAYGELNWEYYITEVGNRHDCFSLCIKFVVSRENLQIESAPAGVALSTYDLNDKSFNIHVLENFVKDMENHPLHRKMLLYTLYATLIFMNVADGEDVRIHEPVKDKIAYYRSFGFELERCGYVMSCDIKTLTAKLKSRSKALVLZ

SEQ ID NO: 2718 - protein, 183 aa, Photorhabdus luminescens
YNFWSFMMENNNKNTNFNKTEMNKFTFVESKLSNEEVVDIHDIMVNSGELRPIEYLKLCQNEIKESKRIVILCSHNTEFVGMAHILLISERTSFNDQGIIELHDLWVNPKWRRNGIVLPLSRKVEEICYQRLNVKNVGLAIQLYKNNEYILRFYMKIGYKPIDLQIDGSNTVLWMTKEIEPFZ

SEQ ID NO: 2719 - protein, 193 aa, Photorhabdus luminescens
MCDKQEFVTNPRIKLLSFLAIIIASIMVIGDLGFHIASWSLWHDTTRQAVLQAYSDLMPALTAKGFKQSLLSQVLYISLDTIPRIISTSSYILIGILFFRFAKGEIWSNRNISASFIIGFLMILEQLLYPVINMLQGMALSVDLVKGQRVFSFSFGVNSESLFIIMFGVFLLIFSLIMRESKKISDEQRYFIZ

SEQ ID NO: 2720 - protein, 141 aa, Photorhabdus luminescens
MKQQGFTLMEIMVAIAIISILSAIGIPSYQGYIQKAALTDILQNIVPYKSGIELCGFETEDFNGCNAGAVSIPKEHNSRYIDNISVKNGEVTINGKQSLKNLSVTLKPTQNTQTGIIKWNIKCESTNNSLKSRCQEIFEFZ

SEQ ID NO: 2721 - protein, 153 aa, Photorhabdus luminescens
VVAASIGAPTILAGVTDNISQANTSPSQSWQNQALSAFDNLFSLQNVQHQPANGVNYWQQHAVRNVIRQLSFAFSISQPMSDETAKQSIRLSSSNIQQLVLETLNTLLIREPKPPEPVLDIPFLNVASQSSYILTLWIAKAQGIRAGPTAYLZ

SEQ ID NO: 2722 - protein, 339 aa, Photorhabdus luminescens
MSALTPASEVILRHREQFSSHHLLFAGDIQDTLATQIDAASVRVHTNQYHHWQSLIRTLGESAWFGLVAEKAFTQGCDTLIYYWPKSKQEARFQLRSLFSVLPKGINIFIVGENRSGVRSVDKLMDGMATFRKIDSARRCSLFYGQLEHEVQFEQDNWWNSYQVENVIVNTLPGVFSQDELDVGSRLLLSTFDKPLSGNLLDIACGAGVLAAVLGKKNPELALTLSDVNAAAIASSKATLKANKLEGHVVVSNVYSNIEDKFDWIISNPPFHEGLKTSLLATDDLIRQAPNHLKPGGKLRIVANAFLPYPDLLDKTFGTHEVIAQTGKFKVYQATKKFZ

SEQ ID NO: 2723 - protein, 153 aa, Photorhabdus luminescens
MFRGATQINLDSKGRLTVPTRYRAMLNEESQGQMVCTIDLHQPCLLLYTLSEWEIIEEKLSRLSSMNPAERRVQRLLLGHASECQMDSAGRLLLANTLRQHAGLVKEVMLVGQFNKFELWDEQAWYQQVKDDIAAEQSTQEPLSVRLQELSLZ

SEQ ID NO: 2724 - protein, 164 aa, Photorhabdus luminescens
MRRILSVLLENESGALSRVVGLFSQRGYNIESLTVAPTDDPTLSRMTIQTKGDARVLEQIEKQLHKLVDVLRVSELAPGSHVEREIMLVKLQASGYGREEIKRSTDIFRGQIVDVTATLYTVQLVGTSDKLDAFLDAVRDVAEIVEVARSGIVGVSRGDKIMRZ

SEQ ID NO: 2725 - protein, 159 aa, Photorhabdus luminescens
RLKVSKKIFSACLMQGCLEYRYTRHLSSCLFVGCAHSPRSHSYLCSRGFAPLPSRCILKSIGYKQHFISCQGNQVVSLNSIIVLRNINGYNLIYSPIIQLDKNHLTVNGEQMMLVANINIKVETKTDRLKIIDYGLSPLKTKTEESLLGTIMTSQFIFZ

SEQ ID NO: 2726 - protein, 190 aa, Photorhabdus luminescens
LMNFNNVVIVHGFLATPDHHWFPWLKDQYEKLNINVIVPELPESHVPSPHLWQEKLQESISNPNERTLFIGHSLGCIATLRYISSLPDNINIGGIVLIAGFYEKLSTLPELNTFTEEGLDFHLLRQKINQRITILSLNDEIVSPQFTLNLSQQLRAELYGFPDGGHFLDRDGFTVFPKLEKVLKDNSMLZ

SEQ ID NO: 2727 - protein, 151 aa, Photorhabdus luminescens
LSWLQRYQQQVRPQLIVNPDVKALFVAMDGLDGLQANGISNLVTAYINAVGIEKKGACHLFRHAMATQMLENGADLRWIQAMLGHASVESTQVYTQVSIRALQAVHASTHPAEQMADEKVRDADEVGLLADLYADDNADADTPPDSPELTZ

SEQ ID NO: 2728 - protein, 152 aa, Photorhabdus luminescens
LPCNRWANPPKGRSACGLRSLTSPRPNPAALAAPGSQSQAPCSFPCSPSPPRAAPGGFPEQNRVVMQGHAQPETPVPPSVAGAPLAGSMPPAPAERASAAQASWATFARCRKRRYTDNGTAGKTGLWRRKARQGVLGPAVNAHWKKRVVTGZ

SEQ ID NO: 2729 - protein, 408 aa, Photorhabdus luminescens
FMPPLILRLLPIILIIGMVPSFIEVDITLPAFPQMLNFFSAAESAVQFTLIVNFLGLCIFTPIFGPLSESYGRRKIILIGATLFFIGSIGCSTVVDLNQLYLFRFIQGAGCSAIWIVGFIICSDIYKDEESVQVFGILNAAISMALIIAPIAGSLIVAHYNWRFTYHLVALLSFLSLMAVFIVPETNRNTVKLSVNKVIKNYCQLIFNTRFLIYSFTPGLLVSACIAYVSVVPFLYIDKMGMSYYIFAVHQAILGICLSVAGFYSGALNRKIGSANCIYLSIIICLIGCGSLMIFSHIYPESAILFTLSMAVICIGSAFQYSMVFSRSLALHPELVGSASSLLTFFRLIFFSFSVLISGWAFTGKLFNSAIVVSSIIAMGLLFSLFVLIDLRNNVVNRRINDESHVSZ

SEQ ID NO: 2730 - protein, 167 aa, Photorhabdus luminescens
LSLVYTHPTPVAYSQEMALPILQQSSHRLYRPWLLSCHQHNGASPLLQTHYGPSTLLRLAPPLYPALVLWRSWDLHLRFSLLIGVTGSHVPHKSLNRLHAAFMPDAAQAVNRSPPALIPQERLHHGFDIIYTLSTHHQRFTFVRLFDPYLIGSCPTFSHLAHHHVSZ

SEQ ID NO: 2731 - protein, 197 aa, Photorhabdus luminescens
MLGVLNWMFPEILSMGIDYFNFNFLIKIMTENHISLTGIAKKYKKIDHLAIAVVSLDKALSMYVEMLGFTLVERRVTKGVTTAMESAILQGNGYTLVLLQGTESQSQVTQYVEQYGPGVQHVAFEVENLEEVVAELEENGIEFSTQIIRGGNLKQIFTKRDSESGMMFEFLERHGEGFEEENINNLFRQLEKTQQIZ

SEQ ID NO: 2732 - protein, 189 aa, Photorhabdus luminescens
MKIEKMKNKKASDASFSDEEKEGFISRLLQLVGQRNIRTAAKDWGLPYSTLNNYINKGTSPSLKYMQIVANKENVSLDWLANGDKNFKFETPDAHYNDIELRHSWNLVFNSLNLCEVDKLIKLIHRKGIEGLLTMAHEKQDIKDVIDKLHIRSSLKQAIKMALAGDESTDKEILRCITTLVSQETNKNZ

SEQ ID NO: 2733 - protein, 165 aa, Photorhabdus luminescens
MPTFHQTGFIEATVGEIQYHRFDFSVEDHDFVMIFSAVEISDVEYLQMRSEEVGFSIPERCYDVKFDRLENFDSGDFYAPPPPDAIFSKLGYQGLMRLGKAFSEIIGLHYQFYDAKAYFAMAETRKLKSFYDRILQQPNVGVPYEIIINLGEMGRGYAIKTPSFZ

SEQ ID NO: 2734 - protein, 445 aa, Photorhabdus luminescens
MAEGRAVKGNITEFGGARRMTQNQTEALKAAINNHKAKNVILFIGDGMGDSEITIARNYAEGAGGFFKGIDALPFTGQYTHYSLDKKSRKPNYATDSAASATAWASGVKTYNGALGVDVFGKDHQTLLELAKANGKATGNVTTARVQDATPAALYAHVTDRGCYGPQETIKKCPTNALENGGRGSITEQLLVARADITLGGGAKIFAQKSVVGTGKDKTLEQQAQEQGYQLVRDAKSLASVTRADQKTPLLGLFHEDNMDIAWEGPKAVYHGNIDNPPVTCKVNSKRNPDAPTLAQMTEKAIDLLKENQKGFFLQVESASIDKQDHKANPCGQIGETVALDEAVQVGLKYARKHGDTLVIVTADHAHASQIIEADIKSPGLTQALITKDGSVMAVSYGTSEGKEQEHTGTQLRVAAYGPQAANVVGLTDQTDLFFTIRDAMKLKZ

SEQ ID NO: 2735 - protein, 149 aa, Photorhabdus luminescens
VADLGGQSTAAYFDAINAQDNEPTTSSNTEATPPDLTEGGILPVETPELSPGPVDARPLQLPGMGALFMIGDDARSKQWLKENLVGLRKKQAVGLLVSVRDKAQLDELRQLAEGLVLAPASGSDLARRLNLRHYPVLITDIGLTQQVRZ

SEQ ID NO: 2736 - protein, 157 aa, Photorhabdus luminescens
VIERHADSVPDNSPSLSGKSVTGVAELVSPAGQVISLDLLPVNAADEPVKLGGRHHPAALALLRPDKMGPVQTAGTQPDAVSVPAQHLETGAGLVAENKSGFVLPAQIQPLQVLGQGINAPAHVDGLSHQKELLRFQHRVSTRITSGNSVNGQAMAZ

SEQ ID NO: 2737 - protein, 162 aa, Photorhabdus luminescens
MPGNNTALWISVLSGLIFISSPVWATEDSALSVTGMTEASAGVTVGQLEHLHAKNLLLEAELQRAKLQRQLTESQPLGLTGNNNIDLPVTVSPVMTAGQPVTRPVVQEIYGRGHALRASVSLPGRGVMELAVGDAVPGTQFKVKVITLSAVTLSDGSVLTFZ

SEQ ID NO: 2738 - protein, 155 aa, Photorhabdus luminescens
MASRGVNKVILIGRLGQEPEVRYRPEGDTVAVLSLATSETWRDRQTGEQKERTEWHRVVIFGKLAEIAGEYLKKGSQVYIEGQLRTRKWFDKASGQDRYSTEVVLNQQGTMQMLGGRSQSEPSRSSGREQSQSSSSVPPRGSEPPIDFDELIPFZ

SEQ ID NO: 2739 - protein, 153 aa, Photorhabdus luminescens
MSAITTENKYFNLNINGLGYLSNVRKVNGPNGSFFSAVINALSGPTENPSYVRFDVTVAGKENSDLISRCQKAVDEDKKVLLGFTLSQPSTGIFTLNKGEHAGEQRVSLRARLIKIDWIKIGQEMVYKAEKPESVPPVQNKSSQKHYAENSFZ

SEQ ID NO: 2740 - protein, 197 aa, Photorhabdus luminescens
MSQISQVTNALLTQLVMELKSGYLRRCEALGLMDEEMRMLHSLTVEDLHYLMNSPVSVLTLRIHHENFALMLQQARREQKRLQRLDRALMLGGSIELMQHYFGLTSVEVSSRRRMLGIEARQGRCLMLTDKDSAEVWRLWKANVTDLDSADGLDVMMQAAEQLVVSLTAVWNAVRGWIEDEKNTVKPEVGQGRQDRZ

SEQ ID NO: 2741 - protein, 544 aa, Photorhabdus luminescens
CMICRVKKIEYQQSTIKEEKKMKVNIMICALMASFNAFASQCHQIKFQQDQQTITGNFNSQREACIEFNILPEHYVRGLALGMQKLVVQKGNQQHIRTLFTDNPVDARQSIGFTVPQVGKYRLAAKGKTGEPWQLTLSFPSYIPKDNDYRQQPESLRLKQLQTEIAQGKGTHAFWREITRKGTPLIEDYDDKNKRVTFLWRGAKANVFILGAPSGDHDPMSHLVGTDVWFRSYIVPSDTLMQYRLAPDLPRVEGTADEQRRSILITAQADPLNKKVVPAVSEDVFNHDSLLALRPTLCDIAQFKQSPFQGATKLHQLESKILGNSREIAIYQPVTPMKQPAMLVLFDGQIYRKQYYIDRFFDSLIEQGKIPPMYVVFIDSLDSARRGQELPPNPNFAEFMASELIPWLAAQGIKAPAERTIISGSSYGGLASSWVAFNHPELFGNVLSMSGSYWWAPQGEAPEWLIREFAKAEKKPLRFYLQAGLFETNRGELEGILYNNRRMKQTLLQKGYLVESSEISSGHNYISWCETLYYGTRSLVTKWZ

SEQ ID NO: 2742 - protein, 105 aa, Photorhabdus luminescens
VNILWSGMSDAIASLDLSCVSDTVLCQLIESSKENTMGICHGITFLGDSMLSFASNNIHEFTPESLCRLGHSLSALSSLLPMLFTMHEKASGEYRRRTSKNEIKZ

SEQ ID NO: 2743 - protein, 176 aa, Photorhabdus luminescens
MSKLILPSDMLLKEGQTVSLTQVDLTKEDSSLLELLQQQIEAEDSLAQLAGPRWYRSGLGPKPTQGGVYVSGTTLAPGQTPPVGIVSTILCNYDRLNWAGWQNQITLRLLITTPNNSAAWEAFLDVASDSATVNAAGSNVPADCRITLQMKVGNITGGLYQPPYISSYDCWVNYNZ

SEQ ID NO: 2744 - protein, 163 aa, Photorhabdus luminescens
ILDDYKIWFTINRLYSLYNKNLDSKILDNWASYFTDDCIYRITSKQNIDNGWDLCFVFCEGKKMLIDRASALSGSIYFRDRVQQRITSNILLTKLEHCGEKILANTETIFTIHESICGQENKLLISGITKDIIEYKSGTALFKERLCICTADIITDSIVYPIZ

SEQ ID NO: 2745 - protein, 170 aa, Photorhabdus luminescens
MKKNFILASLVTVLAVFSSFSALSYDGTIKFRGTIINEGCTITTKDVAVDFGKLSKNAFGGKANIVGISKDFSISLTSCDVTGALGISFDGGPDADNKNVYSSGLAGVGIQILKGSDGNNIAPGTNVPGIATIASNTATMNFRAGLISTKNNVSIGSIDKTFNFTIIYPZ

SEQ ID NO: 2746 - protein, 149 aa, Photorhabdus luminescens
MHESLTIALLQARETAMGFFRPILKRHNLTEQQWRIIRVLSDNRSIDFYDLSCQTCILRPSLTGILTRMERDGLIFRLKPMNDQRKLYVSLTQDGQKLYEKAKEQVEQGYQAIEKAFSPEKMVQLSVLLEELIAVGKNSLINTGKDIKZ

SEQ ID NO: 2747 - protein, 129 aa, Photorhabdus luminescens
MPHFYAECTENIREQANLPELFAKVHQALADTGIFPLGGIRSRAIWLDTWQMADGQHDYAFVHMTLKIGAGRSLESRQQVGEILFPLIKQHFASLMAQRYLALSFTMEELDPVLNYKQNNVHALFRKEZ

SEQ ID NO: 2748 - protein, 161 aa, Photorhabdus luminescens
PLLRNLAINAPCTAASILASSKTINGALPPNSNDSFFTVSALCAIKSLPTRVEPVKESLRTIGLWVIAPPMAFASMPVTTLNTPAGIPACSASAARARAESGVSEAGFRITVQPAARAGPTLRVIMALGKFHGVMAATTPIGCLIVTIRRPGNGLGMVSPZ

SEQ ID NO: 2749 - protein, 173 aa, Photorhabdus luminescens
MSLENEHRLRFRDAMASLSAAVNIVTTDGHGGCCGITATAVCSITDTPPTLMVCINRSSAMNTVFQENGRLCVNILNHEQELMARHFAGMTGVSMEERFRWNIWQKGILGQPVLTGTLASLEGEIEQVQEVGTHNVYLVQIKHITVSEQGHGLIYFKRNFRPVMLEIETATVZ

SEQ ID NO: 2750 - protein, 484 aa, Photorhabdus luminescens
LLMSRTGEEYIESLRDGRTIFLNGEKITNHVDHPAFRNAIRTVASLYDYQAAHADQMTFETSGGKRVGLYWELPTTREKLIARGEAAYAWAMQSCGWLGRSPDHVSAALTGMMTYLEVFEEYSKDRAEALKNYYSYARDKDIYLAFTLVNPQGDRSKTPSEHIKNVFHTLGVLEEKPQGIIVRGAKMLGTAAVLAEEVVVGVFNPLKEGVDDKYALSFALPLNTKGIKILSRKSYETGSNKFDSPLAHQFDENDAVIYFDDVFVPWERVFVYKNTDMCRRQFLATGADVLMDVQGMARYAVKLHFLTGLAHQLTETTGVNEFPAVRESLAELACYATNIEGLFRGLISNPDRHNEYYIPNRLQLYACQVALQSTYPKVIESIRKLSGGGVIMLPSNYIDLANPEIRDLIEKTQYSTLLPPIERVKLLKLVWDAIGSEFASRHTQYEMFYSGAHYVALSRLYDQYDWDFAKNMSRGILDSIDVSZ

SEQ ID NO: 2751 - protein, 171 aa, Photorhabdus luminescens
MKIERLDKNKHDRNNFNCGEPALNNYLKAVSGQHDKKDLSRTFVLTSSQNGSQIKGYYSLALCTVELDELPEKISKKSPSTLHCALIGRLAISKSFQRQGFGEILLIDAIRKAIESSKSIPTPMIIVDAKNDIAKKLYMNVGFEEFPQTKSKLFMSMAVAMEMIKRVDAMZ

SEQ ID NO: 2752 - protein, 161 aa, Photorhabdus luminescens
LSLVFSKFMTPFPLSRMVVGVPQDLSKRTYYGRPQEQDYLLDFNLDAKTLQRHIRAGYRHPGAHFFLPDGTKVVVLSAIVPHGVDIGVPNLPGCIVQTASGIFIATADEWLQLLTVEVNGVESPAVPNTIPEIFRLARQMTIRDEIASNTQDQMACVTDFZ

SEQ ID NO: 2753 - protein, 158 aa, Photorhabdus luminescens
VSTEKTSAFEVFTEITLAVFRLNALLLSKGDQLVAPLGITSARWQVLGAIAHAPHPLTTPQIAAAMGITRQGVQKQLNLGLSSGMVKTITNPRHERSPLYQLTELGRRTFDAAISLEAEWVGSLVQSTDPNELKVTLNTLISLETKLEESPVPNSTIZ

SEQ ID NO: 2754 - protein, 157 aa, Photorhabdus luminescens
MGKQVEIFTDGSCLGNPGPGGYGVLLRYQQHEKTLSEGFYHTTNNRMELMAAIIGLETLTRPCKIVLTTDSQYVRQGITQWIHNWKKRGWRKADKSPVSNVDLWQRLDQAISRHNIDWQWVKGHAGHDENERCDELARAAANSPTETDTGYLENRDZ

SEQ ID NO: 2755 - protein, 193 aa, Photorhabdus luminescens
IIIILFFLDKNYPLLPSGYSMYHMGKIRDLLWDYDISAPLGELGDRHWILLIASWFAVLDSLIIQPCLLQGKIIICDSWYYKYLARFLLKSTELAKLSKSALSINTKPDMVIYLDVPPSIAEKRKEILKPSESGKLEINEKYDFIEYQKHVLNQYQTFYDDTWKIIDADTLTKDAVIKSIVDVIQLEILKRRZ

SEQ ID NO: 2756 - protein, 93 aa, Photorhabdus luminescens
VAHVCVRKLKMSWEEIAEFLDIVRSFCKIVPLTVEVHDRARLIAERYRLSFYDSCIVAAAVIAGCRTLYSEDMNHGQMLEDSLVIKNPFSYVZ

SEQ ID NO: 2757 - protein, 152 aa, Photorhabdus luminescens
LFFEKFILFHFEYLLGHISKGSQFRAVAMSFSPLGHGRCKAFDKVDDASPASLETAANDVPRFLSPAIISAGCQSFFTIIPYSPFSLVIQGAIFILSSNLYFYTRYLSSCLFVGCTRSPRSHSYLCSRGFAPLPSRCILKSIGYILLQLFPZ

SEQ ID NO: 2758 - protein, 143 aa, Photorhabdus luminescens
LGQTAEQIIEKEIIPANKFEYFFEGDEEFFYKPESGMRLVFDDVSKRLKSRQFTLINIYDNNGAYNGEIPYPFSHSVDRTIVRALMGEPDSADGPEKIPVIGMVGGYDSYTRKLSEQYPNTEIRFLYLADLRVHALIFEHIVZ

SEQ ID NO: 2759 - protein, 191 aa, Photorhabdus luminescens
ICVFEDWFLRGKYNFSCEKFENLSGRYIREGDVKIMTVNVESLINSLGRTYQDIYDEGLIPYKTKPTGFAGDSIVCLDMVKEGVFLSFHREGKRLKEITLTLFDEKNSLYQFTNELPSPLIPLMCRQWVHEQFGKPEKFLPPRKRLKKDIGWTELYSLLDFRIPTSMKFDYDLLEQVISVTFLPTSEVRWZ

SEQ ID NO: 2760 - protein, 208 aa, Photorhabdus luminescens
MIYLYTDSSPNGYKITIALEELGLPYTLKHVRIEKGENRELEFLQLNPHGRIPVLVDESTETTLFESSAILLYLASKTQQLLPEDFKSRWEAITWLTFHSSSVGPILGQRVHFELFVTEKNHMAIQRYRRLTEEAFSTLNKRLSDRPFFAGDEYSIADIANFGWTHIARIIDFDFSHHEYLSAWHDRIALRPAVQRGIMIPEPATGPZ

SEQ ID NO: 2761 - protein, 156 aa, Photorhabdus luminescens
MADIMTMIKSLGQTVEQLVEKKLISDKKFEYLFEGADTFNYEPEAGLILVFDDKSRKLRSVEFTLISISGRSGNSEMYHGEMPPPFTLSMDKVAVRALLGEPDVTSGETKIPVIGVVGGHDCYIRKLHFIYPNTNIRVLYLIDLRVRGLVFEREIZ

SEQ ID NO: 2762 - protein, 137 aa, Photorhabdus luminescens
VMFNIPRNQPGVVTGRGQKIEGNWLSRAGQDMGAPIPSQIADKLRGRKFNNFDNFRNAFWKEVANDPEFSKQFKTANMGNMKKGKAPAPRKDEWKGKKKKYELHHKKPISKGGDVYNVDNISVVTPKRHGELHSWRZ

SEQ ID NO: 2763 - protein, 151 aa, Photorhabdus luminescens
MSIKELINSLGKTADLLIEKQLIPTGKFEYLFEGDDEFLCMPEDGLTLVFEDKSRLLISVGITLITSGPRMKIYRGEMPPPFLSEMDKTKVKSVLGEPSETKGAVKLPVIGMVGGWDTYIDRMSDQYPNTRIIFAYSTDQKVSNITFKKIZ

SEQ ID NO: 2764 - protein, 151 aa, Photorhabdus luminescens
VADITKLIKCLGRTAETLVEDGEISKGIFKFHFEGDESFNCEPEKGITLVFDSKSRQLNSVQITLIDIHGDHDEYNGSLPYPFLPLMDKAMIRAEYGEPMESKDMIEAPVIGVIGGYDAYINRIKSCPNVEVIFIYDAYYRVRALTFNTIZ

SEQ ID NO: 2765 - protein, 179 aa, Photorhabdus luminescens
MKNKFYLIFILLFSFEAFSHCGNKVNLKDGINLIDLNGDGKKDVIFYAKFENNTSHPSNTLTVFIKNKNGKFNIVPLPNDTGFTWFDFKLSASEIKIQDYELRVKNGVYYIIFFRKKNNDDDIFGEYPVEFIKYDIKYNNEVPGISNYYWDYTKSYLTKKKYKNVSDAMTEYNMECSLZ

SEQ ID NO: 2766 - protein, 183 aa, Photorhabdus luminescens
FMKFFLFFFVFLSFFCHSGENESFRKKIQKKIDDKILLCLGETEWPVSINENSIWVNANMESLVDAGLVKLDFKRGKNKLWNLTKLGKKEFNKNGDFCYGRMMLKDILSITYINKKRGFIVFNYYVHLLPEWAKSKSIRFAYSYLDNIITGIDNEKYQIEFEKSDTGVIKIISDPVQLEILYZ

SEQ ID NO: 2767 - protein, 152 aa, Photorhabdus luminescens
MQEGQKRKTSSLSILAIAGVEPYQEKPGEEYMNDAQLAHFKLILEAWRNQLRDEVDRTVSHMQDEAANFPDPVDRAAQEEEFSLELRNRDRERKLIKKIEKTLKKVEDDDFGFCESCGIEIGIRRLEARPTADLCIDCKTLAEIREKQMAGZ

SEQ ID NO: 2768 - protein, 172 aa, Photorhabdus luminescens
MARVYIAVGSNLAEPMQQVKNALAALKDLPETECIACSSLYRTKPMGPQNQPDFLNAAVALETTLAPEELLNHTQAIELTQGRVRKDERWGPRTLDLDIMLFGDQVINTERLTVPHYGLKQREFMLYPLAEIAPDLIFPDGEALSERLKHIPENGLALWLQPQSSDSNHYIZ

SEQ ID NO: 2769 - protein, 184 aa, Photorhabdus luminescens
LVNFIMKHTVEVMISEQEVKQRIAELGKQITEHYCDSGSGLVLVGLLRGSFIFMADLCREIQIPHQVDFMTASSYGSGMNSTRDVKILKDLDEDIRGKHVLIVEDIIDSGNTLNKVREILALREPKSLAICTLLDKPSRREVDVPVEWIGYSIEDKFVVGYGIDYAQLYRHLPYIGHVVLLEEZ

SEQ ID NO: 2770 - protein, 151 aa, Photorhabdus luminescens
VGKILYFADRLHLERYGRLITGDNYLAMKDGPVAVNAYDIIKVARGDGRFIPNKCDVDVIRSLLSVEGRHGNHQIRALRDFDEDVFSDSDIDCINEAIEKYGNLSFKEIRDISHDSVWMTANQNSEIPLEVIAASCKDGDKLVAYLISTEZ

SEQ ID NO: 2771 - protein, 313 aa, Photorhabdus luminescens
MSSILPLLALRAFTEVGRRGSVKAAAAAMGVSPGAVSQQIRILEDRIGFALFLRTPKGIKLTAKADRVYETLLLSFDNIDKSIKSLKAMQFEHKVSINTTSSFAASWLIPRLKNFNEKYPNIEVNIEASNELVDLKRSSTDIAVRHGLGNYPGLISTRLIAPVLIPVGTPELLGSGPPINHVEDCLNYPLLQDSDRSDWHLWLKAHGINEGAKARQGSSFEDDFLLARAALTGQGLALVPEFCVEEELRSGRLNVALEKKWPSRFAYYAVTLPETLFRPEIVNIIDWLVEQSNLSDDCVGECSLAWNQSESLZ

SEQ ID NO: 2772 - protein, 167 aa, Photorhabdus luminescens
MINDPTLLTDDHNLNSFTSGIDTLDNWLTDRALKNQKENASRTYVVSEDRDVIAYYSLATGSIMSEEAISKFKRNMPNPIPTIILGRLAVDKRYQGRGFGRYLVRDASIRVAQAADLVGVRGLIVHAISENAKAFYKSVGFSDSLLNPMTLMITLKDLKTVFKITDZ

SEQ ID NO: 2773 - protein, 182 aa, Photorhabdus luminescens
MSKPKHIVEVMISELEVKQRIAELGKQITEHYRDSGSDLVLVGLLRGSFIFMADLCREIQIPHQVDFMTASSYGSGMNSTRDVKILKDLDEDIRGKHVLIVEDIIDSGNTLNKVREILALREPKSLAICTLLDKPSRREVGVPVEWIGYSIEDKFVVGYGIDYAQLYRHLPYIGHVILLEEZ

SEQ ID NO: 2774 - protein, 176 aa, Photorhabdus luminescens
KKQKNIIKTNQKPYKNNKQEFMKIKNHKNTLLYRAKEISKLSKKTFKKEALFFNFFIVYIVSVFILRLDTPILEYIDYSMSIILLIIMFSTANKISNEFSLLKKRFKKEYSHDKKPNFFYKIFTLSIITILLILVSIPFLYILNHIHYDFSLKLFLNTIISSYIYLIVIIFSKPEZ

SEQ ID NO: 2775 - protein, 190 aa, Photorhabdus luminescens
PCVIVYFCTYNLSINTSEKGIINIKLLLIVLVATRYDIELEKLRVTGFDRGAEPLYKIQGVTLMLHTNNPTIKHKASLLNLAEELNNVSKTCKMIGISRDTFYRYQELVEEGGVEALVNRSPNLKNRIDATTEQAVIDYAIEFPAHNQHRTSNELRKKSIFISYRLRFIYFVKTGYPVTDFTPYEKIMTZ

SEQ ID NO: 2776 - protein, 180 aa, Photorhabdus luminescens
RIAVTTGATWSISVCHELLNGGGIMTEKCLYCSFCGKKQDEVAKLIAGPSVYICNECVALSQGIIDEEKKLKVLAVSHPHSASLYTFLAYNSGCFIESSAICSDEILAKTLEISIDDLHKALRTLKRKKLIEILPCADGMTLYFVSGKNICKTYDEETKLYRVAVNVLLQPNPKLKMLPZ

SEQ ID NO: 2777 - protein, 180 aa, Photorhabdus luminescens
MKALIVIDMLNDFVTGALANEADAMKIVPVIKRLIDHARRQPDWLVVYANDAHRADDREMSIWGRHAMAGTLGANVIETLAPIGTDREIVSPKRFYGAFDGTDLEEVLKVYGVTEVVLTGQHTHCCVRHTAYGAFIRGYQIKVPSDAVCVFPGVDQQDAINYLKTIYGAEITMSTALVMZ

SEQ ID NO: 2778 - protein, 161 aa, Photorhabdus luminescens
MSIPNILMTRIDNRLVHGQVGVTWTNSLGANLVLVANDHVAGDLMQQNLMDMVVSDGVQTRYFTLQKTIDVIHKAAERQKIFIVCKTPQDVLTLVKGGVPIRFVNVGNMHFAEGKRQIHKTVSVDDSDVVVFRELEQLGVTCEIRRVPDEAGEPIAKLLVZ

SEQ ID NO: 2779 - protein, 137 aa, Photorhabdus luminescens
LSIGGDDHCTVPFGQGGECIVEVPDNDDVQAFYLYIPLLRLPVDEPGQLMLTRAALELNMFGLTTGGSQISLDSRTNYLVLSFSALIEMFDETAFMQTLGEFLDLGVSLQAQFQAINTQQNGASAPHPLLGSAIACZ

SEQ ID NO: 2780 - protein, 323 aa, Photorhabdus luminescens
GFIMFNYSKHKTYTNLFKENKISIGMFLPLRALNQEADIKPEIDLIREIEQQNFSAIWLRDIPLFDPNFGDIGQGFDPFVYAAWLAALTSKIAIGFGSAIFTLRHPIDLAKKATSIDQLSNGRLILGVAAGDRMSEFPAYNIPYNEKGMRFVESINMFRALLDNNNRTINSPLGYIDGNLRLIPKAVNDFIPLIVTGRGQQDIKWIAENSDGWFTYPIQTHNKEGVAKLGKNISEFRQNIPGNMFKPHLTNEWIDLVEDKYYPRTPTNGGFILKTGRLGLIELLEEWQEVGVNHAALGIQYGKRPPKEVIQEIGEEVLPAFIZ

SEQ ID NO: 2781 - protein, 198 aa, Photorhabdus luminescens
SPAVIVNHRPAHRALTHLPNIGHTILRRYHGGIAVQIERLSIQRETVQRQKIRGGIARLDAIGLRLKAQLSIRRFRQQRQAMRSPEKLNSHPHAHRCLFPNRLIRHLLSRRNSVHLDIPERFPIHRKEGLIKGWQNTQAVLTVGFQPEQRRCHHKRRCDFLLIFHYPYLHQPRLRCGIDHRQRLCPFPLGKNHPGFIZ

SEQ ID NO: 2782 - protein, 191 aa, Photorhabdus luminescens
MRKPWVLIRQTTLAGLLCTVSLPGGASPNTAELTLALTLEQPTCELYMQTSHVVFSSVPLTEVRYSTQHIAAAGSKPITLALSGCAGSARAGRTPAIKIAGTTLEEHPTLFRDKASTVAGNVGFGLRYQLPGGGLGIYLKNGDYVNLAPSGNAVKDRQITFLMDMRHESGTAVPTPGELTAHIQFQFDYHZ

SEQ ID NO: 2783 - protein, 187 aa, Photorhabdus luminescens
MKKQILKTCAIAALCLGGMSQAIAEDVSAGTLAVSSSVTAETCKFAAIEPVSLSALVSDFTAVGNGAIVANTQKFVTIKTEKCPLWSSAKSVKLTVAGTTLASSSSYFQLLNTTGNAAITDHAVAITINDKALPPNAGINLKDPQYSPAVAGDNAITLKVGLARIGATAVKAADSKANLTVKVSYDZ

SEQ ID NO: 2784 - protein, 191 aa, Photorhabdus luminescens
MLKPWTLIGRTALAGLLCTIPLPGGASSNTAELTLALTLEQPTCELNVQTSHVEFSSIPLNEVQRSAEHIAAADNKPVTLALSGCAGSARTGRTPAIKIAGPTPENHPTLFRDKASTAAGNVGFGLRYQSPEGGLGSYLKNGDYVDLASPGNAVKDGQITFQMDMRHESGTAVPTPGELTAHIQFQFDYHZ

SEQ ID NO: 2785 - protein, 189 aa, Photorhabdus luminescens
MMKTSVLAAVLLSMGMGMAHAAAGDVLASNSVVVNGVVGAASCVLNVTDGGASTTSIDLGAINQSAIKSGQLIGTKKIKVELGDCSQVVDSNDNTKLNTGVGLRISGTASTVSADYFAAPGDTNNKLAVAVQNGSKFLKPNDAVSFTKGALLTDVMQELDVGMIAKTPSDVTAGMSVSVPLTFQLIEKZ

SEQ ID NO: 2786 - protein, 182 aa, Photorhabdus luminescens
MKYLKLFVLRVGFMVIAATVYGHQGVQAADNMRFHGALVKEPCTIKPGDEDIQLDFATISEKYLYLHGRTHSEPFLLRLSGCDMSVGKSFKLTFSGIENTQLPGLLALSAGSQAAGIAIGIETAEGRRLPLNKEGDAYPLKEGENLIALQAYVQAEPIALANQTITRGAFHAIATFNLNYDZ

SEQ ID NO: 2787 - protein, 161 aa, Photorhabdus luminescens
LIYRVFWTVCLGFINVMPGQAADNMWFHGTLLEAPPCVIDDGNMIDVYFGHNVGIHQVDGVNYTQPVNYQLVCAPNISGWSLGLTVIGPSTSFDAAALQTNITDLGIRLTLDGKAFTLNERIPVTSQKQPVIQAVPVKKPGSTLPEGAFEVMATLLAEYQZ

SEQ ID NO: 2788 - protein, 164 aa, Photorhabdus luminescens
LSVSAQADLLTTRGNIAARPAGNFSGKTPINIYGVVIAPPPCVINNGNTIDVDFGDVMITRIDGVHYMQPVKYSMKCEKMPANAMKMMISGNTASFDPAVLQTNHTGLGIAVIHNGRKLPVNDWMKFNYPDFPELYAVPVKDMATVLKGGDFGAGATMMVEYQZ

SEQ ID NO: 2789 - protein, 442 aa, Photorhabdus luminescens
MNQVEYDIIGVGFGPSNISLAITLEEELPHKKVLFFEKEPSCEWQAGLLLTNSDIQNHPLRDLATPRNPKSHYSFINYLFENNRLFEHLNLGLYFPYRYEYRDYIKWAAKHFDKVVRYSTSITSVKIIDHYHGENTLIEVKTDGGETYQCKNLIVGTGRTPYIPLSLRQLDHNHLIHGAEFNNIISHISSGKVKSIAVVGGSQSAIEIMIFLADKFPHLEIHGVSRKFGYRLKDTSPFTGEVYFPEFVDTFFNSKEEHKARLKRDLNLTNYSASDGDVLDELYRTIYRDKYFGQHKIKIHNSADIVESSVKDSIVSLQIVKNHGLEETYQIDVDMVVSATGFKDIGREEYQEICPPLLAELYPLMSKNSHNGIIINRDYKIDLINATDIGIYLNGLCESSHGLGDAGSLSLVSIRSKHIIDSIEKNIKIKRSIHNKNKIEAZ

SEQ ID NO: 2790 - protein, 192 aa, Photorhabdus luminescens
LDKFSWREVMSRYAAVVVVPCLLMFSCVIEAETAVPQGTQGYGRVSMQGTIIDTACAIDAGSRDQTIELATIPVSRMIHDGQGPVRPFSIRLINCVLTSATLGKPDWRHFQVMFDGIPDGNNFRLSGVAQGVALQITDMYGNQAYPGTPLPVEGLQAGQMTLNYAMRLVSNHQLLQAGQYRTTVRFRLDYHZ

SEQ ID NO: 2791 - protein, 194 aa, Photorhabdus luminescens
MDSKSEIILLHWWQSMFMSPKQLKEKGIIPAPSTYRAQLKRCDSVEMAMLTEGFRALWLSLPDEISLSDNPIKLEYWATMAVALVHVKNNSDIKLAVAAGKKGGGNKPVVSELRFSQLQNAKTPNELLRRLCRVLQQIKGNISVLALARDIEEWFAEYEQLRPCKADRRIKVRWGMDYYRAASGKSVDLSDFHZ

SEQ ID NO: 2792 - protein, 184 aa, Photorhabdus luminescens
MPKLIYYVATTIDGYIANKNNGLDWLYEFVLGDDATPYDDFYRGIGAVIMGAQTYEWIMTNSPDDWPYKNVPAFVLSHRALSTPEGLNIIITNETVRVIAAKAKKMANGKDVWLVGGGKTAAYFAEAGELQQIFLTTIPVFLGAGIEVFPVSEKVHVIPKTQRFLRSGAIESLLDVDAPTPTPZ

SEQ ID NO: 2793 - protein, 170 aa, Photorhabdus luminescens
MKMTVNVLDTQQIQWMYVHNHDWLFRWLKHRLNCDETAADLTQDTFVKLLRSPLPQQLNEPRAYIVTIAKGLMVNWYRRRSLEQSYLDLLVSLPEPLIPAPEQKLIILETLQEIDIMLSQLPTPVQTVFLLSQIEGMKYEDIANQMNISLSTVKRYMKQGFYQCLIAMAZ

SEQ ID NO: 2794 - protein, 102 aa, Photorhabdus luminescens
LYKWGYGGIALFMNYCQWNEELHEEILNLRENTGIIPCEFAFTDEIYGHLMSDNIDLRKKSRDEKCISEWPKSVVKLARSLSWNLHTAHRILCCCFIPIRKZ

SEQ ID NO: 2795 - protein, 158 aa, Photorhabdus luminescens
MRIGHGFDVHKFGGEGPIIIGGVRIPYEQGLLAHSDGDVALHAATDALLGAAALGDIGKLFPDTDPAFKGVDSRKLLREAYSRIREKGYRIGNLDITIIAQAPKMLPHIPQMRVNLAEDLQCHIDDINVKATTTEKLGFVGRKEGIACEAVALLVKEZ

SEQ ID NO: 2796 - protein, 181 aa, Photorhabdus luminescens
PTELPHHRILFDLYRCYDIKLKYQAWQLTNGFPAVCSSGRRPSRRSNPFPTELPYSLPLGPCIAFLSPYNAKLKPGSVLLSHGETPHYHRRYGVSLLSSAWGQVGPPRYRRQAYSVFFRPLSLFCHNHPNQSLNKRKISLCCLPTPKHLRCCKVKPLGSLVLVSSMHRCTYTPSLSTSSSZ

SEQ ID NO: 2797 - protein, 441 aa, Photorhabdus luminescens
MKLSLDHIPGKMRHAINECRLIQIRGRVTQVTGTLLKAVIPGVRIGELCHLRNPDNTLSLLAEVIGFQQHQALLTPLGEMFGISSNTEVSPTGAMHQVGVGDYLLGQVLDGLGNPFSGGQLPEPQAWYPVYRDAPAPMSRKRIEHPLSLGVRAIDGLLTCGEGQRMGIFAAAGGGKSTLLSTLIRSAEVDVTVLALIGERGREVREFIESDLGEEGLKRSVLVVATSDRPAMERAKAGFVATSIAEYFRDQGKRVLLLMDSVTRFARAQREIGLAAGEPPTRRGYPPSVFAALPRLMERAGQSDKGSITALYTVLVEGDDMTEPVADETRSILDGHIILSRKLAAANHYPAIDVLRSASRVMNQIITPEHQAQAGLLRKWLAKYEEVELLLQIGEYQKGQDPVADNAIAHIEAIRNWLRQGTHEPSDLPQTLAQLQQITKZ

SEQ ID NO: 2798 - protein, 471 aa, Photorhabdus luminescens
KLKDLFIIKIKSRLKMNKVNIHTTIPGPFSKIALAKQLEQESSAVSYPKRIQISLEKGNGCYVQDIDGNVFIDFLSGAGSLPLGHSHPELIAEVNAQVSKLCLGLDFPTPAKELFTEAHLSMLPESLRNKYKIHFCGPTGADAIEAAIKLAKIATGADEIISFRGGYHGCTHAAIAVTGNRSMKKNILGKMPGVHFFPYGSESQSSESWVLNSDHLDAGLYLESALNDANSGLGNIAAIILELIQGEGGVYSAQKSFVDSIIRVSKTYSIPVIIDEIQTGCGRTGTWYAFEQYAIEPDIFVTSKGTSGIGLPSSLMFYKKDFNNWTSGIHIGTFRGNQLAFASGTKAIEIIKRDNLLENVKQRSIQIKKHLAALKNNFNIIGEIRGKGLMLGVEILNASTGKACEITAKHIQKIALNKGLITELGGRNDTVLRILPPLNVSSDTIEEAIEILRNTFRAYMNEFQLLEEGVZ

SEQ ID NO: 2799 - protein, 197 aa, Photorhabdus luminescens
MEFIYPQASLIAGVDEVGRGPLVGAVVTAAVILDPLQPIVGLADSKKLSEKRREALYLEITEKALCWSLGRAEPAEIDQLNILHATMLAMQRAVANLPISPEYVLIDGNRCPKLPMPAQAVIKGDGLVAEISAASIVAKVTRDREMAELDQLFPEYGFAKHKGYPTAFHLEKLVQLGATEHHRKSFAPVKRAIGLKZ

SEQ ID NO: 2800 - protein, 165 aa, Photorhabdus luminescens
MVRMPRCFNRPSNVILKSGASMPTNTSGFSSVKRVVRSLRIFNKRGKRPRTSTIPITASSSISYQASQPSACIRGPATPTKRALGTLAFNARIKPAPRISPEVSPAINPIVNGRRLSIEEMVAKGVSFIYLTDDAAGRICQKIAEDFYMLIIFSQLSNFLLCFFZ

SEQ ID NO: 2801 - protein, 186 aa, Photorhabdus luminescens
VINEIKKDAQDRMEKSVEALKNQISKVRTGRASPSLLDGIIVEYYGAPTPLRQLANVIAEDARTLAITVFDRTMTPAIEKAIMASDLGLNPSSAGTTIRVPLPPLTEERRKDLIKVVRSEAEQGRVSVRNIRRDANDKIKALLKDKEISEDDERRAQDDIQKLTDNFIKKVDEALTKKEEELMEFZ

SEQ ID NO: 2802 - protein, 150 aa, Photorhabdus luminescens
MAKIGIFVGTVYGNALAVAEEAQQILEQQGHDVEVFEEGELEQWQSYLDQMVLVITSTTGQGDLPDNIRPLYYALRDEQGYQPELRYGVIALGDSSYENFCGGGRTFDELLQEQGAIRIGEVLMVDAVEEAEPEVFAQPWIRQWGELIEZ

SEQ ID NO: 2803 - protein, 185 aa, Photorhabdus luminescens
MISNVTEALSNFTRCYVDLWQKETGAPPASRELYGVPSPCITQTGDNIVYWLPQPFPLEEKLNSVEVALDIQLQPAIHDFYTSQLAGDMTVTFEGQRLSLIQVWSEDDFIRLQENLIGHLVTQKRLKLSPTAFIATMESDDMGIISLCNLTGEVILEQFGSHKRERLFTDLVGFLGAIEPVFMRZ

SEQ ID NO: 2804 - protein, 111 aa, Photorhabdus luminescens
MASSLVLPHASELKGVWQLSDKHQQCDVLLTDHPLPEGSIWSLNGDNDCLAYMFGEVPAGWRPTPDGLTITDEQGSGLAFFAHEPDGWFARFADGRELMIKPNKTSKKNEZ

SEQ ID NO: 2805 - protein, 152 aa, Photorhabdus luminescens
MTQATENRIAPHPFGREISQQQLIATFDQCRQWEDRYRQLILLAKKLPALPENLKQQDTEMSGCENRVWLGHQLLPDGYLHFYGDSEGRIVKGLLAVILTAVEGKTPEQVLTTNLLALFQQLGLEQQISGSRLNGVKSLINTVQNAARSYMZ

SEQ ID NO: 2806 - protein, 527 aa, Photorhabdus luminescens
QSGRFPLLHNMVGQGKYIELSYPIRAGLIMNKYIVTITPPTPNGDLHVGHIAGPFLSADIFTRTQRLKGKKCYLISYSDDYQSYLQRKAEEIGISAPALAKENSKKIQESLILIDIKLDHWLESYDNRYFEDAVKMLYHSCLDQGIIAPKVSLEPYCEKCEKWGYEAFARGECNHCGESSDPSQCESCAMAPDAFEMKNLRCILCNENVVYKHVERNFLLLPVIAEKLKEKILSSPMRPQLTAWVEEVFAHGIKEWGVTRPNESGLKLYSDENHRIHTWFMGLAGYLATLKELSEKNADTESPYDLIYDDNTCMVNFLGMDCSYSHILAYPAQILLNDELHFKHAFYTNFFLKLDGKDFSTSRNHAIWVKDIVKNACSDSVRFYVSLISPEHASENFVVEEFWTWRNHIFNYLLPKISDNLEKMNSDNITSPIVLSESETKIIERWQTYSRYDNFSIKEIAAELMEMLDLLNAKLNYNILDKNLAILFAILSEPIIPKTSQKLKEYITHHDIEAFCSLLNLSRPGVZ

SEQ ID NO: 2807 - protein, 154 aa, Photorhabdus luminescens
KIEFLDIFQRNRAVTPGDLIGHHIPTVGTGNLIIAVVTVQADDVDPSVPINRSIAVTHFDHIVTHTTENLIIAAASVNDAAVFGGVNCVALRTGIDNRLTRATNDGVVPTAADQDVVTHATYQSRIAGTALDKDTVDTTAYDSIVAASAFGDGZ

SEQ ID NO: 2808 - protein, 174 aa, Photorhabdus luminescens
MKVLQVHERFKNWRNIIIFMSCALLMACSKPIDIYKPIDVSKSGQSVKIDFEISKKGNYQFALLFDKGDDYEEMKKRLELFGNVDKDGVIIPVSLHLVKDSKIFFDKKINAGGRGWGQSLDYEGRRINMAVRNIKILELPPGRYSAVITILEDVPVFNDIESFVEFSYFNPKIZ

SEQ ID NO: 2809 - protein, 190 aa, Photorhabdus luminescens
NDISINKGNIKIWSEEMKLLRIYKRFKNWRNIIVFMSCTLLMACSKFIDIYRPIDVSKSGQSVKIDFELSKEGNYQFALLFETGEGYDEMERRFKLFGRADKDGVIIPVSLYIVKDGKIFFDKKINASGSEGGRVFNYEERSINTAVREIKTFLLPPGRYSAVITTLEDVPVFNDIESFVEFTYYDPKIZ

SEQ ID NO: 2810 - protein, 135 aa, Photorhabdus luminescens
VSHSDQSVKIDFEISKKGDYQFALLFATGRGFGEMQRRDKLFGSIDKDGVAIPVSLRVVKDGKVFFDEKINAVGSGWGRTFYYEERRVNTTVREIKTLSLPSGHYSAVITTLEDVPAFNDIQSFVQLIYFNPKIZ

SEQ ID NO: 2811 - protein, 193 aa, Photorhabdus luminescens
NGISINKGNIKIWSEEMKLLRIYERFKNWRNIIIFMSCIWLVACSNYIDAIRKPIDVSHSGQSVEINFELSKRKAGNYQFALLFATGGDYNEIDRRSKIFGSVDKDGIAIPVSLRLVKDGKVFFDKKVNAVRLDGWQAFYYEKRLINTTVRDIKTLELLPGRYSAVITTLEDVPAFNDIESFVEFAYYNPKIZ

SEQ ID NO: 2812 - protein, 190 aa, Photorhabdus luminescens
NGISINKGNIKIWSDEMKILRIYERFKNWRNIIIFMSCTLLMACSKPIDIYKPIDVSKSGQSVKIDFEISKTGNYQFVLLFATGDDHDEMERRFKLFGSIYDDGVTIPVSLYLVRNDKVFFDEKINSGGYDGGQSFYYEERRVNTAVREIKTFSLSPGRYSAVITTLEDVPAFNGIESFVEFAYYNPKIZ

SEQ ID NO: 2813 - protein, 190 aa, Photorhabdus luminescens
NGISINKEDIKIWSDVMKILQVNERFKNWRNIIIFMSCALLMACSKFIDIYRPIDVSKSGQSVKIDFEISKEGNYQFVLLFATTDDYDEMARRFELFGRVYKNGVITPVSLHIVKDGKIFFDKKINAAGSEGGRAVNYEERRINTAVREIKTFSLPPGRYSAVITTLEDVPVFNSIESFVEFNHYDPKIZ

SEQ ID NO: 2814 - protein, 174 aa, Photorhabdus luminescens
MKVLRIHERFKNWRNMIIFMSCTLLMACSKFIDIYKPIDVSKSGQSVKIDFEISKEGNYQFVLLFETGEGHDEMARRFKLFGRADKDGVIIPVSLYIVKDGKIFFDKKINASGSEGGRVFNYEERSINTAVREIKTFSLPPGRYSAVITTLEDVPAFNGIESFVEFNHYDPKIZ

SEQ ID NO: 2815 - protein, 141 aa, Photorhabdus luminescens
VLILLTVSLMMLKALHHHLDNALIMMVDERRYLKAFQQAESSLAWGIAQSWPLHSSQIEDSNKTEEWYCQQQQEFHLTSCLKRQSSHFFLLKGMADVAPGQSVGLYQWMKLHSSGGDDSLIPVESGWLDFCPEVDVGFCSZ

SEQ ID NO: 2816 - protein, 393 aa, Photorhabdus luminescens
YRGFLFIVKFIKTRCLIMQTDKTIRITIIGGGIVGATVAANLALKGLNVSLIEQETIGGNGATKFSGALFRVHDPDPEIARLTRRSVELMQESQVGKIFKKTLKQTGIIYAAELNQKNIELVKTSIRDYCDSLYPLELISAEKAFELTNGCYSKHNNRIILFEPNGGFGYIRHTASNLAQVVRDTGNLVLENTKVHAITTENGKAIVQLAHSTIEADYIVLAIGAWTKTLAYKLPVNAKSIPLANIRTSYSTNMPIIDTETGTHIVPLAEYFYQAGSKIRNVAETPEDIEYNDNIIENDISERLLKSKFKHEPSNILSIIKGYDSYTPDERPILDFIDEEKRCFVAAGFCGIGYKIALAVSEIITLNLLPTELSTDFLKQKNQIFSYSRFTYZ

SEQ ID NO: 2817 - protein, 184 aa, Photorhabdus luminescens
IKCFTKGNKELSMVNNVNIIGHYNIDNQSGFSLLELMVVIVLVSIFSLWGVQEWGYHQERVRLQESAQKILTFISRQQSLANYLNKRVILWLKTGKDWCIAFSNSVLANCNLENVEGINSPYQDVIISSATKDQIEFHGIRNTMIPASFTLANSAGEISIIFSSRGRIRSCSNNKFNQIPACDZ

SEQ ID NO: 2818 - protein, 177 aa, Photorhabdus luminescens
VIDDDGYRPNVGIVICNRQGQVLWARRYGQHSWQFPQGGINPGESPEQAMYRELYEEVGLGRKDVRILASTRNWLRYKLPKRLVRWDTRPVCIGQKQRWFLLQLLCNEEDINVQHSNTPEFDGWRWVSYWYPVRQVVSFKRDVYRRVMKEFASVVMPMQESVSLPRSSYSYRRKRSZ

SEQ ID NO: 2819 - protein, 162 aa, Photorhabdus luminescens
MNISLIAALAMDRVIGMENKMPWNLPGDLAWFKRNTLNKPVIMGRVTYESIGHPLPGRLNIVLSNQPGNDERVTWVSSVDEALAVAGDAEEVMVMGGGKVYDQFISRASRMYLTHIDAEVIGDTHFPDYEPDEWDSEFTEYHDADELNSHSYCFEILQRRLZ

SEQ ID NO: 2820 - protein, 153 aa, Photorhabdus luminescens
VQADSAVLLHFILKLQDGSIADSTYTQGKPALFRLGDGTLSSPLEQQLTGLKDGDKHTFTLAGENVFGKPNPDLIQYFTPRDFAATGIPEIGTIMLFTAMNGSEMPGIVKAVTEESVTVDFNHPLADQNVTFEIEVVEIDPQLEENHADIAGZ

SEQ ID NO: 2821 - protein, 168 aa, Photorhabdus luminescens
MNKPICSTGLRWLWLVVVVLILDLGSKQLVLQHFHLYESVPLIPYFNLTYAQNFGAAFSFLAEKDGWQRWFFAFIAVAISVVLMVMMYRASAKKKLSNIAYALIIGGALGNLFDRLVHGFVIDFIDFYVGDWHFPTFNIADMAICIGAGLVIIDSFLSPDEKTIKVGZ

SEQ ID NO: 2822 - protein, 190 aa, Photorhabdus luminescens
MNANQLANPGPLGLMGFGMTTILLNLHNAGFFPLASVILSMGIFYGGLAQVLAGLFEYKKGNTFAATAFTSYGLFWLSLVGLLFLPKMGLAEATSSQYLAVYLGLWGVFTLFMFFGTFKANRVLQFIFGGLTLLFALLAIGNFTGNTTLLTIAGYEGIICGASAFYLAMAEVLNEQYGRTILPIGEIKPZ

SEQ ID NO: 2823 - protein, 187 aa, Photorhabdus luminescens
MERLKKVKIGFIAGLALVMSAMAPTVALAMESKTTVAQLINQRLSYMKDVAGYKSENHLPVEVLAQEEKVLAKSISEAESFGLNGESVRPFVIIQMNAAKAIQYRYRADWLSVPENGWQLKPLDDVRIKISGLSTEILQQIATLLKAGEKISASDKEMFMKNIQQHNLKDSDKQQIFAALEKVKLKZ

SEQ ID NO: 2824 - protein, 352 aa, Photorhabdus luminescens
TYCQLNFRLIFSNRKIRFSPIHDLLIKINKMNSKLICGISAILDPERSVHALTVMRAIEIFKDLHNNSTLEFIFSEDYGSIEGGAKAAHYNIENNVDMVIGHFSSNAAIGAAEVYSHHNIPVLLPTATETTLTIRNSNIFRICFNNKNIAHALTVLTKEDGDHYYEIKTDGSKYSDNLAEDIRRMLSRDDAAVKPNDNTDQIIFIGTIGKSEKFLHHYFSEKKNGKIILTDDAACKQLNLPENVENGQITGIGFAPVEFINPLESCIQHYIQQYQQFPNIFFLETFAALEIAHQLAIPDKLLHRLNRETFQTILGHIKFIKGECSAAKLCLWMNENSIMKPRYILPINSRAZ

SEQ ID NO: 2825 - protein, 192 aa, Photorhabdus luminescens
MNELRIGLVSVSDRASSGVYQDKGIPALEEWLKSAITTPFQIEARLIPDEQIIIEQTLCELVDEIGCHLVLTTGGTGPARRDVTPDATLAVADREMPGYGEQMRQISLQFVPTAILSRQVGVIRKQALILNLPGQPKAIAETLEGLKDENGKVLVSGIFASVPYCIQLLDGPYVETDDKVVAAFRPKSARRZ

SEQ ID NO: 2826 - protein, 162 aa, Photorhabdus luminescens
MLKIIKILVTTTLLCLPVAALAEEIGSVDTVFKFIGPDHKIVVEAFDDPDVKNVTCYLSRAKTGGIKGGLGLAEDTSDAAISCQQVGEIELTDKIKKSSKKGQVVFQKRTSLVFKKLQVVRFYDANRNALVYLTYSDKMIDGSPKNAISAVPIMPWKPVENZ

SEQ ID NO: 2827 - protein, 177 aa, Photorhabdus luminescens
MYHVIAATTNPAKIKAISLAFDDVFGPGTYRIEDINVDSSVPQQPIGNTETRTGARQRVMAARQVRPEADFWVGVEAGIEDDMTFAWMVVEYQQIRGESRSASLMLPEKILDGIREGRELGHEMAYLTGIDNINQKEGAIGFFTDGILTRTSVYHQALILALVPVHHEIYKELNARZ

SEQ ID NO: 2828 - protein, 166 aa, Photorhabdus luminescens
GSGTGIQGDIVPGLSGKLLTGVYVSRGSIEVIARSQRQVTGGGYLATDVMLLCQMAIVVAPPVTVFCAMGAQGIQSQVKARGYLCLTVFARIFHVTGREMDVVEGFQRQGAVVVLDINARRPILPTVSTCSAQGRGTGDIPICLCGNAVTAPNLSAEVGDVLPGGZ

SEQ ID NO: 2829 - protein, 439 aa, Photorhabdus luminescens
FESLTMNTNNKKFIDVLSIGFGPAGIALACIFDEKKIEHQYQLQNNFLALEKADSCAWHPNLLLPSTDINHHVYRDLVTPRNPQSPYSFAMYLKEKNRLFKFGLLGRPASRFEWSDYMIWVGQKLENYVQYKKNVTHIYPVINRGLLDGFSVSGEDFEYVTNTLILSSGSTPFTPKMFDNLLGDHVFHTSAYLEKINNFQNNIPRRWMVIGSGQSAGEVIADLINKKDDIDILSLHRSIGFKIAQLGQFPNLVFLPENIEYFKSLSPENKKVFFEHVKSTNYSGIDIDESQSLFSTMYEDEVIGKERLHMMVNSEIITIDHSHEEYQIVIKDTFTGEETNHICDAIVLGTGYYQNPLPDLLAKFDQFLVKDFEGGLTIDSDYKVKLKNCGTAHLYVNGLSERTHGISDAQSFSAVAIRAERIYESIKANTGTTDDYAIZ

SEQ ID NO: 2830 - protein, 160 aa, Photorhabdus luminescens
MADMIYMTIKGKKQGLISAGCSSVDSIGNKYQANHFDQILVYSLSHAITRTQNVDHQPIIIQKPIDKSSPLLGVAISENESLECSIDFYRTNSNGAQERYYNIKITGATITEISVLHPHSLNHNELPPQESISLKYTNITWNHLIAGTGGYSIWDDRIYZ

SEQ ID NO: 2831 - protein, 155 aa, Photorhabdus luminescens
MMAALGLFVFMLKTTPYQSMQHQQSWRHAFNSRIGIRPAWQFLGPGNDTMTLSGSLYPEITGGRLSLTVLQVMADSGKAWSFIDGSGTVYGMFVIESIDQTKTEFMSNGSARKIDFTLTLRRVDSSLGEMFGDLQEQFSMLTDNLSDRVREVLSZ

SEQ ID NO: 2832 - protein, 172 aa, Photorhabdus luminescens
MALPRKLKFLNLFNDGNSYQGIVEEITLPKLSRKLETYRGGGMNGSATVDLGLDEGALDVEFTLGGMEAQHYRQWGLTKADGVMLRFAGSCQRDDTSDVIAVEIVMRGRFHEFDHGAYKQGDNTQTKISAKNTYFKLTWDGEVLIEVDTVNMVEVVNGEDRLADHRRAMGLZ

SEQ ID NO: 2833 - protein, 177 aa, Photorhabdus luminescens
MQNIKNFSQYTPDSEQARKIIEDFNVIYLKSEDGQDWYECQKSFNPDTIKVMYDFNNVIRSISGDVSAFNPEGMSVAEVSNLLDSCDISGQWQYINGAIVPRKYTKGELVAQAERRKEELLALASNTIAPLQDTVELEEATLEEIERLKAWKKYRMQANRIDPTIAPDIEWPAQPVZ

SEQ ID NO: 2834 - protein, 161 aa, Photorhabdus luminescens
MSVLEEIPGGIPTDIPPNGWVKCNGAIFDKSLYPKLAETYPSGRLPDLRGEFIRGWDDGRGVDVGRYLLSFQLADIAPHSHRIERMWSNSNGGTEKVGTPSYILNSVYQNVNYGIDPRGLGIAMGMGAGGFGYMDNAIAASTGIETRPRSVAFNYIVRIAZ

SEQ ID NO: 2835 - protein, 191 aa, Photorhabdus luminescens
MAKIGYIRVSTNDQNSDLQRNALISINCEQIFEDKISGKTSNRPGLKRALKQLKKGDTLVVWKLDRLGRSVKNMVTLISDLSERGIHFQSLTDSIDTSTSMGRFFFHIMSALAEMERELIVERTNAGLIAARAQGRIGGRPVSLSFVEQQQAARLLAKGHTRKQLSLIYNISLSTIYKYFPVNKTNCRSNZ

SEQ ID NO: 2836 - protein, 178 aa, Photorhabdus luminescens
MSEFATVARPYAKAAFDFAVEKQSLEQWQNMLAFTAEVTRNEQVGELLSGSLASETLANTFIAICGEQVDEHAQNFIRVMAENGRLLALPEVLQQFIQLRASLESTVDVEVISATELREQQLAKISVAMEKRLSRKVKLNCKIDKSVIAGVVVRAGDLVIDGSIRGRLDRLTDVLQSZ

SEQ ID NO: 2837 - protein, 157 aa, Photorhabdus luminescens
VNINATILGQAIAFVLFVMFCMKFVWPPIMAAIEKRQKEIADGLSSAERAKKDLDLAQANATDQMKKAKVEAQVIIEQANKQKAQILDDAKAEAEQERNRIVTQAQAEIDAERKRAREELRKQVAMLAIAGAEKIIERSVDEAANSDIVDKLVAELZ

SEQ ID NO: 2838 - protein, 491 aa, Photorhabdus luminescens
FLQEEINQMIDTNDRWDISKEIISSLFPEIHQRNDIIEFIKNSVNNHIAELPTMGVNPSLSKTDISHALSKYTFDGNFSPTDVLNDVLHLMEKGIVHVTSPHYFGLFNPSSTFWGIISDFITALYNPQLAVWSHAPACVEIEEKLIKYFGGLAGFNADNSGGTFTTGGAEANCTALICALTKHFPDYAQQGLQSINGQPIFYISSDSHLAWLKIALQSGLGHSAVRLIAVDHTGRMDISGLTRAIDNDIANGNKPFMIVGTAGTTNAGIIDPLPELAAVANKYQLFFHIDAAWAGAILLSDQYSHHLKGIEQADSITIDAHKWLSAPMGTGMFICADKHILTTPFAVSTNYMPVSDDINSDPYIHSIQWSRRFNGLKLFMPLAILGRTGFSNMIDYQINLADYLRSQLAKNDWQILNPSALPVICIRDNGDFDVNKILEKVLEINQCWISITTFANTKALRLCISSFRSSKSDIDQLVDTLNMARNSVPMZ

SEQ ID NO: 2839 - protein, 126 aa, Photorhabdus luminescens
MSVSLYSGKIALKLLFLQLMTFVVLSVAFCTKSIEWGASAFAGGLACWLPNAIFMLFASFQKAKEEEVPVRIAWSFAVGEGLKVIITIAVLVVALGVFKAAFAPLGLAYLAVLIVQIIAPAVINDZ

SEQ ID NO: 2840 - protein, 147 aa, Photorhabdus luminescens
MATITLISGSTMGSAEYVAEHMAEILEDAGFSTEMLHGPSLDELPQEGIWLVVTSTHGAGELPENIQPLAAEISDQKPDLSKVTFGAVGLGSSEYDTFCGAIRSFDQLLIENGAKRLGDRLEIDIQQHEIPEDPAGEWVKYWANTLZ

SEQ ID NO: 2841 - protein, 154 aa, Photorhabdus luminescens
MAEIYQIDNLDRDILHALMDNARTPYAELAKKFAVSPGTIHVRVEKMKQAGIITGTRVDISTKQLGYDVCCFIGIILKSAKDYPSALKKLDNLDEVVEVYYTTGHYSIFIKVMCRSIESLQDVLINKIQTIDEIQSTETLISLQNPIMRTIKPZ

SEQ ID NO: 2842 - protein, 172 aa, Photorhabdus luminescens
RRILGRGSAWPRGRGAKGKCPFVAEVSMNEKGHPMFMRFSVVKGFKTEELTRWAKVYLKPKSLVISNGLACFRGIKQAGTFHLPRVTGGGAQSVKLPYFQWVNTMISNVKNSIRGTYHSISKKYLPRYLAEFCFKFNWRFNLKKTFEQLIYSCIRAAPIPEYLLKLAEIRWZ

SEQ ID NO: 2843 - protein, 171 aa, Photorhabdus luminescens
MAKNQIQFQKGISIHEVISLYGHEEQCQKQVFDMRWPTGYHCPHCGHDKYCQLKSRLLYQCNQCHHQTSLTAGTLFSASKLPLTVWFLAIYLMTQEKNGISALELSRQLGISYNAAWRMKHKLMKAMKERDDEKPLGGFIQLDDAYWGGAQHGPEGEGQKGNALSLRRFQZ

SEQ ID NO: 2844 - protein, 160 aa, Photorhabdus luminescens
MALLKTLGSKGQHIAQENVLPLLARISLAATFWLSGQSKVVGLNIDILETRTPWQLGIPRVTDSSVSLFTNEYKLPLLPPDVAAVMAATAEHLFPLLLIVGLATRFSALALMVMTLVIQIFVYPDAWPVHATWLTAQLYLMTYGGGRFSLDRLIYRHRTZ

SEQ ID NO: 2845 - protein, 174 aa, Photorhabdus luminescens
MAEKRNIFLVGPMGAGKSTIGRQLAQQLNMEFYDSDQEIERRTGADVGWVFDVEGEEGFREREEKVINELTEKQGIVLATGGGSVKSRETRNRLSARGVVVYLETTIEKQLARTQRDKKRPLLQVDAPAREVLENLANERNPLYEEIADVTIRTDEQSAKVVANQIIELLEKNZ

SEQ ID NO: 2846 - protein, 321 aa, Photorhabdus luminescens
MDDLSGLFADVADVLGIGTISIVEKDYYVVELLRLLQPLAFDTHKLVFAGGTALAKAGISLDRMSEDVDIKLVPQPEFLVGVQYSRSQRKNIRKDIVQTISATIAASGFLGIDDSNPKITRDEYRYNDISVRYPQRVVQVPYLRPFIKLELMESDLLQAAERRDIRSFVTQLTGKGRAVEAFPCTTIISTQAEKLVAMLRRTAVFMRNIDRKDDESLVRHLHDNYCIVNAIGVDIRQLAGFVQQTIEQDIQRYGRQYPQFQISSINELRAGLEELGSNPIYQQRYQQLVIPMVFEHSRIPWAEAYDCFRQTALSVLNELNZ

SEQ ID NO: 2847 - protein, 157 aa, Photorhabdus luminescens
MLFLILFYLFFWQERTEQRSSLAQKIAAQQINTKAANERLNQLPLLGGIRQHINQIENKLSKPRQNEVKITAIKQLQQPLINSGAQVLEWQRKKEGEKTLWQITIYLNYEQMLSFLEALQTLYPPLLIKQLSISPSGESLNVKITLSEASHEEFYDZ

SEQ ID NO: 2848 - protein, 185 aa, Photorhabdus luminescens
MMYQVNFLPWRQTRLRHRYRWWAILLLLQLMLWLTVLVWMLLKQQETINQYQRQWQQLNQQQLYLQQQITQTEEAVNLHNKLADKLKQQQTWLKQNQQHWQLFNELPELLPEGSWLTAFDDQAGQLKLVANSLDYSSMTSLLDNLENNGQLSEIQLKKMTTTEQQIRQFIIDANWQTEISDDKKZ

SEQ ID NO: 2849 - protein, 156 aa, Photorhabdus luminescens
LAAGLFAQSAFASSLITERNITLEVANKLASEAIQSCAANNYNVTVSVVDKSGVLKVVQRMDKAGLHTVDASKMKAYTALSTQRTSEDVMKTAQSNLGAQYLGDIPGFLLLGGGVPVKSSDNQVIGAIGIGGAPSGSLDQQCAFDAIQKISSDLSZ

SEQ ID NO: 2850 - protein, 157 aa, Photorhabdus luminescens
MTQSQYSQTPRLALTDAIIDAKARKNLTFEDIAQGTGLSLAFVTAALLGQHPLPADAARVVVDRLELEEDAFFLLQTIPVRGSIPGGIPTDPTIYRFYEMVQVYGSTLKALVHEQFGDGIISAIDFKLDIKKVDDPNGGSRAVITLDGKYLPTKPFZ

SEQ ID NO: 2851 - protein, 166 aa, Photorhabdus luminescens
MSTRIVNERDPQYVVAEGEKRAIRTIKLFISLGFIAESGFLLMGLILFPDNGPLVWRLVWALGLCGIGMGAAVGGLTYLVSARFTPGSTGAYIMTAVSSTLLFSVCQTLCWGLDHNVGLNYWGSIEMPLLFLIKGYTAALIAGILGSFLLNSVTGARFLARLKVFZ

SEQ ID NO: 2852 - protein, 113 aa, Photorhabdus luminescens
MIIWYILGWGFAPGCLTVLTINSIRGRLPRRVGAVVVTLISFLLVTGICGLVYAYLTNSVFMQIAMGGEAHHHSSVNHGTILGFITQLLPSLCATVISIVNAFSIKMGKQFRZ

SEQ ID NO: 2853 - protein, 112 aa, Photorhabdus luminescens
MFSTIALFWALCLVCIINMMRYFSSLRALLSILRQSDPLLYQSVDGNGFFTTHGQLNKQIRLVNYINSQRYLDHHDPEVVLRCERLRKQFILTSSLSGLVVICLISMLIWYZ

SEQ ID NO: 2854 - protein, 144 aa, Photorhabdus luminescens
MAYKHILVAVDLSPESQVLVRKAVSMAKPDNAKVSLIHVDVNYSDLYTGLIDVNLGDMQQRISEETRSALKALSADSAYDIQETLSGSGDLGQVLVDAIKKYGIDMVVCGHHQDFWSKLMSSARQLINTVHVDMLIVPLRDDEZ

SEQ ID NO: 2855 - protein, 199 aa, Photorhabdus luminescens
MDKNEPTLWPPYQVFYIQSMLFNTTSALQAVDRASKYIQAISEGKLGPQDRKDELLDCLQNFINHSAAIARYFFPSMIGGKGEKVLYKNRAEFLRQIFDVTESSPLHDKKLRNAIEHFDERLDMYLEGGIVGNIFPSLILNKPEETDVPHHIFRAYYLNDGIYQVLGERHNVQPILDEVMRLHELLEMFDENGGMFGKZ

SEQ ID NO: 2856 - protein, 224 aa, Photorhabdus luminescens
IRLNPYPLSRYFHILSLRVNCRRYSLSHFVLLIEGIWRRLNKPRYPTGYQAGITLNRLEQNLSPYCCERLSAESLQVTLPDGLQIDVCEKPKTLFLAYIVSCCFRLQGMTSLKEKIVIKAKIKGIFRRKTVTYYCYHGAEYGQQIIDLLNQYPLIGETLAELDFRDLVLNIHQGQWQLEVEHFAASEIVSRLPASRRYLRLTSEQRYLLLSSLLMFSQLMEKIZ

SEQ ID NO: 2857 - protein, 158 aa, Photorhabdus luminescens
MSGLILTPAFSVNDQRIIRRALRLLEKYQRQPGEQFLAASYTKTWLQLHLARQEREVFVVLYLDNQHRLLEHETLFLGTISHTEAHPREIVKSALRHNAAAVILAHNHPSGITDASKADRTITDRIVNTLNLVEVRVLGHFIIGDGNTLSFAEMGWLZ

SEQ ID NO: 2858 - protein, 167 aa, Photorhabdus luminescens
MLVQYKTAFASIDNYHKGGIQALVEDPKRYVFSNMYEIAATSAPYDRIVAAINLDYTIEIARAEGTSPWFACAHDEFVVAMDYDVEVHFVKLTDESVIDEDKDGAVKLNGTPDGQKMGCIYLKRGHQALLPEKVAYRFHADKPATLMIQSILGDVSVQKWADICLNZ

SEQ ID NO: 2859 - protein, 129 aa, Photorhabdus luminescens
MKVWYQEKNAPLPGTYLCSVFDITSGGVMEFCFGKHRKTQFRMFIYNDAGQLRAYMNVCPHFDVPLNVRSGEIFTSDRSQFMCSIHYARFNFHDGHCTEGPCEGIGLESIPLTITGESVFIAKYDLHKZ

SEQ ID NO: 2860 - protein, 192 aa, Photorhabdus luminescens
MNLVPDRTIIFMFCLFFINMRRLMMKLTISTDNIKFFLKKIDELVDIENKKEEIRLLLTLTVHSKRKKVKPGSDLSLKITMLSHWNRLMKMAMFFLKKMNNEGIIDIQLLSGRYYSNETEAIVNIIPYGEGIYIYGIVYPVKKEVLRHIYGNSYLSPGTNLIIDFEFDPDKNTCLLYISNSRCLNLEFIAVZ

SEQ ID NO: 2861 - protein, 139 aa, Photorhabdus luminescens
VVSRYVFGTPSTVTDELARYLFMWVAMIGAAYTTGQHRHLAIDLLTMKLKGIGKNSVGLVIQAAIMLFASIVLVYGGSVLVISTLETGQITPALGLPMGYVYLCLPISGVLMICYVLVDIVALIRNFSGKDAVISENQZ

SEQ ID NO: 2862 - protein, 163 aa, Photorhabdus luminescens
VGISTPEILTAEHNINDFYCQHETLNEWLSRRALKNNKLGASRTFVICKEGTKDVIGYYCLSAGSINHIESTPSLKRNMPDPIPVVLLGRLAVDVEYQGKKLGALLLQDAWKRVASTAEQVGISAIIVHALDESARTFYTRLGFVQSPLEPYTLMLPLGKQKZ

SEQ ID NO: 2863 - protein, 283 aa, Photorhabdus luminescens
MKYIYLFLSIIMSSKAYSFDNMKLSFVEGGDFYVGSVFGAQNYESHSNVTLNSFYIMKNEVTYSEYKEVYEWAILNGYDFDDGCNGSHYEDCLPPEQDEGRHPVTSIKWLDTILFSNALSEKLKLTPVYFQKGNKIIRKKDKNLEIFINTNANGYRLPTLNEWHVAARGGEPALRLGRYGYYHSGSNDSKKVAWYPEFNTSNFGTQVVGKLSPNDLDLYDMSGNVSEWVYDSYELGTVKLYYFCGGSYLSHANSLSSCDNHSSGYIMPDVGFRLVRSYLNEKZ

SEQ ID NO: 2864 - protein, 179 aa, Photorhabdus luminescens
MKNKFYLIFILLFSFEAFSHCGNKVNLKDGINLIDLNGDGKKDVIFYAKFENNTSHPSNTLTVFIKNKNGKFNIVPLPNDTGFTWFDFKLSASEIKIQDYELGVKNGVYYIIFFRKKNNDDDIFGEYPVEFIKYDIKYNNEVPGISNYYWDYTKSYLTKKKYKNVSDAMTEYNMECSLZ

SEQ ID NO: 2865 - protein, 183 aa, Photorhabdus luminescens
FMKFFLFFFVFLSFFCHSGENESFRKKIQKKIDDKILLCLGETEWPVSINENSIWVNANMESLVDAGLVKLDFKRGKNKLWNLTKLGKKEFNKNGDFCYGRMMLKDILNINYINKKRGFIVFNYYVHLLPEWAKNKSIRFAYSYLDNIITGIDNEKYQIEFEKSDTGIIKIISDPIQLEILYZ

SEQ ID NO: 2866 - protein, 498 aa, Photorhabdus luminescens
MNMSTRLTSHIEKGVVGFPTALASSIGVIMASPVILTVTSGFGIGGDTFVLAMLISFIMMQAQVTTFAEAAAILPTSGSVYDYISCGMGRFWAITGALSAYLIVHIFAGTAETILSGIMALVNFDSLNTMVESHNASWMVGVGLVITFGLLNALGIEAFGKVEIVLTFCMWSTLVIFSICGLLMPFAVPLESWFGEGLNVSDPLAVLSLVGMAMFMFVGCELVTPMAPEIKNSAKVLPRAMMTGLCGVAFCMGLYGASISHQVENVLVDVENNVRLLETPMAIPAFASQVMGDFGKYWIGIGLLLAGAATINTLMAAVPRILYGMALDGALPRIFAYLHPRFKTPIFGILVAVMIPCLHAFIIQGDLSRIMPLVLAAVCAWCVAYLLVTCSVILLRIRRPDLHRAYKSPFFPLPQIVSSVGIILAIIHITPPGMNPGDVYIPFAIMLGLTASYALFWTLCVQRVNPFKPVPVEQVLSHTFTKGELPEVQLEPLRSLNZ

SEQ ID NO: 2867 - protein, 192 aa, Photorhabdus luminescens
MINITEAAQTHFAKLLANQEPGTQIRVFVINPGTPTAECGVSYCPPDAVEATDTELKFDQLSAYVDELSAPFLEEAEIDFVTDQLGSQLTLKAPNAKMRKVSDDSPLAERVEYVLQSQINPQLAGHGGRVSLMEITDDGFAILQFGGGCNGCSMVDVTLKEGIEKELLNMFPELKGVKDLTEHQRGEHSYYZ

SEQ ID NO: 2868 - protein, 158 aa, Photorhabdus luminescens
IKPKIPRIQNMGLPFHNEVHGISIEGREAVFREGDFSGSLQEVKNNIIKYGNISSCTFIKGWFEISLANWSRPIAAIYLDVDLQKSTRDCLKYLYPWLTPGGSLYSQDGHLPLVLDVFEDVNFWLNEIGTLPPIVVGIRKKKLIKITKPDTPSLPLLZ

SEQ ID NO: 2869 - protein, 175 aa, Photorhabdus luminescens
RIFRRISPDFIRHVSKIHRAIFLATAITRQIHQMQTKMRSTSHFNGTPNFRIQPPSVQQHKITRTFIRSLPKQISHCYSQLYLPSRKKSMLTMVGYCWLCHQPLWFPHHGVCSFCNKRLKRLTNMCPCCALPSELPSLPCGRCLKKPPLWENMIYPMDFKMDRDGKGENPREHRZ

SEQ ID NO: 2870 - protein, 101 aa, Photorhabdus luminescens
MSDNDYDIIPFSEAKTLLLEDAATLEAYNDIQIRKALMKQLKDARKALHLTQQDVAQKIGTQKQNISRMENGKSVPNLDTLSRYAAALGGRFIFQMPVSQZ

SEQ ID NO: 2871 - protein, 158 aa, Photorhabdus luminescens
MKTKLITREGYNKLKEELDYLWREERPEVTKKVTWAASLGDRSENADYQYNKKRLREIDRRVRYLTKSLEELRCVDYSPQQDGRVFFGAWVEIENDQGEIKRFRIVGYDEIFGRKDYISIDSPMARALLKKEVGDSAIVHTPTGKVLWYVNEIEYTKZ

SEQ ID NO: 2872 - protein, 164 aa, Photorhabdus luminescens
SVDDGNTIKETLLPAGTVHSVIQKMSQCPLTEIFTSNKKITMKQKLFGQPYDESNPEWILKGYFDVMYQKGKNYFYDVIENIIKRHGFSTDGAYCNFPDMNSFFEEEHFEGVEFTWGYPPEQAPTIIVSEATCFKYVKLACEKYLQLHPEDTEQVKSLLVQLPZ

SEQ ID NO: 2873 - protein, 182 aa, Photorhabdus luminescens
MIFGDPYRFAILVEYIPYWSDSSFKNGLFHFYINGKMFPDELTTATLNVDVFSLDEKNALVSFPENKELFDKEIKEAFNTMLGMISPNLVDSNLDVPEDFESSYIYKASTENIDDFGSSVFAVSYDDIVRIIGAKRRILRYDNNGCGYWEDIPKPDFYETKIYKDEVKEIISNIKKYYISLZ

SEQ ID NO: 2874 - protein, 170 aa, Photorhabdus luminescens
MNPLKKKAPAKVSASKQKRKNREELNAEGRARKREKKHRGNPPGNRNQEQSGDKHPSGKQQRDPRLGSKVPVPLIVGEQPTKPVVANKVETKPRLSPQEELAMLENDDRLDALLERLENGESLSKEEHAYVDTTLDRIDALMEELGIKLDEEEREEEKQDDIMQLLKGNZ

SEQ ID NO: 2875 - protein, 167 aa, Photorhabdus luminescens
MTINVNDSMLLQISGSQTDLPGGQTITGKQSNHGDFRLPACLSHLKDTPLYMAVAYWGLLKGSGFTKSEISQVFRVTERRATDVMNYIYNERRDVIACEKVFFREKQGSRRQMLIVTAVVEPMPQKGQASVTKTVKSTRSRTLSQANHMCIWRTWFLQRACGPFISZ

SEQ ID NO: 2876 - protein, 220 aa, Photorhabdus luminescens
LSTVLPNSRENALIYSCLNTIAHLVPISAAAFYLVNNELRPENYILYGISDETHQNYLAHFQHLDPLKPANYQQGDINMVGMDQKILTKHNKYYHEFMQPNNIQDIAEIFIRQHNQIIAGVSLLRDTLFTPKDFNRLSAILPLIELAVRDLLPETPTILTAKEQEIINLIREGSSNKRIAQILNISLSTVKTHLRNIFAKTKVTNRTELVSSGFITRYLZ

SEQ ID NO: 2877 - protein, 189 aa, Photorhabdus luminescens
SHVHLAHLVFAAGLWSVYLLSRITHVAVWRDMMKGEFSSILCVMPYGMLISRMVLVIGIILLAVCGFLLGNKIRYSRYPRMLLAYWCRTWILPLLFIAIGLVLMFGVGEEGWLDRILDEVDSVLIGLFFDNRDDVLSAPYPPPVSCGSAVDSAVDCSPADLHGLSGLVSVTTDSHHIRHDPNFAHNIRZ

SEQ ID NO: 2878 - protein, 152 aa, Photorhabdus luminescens
MAETIDHGTLSHLVEAGAVKGAHIVGQPGGWAVMVRYGMHERPLAAQRSRNVRLFRKFETLVSYLKKIGIARFDVDSSNYAPAPPNTSTRRPDRAEALKRTHEAAAYDAWFREQVQQAIDEPGPGIPHTDVKAKFAAKREALRKRIVQGRAZ

SEQ ID NO: 2879 - protein, 152 aa, Photorhabdus luminescens
MLYNLIIVIDVKTLHQEIWENKNYPTSLCKSKLFQRLSHTRSIEPMKNNKLILFCVTLGWLLISGCTSIMTHSGPSRGYYPGAKANIEMLKDKDTGWVMKPLLAIDLPFSALLDTLLLPYDYIKSDEDQSTSSPKERIEKIEKAQRQTKTNZ

SEQ ID NO: 2880 - protein, 191 aa, Photorhabdus luminescens
LELTRMELTRCHWVTSDPQYLAYHDNEWGKPLQDSQKLFEMICLEGQQSGLSWLTILKKREGYRKCFHQFDPVKIAVMDENDVARLMLDPAIVRNRAKINAIINNARAYLKMQQQGEEFSTFIWRFVDNKPIINQWKTITEVPIKTDLSDELSQALKKRGFKFIGSTTCYAFMQATGLVNDHITDCLCRKZ

SEQ ID NO: 2881 - protein, 154 aa, Photorhabdus luminescens
VFMGIKAQSSAHTKWLCKYPIVFSPKYRRKVIFTRIRSSISEILRDLCQYKGVEIIEGHLMPDHVHILVSIPPKISVSSFMGYLKGKSALMIFDKHANLKYKFGNRKFWSEGYYVSTVGLNEATIRKYIREQEKSDLMQDKLSTREHEDPFKGZ

SEQ ID NO: 2882 - protein, 191 aa, Photorhabdus luminescens
LCIRGKLKMKLMNKNLSIVLIIFAIFVSVYFVFFKKWDVREAIADFANEHCKINQECLIDLNEITPFHWDRAYIFSTGTRPKSIEKAIGMHYQFIDVGVKFIFIKNKEIVYSEEYFPYPDYRDKNQIVPNFASLLYPENNYPEYYFLTKENSQLFIKRYHGTSSKRKRNMFYEISPSNENQSERNNSYRKZ

SEQ ID NO: 2883 - protein, 198 aa, Photorhabdus luminescens
MMSEVIQGKDDIAITKNSITADVTFVIDVDSIIEYLRNNNLKSSLDPKDPTVIRQHVYIANYTPELGLKVASSSGARVTVPINANIRWRATTVSNNFDYTIILYKFKKLSIGDDVISVPSQIWSQNPMGKKVPMVPSGINANEDEPKIIFVESQDSYFQAIAHKPGVEQYTWFFAAYDGKKLLGYYRYDPYVEVTNSZ

SEQ ID NO: 2884 - protein, 166 aa, Photorhabdus luminescens
IMTNIIGNKSTFAVEYSLENRKKLIGRARLWINGIFLGSLGDTIFFDGYLIGGLTEILNKNKLDERYLLDDHHLIYDLLENDMNLFDDEKYDLAKSFSVNLGTWSDYFDMYSYKLTDNLGIILWKFIGHNDALEDLIGYPRCVFSEQFRYDELVNIINRLHIVGSZ

SEQ ID NO: 2885 - protein, 163 aa, Photorhabdus luminescens
DCNMIDINEELGQIKKTSFFSNMGLSDLQDEDVILIESVEKVFINPSDIEFKGYYKNTKWLPTSPTQEDPFYKKQDSPKDLVEIRVKINKAVMSMTKELAKGKFISGPHDFNQVARNAICYAFRQYISEKYLNLGNKWERIVKIYYAGHWPVGISKEKIIVIZ

SEQ ID NO: 2886 - protein, 398 aa, Photorhabdus luminescens
IPGRAGTRRVPSPGKSVKQKSMNPLTAIGRKDVSSLPTSSPAEADADLQRRFEQAITSHAANTRQSTTRQTEQPLTNTTANHEPADQHATHDSDEELPLFDSPQPAIDDLRKQALPLTGHDMPAPHQNQKKNLSAPAHRLNEIANEIKESLSAPGVPTRQSNLNALSDSDLKPVDITVTSNPDTAMMQTTPGRSPSQPDTQHSAIPHQQTDPTLPIPARNANEINPAEGKTRDEIETSHLLVLKPKESDSQSSDSGGSDGKTPFFPQTQFLPGERILATMQATSTISPLLEVLIDKLSVEISIELTQQPRPATLHLTLPNLGALEIQLTSEHGKLQIEILANPAAQQLLKQARFELIERLQLLYPTQTVELSLPPQTDSEHGSRQRRSVYEEWKKDAZ

SEQ ID NO: 2887 - protein, 295 aa, Photorhabdus luminescens; identical to SEQ ID NO: 404

SEQ ID NO: 2888 - protein, 169 aa, Photorhabdus luminescens
DPLNLSGGVNPYSYVHDPVNWIDPLGLAGCPLINRIVNDANKVASPGGHITSKQAEILKSNLPVVQRRSALQNQVSRKEFVRDQDYLMKQWETNTGRTWPIGATPHHIIPLESGGANKWWNLMPTHGTLPNHSLPGIPGPHAAGGVLRTTIQQGRKALPPGTITDLRLZ

SEQ ID NO: 2889 - protein, 158 aa, Photorhabdus luminescens
MADVHNPSTRSKNMRAIRNCDTAIEKKLVKILHDLGVTYRVQVRELPGKPDFVIDEYQAVLFVHGCFWHGHNCHLFKTPATRTEFWLDKIEKNIRRDQFVMSSLSDNSWKILVIWECTLRGRLKLTDNELSERIEEWLCASETHAEIDTVGIHKILLZ

SEQ ID NO: 2890 - protein, 147 aa, Photorhabdus luminescens
MISSGEEILSSGGVDIDTIREFESLLGVTFPESYKFFLQKYGTLSFGGDDYYGITKKGINGNQAPCILYVTKQARDSGDIDEGMIKIKSSGYGPSYSIDTNIKGKTGEAVVVETELSFKRDGAKNIIADSYAEFLLEEIKQAIEDLZ

SEQ ID NO: 2891 - protein, 156 aa, Photorhabdus luminescens
YSFEDDFNERFFFFTTDTATLAIFDLQAIKHRITDTPDWWSIPDDELKEVNEGNIAFFGLRDDGDYVIEIIDNIEQPDISLNIKSPSGKIFIGAGEDTTGGDLEPDDSEYISGKKISLEKGNYLILLKKNENNIQISFIKSQYFSNNLQEPIRLGZ

SEQ ID NO: 2892 - protein, 186 aa, Photorhabdus luminescens
FNMGETISFHMEPVEFFKSSYFLSGSIGEFNEYEIIDNKDMALKLLFDQDIPCNYMVWSDFFSDLVSEFYLHEDYKKAEKDILDRIKISTQDQVKENIRKRKLYLTRKKQGLVDNIEYDNFLNEVNDECNYMLNMISIYRYLFSFNQDSKLEEIFSIFKKGVMPCGIKKDKKTLVIFNPILLKNSZ

SEQ ID NO: 2893 - protein, 203 aa, Photorhabdus luminescens
PEPINTVLAPDFMVAPHASLSSTRAAGEPLINTVSLPWAIRGGAGCLLQTAISVVALAAGWPSIKTLGEPLVRVPLGGPMLSTMFVTAELAALMTSPRANVAAVPSAMTATVANPPVRMVSPTSADAAAKTAAPISAPVMAPASAPRKLACLIGSPSRAAAGPGEPCGGETCTACRAPTRAIRVTISSPSDMVFLLSGHQAAZ

SEQ ID NO: 2894 - protein, 140 aa, Photorhabdus luminescens
MENTTYQMNEGSLAIPGNWRDESMNVFVLPDDSGINLVVSRTPVPAGMDNPAYYEQTLEQFCTHLPGYQEHQRSEITLSQQPARRLDYQWTSPEGDMYQTVILQIRGPLLLTFNLTSPAPFEAGQRDTLLAIVHSFQAAZ

SEQ ID NO: 2895 - protein, 205 aa, Photorhabdus luminescens
SMVKRIVWKHNHLVNIKLRDNLYTIGQMLNSVEMQFYDICNTDGVWKNIDLNQVPTLFRILVVNAVYKLMPDKIKDKSVIPNTQSYNNYWIKPYSSFDGDHYPGGKNSFLFMGGKLIDIGPEGNIGTTLAPVLKEDLTLPNDRELIEKYELTNMWSHEELAERLCRYFDTGINRDDLKFEVFPGLWDDREQLRPLTSRLPVPLRZ

SEQ ID NO: 2896 - protein, 151 aa, Photorhabdus luminescens
GVAAAGVKPVQQVGADRRLRRPQVIPLADHHPGQQFTAFGKPRQAAELHPGQGVVNRALQIDAVGAKQRQGQGFDKRPVHRRLRRVIDFVNFFAYGGERRQRHRVAAGTDNQVFRAFTHGCSSFPLPPARRTEWVAMLQGIKFALNTVCPZ

SEQ ID NO: 2897 - protein, 186 aa, Photorhabdus luminescens
PPAVFSRQIRFGQQDRFKQRVGEVGHGVRHRPGGKSLRPQMILHGGRLGKQVIHLADLLRRGEINPPQARLCRAAVVEEPLQQRHQIAVQPLYLAGEAEQRTALTDIDFVEHHVRHGRVELLHPLVPELGQLSAPALLIPRIQAKGDAQDLGALRAVQRLESGAETVQPVEFGQHQIERQRMMQSZ

SEQ ID NO: 2898 - protein, 161 aa, Photorhabdus luminescens
LVTQLFQFLQFFQSVLHDMAVDVKHVAIVSKTMDIFGENSNHATRLPVAVKQRNSMQAAAMREFFYEEAKVSMVDTYPLIEGSPRRGGAFVQDLDQWMVDITDIDIQLQRAYLVWRRQPVAFQTVFIHVKQRDQQGIKTLALVIHLKKVMNQLLDRVIFQZ

SEQ ID NO: 2899 - protein, 189 aa, Photorhabdus luminescens
MKRSGGNTSWFGSNTVWFVLLAALMLSGCSSAWQATKKVGQVVWDPSTPVGQPANLPSTVAITLLAEPDINPNKNGEATPVEMHLLYLSEDSRLLAADYDQLASDKLDKALGKNYIDHQDYTLLPGQYKPLPVIPLEKNSRYIGVIVRYADINQSEWKKVIRVKDTGQQYHILVHIRANEVELRKEEQZ

SEQ ID NO: 2900 - protein, 166 aa, Photorhabdus luminescens
MSKNSSGSVAPKERINIKYVPNTGDQVAEIELPLNLLIVGDLKGTKEDTPIEERQAVSVHKNNFNAVMNEANINLTFSVPNRLNDNNGDDLPINLEIKSLNDFSPDNVAKKVPELNKLLELREALVALKGPLGNIPAFRTRLQELLGDEKVREQLLKELEIVNQKZ

SEQ ID NO: 2901 - protein, 173 aa, Photorhabdus luminescens
MPTPCYISITGKTQGNITAGSFTAESVGNIYVQGHEDEMLVQAFDHVVTVPTDPQSGQPSGQRAHKPFRFTVALNKSVPLLYNALASGEMLTSVVLKWYRTSVEGKQEHFFTTQLEDATIIDIDCQMPHCQDPTKAEFTQLVRVSLSYRKINWEHTTAGTSGADDWRAPIVAZ

SEQ ID NO: 2902 - protein, 173 aa, Photorhabdus luminescens
MRAKPLPLLGITAYSGTGKTTLLKQVIPLLRQQQIRVGLIKHTHHDMDVDKPGKDSYELRKAGAEQTLVANQQRWALMTETPDLMKIDLNYLASRFDPDSLDLILVEGFKDEPINKIALYRNTLNHRLNDLLDQHVIAVASDEQLETILPQLNINQPEQVADFIVEWLNMERZ

SEQ ID NO: 2903 - protein, 1429 aa, Photorhabdus luminescens
GDIAMPEAARLGDTIGHSGALAGLIGGTILGAAISAIGGIVGGALFAAGIASSCLGVGILLIGLSVAVGMLASHLGEMARDNCTKSGAASRSPCGTITRGSSNVFINGKPAAIATYSQVGCDKDGTRQMAEGSSSVFVNGYPLARVGDKTTCDAVVMTGSPNVFIGGGTKPTEAVTPEVPHWAYQVSDLTILAAGLISFGGAAANGPSAVKKLFSKIPGAGKIGRILCRLSPLAIGASVVGILMNPVEVVAGQKFLNDDDELDFIIEGELPLYWQRSYLSSYDYDSVLGRSWSLSWESTLTSIEEGILWRSPLGEIIPFPDVPIGYRCFCPEAQSWLMHTPEDTWEIRDASEHIYHYPEFGADSTSRLSRISDNVGNEQVFHYNELQQMVNITGSGKLNLHCDYLLIELGGKSVSRLTTVWQVLYNGSRVLLCRYHYNEHAQLVGVSHRDDHLKRQFGWHEGGLLAWHQDARGLRCDYQWEQTEEALWRVISQQTSEGAGYRLHYDEEHRVRTAQWYDGTTTVWTLNEEHQIIHCMDRAGVEHHLLWDEFGLPTGYRDADGNTRRCEWDTLGRRLSFTDGNGHQTGWQYQNDTDRVTFILWPDGCQSVFEYDDRGRLVSETTPLKQTTRYCYGHNQTLRPYLRIDARGGESRFMWNDQGQLIRRTDCSGQASEWGYDMQYRVSRFTNALLETTSYHYHDDGQLTQVTYPDDSTERMTWDSAGQLLSYQRNENEARYWEYNVLGQVVCTTDRLQRQIRYHYTPEGYLVKIDNANGDSYILTRDAEGWLTEEIRPDETLIYYEYNAAGLLSTERRMGDRVFKYPERRVHHRYDGAGNLIQRETYTDNYQYQWDSLGRLRQAERQPNEVGKKLDILPNTVCFEYDALGRVTREQNGENILQFGYDELDNLTELTLPQGETLHWLYYGSGHLSAVRYNQQLITEFERDALHRETCRTQGALFQYRRYDPLSRCISQYSVPQANVQTDIKPEIWQGKPWRAWHYDIQDELFLREDHYLGRVNYSYDLEGRLKSVDSTDSYQEMFWYDGADNLLEHPQSQRERQPVGSLTPPGDRLSQWNNWQYEHDEHGNVISRKNMQGQRYRYDGDNRLTTVEELSMKVVYHYDALGRRISKVVKTGIGGQARYEQTDFVWHGLRLLQDHELKTGKRQTYCYESHDSYTPLACIESRGTVREYFWYHTDINGAPLEVTNEAGKIVWSGKYDALGKISGLALAYFVDTDRSFHDFKQNLRYAGQYFDKETGLHFNTYRYYAPEIGRFITPDPIGLAGGLNLYTYAPNPMSWIDPWGLYKGEGQRGLGKYHVFHEHTLNSSEYQLSDGQHFKRGNQSVYERMQRDPAFRREMQTKYPGVVEHVQPNSKGNFRGTSPKNMTWHHENQPGKLSLVDRYDHKSYHKIYHPDGSGGRDKWGGGNKCRKZ

SEQ ID NO: 2904 - protein, 190 aa, Photorhabdus luminescens
MFKRILVALVTACSLSAMAPLALAVGETHVKLTTTEGNIELELNNQKAPITTKNFIEYVNEGYYNNTIFHRVIPGFMVQGGGFTKDLQQKATKAAIKNEADNGLRNLRGTISMARTADKDSATSQFFINVADNAFLDHGQRDFGYAVFGKVVKGMDVVDKISQVKTENVGPYQNVPVKPVAILSAEIIPZ

SEQ ID NO: 2905 - protein, 192 aa, Photorhabdus luminescens
MLLIIDNYDSFTYNLYQYFCELGTDVLVKRNDELQLEDIERLTPTHLVISPGPCTPNEAGISLSAISHFSDKLPILGVCLGHQAIGQAFGASVVKAREVMHGKTSAIHHNQQGVFKGLNRPLTATRYHSLVIAAETLPASFEVTAWSQHNGNVDEIMGIRHRTLPLEGVQFHPESILSEQGHQLLSNFLRYZ

SEQ ID NO: 2906 - protein, 160 aa, Photorhabdus luminescens
MSHIIYLSLNGKKQGLISAGCSTLDSIGNRYQQGHEDQIQVLHLNHTITRQKNVDHHPVQFIKPIDKSSPLLASAISSNELVNAIFFFYRTNFAGQLELFYEVKLTEASVVDISCVYPHSINDNEMMPYEKVFLKYRSISWNHITAGTSAYSIWDDRIYZ
